United States Patent Application Publication US 2008/0114160 A1 - sequence listing, part 61

SEQ ID NO: 21572 - DNA, 17957 bp, Oryza sativa
agggtgcccaagtggtaaaagactggatgtagtggagacgagcggacaacaagacgctagcgacgcactagagctactaggatggaggagggaccacctgacgtcgggtcattagttagaaggtggggacaacgggcgcatgataatggtgcaagtggctggagatggggaagaataacgggagggggcaccttgccaccactcagcttcgagaggagaaatgataggggtagtaggctgatacggtgagccttgctagcactgttggcaacttccacactggcgaggcaggaatgcagcgttggggtagtggttaggagatggagagttggagacacattggtatctcgacgatgcaagccgctagagacgggaaaggttgccacgcctcagcttcgggcgaaagaagggatagggggaaggaggtcggtatggtggcccttgttggcattgttggtgccttccacgctggtgaggcagagaggtacattgatggcggtgacaagggcagtggggtgaggaataagagaagtgacatgtagggcttagagggtgttgcaagattcttaaagccatcctagtattttaaaactcgagtgatattttttcgcattttcagctaactgacaaatcgcaagcctcacctaatgcatttttctttttcatgatcctccaagatgcaaatcaatcccacttgttcttatttttactcaaatatgctaataaatttgtaatgctacgaaaccacactcggaagatttgcctcttgccctttttttttttgccgggtcggccaacgaccaatttcattaagattggaaagaaaaacaaggagaatgttacaacgacattacaatgtcgcgctagtccgggagagatcccagacccagcgtgaacaagcaaaggggaaagagggaaggtagggcagaaccctgacaatacacaacacgattactctccaaaatgggagaagatcccagctaccctccacaccgcaatttcttcttttatatcctcggctagttgcttcggaatctttgacacatgctgaaaaattctagcattttgttccttccaaataagctagcaaattaacataaaggcgttgtcgaagtccaccctgtagctcgtcctaaaacggcgccgcgttgcaagccaccagtcagcaagcatgctgtcactgtccgccgggattgcaaagtttgcattgcaccatcttatgaactttcgccatacttcctcttgccctcttcccccgctgctgcatgtcaccaatagagatgaaaatagagcggatacatgcggatagcattcatatcacatcggttttcgtacttttagccggatatgaaaacaaatacgaatagctgggatatagacataaatatgaatgatctcgaatacaaataaggattgaataagaccagacacaatacataaacaaatatgtctcggaacacgaaatccacctaaacttctaaaatgtgtatccgtcggaaagtctaataccatatttgtattcaactattcatgtgggaaaaacatttgtatttgtatgattgtatccgtatctgtaccatcctaatgtattcaattttctcgataggctccgttttcatccctggccaccagcggtcatccaggatcatgcacgcgtttaccccccgcaacgcagccaaactcaacggcgacgcaacaagccacaacgctcaacgcatgccttgcgagaccggcaaagccatttccatgtcgaaccagtggaattcacggcggcaggcgcgcgcgagcatcgcatgcccaagctaaatctgagggaaggaaaattagcatgttgcttatatttggccgcagcaatggcgcgccatcgcgcgcatgccccgttttttgcgtgcgtgtggtttccaactttggctcgcccctccgggcgcaaacaccacaacacctcgcgcccatgcgaggacgcagccatccatccatccacccagcccccacactccttcggcgcgcgcgtccgtcctcgatcgcgcgcgcgtcgacgagctaagccggcccgggaaacccaaggcccctctcccttcctcaagcgcgccggcgggcctcgccggcgcgcgacattgagctcaacccccccgtcgtagtcgcacgtcgagcgccaccaccaccgccagcgcgtcgcatcgtacgtcctccacgcgcggcgccgtgctaggcaacctcctctgctgatcgcccgcctcctcatgagcgtgtgacctgctgtcgaatggtgcggcggcacctgctgcgcggacacagcctggacaggttcctgccgatcaggagcctcatcatgtcgtccagctcttccttctcgtcgtcgtctccgtcgccgccgccgccgtcgtcgtcgtcgtcacggggaagcagcagcggcaggtggtgcggcgtcagcgtggccgaggaggacgaggacgatgccgccgtctccgcgacgacgaccccgccactgccgccgctgcagaagcgggtgctgtcgaggagccacgggtccaaggccaagccgctgggcggctccgtcgaccacctgccgccggtggtgccgccatcgtcgaagaacgtccgtgacagtggaccgccttcaggtgatcaaccatatgcaaaatcacaattgctcaaatcttcttggatcaaccgcttagtttcgccattgatttgatcgatcgttcgatctctgttgcagagattgatctggtgaaggagaagttcgccaagctgctgctcggcgaggacatgtccggcaccggcaaaggtgtctcctccgctcttgctctctccaacgccatcacaaatctcgcaggtcagtatcacaccactcatcacatgctatctactacaaatctcttgtgttcttgcctgtcatgatgtttttttttcccgttcttcaccgtggcaaaatctgcagcttcggtattcggggagcagcgccggctcgagcccatgtctgccgaccggagagctcgatggaacaaggagatcgactggctgctgtcggtcaccgaccacatcgtcgagttcgtcccttcgcaacaggcgtccacggatggaaccagcatggaggtaggccatccacaagatcgttgcaacctcattactatttcatcgtgcaattcgcttcattttcgtccttgttgtcaaccaggtgatgggtacccagcagcgcagagatcttctcatcaatatcccggcattgcgaaaactcgacgccatgctccttgtaagcataatagcatatacaaatgtccaaattgatcttttccccattagttttctgaaccagcattactttgcggtggtccttttgccggtggagcaggagtatcttgacaatttcaaagatgaacaagaattctggtacgtaaaaaaagacgcagatgagggtgaaaagggcgatgcgccaagacagggcgacaagtggtggatccctacagttcgagtccctcccgagggtctgccagatgcgtcgaaaaaatggattctgcaccagaaagaccttgtagggcaggtgctgaaggcagccatggctatcaatgctgatgttcttacagagatggagatcccgggagagtacattgaaactctgcctaaggtgacttataataccattaatatttgtaaaaactcctttccatactttacgcatatcttttctcgaagtgagttcattttctgcttgatgctgagttgaacaaacttttcctggattttggaatgtagtacggtgttttcctgaaaaacattatgaggctaatctaaccgagactacttctcttgcagaatggaaggtctagtcttggagactcgatatacaaaattataactgatgatcatttcgatcccaatgagctcttaagttctgtagacttgtcgacagagcacaagatcgtcgatctcaaagaccgaattgaggcctccgttgtaatttggcagaggaaaatttccaataagctttcctggggccccggtgttagcttggagaagcgagagcagtttgaagagcgggcgcaaactgtcctactcatcctcaagcaccagttccctggggttcctcagtcatcacttgacatcagcaagatacaatacaacaaggtcaaaaaaaaaaaaccatagctgcatgtttagttacttttttcggatttgctacagtacttatactcatgccacctgcatttgctacttcttttcttcaggatgttgggtatgccatcttggagagctactccaggactcttgagagcttagcctttgcagttttatctcggatcgaggatgttcttcacgctgatgccattgctagagacccaaagcgcacgaaatcaaggagaaggcccagtctagttgacatccccgagatcattgacaatgcactggaggaagaggagactgtgaacagcatagatgccaattcacaagtgaccaacaactctattcactggcaagagcaagaacacgaggacaaaggcgcgaggctgaggaaagtccaccgcatggtcacaaagaaacttttgcacattgagaaagttgataatttggggggtgggttgaaaagcttttctcataggtagctgtagcctgaaaaaatggtcagacagctgcatgcttggttgtgctaccggggggagcacctgtaaatagctcaaacttcagagaggctggatgggttgtattggcgatttggcggtgtaatctgctcatctcagttgagatgaaatcagtatgcatatttcacggcctcattttggttggaaaatttttgcatgaatagatcagaaattcaaaatgtgaaaccgctagtatctgaataacagaatgcacactagcatattttccttcggaatacaaaagcagacgtgcgcgcaccaacagtaacacaaagatatgcaagctacagttgctgtaaactatgcggagtataagtaattggcaagatggcccaggcattaagcctagatttatcaccatatttaccttgtaaatgaaataaccgcacagcctccttattgccatcttcgcacgctgatactaccttcttttttaatagatgacgccgttgactttttctcacatgtttaaccattcatcttattcaaaaaatttacgtaattatactttattttgttatgagttgttttatcactcatagtactttaagtgtgatttatatcttatatatttgcataaaatttttgaataagacgaatggtcaaatgtgtgagaaaaagtcaacagcgtcatctattaaaagagtattaagctgtgcagaggcagtatatgcctgttcagagaacgggcattgctgttgcgatccgatcagtttctaccataaaattctctcttcttgaccaataatccagtttactctagaagtcactgtctaagtgtcaacggaaagatcaaacctttttctggagatataaactgaagattataacttaacatgagcactgaacattactacttgattcaacagtggatacagattcaaacattatcataaagtcctcacaactaggcagctcatcgacaattttattcgcacaagtattttgcagacaaatttaaacaagattgacacgataggtccaagtgatcgctgccgttcctaagagctgaagctcttacagtgccttgaggatctcctcagcaccagagattgtgaattggccaccttcctcaatgtttgcaacagtaaccttgaggttgtcagcaaggagagcaaaccgtctcgaacgaataccaagccctttctccgaaaggtcaagctcaagaccaagtgccttggtgtatgttcccaaaccatcggcaaggaatttcacatgcttattctcagggtatgactttgcccacgccttcatgacaaaggggtcgttaactgcaaaattatatcatagatccacagataagtcatattctgccacagctgccttgattcggtactatatacagtcagaaagtggatagtgtttctactttgtacaccagtcagtatatctaccctacacaactttaccgagaacacgggaaaatcacaatatctgaaatagaataaaattttcctttgtccttaccatgtttagttcaaataattgactgaagatttctgacaaaagctaaatttgggaatatgaacatggagaaacaaatgacagaaacataccactgacaagcaagatgtcgtctacacccttggctttgagctgctcagcctgatttatgaatcctggcacatgctgattgctatagccatcgaaaaataataataaaagacattatgtcagttcatcaggttttcagaagtgaaaagaagacaataacagggcgagtaacaaagtaatatgacaacttaaacctctgtgatggcaaaatagaacagcgggttcttataaaagggacagcaaaatgagataattggcagctagatatattaaaactgcggtgccaagtgccaacagaggatgatggcaaagggaaggataaaacatttcaagctcacaaatttatcgaaaccaaatagtacaagtaaaaaccaacagcatcagtctaatctaaagaatgaagacaaaagttagccagttaggagcacttggatatgagcactttgctctcgataaaatgtgtactctgtatttgtcagtcatgtgactcgtgtctccattttttctattcgaaatgtttgttttagttcagttagctgcatccaggtttacagattttctgtgggagattaatcaacaagaaaaggctatcagcttacgaaattctgagcgaatctccacggagtaactatagccaaaatctcccttttatatcctgccacccatcttggcttaactgcttctagcatagatgcccaaaaattataacattttctctcgcgtgctcagaagctggggaacaacacatggagtaaaccagaacagtggatcgaagtctactttttagtcatgcaactagcaatatataaacccacatcaagatttttaaccctaactctgacacccaaggaagtgggagtgacttcagagctcgtcaaatcaatcccataaattgtgagtatctgtataataaagcagtaatcttggatttggtccggacatcagctagtacacatttcagttttgcagtaaaatttctcgatctgataaaaagaagtcccattttttaaggaatttttttttcagggaaatataacgtctccaagaaagaggggggagaggaaatcgaaaaaaggaggaagagacctgcaggtcggggtgaaggcaccggggacgccgaagaggacgaccttcttgccggcggcgaggccgtggacggagacctgctgcagcttgtcctccccgtcgaaccaccccagctggccgtcggggagggtgtcgcccacggcaaccggggccatgtcgctctcccggatgattcttgtgttgcctgcctggatgtgtggaggagaggaggaacagaggaaggagagaaggtaatcgacagggaagggagatgagtgatgatgaggagaggaatgcgaataaataaggggcccttccctccccactgattgtgatatgctttggggtttggttggttgttgggagcttcgagtgtgccgccgagtgtgaacccaaaaatttgggcggatatacgagtggtactgtactactgtgtagactttcaagtccctatcaaggtttggacactaattataaatattaaatatagattattaataaagctcattctataatcctaaactaattcgctagacgaatctataaaacctaattaatcgatgattagcctatatgatgctacagtaaacatacgctaattatagattaagtgggcttaaaaaatttgttacgtgaattagcttttatttatgtaattagttttataaggctgagtttgagaaaggggagatagagaagactgggaagatacgcaaaacgaggtgagccattagcgcatgattaattgagtattaactattttaaattttaaaaatggactaatatgatttttttaaagcaactttcctatagaatttttttaaaaaacgcaccatttaatagtttgggaagcgtgcgcgcggaaaacggaacaaactatctcccaatctcacggtggcgaacgcagcctaagtagtctatgtttaatacttcaaattcatccgatataagagtcacttgatccaaacaccaccttacactgatctcggtagattgaacggatcgtgaagttcagcgggtatactggagtttcttattattagtagaaaataaattgtgagagtacgcgattcccggatttgtcaggatatgcgcaccagaactgaatatgagaagaagaagaatcatttaccaaaacctggtacgttcgctcttgttgacactgcccgtgaggccgtttcaagttttcaacggatcgcggacttggtggatcatacgtgttcgtgcaaggaatgatcgtgccgcagtggggctcgaggaaattaaacttgtactgatgctgttttacctgacaagaaaatgaaaacaccgcagtggggctagaggaaattaaactttgtactggtgctgttttacctgacaagaaatgaaaacaccgcagtggggctagaggaaattaggctcccatcggatggcctaataagccaaagaaaaaaccaaattttaaatttttaaatttaattttttaacctactttttttttcagcattggcttttaagtcacaaagaacacatatataaatataaaaagttttatatacaaatttatttttatttctaataagccgtctggtgctgttttacttgaaagaaaaaagtacgtcgacagcaggattcgaacctgcgcaggcaaagcccaacagatttcgagtctgtctccttaaccactcggacatatcgactacttgatagtggatggaggtgacaatttatttatactctactacttagtatcaaacaattttccaacgcctactagctaacattacgtgccttggccacatcatctgcgttgctgtcctgtttgtatgcttctattggccgtaaaaatatgaagtacaaatgagaatgcaatacggctgtattttgtgaagcatataaccctagcttttcggggacggtgcgtgacattcaaaatctaaccctctattcatggaaaatgtcgttttaatcagtttcaagcccaattttcaaaaggaaaaaaaaagacccctttgaaaaaaagattaataagaaaacccaggaatgggaaggtaggtatataatgtcatgtccatcgagtttctacacgaattaaaaatataagaattttttttaaaaaaattgtagttggtatacacatatgagaaacacaaaaaagaattagagtcatgcatgggaggaagaacagatcgtagtagcattataaattattagtaaaaaatgtattgtttagagaacgcgtagtacgtaaaacgtcacgtgtgtacgtaacggaagacaatggtaattttgtatggttattaaaaaacggtgaagtttttccgaatgtgtgaatattagttgagcttatagaagttgcacatcttctatgtaattgagaaaaacccgattatgttgcaaaaagactaaaaaatacatgtaatcttggacaaaaccaaaagaaagagatcacttgctgctagcaacaattcaattaataaatgtggtaatattaaacaatccttgctctgtagtaaatctacaaacggctgaagaagtactatactattctacgagacatgctaaggtgcttgggaatgatgacatccgttgatcggatgcaatccaacgatatggatctatatatatgtctagaaaagcacaacaaataaaatgcgcagggtaattatcaaaaaaaaaaagagagtatattttctagataatggaatagaacattccgacctttgcttaaaagagcttcaattattacaactaggaaagaagcccgcgcatctatggatctatatatgtctagaaaagcacaaaaataaaatgcgcagggtaattgtcaaaaaaaaagagagagtatattttctagataatggaatagaacattccgacctttgcttaaaagagcttcaattattacaactaggaaagaagcccgcgcagatcattttgtttattgtttatgtcaaaagcgtttcctagattcaaacaaaaatcactgtgtcccagttatatataaatttgcctaatatcgccactacttattattattattttattttattatggagacttattatcgttcttttgaaaccaaagtgattatgaccctgtttagatggaactaaaacttttaagtccctatcacatcggatgtttgaacactaattataaatattaaacttagactattaataaaactcatccataatcttggactaatttgcgagacgaatctattgagcctaattaatccatgattagcctatgtgatgctacagtaaacattttttaattatggattaaattaggcttaaaaaaattgtctcgtaaattaactttcatttatgtaattagttttgtaattagtctatatttaatactctaaattagtgtctaaatacagagactaaagttaagtccctggatccaaacaccacctatttaatagatgaaactgtatttgtaacatcaaaataagaacaatacatcgttaatcgactaaaaaaattatctccactactaacctaactgttcatgtcgatctgacttatttctaaatctatgtataaatattccaataatattttatcaaaaaaatatattataacaatatcgcttctatgagttaataggataataatgttaaaatttgatatgaatgcccatctaacggatgaagccgaacataactaccaaggctttctttctcgataccttgaaacatgggtcacatatcgacataatcgtgcccatcaagaccatcgtggataacagttttaacggctaattcactattagtaccctcataaaggattgcatcgttaattaagtacccatggtggcttaactcatccaaatgtatgcctttgctatatcatggtagtatagcaagctttattatctatgcttggcacccttttgagaatggaaaaagagaagacggaggtgattacaataatcctttttaaagattgagttgttttgtggtatatagtagacacaatttgtttatagtgtaaatcaatattactcaaatttcaataatacatatacaatattcttatttgaaagtgagtgaggttatcatgttagtagagtatatgacatacatccatcaactatgcccgacacatcggaattcctcaagtataaaaaatatatattatgggtgttacttgattgtttatttgttgccaaaactatatgacaaacaaaaaacctacatatatgaccatagttctcatgatggattaaggggttgtagtatagccatatcactcgctagaagtatttttaataaagtttatcatgtctatgtatcatgtgtgcttctcacttttcaaataccaatcaaatagttctgaaaaattcaaaaaaaatatttgagaatcgtaatatctcacatattaaaattagataagatctacttgaaaaaaatataactaaattctgttgttttcatttttcatttttacatatgtagattcaaattatttgtcaggtgatattgtacaccataattatttgaaaaattattatgatattaattattatgtgccattatgtatttatcagttagcactaactactataggtcaataatagttcatttaattaaaggaatacatcagaattattaaaattgatatatatatttaatagatgaacacttacagaccattgaattcatattacatctttgatctagtttaactgcgtatgttggttgggtaatattttttatatcatggaaaatcatagtttagagaccattgattttctctgatcatagtgtgtatgtatatttttagctatatatttatatttttacatgtgtatatgtgttactttgctttttcttacatgggagattttggtttttttttggggggggggtggattgttttttcagtagacctaatttaatggtataaaataacgggtttactaatttaaagtttgtagagtaatatattttagctctatatcatagaaaatgcaaagggtgatggtatggctcacactattttttaatttataataaaacatcaatatatagatttaaattattgatttaattgtcaagaatataaagaactaaattgatcataaaaccaacttatagttttcaaaagttaaaacatgcatggagccctccacgaagatgacactgacctaatttaaagttcgtagagtaatatattttatctctatatcatagaaaatgcaaagggtgaaggcatatatatatggctcacactattttataatttgataataaaacatcaatatatagatttaaattattgatttaattgtcaagaatataaagaactaaactgaccaaaagttaatacatgcatggagccctccacgaagatgacactgaccgtgataaccatgaaagtctacattcaatcgaagatataaatcaaatgttgtttagattttattatgctgtagatatctcaacaacctaaaaataagaagagcagataatgcatatacgtgcttgtgccgtgagctgatggtgattatcttggctgatcgtttgggctggtgcttttataattaatcttggcagtgattttttttcaatcatagttatcaatatctttggtttttatttcgttcgtacatacgtatagcttttgcctttttttcccggatgaattgtacgcaacgattttctcttgtatgtgaataggattttttttttcccggatgaattgtacgcaacgattttctcttgtatgtgaataggatttttttttaaccagatgaattgtacgcaacgattttctcttgtatgtgaataggattttttttttttgagaattacacagtacaacacagacactcacaacgcacgcgcactcacccctatgaacgcacgcacgcaaaccctactcctatgagcatcttcgaagactgggccggcaaatcctggagagattgatgaagtcaccgtaggcgtctcgctgtcgacgggtacgtcgcctaccactaaaagcacaacgccgttaaatcctggaaaattcgctcccacggggagtcgaacccaggacctcaggtgctactgaagctcttgtaaccactaggctatgtgaataggatattgggagcgagagattattttttatagatttaataatttgaacgggatattaggagggagagattattttttatagatataataatttaattgtctaaaataatggtctcttagctttaagtgaaaatcgagaattaaatgttttattttaactaagaatttatattattttatttaatttattatagcgctacttagcaacgtagaagcgtttgtagagtgacacatggtgacgtgagagcgtttgtaggaaatttaatggaaaagtataacaaaataaatgataattacatatttctttagtaaataaacatatgttcaaacgccaataatattatggaggtatattaggtaaagcaaaataataaaagaaggggaataaaaaaggaaaaaagtggggtatgttacgttcttactcatatgtacgtacttgcaggcggtgagggaggcatacgtatgagggtctatttttaatctaatctaatggtgtaaaattatggacccaccaatttaaatgaaaattaagggccagatgtttctaatatattaaaacgccacatggcgacttaggagtgtttatagaattgctacgtgacggcttaggagcgtttgtaggaagtttaatggacttttactatataatagatagatagatagatagatagatagatagatagatagatagatagatagatgtagcactctaaaacgagcgaagttcaaataaaattaagaacaccaaactaagaagaaaaataacccatataggataagaaatacacatttattaaagtttatttgtaaatctcaatttattatccttaaaaaaaattacatactcgtagtctcgagagatgagttagagatgggatgtacagtacattgggaggtgccagcactgtaaaatatctcactactctattcagtctatacccatcctgcctaagcacatacttccacaggcgcgtgagatggcgggagcatgcactgcggcggtggagcttccagcgggcgccacgaaccgccgacgatcaccaggtagaagcggctctccggcacggtggcgccgaagaggcggaacccgcggcgcttgaaggcccagatctgcacggcgtcgtgctccctcaggccggttccggcgatgaagtccatgtagccggtccccttgatgatggtgccatggctgctgtcccagagcaccagccgcagctccttcatggcgccgctcaggtgcagcaccgtcaccggcaccccgccgtggtccttcccctgcgccttcttcctcggctccttctccctccccttctgctgctgctgctgctcaccgtcggcgacgtcgacgctgcctttctccgttcgtcgcttcttcttcttcggcaccggctttgggcgaggaggagcctgatcctctccctccacgttcgtctccggcgtcgttccctgcggcttctgcagctccccgtcggcggcggcggtggcggcgatgacgacgctgcctttctccgtgcgtcgcttcttcttgggcctcggcctcgggcgaggaacccccttctcctcgtcgttctccaccaggttggcctccttggcctcgtcgacggtgagcatcgggaggaggcggcgctccacgccgaagatcgggaggcggaaccggttctggtgcgggtcgaggtcggtcctggtcaccgtcttcctcgcgatgaacaccaccggctggtcgtacgtcatccccagccgctcgagcagtatcttgcggatccacgccggctccgcggacggcaccgccgccgcctggtcgtcggcctccttcctccgcgcggccgcggcggcggcgagcgggacggcgcgtatgggccgggcgtcgatgggcgccacgtacgggaccagagcgcccgtcgccgcagccgccgccgcgcgcgcccgcttggcctcccgtcgtcgttcccgccgtttcgcagcggcagcggcagcggcattgcgcccgtcgacgtcgcacgacggcgccaccgcggcgagaggccgcttcatgccggcggagtagcccgcagcagccggcggcatattgcggggcagagagatcacgctgtttcgtcaacaccgaagtatcgcgatcgattttaatttgctcgtattcttcgatcgaattctccctcgggaactcaatatggaagggggtttggatggcgcatatgccctggatttataggcgcgaatgcgtatgcgcctcgagacctgatcggagtccagggcgatcgctgcgaacgcagggcaaactcatcgtgtccgacacggaatggaatgcaacgcaaccgactggataatcattttcgcttttattttgtcatagtatcgtcgtaagcagtcagggcgcagcccgattggcatacggcataccgactggtgagtgggtaacgcagcctgttagaatgagccggcgtggggaaggaggctttccataattttggtaacggatttttgcatttggacgcctgattggagttggagatggccagatggtggggttccggtttccgtgggttgaaagaaggaaagggcccactcgtatcgttggagttggcccgtttggttcagattactcctgggcccaagcacaaatggccattctgtatagtatctgaattcccgtaaaaaaatattgtatctgaatttgtgtttttatatctcaatgtataagttgagtttgaacctagtatttcgtagagtggtatatgtattatatgaatattatcatttttttaaaaaaaatggtaactattttatatggtgtataagtttgagttggaacttaatattttgtagagcggtatatgtatattatatgaatattatcaatttattaaaaaaaattggtaactatttatatggtttttaaaggaggttgctagtgggcgggtgatcgcttccctctcctcctagcgatcacccatccctccctcctaatacttatctttcatctctcttttttacttttttattacatcataaatttaaaaaaaatagtaaaagaaaattaggaaaaaaatctaatactctcattcatgtgcatagactttataccgtaaactttgcatgcataaactttgtgtatagaaatattttatatataaaatatttgaatccgaatttgaatttgaattggatacataaacttttaacttataaacattcggtgtacaaactttaggtggataaactttagatgggtaaactttaggtgtataaacttactaaaatagaaaaatataaaatatttgaattcgaatttgaatttgaatcgggtatataaacttttgacttataaacattcgctttacaaactttaggtggataaactttatatgtgtaaactttaggtgtataaacttactaaaataggaaaatatcaaatatttgaattcgaatttgaatttgaatcgggtacataaacttttgacttataaacattcgttgtaaaaactttaaatggataaactttagatgtgtaaactttaggtgtataaattttaggtgtataaacttactaaaagaggaaaatataaaatatttgaattcgaatttgaatttgaatcgggtatataaacttttaacttataaacattcgctttacaaattttagatggataaactttagatgtgtaaactttatgtgtataaacttactaaaagagaaaaagaaaaaaaaaacgatcgccgacagcaatcgatcgcccgttagcctttccacgtcaggtgagcttgcttgctttccgaaaatgctgagctctgaccataccttgcaatgcattaattttatactagtaggattttagttcaaatcccttaaaattaccacgaatttctccgttccaaaggaggctttacatagggaaatttcggtactacagctggtataggaagccaagccacgaacattctcagtgaatacatgatacattagcacgcaacacgatatttgcattgacaggaattcagagatcagaacagagcaaggtgcaacgcagctgaggagaatgaaatattgaaaaggaacttgcgagttaggaccaagcacaccattgtgtgtacaatctatggttttgatttaacctttgttcatgtatatcaaagagagtatctgctttgctcttcaacagttccaatggaggggaacattcacatctgtgaggtgatatgtatgtatataacggacagaaacgagaaaaaaaatgaaatgtacatggctatatctagctggatgaatatggggaaaaaatgaacatatagaaaagaatgcaacagagagaaaaactttcttttgtcaggcttctcacttttcaactgttactagtatgacattatttggaccagatcttggcagagcagcttctcatgatcctggacgctaccaagttcaggaaggcatcattcacactaggatggcaaacaaaaagaggagcagcaggacagttatgttattggcacaacagcatccagattcctctgcagcagccagccaattgggtagttgacttgaggaggttccagttcgaaattccagaccataacacgagtgcaattatccccaaggccttccatttgactctcgtcctcaa

SEQ ID NO: 21573 - DNA, 699 bp, Oryza sativa
ttgatggacacaggaagccgaagagcattcattgcactcaagtgctacctatcaaatccacctgtacttgttgccccccaacctaatgaagaattatttctctatattgccgccacgccatatttcgttagcactgtcattgttgtcgagagagagaaggtgcaacgaccagtctactatgtcagcgaagctctccacgacgcaaagacaagatatccatagatccaaaaactgctttgcgcggtaatcatgacatcaagaaagctatgccactactttcaagcccacagggtcacagttgtatcctccttccctctcggtgaagtagtgagaaacaaagacgttgtcggccgcattgcgaaatgggtagtcgagctaagccagtttgatgcccgctttgcgccacgaacactcatcaagtcccaggtacttgccgacttcgtagccgattggactatgcctgataacaggtcagacaaccaaatcgacaacgaaacgtggacaatggcgtccgacggcgcactcaacagccaaggagcaggggcaggatccatcttgacatcacctttgggagatcaatccaagcatgcaatccacctcaactttacggcgaccaataacatagccgagtacgaaagactactcgccaggataagaccgcagctgcactcgactgatcgcgataaggggactctgaac

SEQ ID NO: 21574 - DNA, 6829 bp, Oryza sativa
tctcaaaacagctaaagactgccaacacctttttggggctggctttctgctttctcgaacaaaaccaaaaacttgattgtaactggtattgctgctgtaatctgggctgtctagaaaactagaaataaagcttgttttgataaaaaaaattgcctaatgatcccactgatgtagttttcctggtttgccactggatggaatcctaggctcttttgcagaagcgggaggcagatcaaagaaagctgctcttgggggccaagctcataaggcaaattgcaagtgatgtgtacaattctaggtttggatggaggccgacggggagactgcagtgttgatcttttggcgggggtagagtatgctttgttgattgtgtggatgctgggttcatggctcctgttagtcctggaagtcttgttatgcagttgttgattctgtgccttctggatagtccatgtatggtcaaagcagccggtgtgctggcttctgtcctttcttttctgttcttcagtttgtaagactttgatcttgtaatctctttcatttctagtaatggaaatgggggcgtaatgcccttggtcaaaaaaaaaactcaactaaagattaattatctctaattggatttatagtttaattgattaaaacataccgctcgtaatggtaccatccacgattgaaatataccgcttatagtttaattatatcaatagtctttcatgtgggaataaaaaaataaagactattgaaagaagagaccatctagaacacaacacgagattaattaaaattcagaaaaaaaaatccaaaaatataaaaataattgtaggagttaaagtatgaatacaatttataaataacaaaatattgaaatgaaaaatatattttttttaaaaaaaatagtccatctagaacacaacgatgacaagtgacataaagaggagagaagcaacaaacctgtaagaagtagtgttgtgggggttgatgggacctctaaaaactataagcaaaactattgacagtcattaagtaccaaatgcgatagtcaactatgataataaataaagagagaactagcatttcttacatgtattccaataataaatagtgtagtactactatgcttgaagaattaacatgaatgcagagaataaacacacttctggctaatcacgtgcgagcacacggattgagtcacccacaagtcagctcaaactgactcaaagtggggccaaaccaccgggaaccgaccaagaggcccacttgtcaaccacacaccaaaggaggtggctaatggcggttactctggttcagctgaaccagccttggagcgcccaacactcccttccacttggcaactcctcattcactcctgatggcagttatgcttgattcccggcccacaactgccttaagcaaccaccatttaaagctataaatagtgataaggacataactagcttggatatgtccatgactaacttgtgtatttatcaaccaaaggtacatatgttttatattagatttacttattactccgtatatatttgaataaacgttactacaccatgagttttgtatcttctcgtttgcagatctacttgcgtggatgatggaacagagaccgggcgtaaggaatgcatggatgatcaaaaaagttgattgggaccaaaccaagaccttctcctagtctacttttacctaaccacgtcacgtttggtccaaagaagataagagataaagttctacacgttttggattcggattcgggccttctgacagcattaacttcaaacagacctagccgctcgtataaaaggaatttcggggcccatgagtacttgttggaaagcttatggagtatactttcagatggttttggtcatacattaaaattcccaccgagttgtcggaaatctgcaaaacaagcctcataccttatccagtccaaatctgatttgggttttagaccttgtaattatgtcgtcgcttagaccaaaggggcgtgcgccattgggcaaccctaggacgtccctaattatatatatttagtagtcgtcatcgtttagagtcgagttttgcttagattatttctgccattgcagtttcgccgctaggtcggtttgtggaaccctaaatttgagtgcttaatcattcgtatgcaattgtgttgcaatctatcttattcttgcttgtgttcttcgattcgcatgcagggattagccttctcggcgtggtcaaccggacgatgcacggttgataaccagaggagacgtggtgctgcgatttgcatggttcggatcgtgttgatcggaagccggattgtgtgtgtcaagtttccgccaaatcgagagttatcaatacctatcgaaagatcgagacctagcatcctcatcatagaggagatcttttcacttcccaacacacacctcaaggagcaattctctctatctatattgtgttctctacagttttagtagaaataggcttggagtatctccggtcctatagtcttcttagagattccgatgtgtgtttagttctttactattttggtaagactatatttgaattaaggaacaattgcttacttgaccctagtttgaagcccaactactaaattgaccctattttttcaagtttgctcatttgaccccattttttaaaactgaacatcagagctgaccctattccgtgaagaccaaataacagtgttaactgtgaagcaattatcatttttgcccttgctcatttaccaatgttatatcaaagatttttttttctttcattcagtcctttttaatatttgtagttcatctcattgtcattggagctcaggacagtgttcagctgctcgctctccaacaccgggcaggagaactcggccgtcgagatgacgatggtggcgccagtggctgcctgttgctgttgacctgttgctgccgtcgatctgcaggccggggatgagaggctgtgccatgggcatgtgctctgttggctggatgaccatccggccaccgccgacgtcaatggcattggagttcgccggaactgacagaagagagagagcacaatcggattcgagcacttgtgtcagcccgcgcgcagtcgccgccacccctcagcgcgctggcgccggcgccactgccaatcgccgtccctctctccctccgcacggcagcaaccgctgccgctactccgtgcgcccgcgccgaccgccttcgctcgctggcgccgctcctcctccctccacacggcagcagcccgtgccgccactcctccgcctgcaggcgccgccggttctcctgcctccgcgtgccgacgccgcccctccctccgcgcggcagcagccgacgccgctgctcctccacacacaggcgccgcctcccctctgcgcgccagcgctggcagtcctcctccctgcgcggaccgccgcccctccctggctccctccctccgcttggcagcagtcgctgctgctactccaagcgcgcgcgcccatcgccgtccctcccttcgctcgctgacgccgccgcccgccgctcctccttcctccatgcgcccagccgtgccaccgagatgtgtgggtgaagactcttgatttgtaacttggataaggttattatttataatcaggggtatattggtcagttcatactagcaattttattttttttcattttgctaactaagacactaacggactattaaaaagaggctcagatggtggctttgattttaaaaagcggggtcaaatgagcaaagttaaaaaaaaaggggcaattgtatccatgcccccacttttaaaaccaattgctgttttaccccatattttagagtttgtatttttacccccactttttgaatctgaagcagctgtgtaccctcatttctaaccgccacaactaacggtgtcagttgtagagaaaaagacatatatacccttggtggttattgtagttttgcctccattttttttagctttgtgtgattttgccctcattttttttcagcttgtgtgagtgttataatgtgaggctttgaacggcctatgcattcactctgaaccctctaaactacacatcaacgccacatttagttgtacatggataatacaacagagttgtgaattgttccaaaaaaaaatacaacagcccatgtaccctagatttttttgttaattgttgatcgctctgtgtccagttcttcattgcatagagcaacaaaccgcaattaacgaagcagaatgtaagcaggaaataacagaacggaggagcatcatgcatttctatagctccatctctgacgacaaatgcagatagcaaccgcaaaatgagagctgcagatcgatggatcgatctctcctttatcattgtcgcatcacttgacgactttgatccactcagtgcaccctgcatgcgaatgcacaacacataggcaaattaacaaaagctgcagctaataacacagatcaaaaccgttattgatggcaaatgaattacctggagcagtcggtggaagggctgatggcgtaggggatgttgacgccgcacttggaggggatgccggcgacgaggtcgggcctcaggccgcccatgccgctcgtctgctgcttgatgcaggcgcaggtggtctggtggtcggcggcggcggagttgagggtcctgaccccgtcgcagcagccgccggtgggggcggacaccctccccgtcgcgtacatgatgcacggcgcaagcatgcggccaacaactttcccttttctgccttgtcttgccctcggctgtgagaggccgcctccacgtggaagagcagcggctgccggctgtggacctcctgcgagcgggcgccggcgcacgcccgcgtggccgcggcctcctcgcgcggccgcagccgccgccgccgccgcctccgtgccgcgccgccgcccccgcgctagctagctaggatttcgacccgactcacggagacgcacgggaagaaccctatccattccctttccctcaggggtacaaatgtcattacataatttctaaaacctttttttattttgtttttatttctttaacacaaaatgtgggacccaccaaacagttgtcacaagtgggggtagaaggctacttcagatttaaaaagtgggggtaaaaatgcaaaccctaaaagtgggggcaaaacagcaattggctttcaaagtaggggcacagatgcaattgccccttaaaaaaaatagggtcaatttaatagttgggcaaaatttaactatttgccattcttgtgacatggcaattaacgatttaccatactctatcaattacatgtgggctctcatgtgtatatgacatgtgggcctagtggcaaatcgttaagcaacatttgtaagagtggcaaatagttaaaagctccttagggtcaaatagcatttgccccttgaattaatggaattatcttattatttatttatttatttatgctcatagtatgtgtattcatttattggatatgtgttctatgagtagtatatatttcgcatatctcctacagcctaggctagtcgatccatgtaacaattgttcatttagaactaactgaaattcaaaattaaaaaaataagaaaacaaagagtagagcttagagtccacgtagaaatactatttagaaatatctaaaatcaaaatttttaaaaaaggatattggaagaagatgctagaaaccttatagtaatactcctgcaataaaggaattagaaaaggaatactgtaagaagagtctatagtccatatagggatacaatttagaaataacgaaaatttagaattaaaacataacgaatattaaaaaaaattctagattccatataggaatataatttataaataaatgaaactagaaataaaaaaaagagaaatattaaaagaagagtgtagtccatatagcaatacaaataacggaaattcaaattttttttaaaaggagtgttgaaagagaagtctagagtttatatagaaatacaatttttaaataactgaaatttgaaatttaaaaataagaaatatggaaagaagggtttagagaccatataggaacaaaatttataaataaagaaaatttgaaattataaaaataagaactgttgaaagataagtaatttagagtccatacagaaatataataaaaaataattaaaattagaaatcaaaaaataattattaattatcgcctatatacaatacactataaatatcacgtatcgaatagtttggccaggccagaacagtaattgaaaattatgttgtcattttaatatattttaataatacaaaaataaaaatatatatgctattatgtgagaaaaaatataatgattctagccgcgcaatatacaagaccataatgctacttgaaataaaaaagaaacagatagagcattaattttgtttgcgagcttcattgacaagcataacctttgcctagtggtgtgtttggatggagggatataggtggataggacatggcggcccattttttgtgggtgtttggttcctgggcaggggtgggatggagcggcccggggaggaatattccccccagatgccggatgaggggatccggccgaattggccggatgcagccgcccgagcgcggggcgagcgaccaaggcagtcgcatcactcctctccaagaaagagcgacggcgagggcggcgaccagcgggagctcggcggcggctgttgcgagcggcggcggcggctggtgcgagtggcggtggcggcgccagatgcgcgctcggccgcggcgccggatgcgagctcgttcggcggcggcggcgggaggcgcgctc

SEQ ID NO: 21575 - DNA, 4224 bp, Oryza sativa
tgattcctcttcaattccccccaatttcccccttggatcgtgcccccaatcgccgggaacgcccgcgttttctccggccgctttccatggccgccggccgccattcccgtcgccgttccgccctctcccgtgctcggctcgcttccctccgctataaaatgcaaccccctcgctccgttctatcgttttagccccctcccgcgatctcccgtggtccctagccctctccccgccgtcctcctctctctcccgtgccgccggccgcctccagccgcctctccctccttgccggagcgccgtccggtcgcgccgtcgcctcctccagcatcgcagtggcctccccttccccggcttgccctccgtttcccgcggagacccccggagctgcgttcccgccgtcgcccttccctttcctccgcgccggccgcctccagccgcctctgtctccctgcctgagcgccggttgacgtcgccagcacctcccttggctccgcgacgccgccctcatccccggcatcacctcctcctcgcacgaatttcgccggaacaccgtcgcccgcgccagcctctccttcctcctcatcgacgtctcctccggcagccccttccgccgcgcccgtgcatcagccggcgctgccgtcccctccctcggcgtcgccgcatcgccctccaccccggctgctcctcggtttcgccggaacgccgtcgccgcgccggcctctccatcctcttcgtcgccagcgtcctttcggccgccccttcctcctccccggctcgtcggcttgctgcacctctaccatcttcggcatcgcagccgcgacgtcgtcctcggcctcgcctcccctccgaccgaacaccgccggtgtccgtcgtcgtcttcaccgttcatcctcgccggctcgccgtctggcggcgccgcctccgtcgtcggcatcgcagcggtgtgttccacgccatcctcgcctccgtgcagccgctgccggctgccctcgtcgtctcctcgccggccccggtcgtcgtcgtcgtcctctcgtcgttcccggtcgttgtggcgttcgtccctccgtcaagccgttctcgtccgccgcccgcgtttcgtcaagtgtgcagcagccccgtcgtcgtcttcgtcctcgcctccgcgtcgtcaagcctcgtgccggctgtgtctcgccttcgtcccaggatcgccgccgaagtcgttccctcgccgtccgccgcgcccgttcgtcgttgtcgttcccacgcctcgtcgcgtggtggtaaggatccgtcctctcgctgccccgtcctcgtccttttggtgtcgccccgtacccgttgtgcggtcgtcgaccccggtacccgtgtaccggtgtcggtagtcgttcacgtgagcgggtggtgaccgtgtagtgtccgtgttagtgtgttcgctcggtagccgcgtggtttccacgtgtgcagcccgcgtggtgtctagtggagtccgtttgtcggctactcgcctcggttgacacacggggtccgcttccgtcgacctgtggaccgtctctgtgtacctggtctaccgcggtcctttaggttgacatgtggggtccgcatgtcaacagcgcagccttcctgtcttttctaggctagcgcttccacatgttttattgttgcaaagcttaattataataatccgcaaatctccatataacagcattaaacttcggatgaacatatcttggtcatacgaactctgaatcgacccgttcaagtctcctaatgtttgttataacctaaagaactgtttgctttctttttatgtgttgttattgcttctttataggcttgtagctttgcttgtgtgcttcgcgtagctttcgtcgttccggaggttcccgaagtgtggttcgcggtcgtcgccaaaggttcggaaggccgttctctctgagcaaggcaagtcacatcatccttgagcatattgaatcccagtttataaaattattttgatttaaattaatgcattactgctttatttaaattcccgcgttatcactgttttatttagccatgcctatttatcattgttaagacattattattgctattgttattattaccttgttcaccctaggaaaataaaaccccaactagtgggtactctatttatggttccactagtgtgaacttaggtagatgcttcgctggttaattaggcaacattaggtggttttataactttagactttgggaaatctcatatcatttggacattatggaattgttggattatggtggaattggacatacccctctcttcctctttcaaagcccctaaaacctgtttttcggtggggtttgggtgcatgccagttgtgggaagtagcaccccggccactataaggattaagctcgggcctctgttgcaaagcactaccgtacttccacatgtctagtgggtaaggcttagtttttggctcagtctagttataaacaaaagtacacggatggaggtggatgaagtcgggggtcgatggacatctctaggacaaatgaaggctacacgagctgcggcccggtagtcgagatgtcatggcacagggctggtgtcctgctgctaggggctcaatcctgcctacctgtcccggaggttccggccgtaggtggggttgggtcggtactcttgtctatggctaggatgggttggaaactatgtcacgtcttccgtccgtataccgtggtggtatgtggcacgtggttacacgtgaggaagatgtgtcttgtgggtaaagatgtacacctctgatcagagtataatctattcgaatagccgcgccctcggttatgggcaagccgagcaatgtacccaagtcagtgttttaattcttaaaatttgctcaataactaaaatgtggaatggttggcctgggttggcttgggacgagctgggacccagggtcgggttgccagttcagtctgaatcatcgtaggccttgggttaaggcaggttcgtgagggttcacggccttgattaataattttgtgtagctctaggatcgtctttataaaatggctttgggcaactaagtgacttttaaatgctgtttactgcaaaacttaacccctatattattatccccttgtacccccttgcattaattatgcatctgccggtgtggcttgctgagtactgtggttgtactcattcttgctctatctttctccccccccttcagtaagagaagcttcggagaagatgtcttaggtggagtcctggcttataccccagttgagcgcctgtgaagatggagccgtaggcccgctagtccgctgctgtttatttttgtttgtcaggcctgaagtgcctttgtaataatgtatttattatcgatataataaagatgtgccttttatatcatgtttgtttggtgtaccccggcttttcctgggacggggattaatacactagcgttcgggaaaaggcaattttctcggtcgcgacaagctggtatcagagccatctcgactgtaggataagccaagtggataaaacctaaggacatattttataaataaaactatttgcgaaagttcctgtttcctcctttccctaatgctatgtcacgtcctgataaattcatcccgaaataaaaatcattttttaaaaggaataatagaattaattaaaattcagaaagaaattggcaaacactaaaatgcgtacaagaaaaattcgaatgtggcccggagaatttttgttaaattctccttggtttaaaaggagccctcaaattttacttgaattttcagagcaccggaaataattattaagcaacaaaaacaattatcaaagtttagtaaaaagaaaaacctaaaaataaccttccttcctcctttgggccaagtttggctcaaagtccactctctctctctcggcccgcggccgaagtccctctctcctccctctttttctctccctctccctccccctcccctctctctcccgggccgttcctccctcccctcccggcctgcccggtcccgggccgccctgccccctcccgcctgggccgtgtcccggcccagccgagcctccccaagccgcgccgcacgcgcctgtcacgcgcacgccgcgcgtgcgctgaccgcgcgcctgaccggtgggtcccacgcgccgggtcatcgtcctcctcccgcccggccgtcctctctccctctcccgtgaaccctagcgccattcctccctcaaatccgcgc

SEQ ID NO: 21576 - DNA, 2776 bp, Oryza sativa
actgtttaattttgattgccaggcctgaagcgcctctgtaataatgtaaatactatcgatataataagagatgtgtcttttatatcatgtttgtgtggtgtaccccgacttttcctgggacggggattaatacactagcgttcgggaaaacgtatttttctcggtcgtgacaagctggtatcagagccatctcgactgtaggataagccaagtggataaaacctaaggacatattttataaataaaactatttgcgaaagttcctctttttcttcttcccctagtgctatttgcaaaaggtttacccttttcttccttcttcaaatttcaactagtactagatggtcaggtcagtgaagaagaagacatcgtcagttgttcgccgaagctccggaagactgcaggatccgctagcgaagtggaggaagcagtgaagccagctgtgaaggagtgaagatcttggagaacccgtcgcagaacctaagccaccctatagggtagtgttgttagtcgtgtgttccttgcttgtgtgtgtagcgcgtggtttgcatcggtgggttgtgatgtaaccatgctaggttgtttgcttaatcaacttgcagaataagtgaaacaaacaacacatcaacaagaagagttagttcctttaaggtcttgtccctagttctggtccattctttccttgtctgcttcccctctcaacctctaccttgtgacagatggataacactggtaacaaaggctatgggaatgatggatccgatgactcaagaacccaagccagtgggaatgagaaaagcatcaacaaaacctcaccagagctaatccaaattgtggttaaccaaaccaacatgttggcaacagcctttcaactattacagtattggaacaacccagcaggggcaaccaacgttcaagtacctacagtccagcaacagtgcaagttatcagaatttctcaaaactgagcctccaacctttgccattgccgtcgatcctatggaagccagtgattggttgcgcacagtcgagaagaagctagggttgattcagtgcaccgaccaggagcgggttggcttcacaactcatcagttggttggaccggcttcagagtggtgggatagctacgaagcatcacggccagaaggacataccatcacctggaacgagttttcatctgtattcaagagatcacatgttcccgcaagaatgatcacactaagaaaacgagagtttcgctacctgaagcaaggagatttgaccgtcacagagtacctgcacgagttctatcgtttggctcactatgcaccagaagatgtggaaacggatgaagacaaacaagagaagtttctccaggggttaaaagatgagcttgcagtgcaactactcctagaggattatgaagattttgagaaacttgtggacaaagccatgcaactcgaaagtgagcataatcggatgacgaactgcaagagaaggattgtcaacatcccagtatttccatgtggtaaccaaagacagcgcactgagccacttcagatcaccggatcttctgttgcgcatcaagagttactaccccaagaagatggacacaacgcagacaacaacattagcaatactaatgctgatgataccaccaacaaccatggttcttgccccattcatgaccacttagatcaagcgtgcaatgtcaacagcattcaccaagatatcgacgatagtatcaatgaaggcacccagaatgacaaccctagcaattttgactctgagaaagactccaatggtgatagcaactatggtaccactgatgccaatgttagcaaggatttccaaccaccaattccaactccaagtcagaatgatcgttcccagacggacaactcagtaaagaagacattgatttgttacaactgcaaagaaccaggtcatttctccaaagattgtccacagccgaagcgtaacctgcgtcatcactccggccattatgcaagaagaagacaagtcactcgccttgtggtcactggagcaaacgccatacctgtgaggcctcgagttaatcataacccatagtagaaacaatgtaccgatgttaagcatcttccctttttgtttaaggtagtgccttgtattcgtgtaataagggagaaatgtgtaatacggacaagatttatgaggattcttttggaagatgctgatatgggattatgtgtataattggttactgtcaaaggagacctagggtctcatttcagaggaactatgttctaacctcgagttaatacccaacctgatgatggaaaagaaaatcaagtgattaaccaaagagacatttgtttggactaagtgtttcagatgtgtcttctttggatcaaaggcaacaaccgtcagtctagcttttgatgaaccacttcaaggtttcactgaaaggcagcaagccaaaggacctcattgtcaccagaagcatccacaactctcggagtgaagagtacttggttgacaaagtttaaaaggtgattgatagaagatatcagcaaaggtgtttattatcgggcaaagaagtaggtcgaaaggtgattgataagagaaatctaaaaaaaagaatacgtcagggttgaatgtgtaaaggcatactttgaatgctaaataataacaacatgaagagaatagtggaaagtgaatccgagttgcttgttcgtgagagctattcccagttatgaaccaagtgatatgttcgaagatagtttacagaggtcagattaaaatcacatgtaacagcg

SEQ ID NO: 21577 - DNA, 700 bp, Oryza sativa
ggcacaaagcggacatcaaactggcttagctcgactacccatttcgcaatgcggccgacaacgtctttgtttctcactacttcaccgagagggaaggaggatacaactgtgaccctgtgggcttgaaagtagtggcatagctttcttgatgtcatgattaccgcgcaaagcagtttttggatctatggatatcttgtctttgcgtcgtggagagcttcgctgacatagtagactggtcgttgcaccttctctctctcgacaacaatgacagtgctaacgaaatatggcgtggcggcaatatagagaaataattcttcattaggttggggggcaacaagtacaggtggatttgataggtagcacttgagtgcaatgaatgcctcttcggcttcctgtgtccatcaaaatttgtcttgctttttcagcagagcgaagaaaggttgtcctcaccctcccatcctagcgacgaacctacgtagtgccaccatgcatccggttaacttctgtacttccttgagtcttgtaggcgacttcatgttcttgattgccttgatcttctcgggatttgcttctattcctctaccagagacgaggaagccgagtagcttgcccgatggtactccgaacgtgcacttctctggattgagcatgaggcgatatcgtcggaggttgttatacgtttcccgcagatcgtcaatca

SEQ ID NO: 21578 - DNA, 1162 bp, Oryza sativa
tgttagtgtgttcgctcggtagccgcgtggtttccacgtgtgcagcccgcgtggtgtctagtggagtccgtttgtcggctactcgcctcggttgacacacggggtccgcttccgtcgacctgtggaccgtctctgtgtacctggtctaccgcggtcctttaggttgacatgtggggtccgcatgtcaacagcgcagccttcctgtcttttctaggctagcgcttccacatgttttattgttgcaaagcttaattataataatccgcaaatctccatataacagcactaaacttcggatgatcatatcttggtcatacgaactccgaatcgacccgttcaagtctcttaatgtttgttataacctaaagaaccctgtgctttctttttatgtattgttattgcttctttataggcttgtagctttgcttgtgtgcttcgcgtagtcttcgtcgttccggaggttcccgaagcgtggttttcggtcgtcgccgaaggttcggaaggccgttctctctgagcaaggcaagtcacatcatccttgagcatattgaatcccagtttataaaattattttaatttaaattaatgcattatcgctttatttaaattcccgcgttatcactgttttatttagccatgcctatttacctttgttatggccttattattattgctattgttattattaccttgttcaccctaggataaacaaaccccccccccccaactagtgggtactctatttatggttccactagtgtgaacttaggtagatgcttcgctggttaattaggcaacattaggtggttttataactttagacattgggaaatctcatatcatttggacattatggaattgttggattatggtggaattggacatacccctctcttcctctttcaaagcccctaaaacctgtttttcggtggggtttgggtgcatgccagttgtgggaagtagcaccccggccactataaggattaagctcgggcctctgttgcaaagcactaccgtacttccacatgtctagtgggtaaggcttagtttttggctcagtctagttataaacaaaagtacacggatggaggtggatgaagtcgggggtcgatggacatctctaggacaatgaaggctacacgagctgcggcccggtagtcga

SEQ ID NO: 21579 - DNA, 8986 bp, Oryza sativa
taactactgaccaaggagcttctttcatgtcacatcaatttagtgagtttgtcgaatcttttagaattaaattgctgaatttgtcgccttattatgctcaagctaatggacaggccgaatctagcaacaaaattttgattaagcttataaaaaagaaggtagaggagcatccaagaaggtggcatgaggtgttgtcagaggctttatgggctcatcggatatctaagcatggtgcgactcaagtaacaccgtatgagctagtctatgggcaggaggccgtgttaactgtggaggttaatttacaagctcttagaatagccagacaaaatggtttgtcggctgtagattataggaatttaatgatggacaggatagatgacgtcccagaggaaagattgaaggccttgagacatattgagaaagaaaaattaagagtagctagggcttataataagaaggtgagagaaaaatcgtttcagataggtgagttggtatggaaaacgattttgcccattggaactaggagtagcaaatttggcaagtggtcaccgagctgggaaggtccttataaagttgtagagattgttcctggaaattcatattttgtgtagtctttgcagggggataagttgcctaaagctttgaatggaagatatttgaaaaagtattatcccagtgtatggcagggagcttgatatggttatggccggtgtattgtttgaaacatcgtcctcagaaaaatattagttatagtgtttttggtgaaatttataatatattaccaaaaacaggggggcatgtgttaataatgtaatttggccgattaggtagttcaaatggccagattatttttaatgagtagttagatgatttgaatatattctttaggactttggttttgttttctaagtgcaggtatgatgctatattatctggagagcagcagcagcagattgatggcttggaagattcatgcatgatggtctgcttcacaaggctgtgcgtgtgctgtctatctgcatggaggtgcatatacgttatgcgggtctttttgccgtatgattccatatacgtatgctgcagttgagtgggcctattggatcatgcacagaacaacatgggtttgggctatatcaagaccaatggatcatgcagagatgaggctggttgttttgacgccgaagcttatacggaagggaatacaaggtggcacgcatgtcagctgagataaggcattgtttgatttggtttgttttgtattcggcttagagaattgatcgctacttggtactttctatatacgtgggctaaatacatctactaaagaccggagcacgcctgtacatatatcaggtgcatggccgattggaagaaaaagaatcgaacaaaatcaatctacttatttagattttcatctatttctgttttctctttcccgtgctttttctctctactgccaagctctagggtttggtggatctttgccattttgcgcaggaaaacggtcggttttcctccacgaaagcgaggaatctttgttgctttgctcggaaagcatccggtgatcgtcacgtaagcacggtcagtatcgtgttgttgcgcggatcaatttcgcgtgccaacaggatctaaccatggcatccaagtgactttgaaagtacttagcccacttccggactgtgatcagaactccatgtaatagcttctggtcctatgcatagcgtgtcttggagccagccaaaacatcactgatgaaataaatgggcctctgaaccttttggatgtgtccttctcatttaatatccaacactgcactgacaacatgcgaagttgctgacacataaagtggcaagggctcttgtggatatggtgaagctagcatgtgcggtgtcataagaaaattcttgaagtcttcaaaggttttggctttaggtgtccattgaaaaagggcatgcctcattctccaagcctagagacaaaccgactaagagctgacaggcatctggtgtgtttttggatgtccttctaggtacttggcggcttcatattctgcataccattcatttcctctgggatggcttcgatgccacagtgtgacaccatgaaatcaaacagcttccctgatgctacttcaaaggagcaattctccgggtttaatttcattctgaagacccggatgttttgaaaggtttcctccaagtcagcgattaagttatccttctccttcatcttgatgacaacatcatcgacataggcctccacattgcgcccaagctatgattgcaagcatttctgaatcatgtgctggtacgtggctattgactgtcggtatcaagccatttcgtctgttaatatatccaaaataaaggagaactagctatgcttgcatgcatattttgtttaagaataatctatctccacttgtaattggaattttatttcgttgcagagaactttacataattggaggagaatcgatggagaataaccgaacaatcgattgaactccgtcgagaggtagacttatgggtggatgggattacaaatcaagtaaaataatatcaaatgggcccaaccaccacactactagaccaaagagtcatcacacgacacggctacaaaattctgggctgattgggccaggccagggttcggcgcaccgttgatctccccctttcacatggatgtctaggattgctccccaacgacggttgtagggtatttcggataattccaaccgtcacaaccgtcattggcagcctacagatggaggatagctcactccactccaacacatactcaagaagaagatcaagaagctctctcaattttagtttattgttctagtgctagtggagtaggaatggagtagttctcttagttctcgagtcttcatgtgatttcgggtatggctctagtagctcttccttcttttttaagacttataatgttaataaaatattctcctttatatactttcggtcttttacttaattcatattattcgagtaccgactttagttcttacttgtcttgatataattgtgtaactagcttaccagagatatgctatggtgtgggtttaatgttcatttcaatgatttctctatgtctgctgcagcgatatgaagtagtatttagtaatgtaagcgtggtgcttagattattagataccattaattggggttatatgctgcgggtcagtagaggtgagccgctgatggtgacagctcagtacgagtattcctcaatgttagtatataatcctaagagacttttctagcatgggaactcctccgtattcattaccggtcggatcgccatgacgggttgtcgtaaggaacttggcaatcaggggtgatctctcgaaacaccaggttgacattgtaaggaggtattggttgcatgattgtatactagcaagtgtaaactaaagatgtttatatactagaagtgcaggaatgattatttccttattctttctccactcagcctagattatatctaaataagtgaaaggagagtcatttctcacaaaattactgtgccacttcattcgaataagcatagtcgtccgatttccaatacaaaagatgtgagccgttagattctctaatcatcaaaatatcttcacaattcttcaataatcttcttttcacaaagaagtccttccacaatccacatcccaaacttatataaaaagaagcgaaaaaatgcatgctcttgcgtttgctgcttttcatgctgcatccggtcagcgccgcctcttcttctctttcttggcacaagcggctatcgctggcttccgtacctctgcctgctccaccttttctcccaagtcaccgccttccccaccacaggcgcctcccatctcttttccccactgctgccgctgccgccgcatcctcctcttcctcactgtcgctgccttctgttctcctcctcaacaccgtctcctccccgtcccggcaaggatcaggcagcagggctgcggcggtggccgtacctcctgcgaagacaagatttgaacttctctggtactgctcctttctgtcctctcacaccctagcaccaaatcgggagtatgcaccatagtccgtagatactgattcattgtgaaagtttattttactgtgttattaatttgtatccatgctgtttgtaattggtaatacctgcactaaatcaaatggtggatgtgatttagaacgcctaaatcatatgcccataccaaattctaaccacaccaatctttcgttggagttgtcaatcaggacactaggtcaacacggtcttgctaaatgttcagtcatgtaattgaatttttagcatatataattttgattgtaattgttcagtcatgttagtacaaccatattgttaataagcatttagttcataaacttttaagaatgctaaaatatcaggtccttatgtttttttctcgcttccaatttgtcataataatagaagttcaaattttattttatcaagcttccaatctgtcgtaaatagtagaggttcaattttcttctgtccatgcttttaagttactattgcaatgttggtttaaagaatttttaacacgtctttgtgctttgaatcaatggtacggagcttttctaaccacaagtgtcgctttgcatgttctctacaattatttgacaggagtaaactagagaagatttttgaggatgcatgcagggttcactggaatgattttgtattctcagctgaacattcttgagttattgagtttagcatccgtaaaatctgtaattttttcatcaatgaacaatgcaataccatgagccctctaatgtcccttttgtttccatcaaaattttcctttcaatgtactatcttttcatcaaaatttacgctcatgcacgtctctttcagcacaacccttatttaaatgtatgtgctgccgtgtcctgtgattttggaaaaaaaacaaaaataaaaatagaatatattatcatatattacggcatagatataaagggctttatagctacactttatgtaaaatgaagtatgtcgtgcacacacttatttacattgttaattattattataaatttaaacttattgctataaacaatatgtaaatatatttaagagaggttaaggttatagtcgtacgaatgcacgacttaataagatagttttagtgagagtatcttggttctttcttgtgtgtgtcaactttatcctacctatgaattgattaacccctacctacactttggtttatgcaagtaatatataaattattagcatggtactctcttgtcatatcttggattaaataaatacgatacattggattacttctgggtgaaatgctacaatgctatatccatgcgcttgcggattatatctgtaaccataaatataccgagaatacttcagcgccattgctgggaattatatttctagtaatgtcattaagaaatattaacagtggctctaacattcttcagactgaaaggcattgtgatgtaacaatactctccgaacggggtgataaacgaggtctccaagcggtcagactctttcatgctgatttgatgatatcccaaatagcagtcgtgaaagctgagaaggtcgctgatggccgtcgaatcgacgacttgatcaatgtgaggtaatccaaagggatcttggaggcaatacttgttgagatccgtgtagttcatgcatatacaccattgtcccatcttcttcagaactagaacagggttagctagccagttgggatggtaaacatccttgatgaatctagctgccagaagcttactctgttctttcttcatagcgtctctttgatcttgtgcgaataggtggagtcgttgtttgatatgctttgcgtcagtcttcacatttaatgagtgctcaatcacctctctaggaataccaagtatatcagaaggtttccaagcaaatatatctttactatcttaaagaaagatgatgagtgtgttttcctatttacaatttagctcggcaccaattatggtagtcttggagggattggcttgatcaagtgggatcttctttgtcttggcatcactttctcttgacttcagtatcttcttggcaggcaattcaccttcatgtgatgttgatgcaacgagtcagacctcttgctggtcgagtgccctcccatgagattgggtcatctcgcagctctccttgtcggaggtgacggcttgtttgacgtcgctacgcaatgagataactcgttgtgacttggcatcttcaacatcaagtaggtgtagtaggggacgacaacgaacttagctagagctggccttcccagtatggcataataagctgcctcaaaatcagcaacttcaaagcagatattctgtctggaaattattccgagtccgaaggtgactggaaggctgatctggccgagtagcattgaggatatcatagggacaaccctatgaaacggagcagaactcgacttcatcttggatcttggaatctgcatcttatccagtgtcttggtgaacaggatattgagcgcgctgccaccgtcgatgaggacacgcttcaacttaacattatgaaccactagatcttgtaccaggatgtaccactccgggtgagccactcggccaagatgatccgagcggtcgaacatcattgctacctcggaccaccataaatattggggtacttctggctagatggtgttgatctccctatcggtcgacttctgcttccttttggattcgtaggcgggtgggcctccgaagatgtggtttcactcggtcctgggatcttggaaggcccttctccgttgtttttattttgcccagaagttccttcgccattggtgatcttgagttgcgctttttgtgcttgtcgcagtcattggccacctgtgctttgagttcgggtgatttaggcattgcccattcataaccttatcgcagtggttgggacgacgttgtgattgctaattagatgttgtggccaccaagtcttcaggtttgtgcttgcgatccttctggttgttgagttattattcttctaggggcgccaatagctacccgactacttttcctcctatgatgcattgacagtgtccactgccttggcgtaggagttggtagtctcaaatagcttcatgactattcacgaaggcttgcgattgaacttgccaataagtaacttgtctcgaatgcctttttggaaagtagcggtgataacatcgtcagtgaccttcgggatcttgttgcgggcctccgagaaatgtcagatgtagtccaaaagagacatattggaacaacatggtataggtcaaagtgagtactgcgtctctcgtaggtgccttggaagttgacgatgaactagcttcaaagctctcttcaggaatcaatggatcgccttggaagccccattagccagctccttgttgaatcagcgagtgccataggtaggtaattcgccagtgccttgttgtctcctcctactgcacaaatggccagggtttagacggtcttgccatcgtacttttcaatccctcttgatttgaaaccagtcggccaatccactcgatacagatctcaagtaaaagctaggattcctttgtcatcgtagttgatccttacggtgagagcaattttcccgatcgtgatgacgttggttcagcgtaatcctcaagtatttgggtattcaacgtctgtgtccttcgtcatggtctcggtcgtcgtgatggctcgacattgtcatgattgatctggatgccgacctctgttttcttggtgatgctagatggaagcggtgtgacctctgctatattcaggttttatgtggcccctggatctatgattcgagggctaatgacagccaaccagagtcctgggggagtcagcattggattctttcggtcggcgagaagctccggcatcattttcttgttgggctgcagtggcgacgatcatagtcttgaccttattcaacatcaaagtcatgttttctggagctttgtcgatgtgggtgtcaatcaacgtgacggccaccacagcgttctattgaggtgtagcgaaaacattactgtcttctatgcgggtttggatgatgttgtgtgcaatgtgaccgcttctaatcagatcctgctgccttcactagcgttcctcctcagctttggcacgtgcttcctcttgatccctcgtgatgccggcttgctcgtctttgtctgtggtgccaccgacaatgaagacttcgaagaaaaactaaagctcaaattcggaagtcgttgtagctactgagactatcaatgtcgaagtcgttgtagccatctaaaaaactaaagctgttgacaactttcgtggtgctatgtcgcgcccgaaaatcaccctaaaattttatcgtctaaattatttatgtaaaataggtgattccccacgctttgctgcgggaattacaattcttaatttttttttgtcaatcaagtttggagtaaaaagaaaaaaataatgaaacatcaggatttatcagtcaaatggaacccgtgctttagagtgaaacatattgataagtatagatagatttgttaaaatattgtgcaaatgatatgagaggtgatgattagatatgcttgtattttgatttgtaaaattaaataaattgtagatgatgttgtatgcttacatgagattaaatatgtaattattactagtgggtgatgatgtgttatggttgcatgttgagttttagacttagtgggctttaacttcaacaattaaaaattaccatgtttcaactcaaattgatgtgtgggtatttttgttgaattcctcatgcttcaaaatatttaaacaacttttacttgaattttacataataaataattttaatgcaacaataacctttctcagattttattaaaaaaagaaaaactaaaataaatctcgtcgcccttcttgcgaaaatacattacgttgggcgaccggcgcggggg

SEQ ID NO: 21580 - DNA, 13025 bp, Oryza sativa
  unsure (1)..(13025): unsure at all n locations
tcgccgtcgttgtttcctcaccgttccagccgtttgggtgagcctcgccgccgccctcgcatctctcgtgtcgcgcaccgctgcaccatgaccgatagccggggttgccggctgccatgtcctgacacacctctctctccctctctactgtttccccctctctgctgttacaggcagcaagcacacacagtagtttttctttacaaaattaattcataaattagtaaaatgccaagcaaacaacacctagaatttaaatgaccatatattgactgtttgaattcagaaccgatctattcatattgctattgttttccttaaacagtgatgaacccatttttagggttattactgcatcttatatggtttttatttatgttttgggcctttttcgttgcatatattgtatagatgctgcatatctggaagagccgctctaccttgaagtggatctagaagattttggtagtgagcaaggcaaatcatgtcattttgatcatattgttgtcccaatttataaaattatgtttatctaaattattgcattttgctttattaaattccgacgcttatctttgttttgtttagccctacagattctccttgttatagccttattatttgtattattatgatccttgataactctaggaaaaataaaactagtcataacattatatatgtggtgcttactagtaaatttaggaatatgcttagcgctgcttaaatagaaacaattagatgttttccaataattacaaattgggaataacttgtaaagaatggtaaatatggttcagtggttgtttatccatgacatgatgttccccttcaaaattccccaaacatattttgggttgggctcagggtgcttggtttcgctagtcgcaccctggccgtcattaggacaggtcttcgaacctccgttgcaaagcatatgctgtacagccacctgtctgatgggtagggcttaacgcatcatctagtacggtcatgtacaaggaagacacggatagggatggatgaagcccttggtggggtcgatgactctggcagtacgccagggggcatagactgtctgctcgacccagggcacctggtgggggaagtctatatcagtcttctttgtttagggcggtactaagaggtgggttatgtcatgtcttatgtccgtatgccgtggtggcatgtggcacatggcaacatgtgagaaagatgtgttgcaatatacccaagttagaatttagttctattaattgcgtaattggagttgtcagttgttggcacgagttaaggcaagatcgcattggtgtgcggcttgaaaataatttgactagagataggtttgtgttttatttaaatgcctttaaatatttaaatgctttgaaatgctagttttatgcaaaaaaaatccttaaaaatgaattctttgtactcccttgcattatatctgcattttcatgacatggcttgctgagtacggtggttgtacatagccttgctcttttccccccttctagcagaggagtacttcggatatgatggctttgatgtctagctcgtgcctgccgtcaagcgcctgtggtgactctcgtagcttctggctttttactgtttatctttcattgttgggcttttggtcgcccatgtaataaagtactctatttaagctttcgcttatatactctattatttaccaactttgtaatgtgtaccttgcctccttggacaaggatttatgcactcacaaacggaatatattgttctattttccgggcatgacatgctatattatccaagtgattcgatcatgattcccgcctccctagttctgatctcgggtggacttgggacttggccgggtcgtgaccttggagaggaggttgatcatcccgaaagtcatggcgaggagcggagggagttgcatggcactcttgggatgctgcattgttggataggctgtgaagatttgttgatgatgacgattccctcagtggtttgaagccaactcagaggtgagaatccttgagtagatctcggcagtgttcggggcactgaacgaggccaaagagatggggtccctccctgattggttcaaatccgagtcgagtagagagatcttgacaaagtcatcggtgatgaagtcgatgtcaccgaattgatatgcctagcccggatggaaagcggagtcgccggctctcagaattaatccgattgcacttgtttgcgaaaaactctacgcaacccctaccttgcttgccaactattgattctagaaatcaacaatgagaaagggggacgagatctaaagtggatgagtaaaataacaaacgtttatacaggttcaagccttcttgatgaaaactaataccgtactcttgtttcgaggattgaatccaccgggtgttgtattgatctgatgatcgagttgtggttatgcccttaagagcatctccaacaacctctccatcctactctccaagctaaattttagcaactttggacaaaaaaaatgcactccaatagaatggctatccccctagccaaaaaatagcaatggccaaagatagggtcaagctagctaaatttggccagccgttggccatccacagcaactagctatctgtgggccccaccatctttttcccttctatctctccaccatccgcacatccctgcccgtgccctcccttcctccgcctattgctgccacgcccctccttcctcctcccatgcctaccgccgccacgggaaggaggctcgccgtcgcagccggcaaggagtgcctcggcttcatcgccggcgacaagatgggagaccagcagtgaagagggccaccgctgtgcgcctcctctcaatcccgctacttcatgggcaccgaggtgaggaccctctcccgctactccggtgactggagattcactgtatccacctccgacctcccctccagcctctcccccgccgccatctcctccctcgtccgacgacgctgtggaggccgtcctaatgctcctgtttggtgctgcaaggagggcgcgacagcaagagaggctcgacgacgcacgccggttgaggaggaggaggccggtgatctccatcatcatcgccatcgcaatctgttgtccaccatcaccatctgttgatcttcatgagagtatgaagcatggggaaaaggaaggaatatggggaagaagaaaggattgtagaggctgacatgtgggtcccactgtcatagattcagagtagagagggtgaatggagaggctgttggagcaaacatcaagttagacttgataaattagatggagagttggccaaatagacaaatggagagtgagatttgtgtcgacgggggatacccgtagactggataaagagggtattggggtacgctagtacgaggatctacgtaatatgacatcaagcaggcagaaaacaaagattatactagttcaggccccttgataggtaatagccctaatccagttgatatgggattatatgatggaaaccacagattacaaagggaatagtggaactcgacaataccgacaagatcgtagtcgagttgattcgactagatctcccggcgacttggctccgataagctccggcttcgtaggctgtggtggatgtgttggcagtaagattcgatcccttaggccctcccggggggtcccttttatatcgcaagtcaactggtctccaagtatgactcggagacatcgggcccggcacgatacaataacgacccagttctgtccgagtaggattccttccatctgtgaacttccataatgaatttccttaacttatgccgaaaacgtccgtatacgcgcaagtataccatatcgatatgtgacgtatatcgaagggtagagggtataccttacccgtaaccctaacagtagcccccgacttctgcttaaatgaactcgtgaaactgatcgcgacttctgatgtcgaggttgtcgttgttctcggtgtaaggaccgagagacaaggagtgatcgacaacgccgggtgaagctcaacggtcatgagtgaatttaaattgaagtccaaaaaactgccgcgcgtaacggacccagaaatttccggcggccatctctctcctttccttagaattcgcaccgtcggaggtgcgtctatttaagagagttttggggatccaagttgaagcccgcttgttgtgaaaaaactcaccagctttcaaacgtccctcgtcttctctgctcccacaaaaaaccctagctagctcatctcggtcctttctccggcgatccccggcggaaatggatcttgacaagtctacctccaccagcgcgtcgctgaagaagttgcaggaagatggcgcccttcccggtcgcgggaccgcggagagagaagtgggaggtactgaaccccagcctgtcctgggtcgcatggttgcgatcgaggactttattctctgtggttttcttcctccgccttctgaatttcttctcttggtcttgaatttctacggtgttttcttgctccacttgaaccccaattccatcgccttcttgagtatcttttcgcatctttgtgaggcctacattggggtagagccgtttcttgacctcttccgcttttactatgagttacgctggatggaacccaaaaaggtgtccgggtgtgttggtttccgactttgggatggcctgaagtcgcgatacatccccttccagtgcccctcatctcgcagcaaatggcgggggaggtggttctatcttcagatagaggattcggatccggtcttcgttgttcctgaggagcaaccaaacaagattccatcttgggccaccaaacccgccttgaccccatccctccaatctttcatcgatatcgttgacgacctccgagaacaggggttgtcggggtatgaagtcgctgccgacttcattggtaggcggatccagccgcttcaggctcgagaccatccggcctttgattattctgggccagaggacgcgacccgggtttctcctcggggtattttcctttttagttaaattgactcccttatgcgtgtgttcctcccggcttatcggattctggtctcgatctacaggctaggagcgccgcgtcagccaacttatgatcagtggcccgacaacggcgagcaacgtccccgtccccctttgcgagaaaggggcagccgagcacgacgttgccatcaatgtaagtgtactcagcggtccttttgcatttttcttccgggatcgcattatgacttcatgaagcgtaggctctccctctgactgatatcatcgagccacttgtggaccatctggtggcggcgtcgctgaaggagaaagtcgccaaggaggcgtctgacgctgctgctgccgctgccataacgagcggcggcaacgttccgaaaaaggggaggacattctcctctgtggtcagacatcgtcggaagacgtccaccccctcggtaagttctcctgccctttgatcgcgtagtcggaaagcttctacctcacatcatatcggttgtactccaggcctcggatgcatctcccacacctccacgacggcagtggctagtgacgcttggcgagaagtaagtggttgactttgaggtcttgtcactttgtcaaactgttgcagcctgtttcagttgcagctttacgcagggcggcgcggccaaaggcggcgcaagatgggtctagagggacctccaacgcgtctcctgtcgtggtcgcgcctaggagccgcgaggcgacacctaacggcctagctagcgatcttgcggctggtcggggtctgccggctgccgttctcacctgggaggagctccaggtcgagatggggtgcctcctcgaggctggtgctcgtggcattggccacgagatcacggaggtgaaggcggcggcggcgtcgtcggcgaatgagcgtgctgatcggcttgcgcgcgatttagcggaggttcgcgaggacctccataagatgcgggagctggtggctggcaatgagcgacaacggcaagggctcaagcaccgtatgtctgagcttgagaaccatttgtcagagatccgtggctcactgcaggtcacctacaccggcatgcaccagctcgccgggtagtgtggtgtcaaggccaccatcccgacgaatcccaacgagttctcgttgtcgtcttcgcttgcggaactggcaacggcgatggaggtgatcccctccaagcacgcggccatggtcggagaggagacgtccaacgggatctataccggggcgtgccatgtccttgcgtgtgtgaggctggcgcatcctgaactcgatctgcggaagatcttggatcagggggcggctagcgatgcgcgcaaggatgtgatggaggaggtcggcgacctgggggagtccgtcctcccgctttttgaagagtaggatcttagctctcttgtactctttagccatgctttgtaaaactcttattggttcaaaccacctttgtgtgtgcagtattttgatcttgagtactttgttgtcatttgtagagatgttgatgtcgaggatgtccagcagcgcgggcagcctgagttgccagtggtcgttccgttacttgcgtccgagccacatgtgccggagggcgatgtagctcaaaattcgcctgtggagatgagcatggcaacggctcccttaggttggttatctttgttttcatccactttactcttccgtccggatcgacttgattcgctgtattcttggaagagaagagcagtctaacttagtcgtttccatactaagtagacctcgagagtgcgcttgctgaccaggatcgtcgcatccagtattggaggacgaagtttgaggtcgcggaactcgagaggactatgttggaagtgaggaaggactaggccgtggagacactccgtggtcgcgaggtgtggttcaactcgtatctgaagagttgctgtacctccatgtcaagagtctttagagagcttcgagtaccccgtggggatcccgaggaatcggcggctggatacatctcgtggctgaatggggcctgcgcccagctcgagggcatcggccagcatatcgacgaggccctgaagcaggagtgtcgtcgatcgagctgatatgccggggggcatgtattggcttgtatacgagatcatcgtccgcagctgcacctcgagttcctccacgaagggttttctcgctctcggagaactcctacggagatagatggcctagcgaagtcgatggcgccgctggcggaaaaggtcttccagtctatggactggcgttggccttcctggtagtctccgtgtcctatgacaaatgtcttaggggaaaagtgtaatataattttggatttttatggaactgtaagaagtacttgtaaaatagaaaagaaatctatctaactaagctttcttactctggatgtagcgtgtatgagtgtcttctcacttcgtgactttgattagttgtttgagttatacactctccctagcccccagcctttgacctgcctcggttgaacaagcactgatcctagcccccagccatgaagttacaaaatttatttccgattacacgacttggttaatacgcacggcgagaactcttacacgaccagatcttacatggtctgtcgtctctacaggatccgataaggccttatcggctctgggcgtccccagccgaagttcccttaggttcctcggaggccttgtcaagacggcgtaaagggacatgaggataggtttcaacgctaggtgtcatctgggtaagggatcatcgggaaggaacactttgattgtagtctgtacctgaaaataggctttattgaagttgtaagatgtcttacaagtatggatactattgacttatacatagaatttacgtaattgatcaatgttctaggaatttgccaactcgcgactatcgccgtctgcaattttgaatgcgcccggccgcagaacttgtgtgatcgtgtacggtccttcccatttgggtgagagcttgtttccccctgcttggctttgaacccgtcggaggacgtagtcgccgatcgaaagcgtgcgtgctcggatgcgcttctcatggtaacggcgaagggcctgttggtagctggctgctcgaacggcaactcgttcgcgatgttcctcgagtagattcacatcatcgtatcgctgctcctcttgatcctcatcggaatacttctgtactcgtgtactttgatgttgtagctcggtggggagcatcgcctctgagccgtacacgaggaagaagggtgtctccttgttggatgttgtcggtgtggtacgcacggcccatagtactgatggaagatcctcgacccacttcttgtcgtgtgacatgagcctgtcgtagacgcgggtcttggattccttgtagtactatgccgtttgctctctcgacttgttcattgctctgagggtgagaaaccgaggcatagcatatcttgactcccagcctgatgcagtaatcctggaaatcggcactgatgaactaggagccgttgtctgttatgatacggtggggcaatccgaatctgcagaatattcctttgatgaatttgatggtgttgtcggccttgatttcccccgtgggtgtcgcttcaatccacttggtgaatttgtcgatcaccacgaataggaacctgtagctaccctgtcctcgtgggaatggcccgagtatatctagcccccagcacgagaacggtcaagtgagagggatagtctagagtgcttgcgctggcagctttgtgtgtttactgtggaattgacaggcttcacaccgctgaaccatgtcacaggcgtctttgagggcggttggccagaaaaacccttgtcggaaagcttttctgactaatgtccgaccggcggcatgtgacccacagatcccttcatgtatgtcgaggaggaggtgtctgccatcgtcggacgagacgcattttaggagtaccctgtttggtgccttcttgtatagatcgttgccgatcatacagtagacttttgctttacgggatattttctcggcttctgcgtcgtcctcgggcaactcttcgctatctatgaatttaatgagtggggtgcgccagtcgtccgtggtctcgagatcggcaatggcgtgctctgcctctgtagcccccgagctgatgttgggggcgaccgggctatcttcgccgcttgcctctttcactgatggcctggtcaggacgtccagaaaggtgccaggttcgaatggctctcgtctggatgcatgctgtgctagatcatctggttcgatgttgtctttgcggtatacatgtcggacctcgatcctatcgaaccttttcttcaacttcctaacttctgcgagatacctggataactcggggctagagcacttgtaatctttatgcacctggttcgcgactagttcagaatcccctttcacgatcagtcgagtgcagctgcagctcttatcctggcgagtagtccttcgtactcggctatgttattggtcgccctaaagttgaggtgaattgcatgcttgaattgatctcccaaaggtgatgtcaagatgaatcctgcccctgctccttggctgttgagtgcgccgtcgaacgccattgtccacgtttcgttgtcgatttggttgtctgacctgttatcaggcatagtccaatcggctacgaagtcggcaagtacctgggacttgnnnnnnnnnnnnnnnnnnnnnnnnnnntcaaactggcttagctcgactacccatttcgcaatgcggccgacaacgtctttgtttctcactacttcaccgagagggaaggaggatacaactgtgaccctgtgggcttgaaagtagtggcatagctntcttgatgtcatgattaccgcgcaaagcagtttttggatctatggatatcttgtctttgcgtcgtggagagcttcgctgacatagtagactggtcgttgcaccttctctctctcgacaacaatgacagtgctaacgaaatatggcgtggcggcaatatagagaaataattcttcattaggttggggggcaacaagtacaggtggatttgataggtagcacttgagtgcaatgaatgcctcttcggcttcctgtgtccatcaaaatttgtcttgctttttcagcagagcgaagaaaggttgtcctcaccctcccatcctagcgacgaacctacgtagtgccaccatgcatccggttaacttctgtacttccttgagtcttgtaggcgacttcatgttcttgattgccttgatcttctcgggatttgcttctattcctctaccagagacgaggaagccgagtagcttgcccgatggtactccgaacgtgcacttctctggattgagcatgaggcgatatcgtcggaggttgttatacgtttcccgcagatcgtcaatcaatgagtcacttgtcttggtcttgacaacaatgttgtcgacgtaggcctcgacattgtttctgagttggtcgctaagtgcgccctggaccatgtgctggaaagtgtttcctgcggttattagtccgaatggcatcttaacgtagcagaataccccgaacggcgtgatgattgttgtcttctcctcgtcctctttcgccatgctgatttggtggtagccagagcaagcgtcgagaaagctcaacaactcacaaccggctattgagtccaccaattgatctattcgaggaagagggaagtgatccttgggacacgccttgatgagatcggtgaaatcgacacacattctccatttcccgttggccttccgcaccatgactgggttggctagccactctggatggagtacctctctgatgaaaccggctttgagaagcttgtcgagttcttctcgtatggcttgttttcgatctggtgcaaatctccgcagtttttgctttactggcttggcatcgggtcgcaccatgagtttgtgctcaatcacctccctgggtacccccagcatgtcggacggctgccaagagaacacgtcagcattgtcgcggaggaaggtgatgagcgcgagttcctatttctcgcctagtgatgctccgatcttgacgatcttgtcggggttggtactggagagtggaacgatcttgattgtgccgtccggtttcggcgtcttgtttgttttgctcactttcttgggtggttcagctgtggcaggtgggctaggcgtgtgcttgaccatgtcgaggctctacttgtcgcattgcactgccagcttagcattcccttgaatagtgattgttcccttcggtcccgacatcttgagtacttgatacgcatagtgagatgcggccatgaactttgcgagtgcagttctcccaatgatggcactgtatgctgtatcgaattcagcgacatcaaaggtgatctgttccgttcggaagttgtttgcttggctgaaagtcacaggcaacgtaattttgcccaatggtttggacgatgactgaggagtgatttcatggaagggttgattggtaggtgtcaactcgcttcgtgggatcctaatcgcgtccaaggtgctggcgaagagaaggttgattgagctgccgccgtcgatcagaactcgtgcgaccttgatattacgaatagtgggttcgaccacgatcggatattgccctgggatgacagcagtcctggggtggtcctcttctgagaattctatcttctgctcggaccacttcatcttgggcgcagccccctgccacatctaacagacttcacgttccaccttcttgtattctcgctttgaggagtacgccgtggaacctccgaagatgtgcgagacatggagatcggagtctggatatgctgagtctgattcctgagtaaccgcctcagcgtccttctcaaccacaagtactcgcttgccttttaccaatgccatgtgttttgcgagcgactttttgaagacgaggcaatcttctagagagtgtctgtctgacatgtgtatagggcaccatattttcttcgcgtcgctgccttgtgggtctgggcgcttgggagggtccgcgtattctgttgcgagaacttccgattgagctttccttttcctactcttgtgattcttcttcttgcttgacttaggtgcgtccttggctggtttcttctctcctctggtcttcggtttgtcgttcttgtgtctcagtgcgtcgtccgcatgagcgcatcgatcgacaatttctaataatctcctagtagtcgtgacgtgcctcgttgccaactcctgagtagtatagcgatctctgataccggacttgaaagcgcgaattacagaagcatcggtgataccggggattgtgtttctgcactcgttaaagcgccgaacataatccctcaaggattcactcgggttctgtgtcaatgcatgtaggtcgtcttcgatcgcgtggcgcttgtaagttccttcgaagttggctacgaactgctgccacaggtctgcccacgaagagatcgagtaggggaggagatgcatcagccatgaacgtgcagagcctttcaatgcggttggcaagtaattcgccaacacgttgccgtccgctccagcagcgtagagtaccgtagagtaaacctgaaggaattcttcaggatcggtactcccatcatatttctctattgttcctagtcggaatctttcaggccatcggacatctcgaagtgaacgaccgaaagctctacacccagcgctgggcacggtgggttgtcggcgatcgtatgtccttcgtggatgtctatctgatgatgaggatgaggaggatgacgatgatgacgatgggtcgcttggttccggcgcacgattacgaggacgtcggtcgggttctcgagaatcctgttgtcgtcgcctgttgtgtctcagtgccgatctccatcatcgtcgtcattatggcgacgtcctcgaccagtatcgcccagcccccgccgttcgtgatcgtcgtgatcgcggcggttgtggcggttatcatggcctcggtctttgctcaaacggcctcctcgatct

SEQ ID NO: 21581 - DNA, 6611 bp, Oryza sativa
ctatgaagagacgcaatgtcgagaatggttctcgttgtctcgtgtgcgtcgcgcctctcggcagccattcaggtgatcgcggagatcgccggtgccgcgaggtggaggggtggctcgatgaggcgattcccgccgttcagggttttcaccattagcatcgccagttggtggctgttccgggtgcgccgcagcagcggcctcttcgaacgcgttgctgaggttggtcactaactctcgtaaccattctgtccatcgtgcgagatcgtcgttcagaacggggttgtaggaagtttccctcagtattgtattgacggctctgatgtgctaggccggtgtagtcacttgattctccgcttccgcattggtgcgtgctgacgtgccgacatcgtcgatagccaatacctcacgcggcgtactcgttgttgatgaaccatagccttcgagcaggtgcaagactgatggttcgtggggatcgatgtcgattacccaacaaatcgatctgaaatcggcgtcgctccttgttccttgtcctcatccctaagggggatgcatgactgctggaccttagtatgtggtgtcttcatggcgctgaaaagaccttgcagctcgagaggttgtgattctttgtcttgtaaataggacaaaagacatcacgagttggagaggtacgctgaattccacgctctttgcaggcacgaatttcagcatggacgttcagaaaaacccaacaggcttgcaaggtgtgttttctggttttgtggataggacaccaggaccttgtcacctcggaagtaatcctcgtcggctcgtgattcctgtcggaaagacaaggcttggccgcactagaatccttctcgggctcggatgtcgtcgaagtttcgatttccacttcggcgggaggatccttcgacatggagtcgtcccgggttgtacccactgcgttctcatttccggccattggcggaccagctgagattggcactgtggtgtaaaccggaaagacgatttacccgacttgagtccacaccagtgttgttgaagtaggaactccttggttgaggttggtgttgacgctgttgtcgacgaagctggatgtcatagtagtagaaccttgagcaccaagtccccctacctggcgcgccaatatcaacgggggatacccgtagactggatatagagggcattagggtacgctggaacgagtctctacgtaatacgacatcaagcaggcagaaaacaaagattatactggttcaggccccttgataggtaatagccttaatccagttgatacgggataatatgatggaaaaaacatattacaaagggaatagtggaactcggcgataccgacaagatcgtagtcgagttgattcgactagatctcccggcgacttggctccgataagctcttgcttcgtaggctgtggtggatgtgttgccagtaagattcgatcccttaggccctcccggggggtcccttttatatcgcaggtcaactggtctccaagtaggactcggagacatcgggcccggcacgatacaatgacgacccagttctgtccgagtaggattccttccatctatgaacttgcataatgaatttccttaacttatgccgaaaacatccgtatacgcgcaagtataccatatcgatatgtgacgtatatcgaagggtagagggtatatcttacccgtaaccctgacaatttggagagactgttagagatgctctagggactccatgtcttccttatatagcttcaggggcaaggatataaaggagagaacccaattggacacgacttggttccattatacatttacataattgtatgctacaaaacgtatggtacatgtcttgggaaacacgacaatgtaatttccaaagcttagtctatttacataatatacgtatatggcccaccacctatctcccgtcagagatgctgtccacatgggtatatggtacctataatcttcaaagggcacaatggaggtaatcagctaatcaacaatgctctatgttcctcaaccaagtcgaaaacattagaaacaacaattaacatacacaataatagaattcagtaagaaaaaaaaacatcatttgatcagcaagcataagttgttttaacagagaactttttgctgcagaagttgattaggtcctctagaattggaccaaaaagatcaatcagcatgatattgtacttctcctctccaaacaactacacatgaggacttccagctgaaatttataaccaaaacataaataaaatgagtgaacaaatttatttgaattggtaaacattttttgttaggcaggatgccagtctctttgttcaccttttggaaactagtaatttgctcgtactaacgctacggtgacatttaataaaataattagccaaccaaaaatatatacaatgcatgctttagtgattaagactataatgcgcaatatagttttaagatcacgcaaaagaaaagaaagagaattagattgttcaaacatttatcaatatgatatatatacataaataggtccaaagtacacgtgttcggtacaatacataaatacctttcatcagtagtaaaacacattgtctgctaaggcaacatgttgcgcatacaccatcatccattagagcagacatggtcagtacatggctagttgttatgtaacttaagacatgttgatcttcaggatgcgtttgcacagcctcacagatttaggagaaaacatattcgtagatcttaaagcgcaaaggaggtcaacaaaatttaattggttctatgacaataatctaacatccacaacactataagaagtgatttctaaatggtatgagtaggttggtgcacagggccatcgaaggccatgcgcgagcacagtggccgcacatggctcccaatttttgagggggcccacctcggagtaggcctacagcctggcttgaattcagcggcccataagtgaggaggcaaggagttaggaactatgctagacgcaaacgagttacagccaattattacagagtaactgtttagtgttcactcacggagagacgcgagttgctgcgtgtgtgcagcacaggcggcagcgacagcatcacgcctcacggcagcaggcagcacatcgctgatgttgccgagcggagcaacgggaaacgacgagcggcgcgctgacacagagcagcgccgaggccgcgaggcccagctctagttggaaacctggaatcgataatttactttgaatcaaggctaatgaaattacactgttacagtattttcaatgatccatcattccattggattgataattattgaatcaaaagtaatgtgaacgtcttcactttttttataaaacaggaagacctcaaatcctcgccagatgatgcttctcactggaatattagatcagtactacctttactcttttaccattaatatttgaaaatatatttctatatatcgtagaaaataacacattaaagttatataattaactaaaaataacatattatttttcaaaatttagggtctcaatttgcattcgttccggggcacccaaatcctagagacggccctgttggtgcagtagtgcgtaagatgcaacttaaaccttgaagcccatgattttcaccctttggctctagaaactctagctctgaattgtcatcatccactgagatgaagagtattatctgaacattgtagtattatacccgaaggaaatgaaaaaaatgtttttttccaatgtaccggatgcacgcaaagcaatattaaataatagcaactacaattatttttttctccgagtctaaccctaccaatgttgagaaaaatagtaagggcaaaatatataaaaggtacagaaaaaaatatctagtgtcagaagttccgtgagaaacatgcttgacccttttgtatttcacaccataattttatataggctcctaaaacacaattcggatatcaagttaatcaaacaaaatgtagtatacatgaaaaaaaatcattctacattaaatttaattgtcaaaacgtgacataatatttaccctgcgatattcatctatcatctcatataactccagcattcaggtttgtaaggggcatctataaatttggtgaaggaacctatcaaagttcatcactcagctagttacagttcttataagtgagtttcgtgttgaacatgtaacggttttccgattgcaaaaaaaaaaacagagagaacttgcagaaagcaagttgagatttcattaaaaaaaagagttcaatggttgggagtagagaagaaaataaagcttaaaaatgttaatgtaattgttgaaattataagcacataatgatttaatttcttccataaataaatcatgacattgcagatgtaaacaagcatgaacgcatcattagatgcaaagtgcataatgatgcaaagtatttcagaaagtataatgatgcaatacggttgtttatcagccaagtgcataatgatgcaaagtatttcagaaatcatatacagtatttcaactcccatttatcattcacgagccttggagttacccttgaccaacgagtcagcactgtagtgggaactggtgtgtatacatttcgtgtgcacggtgcattgtaccatcgcctggataatttggttccaggttctcaagggccgcgccatatgcagctttacttttatgatacagaagatgctgatgcactagcccatagggttcgcaggtctcctgaccttgatatcaaccttgttcgggtcattgtacgtattttggcgcaaaagccgtacgtacagaccttcagcagagttggatccatgcccaatatagatgactacatgattgagctcaacactaatgtaacgcctgaccaacgaagatggggatgatccaatgagaacttttgatagacaagtcttggtacatgcaaaaggtgataagccctgttacatcaaagcataccatggttgttatgaccctttagcgtatcctttatttaaccctaatggggagactgggtggaacctgaaaatgccgtacaacgatcccaaccagattctgcgtgatgtggaaatggatgaacagtgtgacatcatctttaggtgatgtacgtaccaacgaagaaagcacttttgatgatcttccaggtacgtacactcgtggcttttgtcgaataatttctaaactttatgtccttatccattgtttatgtatattattatgtaagtttggacgcagagaacgaggttgtcgacaattatctagacaatgaagatgataatgatgatagtagtaaatccggcaaaagggaaaaaggacaagtttgtcacagcgagggagtactattgcttcaggctgcaggttagaaggtgatgcggacatcactacctcggatacacatagcaatcctcctacggtcattcaaggaccgataacaagagctcgtgcgtgacaattgaatttagaggtgagctcgttcctatgttcttctttgtatgaattcgagaatagattgctacctaatgattatattgtgattaggaacaatggaggggacaaggagacacttggggaaggacttagagccatggatgatcatcgaggacgtccaagtcaaggtggaggcccaaaccaattcgacctcgggtgcaattcggagtctaggaccagtctgcactaaaacgggcgcccaggtcgcatatgtgctcggattagggcgttctttatatatatggaaagctaagaacataacctttccaatggttttggtcccacatccaaattcttcccgagtcaatgggaattgatcgaacaagttgacgtccagaatttgtcccggtgctgcgtcaccgtatttgggcttttggcccgtgtatcgtgttggaacccattagggttgtgtcgagagggggttgcacaagcctaaactctatatatcagtacccaccgccatctttaggtttttgggttttgcttagattattctttcaagaacagtttcgccgctagatcggtttgtaagaccccaatttgtgagcttaatcattcatctgcaattttggttgttttctatctcgttcttgtttgtattctttgattggcaaacaaggattagccttctcggcgaggtcatccgcgtttcgacacgggtgataactagaggagacatggtgctgcgattgcggggctcaagagcatgcgcgttcaagaagccggatcgatttgtgttgcgactccgcccaaatcgttgtttatcagaacctctcggaagatcgggaaccctagtgcacatcaggaggggacttctaaacatcattttgttcggaggatgacttttccaacaatgggctattgatatgtacatcaaaatcgagtctatgaggcttgattggtactcaaaacctgagaagcaaaaaaagattcaggctgagctataccaggtaaatggtgtaacatatttccacaactattgacactgtctcccatctgtgattcaacataccagttatttgatcatggtgttatttaatgattgcagggcgtggttgatgtgctttcttctggagagaagcggttccgcagttggtaaga

SEQ ID NO: 21582 - DNA, 35043 bp, Oryza sativa
  unsure (1)..(35043): unsure at all n locations
actgtcacatcaatgttgaggcttgtgcaagcatcaaatctgtgaagtacctctataagtatgtgtataaaggacacgactgtgcatctttctcggttgatccaactggggaaataaacgagatacaacagtacagaaatgccagatacgtgacaccaccagaggctatatataggatgcttggtttcccactgttcggtatctatccagctgttctgcagctccaacttcatcttcctaacatgcagtatgtcacgtataatgaggatggtaatcttgaggatgttgtaaatcgtccatcttctaccaggacaactcttacggagtatttcaaaatgaatcaagtagacccggaagcaaggaagctgctatacaaggagttccctgaactctaccgttggataaccggacagaatgtgtggcagaaaaggaaaatgaagagaggccaagttggacgggttgtgtacgctcaccctgcagaggtggagagatactacttgagagtgctcctcaaccacgtgcgaggtgcaacctcatttgaagatttgaggacagtgtcaggtacttcatactctacctttagagaggcatgcgagaagagagggcttgtggagacggataagtcacatgatgattgtttgaatgaggcatccactttccaaatgccatttgctttgcatcgattatttgcaaccatattggtattttgcgaagtcactgatatccgtgcactatgggacaatcacaaggatgcaatgtctgaagattatagccgagggaacactaaccctgcagtagtagagaagatggtgctacgagacatacatgatttgcttcattccatgggaaaggatatcacggagtatggtcttcccgaggtcattgatataggtattttttgttatactatcacgtcttttccttattaatttacatttgcaccacccaccaatagtttcatcatgcatatatttgttttcactaatcaggtgaacgttgcaacgacgtaatgacagagattatagaggaacttaacgtgctagtggatcaagaccatttagacatatacacatcccttaatgatgagcagcgtgcaagatttgatgagatcattgatcatgtaactaataaaaagagccaggtattttttatcgacggcccaggtggcactggcaaaacatttatgtacaaggcgtttcttgctagagtgcggtccaagggattaatagccattgcaactacgacgtcaggtatagcagcgtcgattatgcctggaggatgtaccgcacactcgagattcaaaatccctattaagattgctcacaatagcatgtgcaacttcacgaagcaaagtggcaccgcggaattgcttcacatgtcgtccttaattatttgggatgaagctgcaatgacgaagcgtcaagccgtagagacccttgataggtctcttcaagacattatgggttgttcattgccatttggaggaaagtttattgttttttgcagtgattttagacaggtacatcccgtggttacacgtgggacaagggcccagataactgatgcaacattacagatattgtatttatgggataatattaggaagatcagattgtcacgtaacatgagggctcaatctgatctattggtttcgggatatctcctttagaatnaggaaatggcactgaanacactatcagagatgattatgttcgcttgcctgatgaaattgtgattgcttatggggatagtgaggattcagtacacgaattgattaatcatgtgtttccctcgcttgaagatgaaaagaatgcaagctctgcatcttatatgagcacacgtgctattctatccactaaaaatgattatgtggacaagctgaatgcggatatgattgacagatttccagggcaggccaaggtttatcacagctttgactctgttgatgatgaccctcacaacagttatcctctggactaccttaactctatcactccaaatggtctcccaccacacgagctaatagtaaaaatcaattgtcccgtgattcttcttcgcaaccttgatccaaataatggattgtgcaacgggactagactaatggttagagcttttcaagataatgcaattgatgctgagattgttggtggacaacatgccagcaaaagggtgttcatcccacggatccctttgtctccctccgacgatatatctctacctttcaaattcaagaggaagcaattcccaatacgtctcaatttcgcaatgaccattaacaaatctcaaggacaaaccatcctaaatgttgggatctatcttccagagcccgtgttttcacatggtcagctatatgtcgcattgttaaggggtatgtcaaggctaacaacaaagattttggctaagccaaagaaagaagttgattcaacagggaagagcactagaaatatcgtgaataaaaacgttcttgactggtgaacaaagataggttcgcatgatctaaattaattcaaaaaaatattgaatatagtaaattgctcatcgaatgttactcaccatcgtcctcttgtttggtacagcacgccatcaccttttatatggaatgccgtgtgattatcttttacaaactatctcacactagatgcgtcagtttgcaccagactgtcatttgagattgtaaatatggtctgtattatataaagggatacatatgcttacaaaattgttctggattattatttttctatatggttcatccatacaacttaaatgaataatgcaccgtagacagcccgaaccaccgccattgccatcaccatccaccacatacagcctgcaccactaccatcaccatcaccaacgccgccgccgccgcttgctctgctgtttttttgggagaaaagacagagagggagaatagggctgacgagtgagccctacgctttttaatttttctcctatcacttacatgtgagcctcatcttgtaaagttttattgtgcccacgcaatatcatagtactgcaccttacatgaaatatattttatataggatatgaattgaattaaagttcaaatgcatcgatcatataaaaatattttttgctaacatgaaattctaaaaattattaaagacatatacaattgcaccgtagcgtttagcacgggcatgttactagttaaatttaattgtcaaaaggtgacataatatttaccctgcgatattcatctatcatctcatataactccagcattcagatttgtaaggggcactataaatttggtgaaggaacctatcaaagttcatctctcagctagttacagttcttataagtgagagttttgtgttgaacatgtaacggttttccgattgcaaaaaaaacagagagaacttgcaaaaagcaagttgagatttcattaaaaaaaagagttcaatggttgggagtagagaagaaaataaagcttacaaatgtgaatgcaattgttgaaattataagcacataatgatttaatttattccataaataaatcatgaaattgcagatgtaaactagcatgaacgcatcattagatctacacatgtaaactaagcagtaaaacatgaacagatcaaatatgcgcaacatgtcgaacacgtaccgaggtgatggaaagaccggttgctcggcaggaactactcgcggttgcgggcatcgacgagggcacgcagcacgcgagcggagaggaaggcgagccgtcgcggacgaacaggaagcagtcgcgcgaagcgcttcccaaaaaccttattaccgccttctcccggtgcaggacgtcgaaggcagaagttccggagacctgctctcccgattgccggtgcacgccagcgagcgagatggagtagtctacgagcgacggcgcagcatagagtaggaggcaaaccctagattgatttcgcgtgtgttgcgtgaagacggcggctcggtttacatagagataggtcgcttgatcagggcgcccgcacgatctccactccgcgtaaccgaacctgataagtcgctcataacctatccggactccatgccattttcacgcaccggattgtttggaatgtttccaaaacaaaacaaatctgaatcttccgcaacaaaacaaaactgcaaaaggagaaaaaaaacctgcgcaagggtgaggagccaatttgcggaccattcgacgcgtacgtcgtgcacgcgcgccgcctgccctgccaggccaggcgaggcgagcgagcgcgcgcatgtgttccccctcttctctccaccacacatgctttaagtggcaaggagggcatcctcccttttaaggaggtccccctttcctagaataagtaaggtggtactaaactccacatgcatgctatcctatgaggtgggcttttgtgattttccaaagaattaatcttcgagtgggccttagcccatccattaattccgacaatccccccaccaaatctcaaaatcccactgagatttgccttttccaatataatgtttatataccagcggttcgatggagaccaattatggttgaacatccatctagaactccaagctacacttactcacaacttgaacaatggactacgccttgaattgcaagtcttgtgcaagcaagtttcactcagagtcttacctggtactagatcgtctgtagactacccctcgggtggagcgtataagtcatactcctaggtctttagtaagcttcctagaagattcacccaaaatctccatagactgcgaccaacagtcaagctcacaaacgtgaattctttcaagaatgctttgcaggacagcaccttcgctaattaaagccagcagaactcattaaggcattgccaacctgccttgcagcaacgagagtacatgcatcttcacttagagagggtataaattggtactctcctctactttactaatggttagttcttcccaggttctaatccacgggatctccgatcacatagactgggttaccaccatagtataactcacatgggtctcaaacccatctccttcgatgcattgtctatcacgtttcgtgatagtcccttcgtgaagggatcttccaggtttctagctgtttggatgtaatccaacgttataactccggagtttctcaatttcttgacagacttcaatcgtcttttcacatgtctagacgatttcatattatccttagaactattcactttgacaattaccgtttgattgtcacagttcataaggatagccggcaccggtttttcaacaataggcagatccattaatagatcacgcagctattctgcctcaacagtagcagtatctagtaccgtcagctctgtttccatggttgacctcgtcaaaatggtttgtttgcaagacctccacgaaacaacaccatacccagtgtgaagacatatccactagtggatttgatctcatccacatcagagatccagttagaatcagtataaccctccagtaccgcaggatacccagtatagtgaagccctaattccatagtacttttcagatagcgcattactcgctcaagcgcacaccagtgatcatctcccggattagaggtaaaccggctcaacttgctcgcagcaaaggatatatcaggcctagttgcactagccaggtacatcagcgagccaatgatttcggagtattccagttgatccctaccatttctcttgttcttgcgaagcaacaagctaggattataaagtgttggagaaggcttactatcaatgtagccaaagcaattcaagatcttctccacataatgggactgcaagagtgtaatcctattctcacctctaattagcttaatgtttaagataacatcagctactcccaaatccttcatatcaaaattttgagaaaagaatgatttaacctcatttatcacctcaaggtttgtcccaaatatcagtatgtcatcaacatacaaacacagaataactccctcacgcccaccatgacgatagtacacacatttatctgcctcattgactgtgaagcctgcagatgtcaatgttttgtcaaatttctcatgccattgcttatgagcttgtttcagaccatacaaagacttcaacaatttgcacaccttaccttcttgaccttcaactacaaacccatcaggttgatccatatagatctcctcatccagctctccattaagaaaagttgtcttaacgtccatttgatgaacgagaagaccatgtgaggctgctagggaaagtagcacatgaattgtgttcaatctagcagcaggtgagtaagtgtcaaagaaatcttcgccttctttctgagtatagtccttagcaacaagccgagccttgtacttttcgatagtaccgtcaggcctaagcttcttcttgaacacccacttgcaccccacatgtttacacccatagggtcgctctgtcacctcccaagtcccgttagcgataatggaatccatttcactacagacagcctccttccagtagtctgcatcaggagatgcatatgcttctgaaattgacttaggagtgtcatccacgaggtacacagtgaaatcatcaccaaaggacttagccgtcctttgtctcttactctttcgaggagcttcactgacatcctcctcagtgatatgttcatgtgtatgttcagtttgttctggtggtgtgattgaaatgggaattatttcaaagggttggctcgaaccactatgtgtatcattcatagggaaaaagctctcaaagaaggtagcatcacgagactccataattgtactaacatgcatgtcaggtacctcagatttaactattaaaaatctataggcaatgttgtgatgagcatataccagaaagacacagtccacagttttaggtccaagtttgtgcttcttcgttattggtacattgactttcgtcaagcacccccatatgcgcaaataagaaagtgatggttttctcccaatccatatctcatatggtgttttgtccttatttttgttaggaactctttttaacacatgattcgaggtcaacaatgcctccccccaccatgccttaggtagtcccgcggtgtccaacatggcattcaccaagtcagtcagtgtgcggttcttcctttcagcaatcccattagactcgggagaatagggaggcgtcctctcatgtatgatgccatgttcctcacagaataagtcaaactcatttgagaaaaactctcaagcacgatcagacctaagtctttttatctttctgtcaagttgattttcaacatctaccttataaattttaaaatagtctagagcctcgtctttcgttttcaacaagtacacatagtaaaatctagtagcatcatcaatcaacgtcatgaaatatcgttttccacccttcgtcaacactccattcatttcacaaagatctgaatgtaggagttctagtggtgccaagtttctctcctcggcagccttgtgaggcttgcgaagttgcttcgattgcacacaactatggcacttagaacctttgacaatggaaatcttaggaattaaacacatgctggaaagtcgagacatcaagctaaaattaatatgacataaacgtgagtgccaaatattagcctcatcatccacactgccacaaatatgattcacagacttattgcagaaatcaaaaagggaaaagcggaacaggcatccgcactcataacctttaccaataaaatatccatgtttagacacgactactttattagactcaaaaaccaacttaaatccgtctctagtcagacgggagccactaacaagattcctgtcgatagaagggacatgttgcacgttcttcagctgcacgatctttcctgaagtaaacttcagatctaccatgccaacaccatgaacagaagcatgtgacccattcctcattaggacggtggaaccccgtgcgacctgataagaagaaaacaatgagatgtcagcacaaacatatacattggccccagtatcaacccaccaattaatagactgattaactgaaaaaacagtaggtaaattaccatacctgcttccatctccagtattgccaatggtcacattagcagacttagtctgccctgcaggtgccttcatccccttgcgttgtggatacttcctggccagatgaccaggttggccacacacaaagcaagtcctctcatcctgattaggattgttgttgttcttcttctccttcttgaagttggtggtctattgagctttgtatttccctttgctcttgttatgggccttgtgcacaacattggcactggacagcccaccatcgcccttagacgcagcatctttttcccaagctttctcctcaacatcaagagacgctatcaacccctcaacggagtattcttgtctcttgtgtttgagtgcagtaccgaaacttctccaagatggaggtagttttgcaataatgcacccggccacaaatttgtcgggtaagacacacttaaggagttcgagttccttagccatggtttgtatctcatgagcctgttcgactatagaacggttgtcagccatcctgtagtcatgaaactactccatgatgtacagatcattgctagcatcaatagcaccgaatttagtattcagtgcatcgcacaactccttagcgttggtcatgtgcatatacacctcgaccaaacgatcgccaagaacactaagaatgtatcccacaaagagagtagtggcttcctcgaattgcttctgctgattagcagtaagaattccttcaggtttaccagtacacatacagaagcatttcatagctgttagccacagagtgatcctgatctgccatctcttaaaatgcacaccggtgaatttatccggcctcaatgcatcggcaaaaccagccatagtaaaatcacaacgcctataataaggttttattgaaattataagcacataatgatttagtttattccataaaaaaatcatgacattgcagatgtaaactagcatgaacgcatcattagatctacacatgtaaattaagcagtaaaacatgaacagatcaaatatgtgcaacatgtcgaacacgtatcgaggtggcggaaagaccggttgctcggcaggaactactcgcggttgcgggcatcgacgaaggcgcgcagcacacgagcagagaggaaggcagccgtcgtggacgaacaggaagcagtcgcgcgaagcgcttcccaaaaaccttattaccgccttctcccggtgcaggacgccgaaggcagaggttccggagacctgctctcccgattgccggtgcacgccggcgagcgggatggagtagtctacgagcgacggcgcagcacagagtaggaggcaaaccctaaattgatttcgcgtgtgttgcgtgaagacggcggctcggtttatatagagaaaggtcgcttgatcagggaaaaccctagattgatttcgcgtgtgttgcgtgaaggcggcggctcggtttatatagagataggtcgcttgatcagggcgcctacacgatctccactccgcgtaactgaaccggataggtcgcgcgtaacttatccggactccatgccgttttcccacaccatgacaaaacactgcaaaaggaggcgtacgtcatgcacgcgcaacgcctgccaggcgaggcgagcgagcgcgcgcgtgtgttcccctctcttttctccatcacacatgcttcaagtgactaggagggcatcctctcttttaaggaggtccccctctctttaaataagtaaggtggtactaaactccacatgcatgccatcccatgaagtgagcttttgtgattttacaaagaattaatcttcgagtgggccttagcccatccatttaattccaacggtaattacagggaatgaaattgtggtgtaagcattgaaactatcagtgatgcacgggttaacttgactattacctgtaggttctttgctccatcactaactgcatggctactgagtcttgccaccagtgccagcgagggcggtcgctgccttgcctatgagagtgtgagagagagagatcggggagagagaagggaggaggcgagaattgagaatttaagaccgatagtgagagcttcccaaaaaaagtgagagaagggtgaggaataaaaggcaagagagagaactcgacttggatcagtcctgcttttatgaaaacccagtagagcagatacaatagcaggctataagccagctataaatatattttaaagagataaagatagagagagaagagcagcgggcaacaaatctgtagccagctacaacacggactccaagatgtaatgtgtgtatgataggtgggaccagatattaacagtatattaagcaactattgtataaattggttattacattggctatagatggtttggagctagcacacatcaatgcctttctaaaaagaaccgacattgataacatcagagccagttattctaatgaattggtattggtatttttgtctcatcaataccgtttttttaagctgacactggttggttgcgtggggttctgatgaacgggaaccactattggtgtaagatttagtcgaacagacactaacaagggtattagtgaaaaacatatctctatctctatctctactattataaaaattgaaaatgtttttgtcagattatttggaccatcgtcttagaatctcaatcgctcccgttcgtcgtttttcttttcagcattcgcatgcatttcctttttttcttaagtccgtaacgcatagcttagctccgtatcagtgggagagcaccgtgcaactgtgcacctggaaaggcccacgtgtgtgtagggctgcatcttctatttttaggcccactcatcctgagatgtctattattctattatataaaggaaaataaatctctactattataaaaattaaaaatattcttgccgatattttggtgcgtcatccgtgtatgagtcggttatatatatatatatatatcaagcgaactcccacagtgaatattatcttaactaaaccatataacaataataaaattaaaataaacttcacccgttgtaacgcacgggtatttttttctagtctacttaataattattcaaatttaatatttcataaccctggtgctatttgaagtttgaactaatttgcagggtagcagaaataagttgttgctgcaggagcagaagagtgaggcctggtttacactactacaaaacatcaaataggtgtcaccactataggtgccggtagtgctaaaactggcacctatagaccttttcccacctctgcgggttaaaatcgtaaaaaaccgacacctttaagtaattataggtgccggttctaaataaagtcggcacctattctattttgtgttagttttttttaaaaagggaacctttagtattaaaaaccggcacctataataaattataggtgccggtttatgtaaaataccggcacctatgaattgagtcgagctgggatgagccgagccagcgggccccaccacgaagcttcgaggagataaggccgctccgcagcgctcgtctctctctgtctctccactctcttctctcctctcggtgcctgtctccactcatctcctctcgttctctccgctctcttctcttctctttctcctctcccggccagcggaggcggcggcgggggccgcgcgctcccctccgcaagatccggggaggggcggcccagcggcagcggaggggagggaggatgcggcggcgggatgagaggcagtggcggcctggcgacggcaccctcccctctcgattccctcgctgtccgcggcttgcggaggcggtagcagcggccgcgccctcccctccgccagatccggggaggggcggcccaacagcgttcgcagaggggcagcctagcggcggcggaagggcggggggatacggtggcgccctccctccatgagatctggcgaaatgtttcttaaaagatttgtgtgaaatgatttgtatgatgttcttcaatgtttcttgatgttagtgaaatgatttgtgtgaatgacttctatggttggggattggggattagtgaaatgatttctgtgatttatgtgaatgtgttgtgtgattggggattggggattggggattagggattgtgatgcagggtggatgagctcgatgcatcggctcaaatcgagccgatgcatcgagcctttatttttttttgctcgcgagtggtatcgaaggttctggtttttaaaataagattggtgccggtttaatgctgccttcatagtgccggttgggaaaaccgacacagaaaggggtttctcaactggcactaatctcgtgtcctgtggtagtgttagctcctaacttattcttcaaacttccaacttttccatcacatcaaaacttccctacacacataaacttttaacttttttcttcaaacttctaattttagtcaaatttctaattttggcatggatctaaacacaccctgaatgttcagattgctaccgctacagagcgagttgcccaaatactccttccgaaactactgtgttcaaaatcaaaaagtacaataaacataggagcagtgtgtgccattggaatcggaatcggaatatataaaggggcgcgagttgggcaagcgaggacgggtgccacgtcaggattttgctacagtatgtacagtgcgcgaggtggtatttttgtgaaaaaacccttcgatttccagataattcaatcgaggtccctcaagaatagtgcctctgaggtgtttattgcattaaggtccttatagaattcggatattccgtgcatagaaaagaaaaatcgtgaattaaaaccgcgttgtaaaacttaaaacatgaggggctttttcggaaaaatggctcacactaacccacccaccccatgccctagccgtataggtgtccaaacgggcggcacgccccggcccggcacgggcacgggtccggcacggcccgtttcggcacggcccgttaggcacggctgatgaaacgggccgtgccgtgccggcccacgtgccgagccgccggcccaagcacggcccgtggatggccgggccgtgcccgtgccggcacggcacgcctgcggcccacgggccgttcggggcacggcggcccgtgaaggcaggccggcagctgagctgcactggccgccaggccgccaggccgccagccgccaggccgccagtgcacagtgttttttaaaaaaaaaagcaaaggaaatgtataaggaaaaaaaattaaaaatggaaataaaatgtttaaaaaaaagtaatgatttactaatgttaaaaaatgaaaaaatggtatttaaaaaatggaaataaaagtttttaaaaaaagtaatgatttgctaatgttaaaaaaaagaaaaaatggtatttttttgttgtgttgaaaaatttaaaaatatagattgtgattcattattttgaaataatttaaagataaatccacacttgcgaaaatattgcaaaagaatttgttaaaaatagtaatgacctttattgatgtttatatcattacaggatacaatgatacatgctgcctcgttaaaaactttgtcatgtaaaaactcataggggaaaatgagaaaaccatgacaaagaaaagagtacagctcaaaggtcagaactacttctaacaaaattttactggggttggtctggatccaggtagagttgctcgaactgggcggccaattcttggttgtctgcagtgtattgggcatgttgtcgagcaagctcccagtctttaacgcttagtagcatttcgacgtggtcgctgcgcagagtcgtcctccggtcttcgatgattcggccgcatagactgaaggccgattcggaggacaccgtcgacacgggcaccgtcaacacatcccgtgctagttttgaaagcacaggatatgttatcttgtggtcattccaccacccgaggacgttgaaatcttgtgcttcgtggtggatggcgtcgctgtccaaataaccggacaactcttcggccacaacttgcgaagaggcgtctccacttgtagccgacgaactgccaccaccttggattgaagacgatccaccccaaatcctaccccactgtatcttcttcttacctgtagtggggataggagggggtctctgctggcgaacttcctgaaactttacttcatatcttccaaaaacctcatataatttacgacagccgtatgatccggtacctcctccacagatggtggagttggagccgatccggaggtatcgtcaaacctcgacatgtagttggggtcgaaatcacccaaggtgaacgacggcgactggtatggaaagttcggatccattctgaaaatttaaaccgacataaacaaattttcgaatatttattgaattcacaaacacaatacaaataatacacaaatttgaatattacttacatctttccaaccgcgagctcttcaaacctctgcgatcaaactgttgaactacgaaactaattttgatttcaaattttgtcaaaataaaaaaaaaatgcacacttgagaacaaagagagcacttaaaacacttgagagcacaagatgaggagtgtgggatgaggagaaatggctggggttcatgccctatttatagggcgaaatttgagattttttggaattttttcgaaatttttatgaattttttagcctcccaacggttattttcaaatttgaacggtcaaatagccgttagtgccacgtggcgccttcccattcgaccgccgcccgccctgtccctgctttcggcctggcgcgtgtgccgctggcccgctttcggcctgacgggccgccggtgaaacgggccgtgccgtgccgcgggccgtgccgtgccgtgccgctacagtagccgtgccgtgccgtgccggcccgcgggctcggccagcggcccaagcacggcacggctactcgtgccgtgccggcacggcccgttactgtagcaggccgtgccgggccgtgcctgctacaggttcggccgtgccccgggccgcccgtttggcccggcccgtttggccacctctacctagccgccgccgcccttctcccctcctccctctcgtctcaccctctccctctccctctgccgccgccgagcaccgtcgcctccccctcgcgccgtagccatcgtcgtccccatcgccatcgcgccaccgccaccgcctccacccactctgccaccgccgtcgcgtcgccgtttcggagctcctccaccgccgcctcgcgctgtcgccaagcgcagctatctctgccgagcaacggtgaaggcgggcacagccttcatcagcgacgaggtcggacctccgacgaccacgccacaggcggcgcaaagagctaacggcccagatcctggcatcgggagccacgccgctgcgcccgccgatggtggcggcgaggaggaggaggaggccccgtcgccgcgtccgtctccgccggttgctacaccttcctccgatcctcgtctcgccgcggcaggcaccggcgccttgactcctccgcctccgcttccggggcggcgcatgtggtcagggtggaggtggggacgacgaagggggagaggagcttgttcccctgtcgacccggccgtgctcgaggccgggctggtgtggcgcctcctcgcgggggccgggcagctgacccgcggcggcgcggtggcggtcgccgtgnacgctttgctgttcgagcacctgtggtggctgcagcatacgccgacttcgtccctcccctcaccatcgtgggtcatcaattcccctagcagccgacccctcgcgccgcccgactccgtcgacgtcatccctcccctcgccatcgtcggccgtcgcgccgccaccccaccgccgctgccctcccacgcagcaggtccatgccgcaagacgtccactggccacaaccatcgctgccctctcctgcagcagatccacgccaccggccgccgccctcaatcacaatgtgatttggaggtggagaagcttggtgtggtacgagttcattttcaaatccgctaccctcgatgacagcccaggctgcggcttcttcgccaacaccagggtcaaccttgccaacgacatgtgagttagcttcttcctctctacagagatttctggtgatttttgtttaggcggaacaacgactacacgttgatgcggttgctggcacaggcggacgccatcaacttcatcttcttcaccaagatggacattggtgggttgttgtgctgccttcaattatgcagggttgggttggactctatgagggtttcgagggcgtgtgcattgctgaccatggctgcgggtggtcctcacaccaacagcagcctgtgactccatgaagtatcgtgtctggatggatggtgagtgactggctttcttttttaactttctgactagccctaattgccacctaattctatacattcacctgttcatccagcgattccagaatgtggcagtggcagtgcggcttgccttgatttgatttgttgtgctccacgattatcagttcagaatgtcagataagtgaaggttggttggttagctagcaggaagttccctgatcattctgttatttgtcaaaatgtgacaagcatactgatctctttgttttgtagtgtggtgctacctagctgggatgccggtagcgatcgctgtagtggccgcggcgacgattgcttcttccttggatgggagccaccgttcgccaaccttgctgctgccgacgctcgcatatccttccctgtctgtgtgccagaggtaaacggcagtttcttcctgttcttccaccgtttgtgctgatgaatgctgtgcattccctccttgtttgagctcggccatggaggagtcactggtatctctgggctggcggtgctagaacagtacacatggtcgcgttgccgagggagctggacggccttttcagggtgggttcctgcaggacagggcaaagatgatggttttgtcgaggaatttctgtgatgttatgagccattatgttgatctgcttctgtttcccttccaggatttgtgggatgcaagcaacagcagcaacagcgaccgggcacgtctgattccagctatgttcagcatcatgtatgggaaggtggggatcagtgccgacacccccagttctacctccgattctttcttcagtgatagtcttaatagctcttgtgggcagtcattgataggcatggtgtgtacttaactgcttattgaaatgatcaggtttactttccattcctaccggttcatacattgttctgctctaaatattttcttttattcgaggggataggcagatgttcgcacaggcatggggcaatccggtttcctttctattttgtttgtattgccatggtgcacttcgttggattgtggtgttctgtgtagttttctactatatttaggtttaccacggcttgttgtttactggttgtaagaaagcacataagaaatgaaacctgaatatctggattgatgggtgatgggggaatatttatgtttctgcttaattggatgggtttgatttctctgtcaattaatattccgtatacatagagcctcaatttttggtagagggagattgtcaatgctcttgcctcgctcgctatagatttcctttctagataattatagacatgttttgttagtttatatatgtgttggttggctgttcctatttactccgcatgcagaggattgttcaaggtgaaagaaagagcatggagattctctgtgtcgtcctatctatatttggatcctattttatcatgctcagtgtttttttgttgtgcaatacctttggcttttattttcgtgccaaacagttttagaattggttcagacatccttttacttctatggctgcaatgaggttgcggcgtgatggagaatccttcttgatattataggtgcagaggcttatgcgttctttcctttatcaaaaaaagatagagttgttcttaaaaaggcactgcccatgttctcttttatagttctctgtgtatttatcgctatgggaaaaaatgatccgtgataaaaaaaattgttagcttgaacgtagagtgtcaacatgttccttaggtgctggtcactacattttgttatttaaaggtcggtgtgataggattcctttatttctggtagatgttcagttatatatgctattggtagagtgcctgcagaaacatagagtgttccagtttcatctattttgtttccaggtgctcatgcagcattcgatgccgcttttgctcgttcttactggtgtttgcatgttggtttatgtccctgtgtttctgctagcatggtgcattccattgccttgtggtaccctatgtgattttctatttcatttctgctggcatggtgcattccgttggcttgtggtcccctgtgtaattttctattatatttacctttgctgcagcttgccatctactaattgcatggaagcaaacaggagataaaattttaatatctgcgttgatgtgtaaggagtggatgtttatatgcgtgtttaattggatgggttggttccactgccggttaaggttttatatagataaggcctcaattgttggtagaggaaggttatcagtgtctatggttcacttgttatgcatttcctttgtggatgattatagacagattttgttaatctatatatatatgttgattggctgtgcctttttattccgcatgcagagtgttgttcaaggtaaaaagaaagaaagtagaaattgtctatgtcgtcccatctgcttttggattttattttatggtgcccgatgttttttattgtgcagtgcctctggcttttattgttgcgccagacatttttagaattaaccgagacatcctttcctttgtttcctgtatagtttcaaatcaaatcaaacagacatgtgcatcaatcatccaaggtatcaatatcagctatcagcctcacaccagagcaattactatttctgccacttccactgaaggttatcctttatcatttctcatacaactattatttttgtatatctagcccatcttatgtgcttgtttcttcatctagagatacacatatataaatgactgtttattccaaccatccaccacatgcagatacatcagacacttcttccaacactaaaactgatctatcatctgataccccttccaacaccaccatgacaggtaaatctaatccttgttttatgtaaattaattaaatttgttcacacagtataatgaagatcaaataatctcgcatgataaaactacatggaaaacaatcatgccaagcttcgtataatgttgtcagtacattttactcacactgaccttcttaaaaaaaactccgccagctgacacctaacatctattttatacttatgcaattttcacttcacttacagtcattacaccctatctagcagcttgaatactcctcagctagatctcttaaaactccgtcctaagttttttagatgctaatgtaccagttgcagcctgcaaaaactctcttcatcagcaacttttaaatgttcattcagttctttcgcaaacaatgcaaatactaataggagtattttcatacaggcagcactaagcgtgcgtttaacgagctgtgtttctgtgcaaagaatgttgatccaacagctgacttgaaaaagtatatcgaagatcttgagtgcctagaccgttcaagcaaattctatgctgttgctgtgaataacacattcatgaagcaggatagagttgtaagttcctacatctgctactcatttatttatatacaccatacatggctatctatcttaccaattatgagtcaaggctgatatacaatgccaattacagtactgtactaaagaattttctcaagactacttaaagccattaatggaaggcaaggaaaccatcagcattggagttcaaattgcaggtggtgtttcaaagaatatgatcctccatatgtcaacggatggtcgatgcaacctgaagaaaggatgggcaaaatttgcaacccacaatcacatatacctacaatcactatgcaccttccatttctacaaaacaactcgcctggaagccaccttcgatgttctataaagaacatagcaatactcatggctatgttgcagccatccttttgctgccatcaaccaggttgatcactgtcaagataacatgtattagttctaggccttacatggtaatcatggaacctcctaatatgaagaaccatctatatatgtacttactgctattagagacctctaaatatcaagatgcctgtgtgcaatttgtactgtggtttgcttctatgtaagacacttcctcgtactttcttgaccctggttgcgtccaggcggcatttcctcgtactgtcattggcgcgcccctagctctagtgtgatagtagggtggactttctgtgcccaccggcactcgcttgcacagccacaagctataccgacaaaaacttcagggaagcagctagaagtcaaaagttctcttggagtcgagagatccttcgactgttactgatcatcttcacttttacttttcgcttcaggctgtgtttagatttaaacttttttcttcaaactttcaacttttttatcacgtcaaatgtttagacacatgcatagagctttaaatgtggacgaaaaaaccaattacacagtttgcatgtaaatcgcgagacgaatcttttgagcctaattatgtcatgttttaataatgtggtgctatagtaaacatttgctaatgacggattaattaggcttaatagattcgtctcacatgtagtttacaggtggaatctataatttgttttgttattattttatatttaatactttaaatatgtgtccgtatacttaaaaaaatttaacacacaaactaaacacagaaacagaacctaatctggagagatgcctgtttgcagatgtcactctggtacgagtgcgacacgcagtcagtccagtacacataagagagcaagaacaggtgtccaccatgtgattgatcagtgcgccccagtacaccaaacaaaaacaatgatcatctgatgaaaatgatgttatttttcgttgggctggaacacaatatttttacttgagcgatcgatctatggaagttggaatatcgttctcacagggcagccaaatggcagcacgctctgagaattttcacaactcgatcgatcacagcacagccgaacttacaataggaattgaagctagctagagaggagaggaaaaaaataagaatgtgccaacatccatgcacgatcatgcctcaatttctaccctagcaagcaatgcaacaaatcgcaatgcaagcgcgcctgcctcatctcatctgatggaggtggcagaggcggaggcgaggacgccgtggaaggtggcctcatcgcagggcagggtgatacccatgtcgtggtcgaagccaaactcctcctcggccttcctgagaagctcctggaactctggcgccgcaaggcacgccaccggcacgatgtagcgtctccggctgatgccgacgtacacggcgaagtggcccctcggcacgtccccaggcagcccatcgtcgtcgccgccggcgccctttatcccgaggctggacgagcacctccgcagcatctgcttgagctgccccggcttcttggaccccgtgatcgccatatggcgccggtcgatgtccaccggacgtccggacggttagtgcgtgcagcagtagtagtggtacgtcgagcagcgagacatcgacctgccacctgcggaatagcgtggtatttaagggggaagggtgggagacacgcgggtgcatgtgggcgtgggctcgctcgggcacacggcggcagcggcacggccgggtgggtgttagtagtagaaggctggtagctagtgggtcgcgcgcgaggtggaatgtacggtcctaccacgctactgcctggcgccgatcgcgcgccgcggatatggctgatttctctactccggtttcgcggcctctgggagcgtggcggggtagggaccgtgtaccgggcctaccggcacgggtgcgcagggcggtatgtggcgcatgtggacgttgtcccggcacctgctacgccagaagccgttgctgcgtactgtactaacccggttgctgcttctctggagagagggataacaagggagattttctgtcttgcgcggtcaattgattgaatgattgattttgattcgggcaggacggtccttttttgggcgggtttatcaggccacagaaggctagctagtactagctgtctatactgattgcaggatttccgaaacaccatgttctctacactgccaatctgcgatgttcaatgaatctactcccaaattgcatctgggaatgtactgcttttcgggggttgctggctggtgatcagtagggaccggaaatggtaggtgaggattgtacgtaacactgtacgactgtttgtactcctcgcaagttgcagccaatgctcccaaaaaacatttctttatgccatatttcaaatacagtaaattaatcacttttgggctgtcccttttaaagaaactaggtgatgcgggaattagtaaacaatgctcaatttgtttttcaagagaaaaaaaataataaaacatcagggtttatcaatgcttatcatgaaacaaacaaatgataccccgtattaatgtgaaacatattgataagtatatcttaaatattgtaaaaatgatagatttgttaaaatattgtgcaaatgatgtgaggggtgatgattagatatacttacatgttgatttataaaattaaataaattgtagatgatgttgtatgcttgataagaatatgtaattattactagtgggtgataatgtgatatggttgcatgttgagctttagacttagtgggatataactttatagaaagtacatatgaaagaatacatagataggcacgcttctcaaactactaaacgatataattttaataaaaactttatatacatatgaatttattaaaaatctgtttaaaatataatttcaactttataataattaattcattctatggatctgtttgggggagcttctagcagctgcagcttctcctagaatctccagtagccagaagctccctccaacagttcagctttttacccagattctgagaatcaatctgtagtcgtagaatctagaaaatgaactagaaaccaaaagctgggttttctagcttctctagattctcaccagctagcttctcagcagctgcttttcataatgttaagctcccccaaacaggccctattccatttagaagccgcgtgcatatagatactatagtatccatcctcccttaacaatacaatcactggtggagaagaagtttttactcccggttcgtaacccccctttagtcccagttttccaatcgagactacaaatccggaactaaagatcgctatcgttagtcctgggtgaaataaccgggactaaaaatctatctttaggactaaagatattgcctttagttccggtactaaagatagagccaggctgatcccggctgctcctttattctattcttttcttcattgtttttaatatattgatttcactccatccccatctccaaaatcccaaatcaattatcacctccaaatcctcaaatcgatcatctccaaatacatcacaaaatcttaaaaaaaattacatcacaacttctaataaattcatcacatattcacatcacacacaaatcaaatacatctcagatccggatcacaaattctcaaaaaaaaaaaacaacaaaacaagccgccatcttccgtctgccgcccagccgctgccttccgccttccgccggccagcgccgcgcgaggccggcgccgcgcctgcagaccggggaggaggggggagggggaggagaaggagcctcgtgcggcggcggcgccgcctgcagatcggggaggaggggggagggggaggagaatgagaggagggagaggaggaggggatcctccgcgtgtaagatagcgaggagaaggggatcggaggagaggagaagaggagaaggggaggaggagatatgtatcttgatcccgcacgcctcgatctctgtgcgcatgccgatctttttttccggttgatgttactaaccaggactaaagattgattaccaaccgagactaaagatcaaaaagtacctataacctttttcaaccgagacttaagataatctttagtcccggttttattgtaaccgggattattatggaatctggtcgaccgaccaaagatggtttctccgccaatgaattataccatgttcagacacgaatattctacaccgctcgattattgagtgtaccgatgataatgagcaccatctttgctcttcaacttatcaaacgtgaccatattataaatttgattttttttcatgtttttaacattgtttaatttaaatatataaaagtttgaaaagaaattcattttttcccttaagctatttcaccagagcactcgacctctaaacaatttttgttcttcttttacacctcaaactattggagatggtcctacttaatccctaactgcatttctctttttcccttcctatatattacttcttctgtttcaggttataagactttgtagcattgcacatatttatatacatgttaataaatctaggcgcgcgcgcacatatatatatatatatatatatatgtatatatatatatatatatatatatatagattctttaacatatatatgaatgtgggcaatggttgaaagtcttataacctgaaacggaggtagtagtaagtaatattctcctataagtctcgacactatttataattttttttatcatcattgttcgcatggtttggaagctccaaaagactgatctaaaaatcaattgctctacaaaactacagcataaaaatatatagcttacatagaaagttttgaaaagaaaaatattattatggataaagtaaaccattttcaacagtttagagtaaaatgagcaaataaatagtataagggttaaatgatcccatgaaataattcgactgaataaaaaaagttttttttttctaaagggacataaattaattttttgctactaagcattgctgcctaataattaatgacagataaaatatcgtaaattgatcgatttaattgcatcttttagataatggaaagactcccggcctttgcttcagagaagctacaaccattccctaaaaaaaaaaagaacctacaaccacttattacatagttcactcaataaagagcacataaaaactaggaaatgatgaaacaataactaataactcgaacatcgtttattcaagtccatttggaaatatacacccaaagttagcaaatatatacatgaccattgtttctaggtttcagcacgcaatatatattagtttcttgtcctcgtcacatctttgaagttgtgcccagaaccgaaatcggtacgttgcccttaacaggacctgcagataagatttcattaatgatttgttaaaaatcatatcatttttacaaaacaaaaaacccaacatatagcagatgcccctactagaataagcttctttgtttttgagtcaatacctttaagccaatttccatcaatatgagaagtactaactccatcccaaaataagtttatttttacacataccaataaaaaacaaaaaaaaaacagaataacccaactttattaaatcccaatgcaactatttctcactttatcaaatcccaatacaattattctctactttcacaaactccaatgcaatgattattctaaaaacaaacttattttgggacaaatagaagaagcttaaaatgaacctactacgggatagaggaagtaatttttagaggttccaagccacaagaaatatgtattgatctccaaagaaatttagcaaaatggtactaaaaactgataaatagtttcacttttaataaaaaaaaagttatattgctattccaattccttcatggtaaattatctttagttaatattacttctttaaatggtaatacacaaaaatgtttattttaagaagcattttaatttctataaaaatatgtttctcttaatatggtcattatttattaaagccaagtgcatagaacaaacccaaaattaacaaatttgatgaagattccatctaaatagtcaatatcatcattcaattgaatatgcacaattaatattggtcactaaatcatgccaattttccaggttctggcctaccaataatgcacttttaaagaaaccatttagtggaatagaagtcatgaccgttacaactgaaacatttctctttgagcaatattgtagagaattggatatctatccataaagtagaggaaatatttcctaaccattatccttccaatatcttacttgcttcccatcatttactacccatgatcctaatttttttaataaaattcttgacctttatgaggcttgaccaaaaatgagaatcctcttgttttctcttaacttgggtgactgtattgttttataaatatttttctttaatatgtccggccaaatatctttctaattaatcagtttaaaaacaatttgcttaacatatatttattatgatttctattttatgcacccctagtctatcctggttctttgattgagcaataatattccatcttgctaatctatatttcttttttatcatctcctaaaaaatacgatctataataatcactttaattgcatataaaatatgattgtatcaattatacactaccagcgacgtacgtcttactttctactagcttgtggtccactctagtagtacgtatttatttaatttaagttcgattgctgttcaataaaggtcccgcattatctaatagttttaatttagacaaattttacggtacattgtactgcaaatatatactaccagtacattttatctaacggtgtaaattaatctgatttttctctaaattattctgcaatataaattaaatagggtatatttgtcttttcatctatttgcgtggagggtaattttgtaaattcgcatttcctcacttagtcagatccggtcgataggcgcccagtcaaatccgctgctgggggaccgtgccataggcgcacagctgcggcagctcgcagcggcaagggcagccgagcggcggcaggtggaagtagcagggcggcatgcggtagcagctgggcagggaagccccgcggcggcgatagcctataagtaatgcaaaaatcacaaattaatatttctactagacaaggactcttgtccgaccatgacgaccataaaaattcacaaataaaccaattcacaagtgtttgtagagaattacttcgagttgaactaattagagataggtttaattattgcttgtgtatccattgtcccgggtgaaataaccgggagtaaaaatctatctttaggactaaagatattgcctttagttccgggactaaagatagagccaggctgatcccgactgctcctttattctattcttttcttcattgtttttaatatattgatttcactccatccccatctccaaaatcccaaatcaattatcacctccaaatcctcaaatcgatcatctccaaatacatcacaaaatcttaaaaaaaattacatcacaacttctaataaattcatcacatatccacatcacacacaaatcaaatacatctcagatccggatcacaaattctcaaaaaaaaaaaaacaaaacaagccgccatcttccgcctgccgcccagccgccgccttccgccttccgcctgcggccgccagccgcccgggcgcgaggccggcgccgcgcctgcagaccggggaggaggggggagggggaggagaaggagcctcgcgcggcaccgccgccgcctgcagatcggggaggaggggggagggggaggagaatgagaggaggaagaggaggaggggatcctccgcgtgtaagatagcgaggagaaggggatcggaggagatgagaagaggaggaggggaggaggagatatgtatctcgatcccgcatgcctcgatctctccgcgcatgccgatcttttttcccggttggtgttactaaccgggactaaagattgattaccaaccgagactaaagatcaaaaagtacctataacctttttcaaccgggacttaagataatctttagtcccggttttattgtaaccgggattattatggaatttgatcgaccgaccaaagatggtttctccaccaatgaattataccacgttcagacacgaatattctacaccgctcgattattgagtgtaccgatgataatgagcaccatctttgctcttcaacttatcaaacatgaccatattataaatttgatttccggcactgatgatagtctgctagttacgaactgacactgatgttattttctgtagtagtgattattgaggaaaacacagaccttttcgaacgctagaatactgttctcctcgctagaatctatacgcacgaatgactagaataaaaccatgaaaaatagatggaagaatggcggaatctattatattattaaaacagcttgtgttgacaacgagtcacagctctacaccttaaacacgttgtgtgcaactcgtggtggcaccctaagacagaccactgtacggagtgcgtagatgtcgccgaacgaacacccgggagaggccccgtcagggtggacgttacaccggtttattttcgactcggcaggccagttagaacgtcctctaactctgtagagacgagagacaacaagcaattttgagattggaggagaatacatttgggattggtagtaagaaggagggtgatatagaatatagagggtttggatactaaatagatttggacaattgattggttgtttattcaatcgatcttagcccacttatattaataggaggggcgggattccttcccatggttttttccacgtccaattaggtgtagaaaccaattaagactctaaaatcttaggctttagcaagaaaatccgaggaccgacaaatcagacttagaatcggactccgttggtttgaccggccccctaccgtctatctgactggccagatggctatggtcagactgacctcacgtgacaagtctttgcatgtctgggttattttcaaatttaatcatggttttctattattagtgtaggagcaaaatttggattaacgccttgaaaggaagcaccatgttcattacggaggctaaaaactagtgagaaaagaagacttcgactaggaatacatttagaagtaattgaaattcgaaataaaaaataaaaataaataaaaagaagagttcatgtaaaactcaactaaagagattggactaatccaatgtttaggggtcggagaaggagcgatggcggagagggcgattgggcggcgactcctctcgcaggagagttcatcggcggcgagggtctctccggcgacctcggcggcgctcagagacggaggtaaggttcaaggggcgggatccggaagtttgaaagggcatatcgcgacaaaattcctcgcgggaggggtttcgcgctgcttttcggaagtttctggggaagggcccaaggagctcatccatggcggagggagattgggccatctagcccatccctatagccggggttttggccctagactttcacgtcagctggcacatctggatcggcacctgaagcatctgtggggatcgaatcctcgagagctagggtttagaggggggtggagaaaagaggagttgagggaggtgaaggcggcggcggaggagtggccgaggctaggaattggtggcggggaatcgaggtggacaggtacgatcaagggagatacgcgcagatttgagaaggttgttcgaggtcggattccagcaatggcgcaacaaggagggggttggagagggcgcttccaaccaaggccagcgttccatgggaggcgaccgctaggagtggagcatcatgggaggcaaggccaggagggagttcgagcagttcatccactaccagggcgcgctgaagaaaagagggatgagcaagtctcggctgtggcaaccaaagaggggagtttagtgcagcagatcaagccgatgcagatgcaggagaagaccgaagtgggaattactgtctcaaacctcaagcaggatgaggcgaaagctgaggttgcagcttctcgtcctcctccccaagcaaacccaagacatggtatgaatccgaactctcacagaatcttttgtgtgagatgcaaaggtgttggtcacttggttaaggattgtcatgttgctgtgttttgtgtcaattgtgctaagcctactcacaagactaaggattgtctatatgataagcaacccagacctattgccaagttggtgagatatggtgctccagggcttggatgtatattgattcagaacactagatctgagccagcaaaggaacacattaatcctttggcaatgatttcaatcattagtggagggggattaactgtggcgcaattggaacaaggttttactcagcagttcaagtggaattggatatggaaagcaaaagaaattcctaatgggacctttcaaatgaggtttcccaataggatgaggtttgatgagctgtcaaactttgatcactttactgtcaaggggactaatgtgcaggttaatgtcaaagaatggacccaagaacctgaagctgtagggaagatgcatacagtttgggcaagagtgacaggtattccggatgaaatgaagacttaccctgccccttttgaggttggttctaacttgggactagtgatggaagtagacatgattactttcagggcaaaaggtctcatcagaatcaaggtgggtatgatggatttggaagcccttcctctaaaactaattctgactacaccaaaagggctgctattccaggctcagtacactttggaggaagtggtagagcaagggtggtttagagagcaagtctttgaagaggataaggaagctgtctatactccaaccaaggtgggatagagggaggaaaaacaacatgtcaatgaggggggagaacagggaccaagtagtaacaagggtgtgtatagggctgggaagggggatgaagttgtgctagtactggaccctggattgacaactgaatctgatgtggctaagtgtgttcagttccatagggacagagatttggccatgaagttgcaagatgaggagatggaaaaacaatctgctaggattttggtccaagaaggaaatgtgattctatctaaaagcaaaggggctgggaaagggtctgagatgtctgaaattcccattgtagaagagacacgtgctggagatggggctttatctagtggtgggacaggaactttaagctgtttggaggtgatggctgagactgaattgggccctaggggagaagaaggagaaagagttaacttgggagacagtgaggatttcctagattcccaagaatctgaaggaaactttgccaagcaagttggtgtggttctgactgaagagggcatcgacagtcaagaagaagacacaaggagaagcaagagactgagagataaagaagacaaaaaaccacaagacatggcaatggaaaggaaagaggctcagaatgcctttattaacaaaggtcaggcttcaatcccttctattattgatgaaccaaatagctctctcatgaacattgctaatttgttaggagttagtcttgggtgtgccttggttgatgttgattctaatcttcatctaataaaggatatggagaatgctagagtcaatttgtttatgaaaaatcaagaagcaattttagacaaaactcaagagagcaaatcaggagattttcctgaactctctggcttgggagaattatactctttagaagatgatgtggactctgaacttgatgagatcgaaaatttgattaaaaacatacacacttccagtgggaaagggaaaagaatgaagggaaaccttgacactgttaaggtaacacccatattaggtaagagaaaagggaaaaataattctaagaaaaatgattggacttttttggaatattaggggaatggggagtcctgaaaaaataggtcacttgcaagacctaatcaaggatcatcatttagattttattggcatcattgaaactgttaagcaggaattttctgctactatgttgggtagtcttggaggtggtaggaatttggtttggaggtggatccctgctaatgggagatcaggtgggattcttgttgggatagattctgataggcatgatattttagatactagctttgggaactatcatgcgagattgaagttacaaaaaatagatgataagaggtgttgggatcttgtggtagtatatggggcagctcaatacgcacaaaagaacaactttttggctgagctagccaatgttttatattatcagaacagacccttggttgtaggtgaggatttcaatattctgagaaaggaaagtgaaaagaataaacctaggggatacaacaaatggagtttcttatttaatgccatcattgagcaatccaatctaagagaggttggtatggggaatagacagtatacatggtttaacaaccagattcagtccactctagaaaagtagataggatttttatcaacaatgattgggggggtgcttttcctttaaccatggctagaattttagtgaagactttctctgatcatagccctgttctgatgagaactgagggcatttgttaataaaaaacatttgttcagatttgagttaggttagttccttagggaagacttggggagtgtgataattgatgtttggaataaacagtattctggcaatagtattgagagatggcagaaaaaactcagggcgcttaggaaaaaaactcaatgggtggaacaggaattgggagggtttatataggagggaaaaagaaaacattctaaaataaattgatgccattgacatcaagattgaagcacttggtatgacccataagtatagggaagatagaaaggagttagaacagaaactagcctatgttataagggaggaaaaatggaagtggtttcaaaggagtaaggttagagaaattctagagggggatagaaatacaaaatactaccatgcaaaagctaatgggagaagaagaaattgtcaaattcattctcttagtcaagaggaaggagaaattgaggggcaaagtaatttgctgtgttatatcactcatttctataaaaagttgtttggtcattcagttgaaaactctatttctattgaaatggaagggatctgccaagttactgaagaggataagaggagactcactgagcccttctctatggaggaaatcaaaagagtggtctttgaactgaaacaacacaggcccctggccctgatgggatacctggggaattctacaaaaaattctgggatttaattaaaaatgatttgtttgaactccttagtgatttccaaaagggtttgttaaatgtggaaaggctcaattatggcatcatcacccttgttcctaaaacaaaagatgctgcccaaattcaaaaatttagaccaatttgcattttgaatgttagcttcaaaattataacagaggttctgatgagcagaatttatcatgtgatgtgttatattatctcaaaaaatcaatctgctttccttaagaacagatatattttagaaggggttgtcattttgcatgaaattttgaattctcttcatcataaaaagcaaagtggcattctcttcaaagtcgatttggaaaaagcttatgacaaagtgaattgggtttttgtgcatagaatgctagtctctaaaggtttccctgatcaatggtgtgactggattatgaaagtcattaagggagggaaggtggctgttaaagttaatgatgagataggtcctcttttccaaactcacaaaggtctgaggcagggagaccctttgtccccattgctgttcaatttggcagctgaagcacttactttactggtgcagagggctgaggagcactctcttctggagggtctaggtaataatgaagaaaataagatctctattttacaatatgctgatgacaccatcttcttgctccctgacaacttagaatatgctaggaacttgaaatttattctttgtctgtttgaacagctttcagacctcaaaatcaattttcataaaagtgaggtcttttgtataggagaggccagagatagaaaagtgttgttcagccagcttttcacttgtaacataggtgatttgcctatgaggtatttgggggttcctattgatcaaaaaaggattctcaataaagaccggaaaactgctgagaatacaatggaaagtaaactgagctgctggcagggcagactccagtcaattggggggagattgattctcattaattccagtctgagttatgttcctttatatatgatatctttctatagacttcccactggtgtgaaggaaaggatggatttctttagaaggagattgctctggcaagaagatcaggggattaggaaatatcatcttgtacagtggcctgtgatttgtactcctagagatcaggagggtttgggtgttctagatttggatcttatgaataaagctcttttaggaaaatggatttggaaacttgagaatgaggacgggtggtggcaggaggtgttgagggataaatacctgaagaagaaaacaatgtctatacagaaacctaaacctggtgattcccacttttggcaaggtttgatggaagtaaaggagagattctataatttttgcacaaagaaagtgggggatggaaggtccattatgttttgggaagatagttggctcgggggcagacctctggctcacttattcc

SEQ ID NO: 21583 - DNA, 607 bp, Oryza sativa
cccttgcagtggcagacatgttgacttcatcggctgcccgtacgtcctcacggagcgtgtgggagggcatcaccgggacgcacgacttcgaggtggtcggctactcgttgatggacggcttcggcgccggaaggcacgtctgctccggcgacttcagcgtcgccggccatgactggtatgtgcgttctaccccgatggcctcgaccaggattccgccggctacgcgtcggcctgcctcgcctaccgcggcaaggagaggctcgtgagagccaagtacagcctgagcttggtggccagggacggcagggcgtcgccgctcgccggcgacacgctgcggtcgcactacttcacgccgacgagccgcagcgccgacgtcctcaagttcgtcgagaaatccaacctgtcgtcgtcgccgtcgtcgtcgtcgtactcgtgcctcgacgacgacaccctgaccatacggtgcgtggtcaccgtggtcaccggcccgcgcgtggtgagcgtcgcgccggccaaggagagggcccccgcgtcacggtgccgccgccgagccttcacgagcacctggcgcggatgctgcgcgacgggcggggctcggacgtggcgt

SEQ ID NO: 21584 - DNA, 8880 bp, Oryza sativa
caggaccgaagcacatcccaaggttttacatggagcacatgcgaaagttttcagacatgcatctccgatcggcaaatccaaataatcaacgtagaaaggacttaaatttcggccataacagaagtgcatatgcacacaatgcggacgtactctgctgagttttcctaccaatgagctgctgagatggtcaatgtcactctcatcggctcacagcctgacacacataccagaagggactgcagcaacgatcacttcccttgtcgttgctagagaacggaagggagttgtacaggactggaatgcgatcagctaacatgaactggaccatactcagatcgacgcagttcaccttgaattccccatgaatcccattcttaacttaagggcatgctatcacttctcgtcgtcgaaccaccgccggtacgctgatttctcgtagaaatgaccagggttcgaattttgagtattgagcgatcagcgtgacttggaatattgagtgatcgagtgtgacttggaacttagtgctattcattcaattgtattacaatgtgttgaatagtttcatattagttgtggaagagtaagagagttaatatatagaacaattttacggttcttgaggaggtaccactttttctattgtaaatttggtacttcttggtacctaagtactatgaggtaccaaatcttacactaaatttttggtacctcatagtacctcattaaggactataaaatgtaaaatcaaaggtgtttttgattattattctgtgatgaacaattggcattggagattattggttttgatatttggaatttatttacgaagtggttttggagatgattgaatttacaggtgaattacaggtgctgtcattttatgtgaccggtcagaccgggaattgtgtgctggtcagaccggcggtatgcgcgcggtcagaccggccagcccgcggtctgaccggctgactctgtgtcggtttcggtttcgggttgtttgtttggatatccgtgattatttcatgattatggcttctagatggatactatacatatgtaatactgttgtttgctactaatgagtcaagttggagatagcttgttctcggaatatggtttctttgtttatttcatgtgtaggtgactcgatgcctcgggagagtatttgcggtgatggaccgggagtcggcttggggataagacgacgttcgtggtggtcagagatcatgcgggatacttaggctagagttgatgcacgtggttgatggagattccatatggcatacgatggaggtattgtgtgcgtatgggatgcggagttaaatttggaaggagtccaactttggtacgattggttatgtaaagtttgtttcttgtactagagggtttcctaaggtatttagaactctaagtatgagtttggttcgtggctttaggctgcctaccttgggtataaatagtgggggagcgtgaggcttcccggtatcgcttttgagagcaattgagttgagttttgagttagggtttcgagtttagttgaaatttttgtaaggagtgctgttggtgcactttgtaaacacagatagaatcaataaagtcgtcatccactttaagagttcttcgatttgtgtttcactgagtttcggcggtccaaccggcgatataccgacggcaagacggcggtcagaccggcgggagcaaggcggtcagactggcggaggtagcaggtgcggcaggcgacttcggcggtcagaccggttgatctataccggtcagactggcggcatccgagcggtcagaccggcggcatccgagcggtcagaccggcatatcaatctcggtcagaccgacttccgtcgaattcgagagtaacttttatttccgctaaaagttttcggtttttgggtataccaaccattcacccccctctggttggcttagttattgtgattcgatcctacataaaattgctctaatatataagtggggggacctctcatctcattggctagtttttaggatgagaaaaaccttttacgatccttcaattggtatcagagactggctagttcaatatctctggtccaagggacacagtatgtgaaggcccgatggaccgtgggtgcctgcgagatccgtatacctaaggaactgttagtgtacggtgaacagctgagggacaccaatgtgtctcacctcattggctagcttttagggtggaaaaatctctttacgatcttacacaatgtagtgttcatcgttgatgtgaagtgctgagaacttaagattgcttgataatatggaatgtgtctctttggtgattgtcagtttctcgttgacaaatcacaagtgcaactcattatctagtatatgtttcaactgtacgcatttttcatttataggttcaacaagcaacatataaaacgacttggttagacattttttggagggttaattaaaagggagatgaattgcatctcggcctgtgccaaagttcttctaattaaacaaatagaataaagtcacacgacactaaccccatatagagtaaattaggccccatggggattaagaagaaaaacgaattagctaggcaaagtatgcacctatatacttcctcctgtgcttgggagttatggtgtctattgattgcttgccatctaacggtctgtgataaaaggtactccctccatccctaaatgtttaacaccgttgacttttttaaacatgtttaaccgttcgtcttattttaaaaaaattaagtaattattaattgtttttatatcatttgattcactgttaaatatatttttgtgtatacatatagttttacatattttacaaaagtttttgaataagacaaatggtcaaacatatttaaaaaagtcaacgacgtcaaacatttagggaaggaagaagtatgtctcagaaggtattaaaaaagtgagttaggtattaactcgatgtttaggtggaaggttagattagtaactttactttcatacatattagaggtggggttctaattaatcagtaaaagaattaggatcgataagccctgcttgctgataagaacatctttcttcagcaagtgccgcacggacaaaacaccaccaccactgatgatccacaatgaccaagaattttgtatacatacaaagattcatcaaactagttgatcgagccatatttgtctttgtgtatggacgaaagaggattatatgtgtttctttggactctaaatttagatgagaacctgaagaattaattagggaaattggattttggacaagtgttaagatgtgaacgacagaatcgaagataagtaacaaaccggatgcaaaaaaagagagagactgttacatgtaaaaggaattaattatcgacttttataatatattgttttctattcctaagttgtgcttaactgatcaatggtgggtgattaagtagtgagggaggtacctccatctggtacatctcaagcaccttaaaaggtttcggccgtcgttttggccggaagtggacaagcgttgggcatgtggactcggtcgatcgaggtgagactcacaatccatgacaggtagcgacagcaccaaccacttcctagcctatgcacccaaaatgggatgggggcagtgtagcacaacctttgactatacaaccacattgtcatcaaatacagtgagccgtgctgctacaattggatcctattcacatcacggaagttcttctcgaattccccatgcatcccattctcagtgtatatctagtatttggtttgtcgaaccagcaacacatgttctaactctccttatcaccgatttctagtagtcagtggaagagatggtcaaggtttactgattttggagtgcgggtttgtctagagaagtagcggttatcctatttataggcactaggcacttggcgaggtaaacgtagagtgatctttactccctccagttttataattcttgacatattgaacaatgacacgatctttaaaatatattttgactatatttttattataatatataatacaataaaaatatttttacttattgtagcactttgtaaaataaatcgatatattgttctagcacttgacctcaaccttatttaaaacgtcaagaattatgaaaccgaagggaatagttattagcagttcaacactacactaccataccatcttattggagaaaagaaagtgtaacattagactccggatatttagtaacacgcatttgactcgtcacaatactgatgtacccaacaaagtataactatttcataacaacctaataggaggtggaaaaattttcatacatcctttgcccaaaattggatgctaccgtcctagcagtataagtggttaaaaaaaaagcttggctcaaaatccatgacccaagcatacataacacattataagtggtcaagaaatgagtttgactcaaaatccattgtccaaatatatactatacatttcttagcgaacaaatgttccatgtgaaaatgatataattggagacaagattacatcgtctccgccccacgaaagctcaacggactcactcttgtatggttggcaaatggcaaactaatgtagtggccattaaggcccactgaatctgcatcagggtttacaaaaccacgcgattatcacgtgtggtaaccttctcagttgttaaaactgtggtaatcctcgaggtaaccactgtttttatgataaccgcgcgggtaccgtgataaccgctttactatggggtgatggtaacctcacctaaaacgctttggtgaaccctgatctggatcgccacaattgcagtgatccaaactggcctattgtgaaatggatcacagaattagtttgggcccacttgcccatagaagtaattgccatttgaagatagttaaactagtcattccatttttatatataaaaaaaatagtcagatctgatgctcgccttgaggaagccgagattgacggggagttgccggagctccagcgagtggtgtcaccaccggcggattttcttcgccgctgtatctctagaacatcattttctatccattatcgttgaccgtctcgacgctgttgcgcatcatttgcatcggagggctactgtctattgtggctcccaatcgcgttctaaattttggaaactagatgtccctggtacgaacccatttgttccgatgtgtctttacatatgaagatagtaacagagtcagtgcttgtataccatttgaggtttccacctattttttaaagatatatacctcttcatacttaagatctctttttataaacggagttaccaaaacaaatgttaaaggttagaataagattgaaaactcatttttttaaatatcctttaatttttatttcatttttaaagcacaagtatatatgtcggtcaggaggtatatacctcataactaacaatatgtggcatatatacctctatgtactttccaagaataaaaaaagcttcatcattactaatcataaatttatcttctaatcagtttagtcaatttatttttttatcactaaaataataaggagatatatatacctcttcaaagatggaagaataccttatatcagtttccaacaagtttcgaatttttatttacaagtgcataatcgaagcacatcccaattaagatattcactgtcgaaatgtttttttttatcctcacaacaaatctgaggatcaacccaaatttcgagaggatcacatatgtgtgtcttgcgacgatgatttgctgaacacgatctttttaagcgccggcgtggtgccctgatgccgcgccaccacatgcacggctgcggatgcgggtttgcctatgcccaattctttttctgatcaactccaaacttcaactttttcgttttttcgttagcatacttttcaaactgttaaacaatatatttttgacaaaattattatggaaatagatgcacaatggagacacgaattttacgtggaaaatccttgcggaaaaaaaccacgggcgccgaccggcaatgatcactatagaggagttgattataaacatagggaaatcacaatgggaacgtcaccccttcccgtatgacttacaagagtatatataggggataaaagaaaggcacctaatagggctcctactagaaaactaatccgaatatattgtggacccaaaattcggatcacatatttaacaatctccaccttgagatgaatttcctcttgtagcataaaaatatcaatcaccaaaaatacctcatgtaggtaaaatcaccgcgcgccaaatagtctctaggactatactgtgcacccaccaagcttgagcaaagctcaaacttagtagtaggaactggctttgtcatcatatcagctgggttatcatgagtacttatcttgcatactttgacatcaccttcagcaatcacacctcgaataaagtgatatctcacatcaatgtgctttgttctctcatggaacatctgatcctttgtaaagcatattgcactttgactatcacaaaatatattaatgcaagacgtaactccacaaagctcagtgtacaaacctctaagccaaatagcttctttacaagcttcagaaatagccatatactctacttcagtagtagataaggcaacagttgcttgcaaacttgccttccaactagcagcacatcgtccaatagtgaatacataacctgtgagcgatcttctcctatccagatctccagcaaaatctgaatccacataaccagcaagtccatctctagatctcccaaactgcaaacaagcgctagatgtaccacgtaggtatttgaaaatccattgaacaactttccaatgctctttgccaggattagccatgtatctactgacaacactcaatgcatgtgataagtcaagacgagaacataccatagcatacataagtgaaccaactacacttaaataaggaactctagacatgtactcaatatcataatctgactgtggacataaatctgaagataatctgaaatgtgcagctaaaggagtactcactggttttgcatcatgcatattgaaacgacgaagaactttttcaatataacctttctgactaagatataacttgccagaatgtctttctctagtaatttccataccgagaattttctttgctgcacccaaatccttcatctcaaattcactactcaattgtgccttcaacttttctatctctgatttatcttttgcagcaatcaacatatcatcgacataaagaagcaaatatatagatgaaccatcaacaactttaagataaacacagctatcataattggatcttctaaacttctgagaaaacatgaaagagtcaaatctcttataccactgtctaggtgactgctttaacccataaagagatttctttaacctatatactaggttctcttttccaggaacaacaaaaccttcaggttgctccatataaatgtcctcttctaactccccatgtaaaaatgcagtcttaacatccatttgctctagttcataatcatgcactgcaacaatactgagtaaagtgcgaattgaactatgcttcaaaacaggggaaaagacatcattgaaatcaatacctggaatctggctataacctttagcaactaaccttgctttgtaccttgcctcatcacttggagacatacctttctttcttttgaagatccacttacaacggataggtttcttctcctttggcaacttcaccaattcccaagtatgattcttttcaagtgactccatctcatcatgcatagcagttatccatctattgcaaccatcagaaacaatagcctcagaatatgtagaaggttcggcattaccttcaatttcttctgccacgctcaaagcataagcaactatgttcgcttcttcaatatatcttcgaggaggtttaatatttcttttgggcttatcttttgcaatagaacgttttggagactgctgaacagcagaagaatctgaatcttcaataacagatgcatcttggttaatagcaacatcttctttttctggtgcatgccctgaactgatcaagtgctccacctgcacacttgctttctcctgactctcaacaggaacattagtagaaggtttgtcatgtaacataactgattcatggaagacaacatttctactaatcacaacctttttggttttaggacaccataacttatagtctttcacaccagacggataaccaagaaaaatgcacttaatagctctaggctccaatttaccattatcaacatgagcataagcagtacaaccaaatactcttaagtctgaataatttgctggggaaccagaccatacctcaattggagtcttcttatcaatggtatatctgggtgatcgattgataagataacaagcagtggaaacagcttccgcccaaaactatttaggcaaaccttcattagacaacatacaacaggcctttgatataattatcctgttcatacgctcagctacgccattttgttgaggtgtgtgaggaacagtgtagtgacgcacaatgccttcagacttgcaatatgatttaaatatcatagaacagaactccatcccattgtcagtacgaaggattttcacctttctttcagtttgtctttcaaccatagttttccactctttaaacacatcaaaagcttgatatttgtgcttcaagaaataaggccaaacttttcgcgaataatcatcaacgatagtcatcatgtaacgagcacctccaaaggatgtcttacgagcaggccccataaatcagaatgcacataatcccagaatactttcagtagtatgtgtagatgtgttgaactt

SEQ ID NO: 21585 - DNA, 657 bp, Oryza sativa
attcattggagatatcatggttgtcttttgtatcgctcaaccagtatatagtgcaagtgaggcactgttatccaaattgaacttggatattcgtctgttttaaaaaataaaaactactcagctacatttcacacattagataatgtgaagcttcatttcgtggcatgcatctttgttggcaaccctatacattgcgtagtcatttaggcatatgaagctctcctgttaaccgtaatgattaatatttgacattatcatccctctaaaaaactcatcctagttatatttactgcaaatacaaattgccctaactgcttttagctgatctactatttgctttccgctgaaggatgtaatgcatggagcacctgttatgccccaaggatggtctcttcctgcaccattgaactcacatcaagctagcctccagaagttccaaggtaaaaatcgtactcattgtcgactgcttcctttattttaatggaaggtattaaaatgtttattttatttattcattacactaatcaaaacattttacttcgaaactcttcaggcacagcccctgtatatgtagccccacctatcatggcaactgggaacctgccatttgtggtaccaagccctgcaccgcttgtgcaggcattccaagccgttcgt

SEQ ID NO: 21586 - DNA, 12806 bp, Oryza sativa
tcaccctcttatgctgccaaagatgcaatgctcacaaaatttgagcttcccgatgctttgtccatctagcaatcctcgcttgcttaattctgccaaaccaatttcactcatatgcccaagacgcatatgccaaagattagtagcatcggaattatataatgaatcagaaactgcagcaatattacctaatatagttgtacctcgcacatggtacaggttggcagatttaatatcagctttcatcacaacaagagagcctttagttaccttcaaaattccgtctccaccggaatatttgtacactttgcgatcaagagtacataaagagatgagacttctcttcaaatttggaatatgccgcacatctgacaatgttctgatacaaccatcaaacatcttgatctgaactgtttcaacacctgcaacctcgcatggtgtatcatcacccatcaaaacagtaccaccttgcacagcttcataggtggcaaaccaatccctattcaggcacatgtgataggtgcatgcagtatcaagaatccactggtcactagtttgtgcacaaccagcataagcaacaagcaattctgcatcagacttctcatcagtaacaactgcggctttaccttcctcttctttctttccttttggtacatattttccggttctcttgtctttatcctgtagcttccaacactcagagatatcatgtccatctctcttgtagtatttgcatgacttatacctgcctctggactttgatctcccacggtagctacttgaacttttatctcttgatttgctgtttgtgttcttctcctgttgcctgccccgaacaaccaagccttctgcttgtgaatttgaaccttcagagggtaccatcttctttatcttttctttggcatgcaaagcatcataaacttctttcaaagttagagtatcacaactataaagaatagtatccctgaagtttgcatatgagctaggcaatgaacacaatagaataaggcataaatcctcttcatcatactttacctccatagactcaaggtcagcaacaattttcttgaaagcggagagatggtccattacagacccatcatcttgcaacttgtgcaaaaataacttttgcttcaggtgcatcttactggtcagatccttagtcatgcatatctgttccagcttcaaccacagcccagcggctgtctcctccttaagcaccttcctgcaaaatattgttagatagatgaagatgaatatatgacatagtcttacgatcccttttcttctcatcgttggaccaatcctgagtcctcttgtcaaatccagaaagcgcatcatcgaggtcttgttgtgcaagaacggctcgcatcttcacttgccaaagtgagaatcttgtgtctcggtccaggagcggtagatcatacttcaaactcgccatgggaattaatcctgaatttgctagaaagaaattagggtaaatctagcaaaaaaatgcgaaacctggtacgcttctcgtgtgcacgtagcgtagatctgaaacttcctggtacacaagcttgtgtgcgcgtagcaattccacgtgaatagaaaatcacgtgaacaggaacctgatcgcttccatcgttgacttccttttcagcctcgggaaccgtgcgatttagttggatgtattgacgccgctgctactcctggacgtgcgcgtagacggcttgctgctgctgcttgccaatcttctgatgcgtgcgccgtttccaggacgtgggctgctgctgccctaatttcgcgcgggcggtagggatgacgccgatcagatcgatccggcgcctcgacgaaccggcggcggctgcgtgacctgtagatcgatctccaaagctctcataccacttgttatggaaatagatgcacaatggagacgcgaattttacgtggaaaacccttgcgggaaaaaaccacgggcgccgaccggcaatgatcactatagaggagttgattacagacgtaggggaatcacaatgggaacgtcaccacttcccgtacggcttacaagagtatatatataggggataaaagaaagacatctaataggactcctactaggaaactaatccgaatatattgtgggcctaaaattcggatcacatatttaacaaaaatgattcctatgcacaagttatttaaaaaaacacataatgtatttttaaattttataataattaatacttaattaaccatgtgctaatgaaattaatcatatgataatgagaaaataatgagttttctcgtttcttatgcgctgaaaatatccctatgtaccattgaatcgaacggagtcgtcggcactggagggataggcacatctagttccgtatcggtgtgtctagcaagccattggaactcaccctgcagggatcacatcatgtggtgtgcatgtagaatgaactaaagcacagttttcagtggcagtgtgaatctgcgaggggctaacgtgagcagtggttgggtaactggtgccagccaacaccaatgctgctcatctcgaattctcggcacatcccattctcaaagacatttgcatcgttgaatcgccgagacaaatgttctaccctctcaccgctgcttttccacatatagaggaaggtgatggccaaggtttacatttactggtagtgctatagttcttctcaacctgcgctagtttatttataggcgcttgacgaggtacactagctagcatgcacttaaagtaccacaccaaccagatgagaggctttgatcgaacgatatcactgacaagacatgaagtcagatggattactcttctgtcttaaaattaaccaaacttacaattagatgagacataatctaatacaataaatttggagaagatcctgtttagattcgttgttctaacatgccatccaatcctgattgatttatttgggacatagagaatagctgatagtatctgattggaagtttggaactgacaaatcatggacaactcacgaagacaaagaggtacatttgtagcgacatgcatcatccattcataataagtgaaatcgaaacgatgattcatgtgagaatatatcatacacacacaaaatctaaaaaaaaaaaaattcagggaataaagtactcatagagtttgagtttcacaaaatcttgtgcccaccagttcatcccgattgacattcttctcaacaggacgatcaacagatgtgtttgaccttcggtgattattggttttactagctgttttctcgttcaaaagatgaaactttgctatatattggactctatggtttagtagaaatgatataatttttgacaaatcctcaataaaatcttatatgtatgtactatttagggcaacgtattggttccagttctgagcacaactataaatatgtgacgaggacaaggaacaaactgcgtgccgaaatttagagacgtcatgcagatatttgccaatctcggatggaaatttacaaacaaacttgaatagtgttttctctattttgtgttggtattattagtcattgtttagtcatttcctggtttttatatgttctttattgagtaaagtatgtaataagtggctctaactttttttgaagcaaaaatgtcagaattctttccattatctaaaacaaggaactttgcagattggagaagaatgaagaagacaaatctcttgatgatatcgccagcgagacaaggaccaccgagtagctattatatcttattggaaacctggtttagcaattttgtatttgcacatttcaaagttaagaaaagttaaaattttcagctacatgagagtgtatatatcagtacccaacatgcaattctcatatacatagagaagatcagaactgaagcacatcccaattaagatttgatatggtcaaattaagttttccttaacgctatatgttcacaaatcacaggaaacaaacccagattggagacgataggatcacaagatgcgtgtgcctttgcgagaggatggttcgctggataagatcacttgtgcacggctgcacgctagttgggcggaatcccctactcctgtttacccagcaacgccagcatcaccatacgttggggcctgaggttgcacgccacacctacgtactaatttgtccaatgtgtgcacgcgacgatgcgctggatgtcgcgacgacgatgctcgtgccgatcacatcgtatgctctgcacacagactgaactaaactagagcacggccatctgcgacatcacgaatctgtgagaggctaacgggcactggggtagcaattggagccaatctagatcaatgttgctcatcttaaattccccacgcatcccattctcaaggggcatcgtattgtctactctttctcactgttgattttccacttacagcgtttatatttactatgtatggtattaattgctatagttctttctagatggtagagtttatttataggcgcttgacgaggtacactagctaatatttcagtgccacaccagctagatatcacaaacaaggagtgaaaaggactacgacattcatctcaaaatgttgctacctagtatagcatgtgacattttctagtataacgaatctagacagtaataacaatattttaagacggagatagtagctgatatttgattgtaagtttggaactgataaaccatggacaaactcccaaagatagaggtacatttgtgcacaacactatggctatatgcctatattgcgcgtctagccacggacatggctcatctgtttataacaagtgaaatggaaacatggtgcatgtgagaatagatcatatacccacacacaatccacccaaaaaaatattgcattctgagaaagctgaaaattcatggaagaaaatgctaattaatatataatgactccaattggtacagtgcatcagaactgctcataaagtttcacaaaatcttctacccacccgttcatccggattcaccttcttctcaacatggcgatcaattgaagcgtttggacctcggtgattattggtcatactccctcccactagttccattccatgacacttctcgtccaaaagatggaaccttgcaaactggagaagaacggaaaacgcaaatctcgtgttggtgatatcgccggcaagacaatgactactgagtagctattatacttctaatctgattgaaagcagggtttagcaatttcgtcttgcacatttctgttaggtgatatttcacttggatatcatcaggaggagatggggggtttgtccaataataacctcgagtatgttttgtttatcttttctttcttcattagctacgtgtgctcctgcaatttcaaagaaaacaaaaaaagtggatcctcctaaaggaaaatttcctccacttttgttgtgtactggtgtctatctctctctctctgagagcttctgagatggccaatgtcactctcaccggctcagcctgagaaagaccagacgaagcagcagcaccgcccgcttccggcgtcgtgcatagagaacagaagggacccgtactggactgagaagcgagcagctaacatgaactggaccatactgatgtcaccaaagttcatctccaattccccatgactcccattcttattaaggcatactatcacattttgttgtcgaaacgccggtatatgttgtgttgctctttccactgccaatctcttgtagatagatgaaggaggaggtcatggttttatagttttgttttaggaagaaaatagaattatagtttggttttggagtgctgattctatatcataggagtagcatctatcttatttataggcacttggtgaggtatattgtatcatatatatacatggagtggcccgaagttggtagcacttgctttacgagccctttggagaaattgaaacaaaatattagtaatacgcgtataatttcttttagaagcgtagtacaaatgtaagcgctcataatgcactcacacccacccctataaacgcacacatgcctcgccctatcccaataagcatccaaaaaacctggaccgatatatattgagattaacgaagtcatcacggacatctcgttgtcgatgggtacgtcgtctaccactgaaagaataattagcaataaatgtgagcacccgtgtcaagtttaggactataacgcgtgtgggttgatttcatcacaagaaatccaaccagttaagctaagctcattttataacccatatgtttaatttgtcacgtgcatacaatgaactcatgaagcataacaaactatttatatttcacaatgtagtgggaggaggaaaaaatggacgctgtagttaacttccacaacttcttttctaatcaaaggactactctagatttcgagatcaccataggatgtgtgtgccttgcgatatgttggtttgctttatatactacatcatctcactcgaggtgtgctcctgccttacttttgtttacctagcacagcgctgccatttatttatccagagcaacatcacgcgttgtgaccacatgcaacaagtggcctcgcgtataggcggcacactcactgtcctgggcaagccgagggaaagaatccccgtgtctagtggccgatctagaaaactgattcgttagatgccataatatatctattgatgtattgttatagcatgtcaattatatttaaattataatgttagtataatttatggatagatccgctccggttagggccgatcgatcacatcattgtcagcatatgctcttcacacaaaataaactagaacatgatctcctacgacactgaatacgtggctaacgtgaccggcggtgtgataactggagcatcaacgttgttcatctcgatttccccatgcattccattctcaagacatgatatcatcgaatcgccgtgacaaatgttctattctttctcatggttgcttttccgcatatagaaaaaggtgatgggtacggtaaggcttaaataaatgtgacagtaagattttatattttctagtgctatttcttcgcagtagagaagcatcagttagcttatttttatatgcgcttgacgaggtacactagctagcacttcagtgccataccaaccagagatgtttggagaaattaaaggctcttaatgatatcaccggcaagacaatgattaggagtagctaattaatttttcctccgttcctaattaatcatcgtattacatgagtgaaaaaagaacaaggaaaactaataactctcactatatttactcggtaacaaatttgacgcattaaaaaaacaaattcgatgcatgcatcatccacatttcttcccagccaataacaaatgaggacattgcatgaaaaaagattgacgattcgaatcaaaatcgaaatagcatctacaagatgcacgtaaattctcagctgaaaattcattgaagaaatgatgtcagcgactagagtttatttcacttctagcattcaaaatctgttccaaaatacaataatttctttacttatttcttgatcacatatgtattatccatgctcatcgggaatgtagtcttttctcaacttgtgatccaggtgctagacctacgcactctgattctcggttagtttggccctcttcttttcgattaatatatagatttatctttattttcattaacatgcttttcaagttattaaacggtatattttgtatgaaattttttttatagaagttgctttaaaatatcatatacatctattttataagtttaaaataattaaaacttaattaatcatgtattaatgattttccatagcacattgaattgttgcagctcttggaatctatcgcgactaataaatcgaaacacatcccgatgcttgggagggagctggcttcccgaatctcagaaacaatgatcatggtagaaacctagaggaagaaatccatgaaatcaacaccaaatgtgacaacatacgagtacaacatctcgttttgagcgttgatattgcactcatcttgtatgtgaaatcccaacacatcccattcctataaaatataatcatcgcaaccatcaaagaaaataaaaaacaatcgctatgggcaagttttgcagttcgcaagtaatgctgatccttcaagggaacgagcagtagtagaacggtgaactattatattaatcgagtattatttactataaacttgaaaataaaattatttatttattgaaagaactttagtatagatttttttttcaaaagcactctatttatcgttcggggaacatgttaacgattaacgagagagtcgctcaaagcagtacagtcgaaacgaatgggcccttagggtgtgtttgagaataaggggattgaggagattgagaagatacgtaaaacgagatgagctattagctcatgattaattgagtattaattttcagtggcaacacttcccttaaaaaaaattcgagggctgcaacaatcatgtgtggtagggacgataaaaaatgccgcgtgcccgttgcaagccaagcggacaggagcattactggtcactgatgagctagagcacacggtaccactccatcacattgttggttcctgagaggctaacgtcaccagtgatgcctcctctagagcctctctatgtcgaattgtcgaggttgtttgtgtcaagttcccaatgcatcccattcttagggcaccctcaatggttatctatatgctatctacaagagatccatgtcagcatattttcctacttggaagagattaaatgaagagagagagcaaagttatctactaacttagagatagtctatagagaaaaacgaggcaatgaattagagagctatagatacccatgtagacataccattgaagtgatttactattaatctagtctattgctgagatgtacatgttttatagatagcacattactttaccattgcgggtgctcttagagatatcgcttataatgttctatctactctttcttcattgctgctttccgacagtcgacacagaaatgtgatgcatgatcagggtttacttttctggtgctagtgcatagaggagtactccctccatctaaaaaacccaatcctgaatttatttgaatctgtccagattcaaatattgggttatgttttattttgggacggagaaagtaccaagctagcacagtatatctgtatatgggcactgacaaagtactagcggcacaccaaccagatgagaggatagagtctccgtccccatataagtgcattctagaagagaatatcagttcaaattcacagtcctataatatgtcacatcctcttcaaaatacgtttatattgggatggagggagtacattattttctgaatgatattggtatcatccggtaggacaaagaggtaagtgattcaggaaccaagctacatcagagaaaaatcatgcggtgttggtccgttcgatccacatcggacggaagctagcgagagcagccggaatcaacggcctcaccttggcccacggcaacaaaattgccccacggatgcacaactcaacaagcacttccaaacttcacgatgcctccttcctcatctcttttctcaccttgccccatggccggtagccgcgctcgccgcctccacgagcctcggtgtgggcgcagctggagcatactgccaatgaagcccctccaccacaaccctcctccctatctcttgtcccagtggcctcgccgtgtgacaatatagagcactaactagcccaaactttagaaaataatgacaccttaattagaacccaagtgttacactgagtcaacaaccatgtgtagttgattcaagtgtaccatgtgtagttgttttaagtgtacaatatagtataatatatgagaattttatgtccttgaggtactaaattttacactaaatttttgatacatatagtacctcatcaagaactgtaaaattgctcataatatatattgttcatcatagtgtgaattattgtgaatttgtgattgcttgatagtatgtagtgcattacttgtcatcaactttagtcatccatagttatatggggcctatggcaattctcaatatctcatacacaacatgacggatgctgatgaggatgatccgtattccgtaagtaacctagcatgtttctattgtactcattcttcattggaagttctaagattgaagcataccccaatgtcaattttgcatggagcgtctcgtgaaaggtttttgtcacgccctgaactagccccgaacggaacttgcccgtgacgctccaaattaacctgttaatcgataccagtcccaggaaacagtgctgatatcacaggaagacagaatatcacagcaacagaggtctctttattacagagtaggagtacagtcatgttgggctgcggatagatcccgagctcacaactgcattacaaaagggaaagcggaagccaagacttggaccaatcatcacaggcgcgacttgggaactagaccgaaaccctaaaactcatcgtagccgacttgctcctggaagaactcctcatcagcgggatccacttcatcctcttcagcgactgggggggtattatttatatagagcaagggtgagtacaggagtactcagcaagccatgggaattaagtgtttaatgcaggcttcaaaggaaaggctgttgtttttgcaattgattttatttaaactcctttttgaaacaactaagcgagtgcttctcaaacgacacgaatgagacagtgcgtcttgtccggtcggagtatgtgcagtgtatcagtctttgaattgatcaaggttggcacccggccaacagctttcaaatggccacccaggcctagctgatcctatcagccgcagattttccaaacatcgatcccattccacaacagcaatttcacaaagtagtagtcaaacaaaactacgctaggaatcacctcacatccgcccatgaccgtgggcacggctgttcgaacaatttaataacctctgcagagggagtacactttacccacacgacgttactagccttggtcacctagcccgtgtggaacggccacgtctggagaccttgaggctttcatgacaaggcatttcgaaagccgacacaggttcaccatatgccaacgagaggggtcctagaccgacatcaggttaggtcccagaccatactgtgccaggaagcccgggggttctccccggcaccaccccgttgaatccacatgtctcttggcatcatggctcccctgattagctaattactcagccaggggcgtcccatttcacccatgtggtcgcacttgtcttatgttcggatgaaattcctagggaaacggtccttaagtgcaagaacgggaaaccgtactcccggtacgtcccccggtctgcggttttggaaattcatttagttcgcaagcaccgacccatgtgtcgggttttccaagtcttttgtaaaaccccaaattttacccatagttggatattttaaatttgaggggaggtgttctgatgcccgtgcccgaaggcccgtgcatcgaagcacaacagttgacaaaggaggttcaagtgttcaataattcacggagggtaattgcagcaattaggattggggccggcaggctatctcacaagccgcggccgaattacttgtgttaaacctattcatgcaacatttgcggaaaagaaatacttagatttaaattataggtgcaagatgatcaaaagtgacttgccttgctcgagatcttgagcttgatcctcgaaatcctcacactgcgggtcttcgggctccgaaactacacgcgaaatgggacaactcaacaaacggcgaaaacaaagccctattattgacctctaagcgtgccattagatagatcttgagatttgaggaattttggaagttgaacggagtcaatcggatgtacggttgagaagatattgaatttctaagattattggatttttgatctaaaggaaaaaggatttaattaaacccttttggaaaaagaaagaaagaggaaggggaaatagacttccctcgggcggctagggctcggcctgagagaaaagggcggctcggtcgagctaaatgggccggccggcccgagaaggcggcccaagggcacgcgcggggagagagggagggggaaccggtgggccgagtccaccttgcatggccccgagtgggacccgcttgtcggcggcttggctcaccgtgagcggggagcaggcagcgcggcgctagggttcggaggggggcgcagctcgtagaggacgcggatgcggcgggcccacgcgtagcctcacggctcgcggtggaccgcgggcgcaagcgatgcggaggggagcggtgggccgaggtcggcttgacccggtcctggccgaggtggcgccgacgtggcgcctacgtgactgccacgcgggccgacgggaggttgaagaaggcgtcggccggaacggacggcggacggcggctgcgaacggcggggcgaaccacggcggtacaagcgaaagagagcacaccgggaggtagcacgggttgagaggggacgagccaacggcttggattcggcaggggatgctcgatggcggcggattgcggcggcggcattcggcggcgagaaaagggggaaacggcgacggcgcgacgggaggtcgattccttcggaacagagcatctacgcggccaacggagtccgtttctagcgtcggattgggcggagctaccccgagcgaggcccgcgacgagaggcgctactgagctcgg

SEQ ID NO: 21587 - DNA, 12558 bp, Oryza sativa
ctgcgcccatggatgcggcggcgcggctctggcacgcgcgcgggctcgcggggcagggcgcggcagagcagcggctaggcggcgcaggcgcggcacgggcggcgaccgcgcgggcgcgcgcgcgaggcaacggtgcgcggggaactcaaaaacgcggcggggagcttgccagggatggagtggggagagagaacaagagagggggagagcgctcggctcggcgtcggctcacgcgcacgcgcgtgcggcgcacgggtagagcgaggggaaggctgagggagagagagagagagagagagagagatgggccgagaggggaatcgtcccaccgaacctgagggaggcaaactagacttttcacttgattaagcggctcccatagccttttcattttctcggactcccagaggccaactgcccagcagcacaacaatccgcttccactcgggaagcctagtctatgatgcccgtagacatcccgaatcacacagattcgtttcttgaccagtcaggtcatctatctgccacataggctgattctggtaacgattcccacaccacaacaacttttcacaaagcacacgcaaacaaatacgattttcacaaacgcagaagacttaggtggtgtattccagctggtatcccaactggtctaacaccttaacacggactaccaaacaaaactcacgcacgcactagtttaccaccactcctaccgagcgggtgacggagctaaggtcttcttatcaatggggcttaactaagacacctagaggcttgagcacacctttcttcaactgggtgtgaagacaggtttattctaggtcaaaagtcaaaacaaatgactagcttctaccttttggacacgaaaagatttttcacaaaattggagctaaaggggaacaacgacaccttagttttcacaaatagtttttgtactcaaataatgccatccttttcaggggtttcgatcctagggccaactaatgctctgataccatctttgtcacaccccgatctggcaccgccgtacaacggcacctgacaggagcgtgtcgtaggaataacggcgcgaaccgctttctacgaaaccgcgatctcagtaccagtcccaggacatagtgctggtacccacggtgacaaacatgaatcattgcaaatccttaaaataaatagatgacttatttaccttaacttaggttgcagctcagaacagcccgagaatgcaaccgacgacacagacgaggaaacaccaataacaacagcagcagcggaacaaacgaactaacacccaacaccacaggcgacggctaggaaccatgacgaaaccctaatcttcactttacttcatcttcagctttaggacggaggaactatatatatttatatagagcaagggtgagtacttttgtactcagcaagtcacgggaacttaggtgtttaatgcaagcttggaagagaggcaaggttgttttgcaaatcttttgttttgaaatcattttgaaatcactaagtggtttacttctttctaagtttgggccgaaaagaggcttgtgtctcgattcgactttaagagatgtttttcaacaactcaattggtaatgtactgaccccccaggtcagatcattacttctcggctctcagagcaatttcacttgattaagcggctcccagagcctttttattttctcggactcctagagtccaactgcccagcagcacaacaatccgcttccactcgggaagcctagtctatgatgcccgtagacatcccgaatcacacagattcgtttcttgaccactcaggtcatccatctgccacataggctgattctggtaacgattcccacaccacaacaacttttcacaaagcacaggcaaacaaatctacgctacaggaaacacctcacatctgcccatgaccgcgggcacatctattcgaacagttagttaacctctatagagtgggtacactttacccacacgacattactaacccggatcgcccagcccgtgagatcagccacgtcgggagaccctaaggctttcatgagaccctaaggatttcatgacaaggcatttcgaaagccaacacagggttgccatatgccaacgagaggggtcccagaccgacaacaggttaggtctcagaccatattgtgccaggaagcccgagggttctacccgacaccaccccgttgaatccacatgtctcttggcatcaaggcttccctggtttgctatttactcagcaaggggcgtcccattgcacccgtgtggtcgcacttgttatatgctcggatgaatttcccacaggaatcggtccttatatgcgaatacgggacaatgccacataggcacaactcccgcatcgcgagttttcacaatttattttattttcaaacacgccgacaccacatgtcgggtttttcaaggtttctcaaacccatttcccaaattatcgacacacaacggtgtatgtggaatagttggtatacgcgctcagagagcacgaataccgaagtaccacaaaggtggagcgacaaggaatcacggtagtacagccgacaggaattagtgcgattactgggtaggtctatcggtttggcacgcaaatcgaggccaagcaagttaagtgtgtgattctaataatgtaagttgcaaacaaaataataatgattttccaattataggagcaattggtcaaaggctgacttgccttgctcaaggtcttcacaaagcttcacgtatcttcgagaaaacccgcgatcgacaaaaatccggtaaccgcaactatacgcaaacaatcaaaacctaaacaaaagaccaagaaaaagatcctatttagactaaataatagtgccattaaatagatctcgattttacagaaatactggaagtggaacggggtcaatcggacgaacggatcgagagatatgaattttggaagtttaatagggttttctggacaaggagatgatttatcggaattttctggaaaagaatattcccaagaatattctttaattactcattgacatgtgggaccaacaagggaggaaagatggacttatgtgtagggaagctgatttggtggagggggaaatatggacttgttgcatgtgtgttaggctcggcaaggaggcaggacatatgaacttcctttgtctcaaaaggccgaggaggggggggggggggacggctggtgggccgagcccatgagcgggggagagagaggaggcggctgaccggctgactgggtaggggcgggcccggtcaacgccacgcgggcagccacattggatggaggaaagggagccaggatccaacggctcgcggcggccgagaggcgccgacgaacggcggcgaaccggaggaagcggctggcaccggtggcgagaggaggaggaggggaagccattccacggcttggatcggggagaggatgcgcgacggcggctggcggcggcggcgaagctcgccggatgccggacgcggatgcgcgagagaagggacgagggggcgcggggtcgggcttagccgaaccaattcgtagttgcgacacgggggcgcgggacccaatggtcgccgcgttcgaactcgcggcggcgctatgcggcggcggaagaggcggcatggcgtgggagcgggtggggaggccggcaactggggcggcagtctgggaaggttcaagaggacacggggagggtcgcggcgcaaggaatcggcgagagaagggccgacggcggcggattgcggcggcggccatcgccggcggagaaaaggggaaaactcgccggggcaacgggagtcctattcactggggaaggagcttctacacggctccgggaactcgtttcaagcgacgggcggcgatgagctagcctagggagtcatggcgacggcgagcgacctccggaacagagcaaaggcgcgcggtggctacgacggcgacggtggagccgagcgagcgtctaggcgcgaggggacaaggacggtgaagtcgcctagagcctagggaggggagaggacagggggcgctcactgacgagagaggagcggcgtcggtggcgggcgtggcgcggcgagcgatagtggaaagtggttcggtggggagctcaccgacgagagaaacgacgtcggtggagtgtatggagtcgcggcgaggcggacgcgatggcggggcggcgtggcaccgagggtgcgcggccggggaagaagggagggagaggtggcgatgggcagcctggagctcctcgtcacgcgtccacgcatgcaccggctcctccggtgctcggcggcggacggcgacggcgagagaggggcgagcagcaataatggcgcggcggtgatggaagttcggcggcaatggcgcggtgggtgtgaggcgagtgaaaacgagagaggaaggggtttggggcggcttgggttttatagatggtggtgaagtcggtttggggaggaaactgacctatgcggtcaaggagcgggagatggtggtcgcgctagcttggctggcggtcacgggcgacgcaagagcggcagacgacgaggatgcaaggggcggcaaaggcggtcgatcgggcggtggaaatcgaaccgcgggagtgagaggagcagcgcgggctggcgcgggggcgagctggcgctcggtgtccatggcgctaggtgccacgcggtggagacagggcgccagtccgggaaggggagaaaggaaaaaggggaggaaggaaagggggctctgcccatgccattttgggagaaaggaggagggagagagaggctctgcctccgggatttgaacgcacgtggcttggagcgaccgagcatgggcggctgcggggcgcaggcgcggcggggccgacgcggcggcgaccgggtggttggccacgcgcgagcgcgcgcgcggatgcgagggcgcggccggattcaaacggcgacggcgggaaaccggcgctggtgggagagctcgacgagagagagaaacagagagagcgagagagagagggaggcgctctctctcggctcgggcacgatgcgcgtgctcagcacgtgcgaaggggaggggaaacaggctgagaggagggatgggccaagggagaggaattcggcccacaaaaacaaagggaggcaaaatagacttttccagaggaattgaattggagagaattggagagattcagggtttggattcgaattcaaatttgacattcgaactcgagggtttagggaggaatcaagggagactcgaggagaagtcaaggaagagattcaaaatgagattttgatatttttgggaacgaggacaagtatttggcgaggatttaaaggagacgtttaagtttcggagacttgaattggaaggaggaagtcgaggtggaggattttgatggtgacgagggtgaacaacgggagatagaattgagatccatggcacgacttagactctcacacaaagaacgaaattttcgcatataggattttgccgaattagttttttaacgtttcgcagaagcgtagcgttacaccactacaggtattaactcctataaagctaccctattgagatttcagagcccactctattaaaaacttcttgaggtgaagccacgtcatcgttattttacagtcgtaggatcaagtgatatgacgctagatcaagtgccatctggatggatacattcaacagccatgcacacaaacgttacgatgacccatcatgatgtacgacgagatgggctcccagcctcccacctatgacgttaatctccctgcccacctcctaattaatcgcgtggttagccggcggttcgagacgacaccacccctccacctatgcgatgccaggacctgctactcattcgcgcagtggttgatggcatacctcaaccgcgtggttcaagacgacgacggcggcttcaggtgttgagatccagttcggcgtgctgagatccagttcggctcacctcatccagtgcagattgcagttggtgtccagaaatgctaattttagtttgaagttttctttgttgctgaatttcacactaaactttaagtgatgtgcttctatgctcctcagaaaaaaaaacgcacgaatattaaagatggtgaatggtctatattaaaaggtgattaacaggctaaacgttattaggaagggcaatttcgtccttgaggtggttacccgtatcacgggcgttcaatcttgacgcagcgccgcctcgcctgtcgccgcactcgatcgcaagtacgagagaagaaaagaaggcattccaagattccaaaacagcgaatcctcctctgttgcagctacacatgtgcatcacctcaatccaccatttgattagcatccatgttcaggctacggttcttgccaaatcaaaaaatgagatgggtagagataagaagcatgacaagaaaaatcagaaaaatcagaagtggacgaaggcagggagcacgccgcggtagactaacgggaaaggcggtgtggcgagagaagaagggggtggctcagcaattagaatgccggcgatacgagtcatcaatttgtaactcctcatcggctgatcgagtatgtgataacttcatccaggacaaaactgccccttcctaatgacttttactctgttaagcaactttttaatctaaaccattcatgagctttaatatccgtgcgggttgttttagtgaggagcatagaagcataagtgttagttcatttcatatattatccttaagagcttcatcaaatcaattctattaaattcccaccgcaacgcgcggggtctcgtctacttactagcactttgatgccacaccaatcatccatgaggagaaggggaaacattttagtttatgaacattagagaggtgaatctaactagtatagacccacttgcctataaaagcaatgaagtaactatataacatttaatatttttttatgaaaaactttcaaatatagctatattataattttaatataattacattgtatctagcatttaattagattgcaacttgtatgtaactcgttctcatctatgataaacatacggttgtgcgcatggctaatgctgctagtgtgctagcaggccatcatgggttcaatcatatcttatttttctcttcctccctaccacgaatcttgaatcacatatatatgattgtcaaaattttagaagttttaaggggaaacaatctgccaattgccaaatgttttttctgagattccgtagaagtaattgtaatgtgaagattaattaattgattagccattgtgaatggttcatgtagagtttatactactatgaccttttacaaaagaggaagggagcactacatggatgaacattgcatgagcctttgccttctcgtctttcagcacagagagaatgattcagtcatgcagctgatcgacgaacttagagaagttcttttttttttcacgctgctttcttcagtcttcaccaactcagaagcaaagcttagagaagagacaacctgaaaaaaataaaccaacggatcatctgcacgagtagaccacgcagcggctgaatctcttggccataaattaacgggctcagcataaaggtgttccgttgatgatcaattaatttacgagcaattctacggtttttaagaaggtactataaggtacccaaaaatttagtgtaaaatttggtacctcatgacatctcatagtatctagataccaagaggtaccaaatttacaataaaaaaagtggtacctcatgataacttctcaaagaccgtacaattgctcttaatttgcaggtcgaagaagctgcgccttgcaagccaactggacaggaacatcacttatcactctgcaatcgctgcgtacatagtgaactacttcctccgtccaagaaaaaagacaaaccctgggtttccgtgtccaactttaactgtccgtcttatatgaaatttttttataatttgtatttttattgttgttagatgataaaatatgattaatactttgtacgtgacttgtctttttaattttttttatattttttttaaataagacggacggtcaaatattagacatagaagtcagggtttatctttttttttttacggagggagtagagcatactactccactatatcgttggttcctaggacgctaacatgagcagtgacgtcttgtctgaagcctctctatctcgagattgttcgtattggattcccaatgcatcccattctcaggacatatcgcatcgtcgaaccagcgagagagcgagacaacgttctatctctactcttttctcgttgctgctttccaacagacacagaaaggtggtcagggtttacttttttctagtgctggttctgcacaaaggagtaccgagctgtagcctaatttatgggcccgataggacaacactcctaaaaactaatttcccacagtgtaaatggcttcaggtggtagtctcaggctgtgtttagttccacgccaaaattataagtttaaaaaaattggaacgatgtgacggaaaaattgaaagtttaaagaaaaaagttggaatctaaacagggcctcatattttaatttcagcccctggtgttttttattttagtcatcacaattttccaatttatatatagaagttcaaattttaaactgaacacccaaaaatccagaaattaatataaaatctctcctccctccctcttctccccaccgacaccccaatcctccaccccactcctctccatctgtcgacaccaatagcgacacaactacctcgagctccactcaccggcggtcgcctctcctctcccatcccctccccggcagcggcggtagctgcattggcagcgatgcctctctccttcccggtggggcagtagcgtcacaggcggatctgtggtggagcggggcggcggagcgcggcagaggggagcactcgaggaagaggggagcacttgtgtcggtggctgatgggcttcccggtgccgacgcaaatcgatgcgtcggtggccgacggagcttaaaggcggtgtcttcccttgacaaaggccaccacctctatacccccatcgtcttctcctccctcgtcggccaccgtggcatgaaatctcttcccgacagagaacggaggtgaagaagaagaaggaaaagggctggatggggatccatcacaaggagacaacctcgccaacacacttccccaagcgtgccttcgctgttctcgagaccgggcgagtagaggttgtcacgccccgaactagtcccgaccggaactagcccgtgacgctccaaattaacctgttaatcgataccagtcccaggaaacagtgctggtatcacagggagacagaatatcacagcaacagaggtctctttattatagagtaggggtacagtcatgttgggccgcggacagatcccgagctcacaactgcattataaaaaggaaacggaagccaggacttggaccgaacaacacaggcgcgacttgggaactaggccgaaaccctaaaactcatcgtagccggcttgctcctggaagaactcctcatcagtaggttccgcttcatcttcttcagcaactggggggggattatttatatagagcaagggtgagtacgggagtacttagcaagccatgggaaataagtgtttaatgcaggcttcaaagaaaggctgttgtttttataattgattttatttgaactcttttctaaaaacaactaagtgagtgcttctcaaacgacacggttgagacagtgcgtctcgtccggtcggagtatgtgcaatgtatcagtctttagaattgaatcaaggttggcacccggccaacagcttttcaaacggccacccgggccaacaactttcaaacggccacccgggcctagctgatcccgtcagctgctgattttttcaaacatcgaacccctttccacaacagcaatttcacaagcagtagtcaaacaaaactacgctaggaatcacctcgcatccgcccatgaccgtgggcacggctgttcgaatagtttattagcctctacagagggggtacactttacccacacgacattactaacccggatcacccagcccgtggggatcagccacgtcgggagacctccaagctttcatgacaaggcatttcgaaagccgacacaggtttaccatatgccgacgagaggggtcccagaccaacaacaggttaggtcccagaccatactgtgccaggaagcccaggggtcctccccgacaccaccccggcgaatccacatgtctctcggcatcaaggctcccttgataagctagttactcagccaggggtgtcccattccacccatgtggtcgtacttgacttatgtttggatgaaattccaaggaaacggtccttaagtgcaagagcgggaaaccgtgcacccggtacgttccccggtccgcggttttagaaattcatttagttcgcaagcaccgacccaggtgtcgggttttccaagtcttttgtaaaagccaagttttacccaagttgttatttagattttaagtttgaaggcatccgtcgatactcgcacagagtgcacgagcaccgaggcgcaactgggtggttacaagggaacatggtataacgattaacaaaggaaggatcaaatgcaacaaattaggtaggtcccgccaatctgccttgcagacgagacaaacagattaagtgcgatcctatcaatgcataatatttttcaagcaacataattaaattcaaatataggctcaagatgttcaaaggtggcttgccttgctcgagatctggagcttgatcctcgaaatcctcgcaccgcgggtcttcgggctccgaaactacacgcgaaacgggacaactcaacaaacggcgaaaataaagccctattaatgacctctaagcgtgccattagatagatctcgagatttgagaaattttggaagttgaacggagtcaaacggttttacggttgggaagatattgaatttctaagattattggatttttggtcttaaggaaaaggatttaattaaatcctttttggaaaagaaaataaaagaaaggaaaataaaaggaaagaaaagagggagggaatatagacttttctcgggcggctagggcgcggcctaagagaaatggagcggtccggccgagctaaatgggctggccggcccaaggcggcccaagacgcgcgcgcgggaggcgaggagagagagagcgccggtggaccgggctcactgcgcacggtcccgggtgggacccgcttgtcggtgacacggttcaccgtgcggagcgagcacgcggcgcacgcgcgcgggcgggggagggacgcggtgcacgcgcgtggttcgcggagggacggatgcggtaggcccacgcgcagcctcacggctcgcggtggaacgcgcgcacgggaggggctgaccgggatcggcccgacccgatctcggacgagctggcgccgacgtggcgcctacgtggcgcctacgtggctgccacgcgggctggcgggaggaagacgaaggcgccggccgcgaatggacggcgggcggcggcggtttctccggggcgccttgcgacgatgaggggcgacggggcgtacaccgggatgacgaggaagaaggagagggagcgagccaacggctcagattcaccggagggagtccgttggcggcggatttcggcggcggcaaccggcggagggcaaagggggaaacggcgacgaggtcacgaggggccaattcccggcggtgagagcatttacgcggccacgggaatccgttgctagcgtcggattgggcggagctacgccgagcgaggccggcgacgagcgggtgctacggagctcggcggcgacggcggcgagcacacggcgagcgacggcaacggtcggggcggcgccggctagttacggggaggctactcgagctactaccgaaaactaagggcgagagatggagcgaggaggacgaacggatggaggcactaccgagatgaggaggggcgctgtgacgagaggccgacggcgtgggagtaatctctccggcctcgggccggggaagaggaggaagacgagcgcccggagtccccttccgcgtccacgaacgcaccggctctcccggcgcttggcgatgaacggcggaggcgagacagagctcggaaggcggcggcaacaatggcgatgggaggagaagagagggagggcgcctgggctttaagggcggcaatgttggtttggaaccgacttgggcggtcaaggcgtgagctggcgctcggcgctcgcgtccaattggcgacagggcggagggaggatgacgccggcgggaggaaaaggggaaaaggagggagggaaaggggggctcgcccctttcttctttgggaaaaggaggaggggcgcgggggcgtctcggcagagggaggagggctctgcctccgtcccttggcggcttgcgcgcggagtggcggggccgaggcgatgactacggcgatgacggcggggcggtgtggagcggggcggcgacacgggcgacaagcgtgggcaggcgc

SEQ ID NO: 21588 - DNA, 52313 bp, Oryza sativa
agggctcggctcggcgcgggcggctcacgcgcacgcgcgcgggcagagcgaagaggtaggggcgctcatcgcgggcggctcacgcgcacgcgcgcgcagcgcgcgggcggagcggatggggagaggcagagagggagcgcagccgggggggggggacagggccggggggagagggggagatgggcggagagaaattcggcccatcgaccccgggggaggcaaaatagacttttgcggaggaatttgatttggaaggatttggattcgggattgaactcgacgatatatcggggatttgagatcttgagatggcacggacactagacaacaagcaaggaaacaaatttcacaattagggtttttaagagataatttttccgctaggcgccacgacggaacgggcgctacagaggtgctcggagccctgcagaggtccgtgattctttgtagggtgatggcccctagccgaaaagtggttcggttcctacctggcgagctagggataccctccacggtggagcgttggccatggcctgaggagtactagctagggatgcagatcctctgcagtactgctgatgcaatagcagacactgactcgtgggtgtactgcagacaatccacactgactagctagcacttactgaaacaataaaactttacaatatttcctaatggtaatacatgttcgttttttggatgaattgagcaagcagattaatctagcgagtgatacatgtttgcacacaacattatggctgtagggagaaatttgatactgtaccattgtctcaacaggatttcgttggatttccactccctaaataggtttcggtaaactgccactttcaaccaagacgtctacgctgaagtgccatttcctccatttcttcccaattaaaatcattctttttccttttttccgttatttgctaaccaaaatacccctgtatgtccactcaatatgtataaacttgtgccattgtgatcaatgctaccaatattttccagccttttcgtatctatttaagatgcgtgcaaatgatgagtacaattgatcacaatggcacaagtctatacacaaacattaagactgaaatcttctataattaaagaaacaataaaattagattattgtgaataatacctctccagcacaaatataatttgttatttttgtttctttatctgtaaattgaatttcgatgtgcatgtttgtatagtggttttgtatcatctttatccatcttatcaaattttatgaaatatttacataattatcttgtaaaaaatgctttcccagtttcgacagttttcatctaaagttgaggaccaaagcacatcccaatgttttacagtgtggtgaagtttctcgatcaatgtggccttctctgcttcgcaaatccatttttctttggagaaagggagcaaagctctcccattttttgagggaatgaacagactgtttaataaataacaaccgacaacatccaaattaagtaaaacaaaactgtcattttgtttgatctaaaccaaaaaccatcacatccagtagacattgcaagtagagtgctgacatctaaccaacccctatcctcttgacttgcattcgtctccaggcaaatcttgagctgaaaacttcagcaaccacctgcagcgttccctcttgcaactttcttcgatcctcttccttgatctgtaggatggaccaagaattgatccaatatatagcatgcatcatgcattagttcagtggaggatccaaagataatttaatcaacgtagtagaaagcaacacatggtttcggcagcaacgctgactgacctgcggctcaggtttgctccggcgagcggcaccggcgccggccgtgcggatcactcacatcgtgtcagctcgcgggtgatgtgaaagagagagaacgacatggagcatagtagagcacggccgcaccgggctgtgatcagctaccatgtgaaccggagcaaatctgtattggtgttgttcatccctgattccccatgcatcccattctcagggaagaatggcatcatatctcgtcgaaccaccgatcgatgcaatgttctgctccgatcctaacagcggatttcttaccaacagagaggaaggagatgatcaggatatttacagttttggagcgaggcgagatcaggatttattgttttgaattgttgattcctgcctagaggattttgcctcaaaaagattctgtctagacgagcagtagctagcctgtgcgaggtagagtcttatattcataattttagtataaatatgtgaaatataaggtaaatttatagtttatcttataataaaacaagccgtaacaaattaaataacattgatctatctttttagtaagatgaatgattaaatgttatgttaaaaattaacggcctcatacatttgaaaacggaggaagtaatagctatagcactttcagtattcagttcagtgccacaccacccagacgagaggtgatcgaaaggaaaacactgcaacgctatgactagctaatagtactatctggttggatttaaagtttggaactgacgaacgatggcaactcgaccacgagcaattaagcagataagtcaatcgtgtcgttaatcatcgacgctaggtgtaccatgcacgagccactcttgttgcgttgtgtctttacacatgcagacagtattaacaaaatcagcatcagtactatctgacgctatttcaacagcaaactttttgttttttgaaaagattagacggcaagggcattgccggatatattagaagagaaatagagtataggctacaagcagctcagttttcctgggaaggagaaaccgaaaggaaccgaaattacataaggtataaattctccctgatcaagaaggctacttgcagcggcgaaagcgatttttgttggaagagacgccaatttcactctagccaaacatgccaccaggaaattagcagcatccctacaattttcttacgttcacttgttggtctgatggtagccagatactccatccaatccgcaattgattgggaatcggtgtgcaagtgttggtagccatgcaacatgactagtagaaacttgtgaggggctaacatgactagtagttcctcagctggagcttctgtaggatcaggttgttcgtttcaaattccccatgcatctcattcttagggcaccactggtttctcacaaatcagagtaagggaatggtctgagatttgcagtttccgaatgcctggtttgtccagagtagtagcagccttaagaccccctgatttatagatgggcaaatggagctgaaggggtactagtacttcattaccacaccaattaacaaataagaggagaaaggaaaacattattagtctctaaatatatactcccttcgtccctaaatatttgacgccgttgacttttttaaatatgtttgaccgttcgtcttatttaaaaacttttgtgaaatatgtaaaactatatgtatacataaaagtatatttgacaataaatcaaatgataggaaaagaattaataattacttatttttttaataagacgaacgatcaaacatatttaaaaaaatcaacagcgtcaaatatttagggacggagggagtattattagtaatgcacatttttttcatgtgtatataaccgaagtatgaaggatatgtatcaaggtttcgtttttgctatatttctaactactggccaaagatgaatgctcgttcaggtgaacaaacatcaatacacacatgtggagatgagtaatagggtgaactaaggctgaatatgggaggtggagttcacacggaaaatggtgttatccattgaggcgtgaatttaggggtggatagcgagccggctcggctcggctcgttatcctaacgagctagaaaaccagctcggctcggctcttttgaaagctcgagctaactcgttaggctcgcgagccaatccaacaagacagaaagaaccaaggaggaggggacctgcgaggctgcgagtgcgagtgtgcgacctgcgccggctggggaagtgcagcggcggcggccctcgcgctggctggggaagtgcgatggcggcggcggtcatagtggcttgcggcggcggcggcgcgagctcctggcgacgccggcggcagccctagcagcttgcggtggcgtcggcgcggtctcatgcggcggagccagagagagagagagagatgcggaattgcagatgtgcggtttcgacttctcgtctcgtgtgctgcggcggatgaggattgaccgagtgaggagaactagggttttgcacttttactattgtcttaggcttgggcctgtgctattgtattgggctgggccttcgcggttgtctgatgaagtcctggctcgttaaggctcgcgagccagctcgagctggctcgttatccctaacgagctaaaatgccagctcggctcgctaggaaaatcaaacgagctgagccgagccgagccaagcctgtcacgagtcgagcgagctaacgagccacgagcttcctgtccacccctacgcgtgattaattaagtattaacctaaaaaattaaaaaatggattaatatccgattttttaaagcaaatttcctatataaaaattttacaaaaaagtaccaattaacagtttgaaaaacgtgcccgcggaacgagagagatgtgagttagaaaagaagtgagaagaacacaacctaagtagcatgtacgctaaccggtcactagttattcagacctgataatcttcatgtatcacataatcaaagttgtgactttgccgtctgttattgtagatgtgaaatgttgtgactgcttgaaaatatggaatgcgtttcttctcagtgtctcaaagacaaacgtaacaaatgctgatgagaagagtcggtatctcaatatcgaccatctcttagcgatacgcaattttcatctacaggtttagaagttagaagtgaagcccatcccaaggttttacatttttttttcatgttatcttcacaaatcctagaaggattgtacataattcctagtttttagaccccaatcaaaatcactggactcgtactttccaacgcacagtacatttcattcatttttcctctatggaagatgaattacatctccgtgtctgcatcatatccaaattaaatcaatagtgagatttttgttttaataatggacatttaaattaacaatgaaatacataagctgtataaagtaaactaagtttgagtttgaagtacaattatagttgtttggcggcttgaaaaacagtacggatcattagcacataattgtacgctgtaccataaatgaagtcatagggtactcaatttgcactagaaattttggtaccacttaaggactttaaaatttctctcaaattttatactattttttttatttgagatagaaaatatgatccctccagaatgataaaattactcctaaagacgaacatagatgcaatgatgcagataaacagccgtagagtggtcggaactgccatatttattttcaccactacagaacagatcggtagccagatctctaatatctactttcaattgtgtcattaaccatgttaattgtatctctaacaatatctctttgttgagacgtgtttttacacatgtagatagtaacagagttggtatcagtaatacctcagtgcttcaacagcgtgctgtttttcatttacaggttcagaagggccacacgctacacggcgatgttatcctcacaaatcgcagaagcaattgagcaacgaggatagactgatacaaggagcttggtggctttttcccaacctgccaccgtttctctagcaaggctagaaattcagaccacacgccgataatttcatatgcttgatctgcagacaaaatgatctaaagcacaacacatgtcgactggatagtgaattggtgagaggctaacatgactactgctgcctcagctagacattatctaggatcaggtggttcgtttcaaatctccaatgcatcccattcccaggatattgcattgcattggtgatgcatagcatactgtcatactgagatggccaggatttgcagttctctactgctggttttgtgtagatgagtatatatataattcactaacttagtataattcactaagttattgatgggctcttggattagagagaggcactcattgccacaccaatttagacaagatgagaaaagaaaatcttacaaccgtgctatacatacgacttcagtgtatgactccatcccgattcacacatctaatgcaccccgtactaccatcagggcataggggttatgggcaaaggattaattaatctacgctggagatgcattgtcgtacgtctcagtcagacgaggcaatcatatgtgtagcattattcaaaatcttattagtctttgaacatattagctcacagtttgtcatgactatataacagaagtataaagaaagtattgaagtatagtttatattcctagagtgaattttatttctctgtgtagaggccctaacgagaaatattactgggaggtgaaaaaaaatacgttcgtttttcctgtattgctcctagccaaagatggatgctgtactacggatttcacagtctcgatcaatttgattcaggcgaacaacatcaattcaggtcctgttttattgatgcaatcttcacttggacaaagtctggagtactagtagcttgctcataggtgttgtgaaggcacatttggacccaatcacaacactggaacctatcgatttattttgaaaaacaaaattacatatgaagtcattgtttgaatattgtcaaatcactatgatttcttctccttgttcgtagcatactccgatcagaaccaaatttatttgtcgatcgaaccaatccacgaagcaactatgaagatttctttttttttaagatagagaggtcgaagcctctcccatttccattaaagaaatgtacggtagttttacagacttgaaggaaagcagcaaacggaaaaaaagaagaaaggttttaattgctaacctctagtggaatgccatcccatcacactttcagctgcaagaagaaaacaaaagaaagtaattaactgaataacagaagctgctacatgcgactctgaagattgcttcatgcacaacaaacgacaaaacataactctctataatggcatcaccaatatatatggcaaaatgatccatatagatgagacccacataaatagtttatctctatgtcaatgttcacaatgtatatagatacaaggtatcattaggagaagagagaggagtaaagatagataatataatttattccatatatatgggtagtccatatgcatatgggtatcttttgttattttttttatatggactagttgtacaatggtaataggtggctgaatggaatattctattgcttatggactacttttacaccacattgtggatgccctgagacatttttgcgacagcaaacagcatgtcatgtgtttccggcaatttttcttctcttgcaggtgaataactgtgaagatacaacatatttctctagattttctagatgatcatgttaagcgtttggaacgaattgaccaatagataatagtctgctattggctattaacaagaacgataccacaaattaaccaataaccatgtcatcaccgtccggtgcaccccgtttaactcaaattcccaatacatcccattcccatggtatcttgtctttcccaccccaaatactcccccacttatatattagctctctgccattacacaatcaatatgagattatttgatgatatcccccttcctacatcagtgcattgatgagctttcacacaatgtaaattctacgtgtggttttgatctaaaatagattgtggattttagatcggctagcagttaggagggatggccatacagcgagacatgcccctctgtcacaggacaaactgagttagcgagtcgtcttcttatctattaatgtatatatactagaaggatctagagcctgattgccgcctgggcggcctacaagcaactgctacctggtccattgatttggtgatttaattttccaacttgtagatgcattgccgatcgattgcgtactaagcgccacaagatcatgtaaccatcggatcgtatcaacttcaagtctggaagctcgctcagctcgtattccacatgcatccaattcttaaagcattgcatcgatcgtcgaatcactgaaataacattctactatttttatttttatttttgcagggaacattcgactcatttttacggctgctttcacatcgtcgaatcatttgaaggcaatcagatagttggggtttatatagttttagagggggcacctagtcggcgcgtgtgcgtccccggtgcacgttttccgggactaaaaggtagttaactaatcaattagttttagataattatagtttgagataatgatagtagtagttaggattttctttttccacgagatttttttaactaataaattgaaaagaaatctatatttgaagtcaaatttttaaaattttaaatccagatttaaaaattttaactcgaaatttcaattttttaagtcaaagtttgaaaactttcaacttttcatctcaaatttgaaaaactttcaatttaactttgaaaacttttaaccctgatttgaaaactttcaactctgattaaaaacttccaaatcggatttgaaaatttttaagttaaaatttgaaaatttttaagtcaagatttaaaagctttcaactcaaaacattttaaaaagccacgtgtgctaaaaagattaaaaaaagtaatcagaaaaacacgaaaaaaagaaaaaaacgaaaaaagcggcgtggggaggagcgcgcgccagcatacgtgcgaattagctctcgcgagtttccgccgagaggacctagtagcatgcagcactcgaggaggtatttagggcctgttcactttgatgccattttcaaccttaccaaatttttgtaaagttgccaaaaaaatagctacatttagtttgctgtcaaattttggtaactatataagaaatcctaccaaaattttggcaagttgccaaaattataccaaaattttggaaatgccaaaatttggtaaagtttttttttgacatcaaagtaaacaagcccttaattaactagtactcggttagcataggccgcttggtttagctatagctcggacgaagtggtgatttcaaattgtagaactgaagtgtttctttttgttcatactgtaattgcgaaaaataaatattataagatgacgataacaactcagcacagtatcatctcggattggctattgggcgaacgttcggtacttgtccatcacgcgaacgaatcaggcaggggaggataaaaacacgtggcgatgcgcaacaggctggtgcggtgtgtcgctacgatatatatttcttttcctaatttcctgttttcttttttatgtgattcttttcaatttcccgttctcctttttttacattaattaattctcccgtagcggtatgtatcaattttctgtttttccattctttttttttcaattttttttcttatagtcatttttagcttttttaatggaaacttttttatatgtactattttcatggaaactctctgcaagtatgctttctatatataaactttctatatatagactttatatgcataaactttatatatatagactttatgtatataatttatatatatatatatagactttatgtatatacgctttatattatagaatttgaatttataaactttataataaattatatttgtatgtataaatttcagtacaaataaaaaaatataagcatcactagattttgaaagagatttttttcaagaaataaaatctagtctgaacaatttgttaatagggaaaagagattggttggtcgctaacagaaataacaaatactactatatacgagctgaaacagtcattagaacgaataacgacaaaacctattaaactgtccgcgagatgcgaacgttcgacgattagacccaccctcgtatcatctccttgacggatgaaaggtgaaatcctatattgggccactgaatttggacagctccaaattagcccatccagttatggctacaacctgtagagctcagcctagtcctgccgtcctggtatgtttgtcaagggaaaaatgtccacttgagatctctcaaataggagccaagttttcagaaaaaccgaatattgaagcatcctcaacttctaaatcagcgcaaattatattaagtcccaccgttattttggacggtggttttcgctgatgtgacgtgttgacccaattatgttctacgtgacgcttacttgcttacaattagggggggatccatgtgtcattgacatctaattcttcctcctccatcccttctccccgccaggggatgcatcaacgatctacgttgtcaatacccatatacatacatacgttggaacttgctgcttgcattatcgcatcaagaacatcatattggtaaggtttgggatttttgcgatgcttgccgtacatcctactccggcgagcggcggcggcaacatgagcagcagcaggagcggcgcggcggcagcgcgagcagcagcaggagcagcgggacgacagcggagtgagcggcgcggcagcagggatggcgtggagcaagcggcgcagcggagaagagagagagaggggtagaagatgtggaagagagacaggcagaagatgagggtattttcatccaatagatgtaaaatacgtaactcgtatctcagtggcaccactaagaatacaaacaagtagcagtggcatcgttacaaatatcaaatagtaatggtatatatatttcaaaaccacaaaatttttaatggcatggatctaattaacccttttatgtattacttttcttctaatgccacataggcatcacatgagatgaagatcagatcaacaagacgccacatcagctaaaaccatccttaatactgtcgacttgatttaaactagtattaataatcaaaagacttactatatccgattttacggttgaaagagaaatgaagcttgaccaatattttaggagcctaaagtggactcttctttttctttgccaaatgaaaatgaggcgcatctagttgacccactgatgatagcacacttatggctcaatacgaggcacatcccatattgctaccaatatactccctatgtggccaaactaggagggcagtcccctcctaatataacaaatctgaaaaaaaaaagctgtctaaattcgttgtaatattggtgtttttagaacggagggagtagctctgattcacattgttaatcgcgccaattgatcttgttgagatgaccatcttacgttacgtgtggtgtcctagtgcctaaccagcacgacgtcggccgccaccgtttcgccagcaaagtagtacgctgaggccgcgcaccaccaccgtacgccgtctccggcaaggtttgctctcgacagtctctgcacgatcgcggctgctgctcgtccgatccaagtacggcaattgccgcgaccgatcaaacgagctaaaccgctgcatttgtgtaggccgtggatcggtgaagggctgacatgagccgtgatgcgtcggcaggagcctctacacgacatggtcgttcatctcgaattccctatgcatcccgttccagattgttacttataaccaaccatgcaccgagagacaacgtatatatgttctagttctacagttctactactgctgcatttccaacagaacagaggaaggggatggtttggttttccagttttctattttctgattctatacccagagttgtagcagcaacactagctagcttatttatatatatgggtacttggcgaggtactacctccatcctaaaatgtttgacgccgttgactttttaaaaaatgtttaaccgttcgtcttatttaaaaaatttaagtaattgttaattctttttctatcatttgatttattgttaaatatacttttatgtatacatatagttttacacatatcacaaaagtttttgaataagacgaacggtcaaacatgtttaaaaaagtcaatgatgtcaaatatttagggaagcagggagtataggtagatatgctaaagttaattactaactagcacttcagcgttacatcaaccagagaggaggaaggcaaacattaccctctaagcattaaccagtccctcgtattttgttacacatttaaaatgaaatatagggaaaaatacagtttatatttcacggccaagagtgaatttatttctctgctttgaggcactaaaaagaaatatcattaggaggtgggaaaacacattcgtctgtattactgttactgggcaaagatgaatgcactggctttcacatcctcaaccagtcaacctggttcgtgtttattattgtttgaatgatgaggatgaagatgaaaattaagtgtttcacgcaaaacgaggttgtaataacatgtgattaattgagttttaattattctaaacttaaaaaatatattaatatgatattttataacaactttcatataggaagatttcgtacaaaacacaccgtttagcagtttgaaaagtatgccacaagtatccaaaatttaatccaacttttgttggagaaaataatagggcacaaattgtcgttcggatagtcaggaggagtggcttcatggcttcatattatcgtattgtatttgatcctacaaggaatcataaattcccaatcttgagttttagtcatggctaataaattcacaactaaaagatgcaatattatatcatgtttaagagttatgatatttggcttaaaattgaaaatccaaatgaaattcctactcagatcaatattgttgctataaaaactgattttaaaatcaattgtaaagctcgccaaattttttttaatggtatttcttattcggattttgaccgtgtctcacatcttcaaactgctaatgagatttggaaggttttatctaattttcatcaaggaacttctaacatcaaggaattatacaaatatgtttttaaaagtagtacatgaaatttgaaatgaaatatggagagactttagatgattattttgtgtgctttaacaaagttttaagcaatcttggatctgtagattgatcttacaatactaattatccctaatataaaatttcactacatcttttgaaccgtcttggtatgttaattaggaagatgaaagttacatcaatttaagagtctgttgttttacattaaactcaaaacccatgacatgaatattctttctcgtaaagttgattttaagtctaatgttttggtttctttttcatcttctttttatgattgctcttcttcatcgacacctactgtttttactgtccttaatgccatgtctaatgaccaactcaagcaattcgttgggaaggacttggttgtgcttattaacaagttgtcttgcgttgtgaataatattaggtttagaatgtgaagagctacatcatacattcggcctgattgcccaaaactaggaagaactaaactgtggggtagactatcaacaagcatgcatggtaccacaattttgactctactgttgtgtgcagatactgtttgacttaaattcccagtacatcccattctcaaggcatattcgaaccccaataatgcgcgcaatgctcaactcatgtcatcttagaaggaaaatatactcaaaaagaagaaggagaaggaggaggaaggagattaccaaacttcaaaattttcatatgttgattctgacaccggccggaaaggagtagggtgtatatatatgtatatatatatggttattggtcggtgtagggaagtacacatccaagtgttttaagtcctaaaccaaccactcaagtgttaaatatagtacagtatgttcatcgcacaaattttgacaatttgaccctttgcaaaaactatttttacaaatgaaccgctgctaaaacttgtttcaaatctgacccttttgctcaacgccaaatcatgtggcgctgagcttagacacctcagcgccacgtcagctagcgctgaatgccgtgccacgacagatgggagactaagtcagcgtgccaacgtacattcagcgccatgctatttggcgctgagatgtctaagttcagcgccacacgatttagcgttgagcaaaagggtcagatttcaaataagttttggcagcggttcatttgtaaaaatagtttttgtaaagagtcaaattgtcaaaatttgtgtgttcatcatagaggtaagtgttctgaatttatgactgcacggtagtctgcactatggaatgtgtttctcatcaaattggtgatctaggtgtgggccactttctcaaagacactaaatggagagatataaaaacggacggaaacaatatatcattttaatgaaaaagattatggtccaatttttttcttgttttttagataatggattaaattaacctagcctctacatcccacatggatgtgcgttgccaaagaatttttatatttaccaatttaactataaagtaacaataggatttggtgttaaaaaaattagaagaatcaaaatttagagatggaaactgtggaaaatggtacccttttatggaaacgagatctgccacagttttaaccctaaaacaaacacggtaaagacggtcggtaattagtgtgacttcgtcaatatatcggtttttcaaatgtgctcttaaagataagatgtgcgtgtgcgcattcaaatgggtgagtgcgcacatgttgtttacgtcttcaacaatactcaattttactttaaggtccagaacaaaagcacaggttttacatggtagcatggtgaatttttttaacgtggtttttgcaaaaccaaaaatcaatatagaaaatgacttgattttggcaacaattggcagttcgtcggtaccgcgatgcaagggttggctgaggtttgtgactggcgagtagcacggtccatggtggcatggtccctcctgctgcagaagcctacggcagcaacactccaaccacctcctagctcttgtgcatagaaaacgaaatgtagtagagcataaccaggaccgcattttcataaagctaagatgaaacggagcatatgcatatcgttgtctttcatatcgaattccctaccccatgagtcctattcccagtgtatcgtaccttatctcgaattgagtcggtgcatcgagctagcttttttgatatgcgtgatgtgtccttactccttacatacgcagacaataacagagtcaatatctatatatcgataagtaatccaccatgtttcagcagcacacaattttcattatatttacagcttcgatgattgtatgctacacatacatatgaccatgcatcatgcgggaggtgtcctcagggcatgcggctttcctgttccctgccatacgcaacaggaacagggaagccgcatccgacacgtcataccatgtgttggtgtacacgtcataccctgtgttggtgtataacgccgcgccaacaaaggtttgtgcgtgacgagcggcaatggtcgcagttgcactgctcatgcgagccaaagatacatatcactgtggcctttcaaatgaactaaagcacatcatttgcttgggccatggatctgcgagaggctgacataaactgcgatgtcttggcaggagacgctcacaagattaccaggcatagggaattcgagatattaaaaaaattgataccccgagttacataatacttagaggtataaccttttacaaattttacatcgtcatacaaatagtaaaattaccctcataaattagagaagcaacgtaagataatcatatgacttaaacctatcatttttttttttaaaaaaaggaaactgcgtgtagagtcattgtagaaatcgtgtctatctttgataaatggaagattcttgccaatgataaatggaagtttagtgatatttgttatctttgtctttaggttagaattctaagtagttttctcttttttcatcaagttaattcgtatttattcgacatgcaaccttgtcttaaagtaaaggccagaataaataaaaaatatatttaaattacttaactagttaaggaaaattcttaaaatttcgaagcaacataaatcgttgtttgaattcaatatatacaagttgaaaaaagaaataaatctgactattagtagtgcttgtactacctataattaaattttattttctcgatacatagattgggtttggaattattaagatagatgatcacttcaaaaaacagagtttttataaactacttttgatgacatttgagagcttagaacaaacatttgaggggatatcccttcaagataagaaaccatctcctacactgtttctcctccaaagcaaactcaaatcaaaaccaaatttgacgacagcatcaatccatcgaacaactctaaagaaaccttcctttcctagatgaaccattctgggtgattcaggaagaactgaccaccgaacaataatgccccacataggactatcactttaaccatgctcttaaccacagtgttgaactcaaattcccaacacatcctattctcaagacatctcatgaacaaactaccaattaatataatacttgactctagtcaccttcaaaagaaacaaaggaaggagattgttggaacaaaatccatcggagatcaagcaaagggaaagaagggatgtagttgttctctattcattcatcgtccccctgaaagggggatgacattcttatatagtagtacacaagtatgggagattacagagatagccctactggacctgagctagggggagaggctgtaggtcaagggattagaaagtgaatatcatatttatatgtgggtattttagaaactactatgaaaattaattttcacatacggttgttgacatgtagacaataaaagagtcaacatccacatcttggtgttcgaacaacaaccgattctcatttacagaatcgaaagcattacacgctaaaggttttctttgatgctatcttcacgaatcgcacaagcagcctagctagagaaaatcaaacgtcattgctagatatatagtaattgacaatatcatcttacaaggcaaaatcgtcttacaaggcggggcctgcatggcagatagcattcgctgacacagctgcatatgcctgcgtatgcatgctatttttgtataggattgaacaagaccaaacaaacctaccagagaaggggtgaattatagggaaaaccaaaaaccaaaaatcttttgcgaaataaaaaatttacttcgaatggagtagatgacgaacccctgtacgtagctgctggtcaaaccgcctcgaagccaccggtttgactgtcgttgtttgacggtcagaccgcgcatacacccgtggttaaaccgccgatctcccgccggttagatcgccgccttgccttcggtcaaaccgtcgggacacagaaaacactggtatatgacaaacttgaagatgtagattgattttacatgttgcgtcccgaggcgaccgactacgcctcctggctgcacatgccagaccggctaaggcttccacgtgacgagctgcacggtgtatgctgatgacccttgcaacccgaaccgggacaacgccttttctttgttatgctctgcacataaaatgaactagaacacagcagttgagtaggtcatgaattcgtcagaggctaacatgacctgctatgcctcaacacgagtctctctgcgttgaggttgtttgtctcaaattccccatacatctcattcttagagcagtagtgcatcatctgttggtttccaaaaaaaataaaaagaatagcgttttactttttcagtctttctcacaaaacctagaaagcagatggttatagtttgcagttttatatatattgctgattctgttctaaggagcagtggctaacttatttatggacacttgaattttgaagaggtactagcacttcagcacaaccagacgagaggagaaaaaagaaaacattactctctgaacatttgtactccctctgtcttaaaatataatttttgatgaatgtgatatatcctataagtatgaatctggaaaagctttctgtccagattcagtcataagatatgtcacattcacttaaaatctcttatattttgggacggtggaagtaacaagctaataagacatagtactaggaggtggaaaaggcattatttatgaccaaagtacaaggaaaagacagtatattttactgtttatagtgaatttctttttactgtctatagtgaatttctttctttctgatttaaggcactaatgagaaatagcactaggaggtggaaaaatattttttctatgatgcttgcaactggtcaaagatggatgccgtggcttgcatagcctcaacttgatccaggtgaacatcatcaattcgtgttctgtccacgcgaaaaatacttctgtgctcaaaatggtttgttctatttttatcgatgcgaggagtggctttcttcatcggaattgtgaaggcgtaggcacattaattgtgccatgccaaaaccggtcgcgttggttaggagcagcttaaggtagattcaatcacccgactgaaaaacctgttgattatttgatttacctcgggcaactgaagaagactgctgcagtcatgcagatcgatagtgtccagaggtccgcagaggccttgggcgacgtaccagccggcaacaattcttcactactacagcagaacgaggtgatcttgcacatgtgcttcattatgcatgacgggctcggctgaggatcgcgcacgacgatcagaatgtccgtagctcctgtctcttgcaagcaaaggcgccaatcgcaacgccgatcaaatgaactagagcgcatcatttgacgaggtgttcaatctgtgagggggcaaacatgactatcgatgcctcaagacgagctttggttggtcactttagttcatctcgaattccccatgcatcccatcctcagggcatcgtatcatcgaactaccgggacaacattctactactccagcttcaattctcaccgctgattttctcataggcagaggatgaagagatggtttgggtttatagttttctactagtgctgggttgcctgagtagcagcgacaactagcttatatatatatatatatatatatatatatatatatatatatatatatgaagtgacctgaaattaccagcacttcagtactctctcaagagaaacaattgagtagtagttagagaaacccatgcaagcattttctctgggtcatctaggctataacctgcagaggccggcccagtttcgttatctttggcaaaggaaaacgaggcccatctatgcccatcgaattttgggcctaccgaaaaagatatgcctatcataaaattgaccatagaattaatccacactgattttagcctacacaagtaatttccatgggaagatagggtgaaaacagatcagattcgaacggatggtcgtaccatattctaaaccatattttttaatggtttcggagctggtacagatagtgtgcatatgcggattgtctcagatgtcaaaaatgatgcggactcagttcagaaacggattaaaattatcgaatgttacatgtatatacaatcaacacgacatcaacttagcaatacaataataaatgaacgatcaattgtaagtactatatgtttaagtgctaaaaaatgtgaatacatgatatacataatataaatatgcagttatgcaagtgaaagacgacatggtgagagtcttactctaggcagtctaggttaattgatgaattataatatttgatagttgatacaaaatcgctaatgcacgatctgtcgctagaatctcagcgtcgtgatcagtttcctttccctttttgccaggcttgtgctcctgaaatcttctctcttttttttaccgctttttgtggttgtttctcttttttttttttgtcaccggtttcgatggtaccaacaagatgtgcatatgtgcagagcaaaatttgtatgcggctacctgcgtgggcctgctttcggccgaatagaaagttcataccatctttttcttttttgatttaaatccatctatggaaacttttcatatctaaagtttatgcgtataaaatttctagatcaaaagtttgtgtgtataaagtttgtatctgtaaagtttatacatggatgtttgtatgtcagaagttcttacatacttcctccgtttcataatgtaagtcattctaatattttccatatttatattgatattaatgaatctggacattcagattcattaatatcaatatgaatgtgagaaatgttagaatgacttacattgtgaaatggaggtagtagaaaatagcacgttgtgatccaaaaccacaacctaattacacttagatgttaggtcaccccagaccactaaaaaactagtacgttttattagggattattgggcaatagacatcaaccaatgcagacaactatatctaaaactgaaaagaaaaacaagcgcgtggatgtttatacaattatacctgaaaatgcattaatgcaatcgtacacacgggcattaggggtacccgtctcccaatgcgatcgtacaagcgggcattagggcatgtacaatgacgtctaataacgggctctcttcattgtcatgccagtaaatttggtgacgtggaagaaagagaggaaaagaatacatcgttgctacacatgacaacggctcagagtcgactgttaacatttattaacgaaaaaattgttgcaagagggtggaaaaaaggaaagaagtataataaaaactatttagtgcattaattaatggtttagaaatcttattatctctactattgtaggaggatagtctctagtgacattaattagtatagagagctcatattagactctacctttgtacatgcccccgtctcctttccctctttgccagacttgtgtgtccgagatctgttttttctttcccgatcacgtattccgtgtgcacgtgatccctcgcatattagagctacccaatttgatgggccgactcatattgtatgcaacatatagaatggttacttatgttaacaattttagattatctggcaaatagcctaccggataatccgcatccagctgattttagagataccatatccttatttgcatccgcaccacactacccgtatccgtatctttatccgccagatttttataaactcataccatatcgtcatttcgaatggattcagagtagatcaaatatcatccgatccgtttaatgtggttatgtgaacagttcgtattgagtttggagtatgatcgtttaaagaaatgtcctaactaagcggagcatctttccatatcacacaagcaaccactaccacagaaaagcaaatacaagtcggtactatagatgccggaagtggtaaaaccggcacatatagaactttacctgcccgcaccaaaccacgtgccagccagcctgcaaaaagcaaagaaccggcacttttaagcgattatagatgtcggttctaaagaaaaacggacacaaataccataggtgccgttttttaaaaaaaatcaacaccctgtaaaatcgagccaagccgcacaggggagggtgatattttcaagccgttcttatccatctggccccacctctctctctctccttccttctctttcttctcctcttctcctcctccatctctcgcatgccctcccctcggctgtcttgcacgtccaccccacccagcgtcagcggcgacccgacggtggaagcggcggcagcgcctcccctctgccagatccggacgggaggggaggcgtcggcctgacacgaggtgccagggcagaggcggcagcgcccttcgccaaatccggtcaggaggagtcggcgatggcctagtggcaccctcccctctatcaaattcggcgggagggggcggcggaggcggtggcggcagcgtctcccctctaccagattcggcctgttataaaagcagccccgaaatcacatcggaaaccaaccgcggaagaaacgccataggagatccacacacgatgacgacaccgaggcacgatatttgataacggagttcagccgaggcctacatctccggggcactgattacgggcgctccttcccgatccagcatatacagcgtatcagagttacaacgactcacagccggtcgccgccggcagccgctccctctcactatgctatgtcgccatgcggttacaacaggcacgccccctctatttatgagaaatcctaggacagaaaccgactcttactctagtcctatacctagtacaactccaagtcctaaactgtaaccgactatgtacacatattcgacataaactctaacaaactccaccttggcgaatatgccatgccaacctgaattcgttacttgctcgaacctccgtgtaccaggacttaagttgatcctttttcgccgctcacaccgagctgcctcgacaagcctccaccaggttcaccgtaaacaagagactccactatacctgcaatttcttcctcctgactccacctgcaacagtgctccaccttctctcatatcatcacagtcgtcttgccaagcgaaattgaattccttcctagctatcacgtcatagacttcccgaagactatgttcacctccatctaccatcttaaatttgacttgatctaatccatggccagataaccgatgtcatcaccaaatagataaatcaaactcactagacttgaagagaaccctttcttctttgtcgtcttatgaaccgaactaacgaatccaacatccacgctttccgcatccatagactgagtatccgataatttgagaagatcattgttgccttgaatcacccgaagaaattaccaccatagcatttgctcttcctcttcagtgacgcagattccatatatccccatcatgcaatccccgcagatcctggatatatcctgtactaccaaacagctcattgacgccctcaacgattttcattcgctgttgcccgggattattttcacccactgaagattgtctttaccgagtcgtaccaacacttggcatcttactgccttgctgcatgcatcaatttcctttgctttctcgcaaatgccatgactccacaagatccaagcatgtgtatttgacacacacgcgtgtccttccctcagatcttgaactggccaaatcaatgcacgaatgaattaacgttccatgcagcccatagcctcgtcacgtgcaaagccacaacagactcaaccataaacagcctaaccagcggaccgaccggtcttttccttctccaaaaaaccaactggtttttctatcggtaagacccagtcaacacagaaggaccagatcgaccctcttctcgctccttcgctcgcgtctcctcggcccaagtgcgccgccgcccagcgcctacgcgcctcttcccagccgccactccttctgctgaccatgagcaccagagcccgtcgcaccttaccactcctccgcgtccccaagaaatagcgccgccgctgctactgccgcagcctaggtttctcttcaacgctgtcgcccgctggaaggcgctgccacgcacgggagctggactcccttgcgccgcctcccctcaggacttcgccggtgagggcaaccaccgttgcttccgccgtgggtttcctgccggtgaggatgccgacgcccacgggagccacctccccgatacaggagcgtcgccgccgccccttcgccagtacctgccacctcctcgcaggagtcggcccgcgtcgaactcgccggcacctgcacgacgactacaccaagccgtgctcctaccgctcgcagttcgtcgcccaaaccccccgccgcccaagaaatcgggtacgatctcttcgttgctttggttggtttgattcgattgcaatctctgcaatcctgtggaatccctgctgcttctattttgggtaaaacttgactccgattccaaaacgaatacagtcctcgtccgtgccatgtgtattgaaatcgaaccgtgcccgactcctataccatgacctccaccaagtcaagtcctgcatgaacccagatcgggcctgctactaccagcgccgcttctgtctccgtcgccggcacgcctcaacgcaaaatcgtgcacaccaccacgaccctgacctccaagcttcacgtacgccagcaacatcctggttccagagcaaacacacacagcacgaccaccgacatcgtcaacgacttctgccgccaatatgtactgattctatgctgacgcttctctgttctaccatccatcgcatgtacgctgctaagtagcaatcctccatgcagtaccttgtcgttaacacctccaaaacagcctgtaggatccacccgctccgactttcgattgaacgccatcaatctagtcgcgaaccgaagccgacaagtcgcgtgtcgtcttcccagccgccgaatgacccgagtgctacatctagccgtctccctgtcgaacgcagctcatcgaaaggcctaggccacccgcccagagtgttcgattccaccgatcgagaacgccaatcacctccagcttcaatcaaccccgagcgtctggccagccgctccctgttgaaaatagctcaccggaaagtttgagccacccgcccgaagtgttcgacccaccaattgaattgccaatcgcttccgccgccatcaacccgagcaccacgtctagtcatctccctgttgattgcagccatcgaacggttcagaccaccgcctgaaatgtccgattccaccgatcaaattccgttgatcgccgtcgtgctccaccttgcgtccatgtccgtcctggacaccctgtgtagtcgtcgcagcgtggagcaccaccctcgtacctctaccatggatctcccgtaggctctgataccacttgttataaaagcagccacgaaatcacatcggaaaccaaatgcggaagaaatgccataggagatccaaacacgatgacgacaccgaggcacgatatttgataacggagttcagccgaggcctacatctccgtggcactgattacgggcgctccttcccgatccagcatatacagcgtatctgtcacgcccggaaattcactagtaatttccgaacttatttgtgcataaaatcctcgtccaggaatcagccgaggtacacaaactgacaatttaatatacaaatccatcataataataacgttacacacttacaaaagaaaagaaaacagcagcggaataatggtctagcgatggcttcagctccactcccacaggcagctcaactggggtataagccaaacgtcttctccttctggatcctttttcttcaaaggaggttgattgattattgcaagaatgagcatatgacatactcaacaagccacacagcaaatttgcaagtgcacaaggataccaaaggatggcataatataggctcatttgcaaaagcaacatttagcaaaacatttaagagaagtgaaacagtggagtaattaatcagaaattttaatcaacactgaacaacacacccatgctgcacaggcccaaccatcctgaacaaccatacccggttgtacagatctaactccaaaccaggagctaagcaaattattaccaggtataacatccataattattgtgagaggtgtgagactaatcacgaaaaacattgctcaacccgcccataaccgcaggcacggctattcgaatagttttactctggccagaggtgtaccactgtacccacaagacacagcctcaacatcatgtctaccatgcgtcgcgatactggaaagtacccgaatagaggctgtgacaataccctctgcacatcacaactcaccacagtgcaccattcctggatcataatcacccccttataaaacaaggcatggactccccagcgacccccgtgggcttgtctccgccacttctcagtctggtgctccgcaatgaaccatgttatacaaaaggtaaagccgttgcccacgctggcttgtggttggcacggttaatgtttcacaacagtagcttgcgaaccggtccttaattgccatgagcacgaccttcaaaaccatgtgctcacaacccaccattaatcatattttaattaccaattaattatcataacacgattaaccatcgtgagctaccattaaatataaccataaataataatgtactacatatgattcatcccattagtgagctaatgtttcgaagcatggctaagcaattatatctaacatctagttgaaccaatatatataaatctcaactagtcaaattataatatcccaaggtatcaaggaatagagtaatcaatgcaaacaggccataacaaaggaatagattcacaccacccagtgacattcgaaaataaatgcacagttgaaataaatatagaatttaaatataggatcaacatgctcaaaggattgtatttagtatctgtgtgacttgccttgcaataatcggtcttcaattaatcttttgaacactcccgacgcactcacaaaccttcgcaacgacggaaacgacaagctaacatgcaaaacgaagaaaaagactaataaaaaccaaataaacagtacaaaaacaagcataaaaagtacatataaagtaaacaaacatgtggatcatgattttagatgaatttagcaacttgaaccactcaaaaccgagttacgatgatttagttatgaatttccgaagatttaatctattagaaaaactggaaaaagaaaaacgatgatgacgtcatgatacctcatcaatggccggaccaagatggcgacctcgccggagattggatggtcggctgcgactttgaaggacatgtacacgtagaggacgacgagacgaacctaacggtactcaccctcgaaccaaacgacgaacgacgacggccggcgatgaggtctagcggcggcgcggcttcggtcgacggtggcgccggagctgcggtggtcggcggcttcgggggtcaggcggccgggcttctccaccctcccgcgcacctaatggtggtgacggcgaccggcggcgacgacggaggcggcggcgcgacgcggatggagctcggccggcgacgatggcggggtggagcacgtggcggcggcgctacgaggcacgggagatcacgggagagggggcaaacgaaagaggaggactagggggtcctatttatagccttggattgaagagatcggactcctctcgcaagaaatcgatccgggaaatcaaaaactcggttttggagataaactcgaaaacgagttcgattcggataagatactcaacgattagctcagatttttggggtaaagatagaggaggataagaggaatatttcccctcaactaaattgaaaaaaggagcaacggggaggcgagatttggaaggaggaggcggtggcactgtgcacggcacggctggctcgggctctgcctgagttggaagatgaacagtagcgcggggaggggaagtagacttcttgccgggcttttcttttctcagcctgattagaagagggagcataactggactttggctgagagaagaagagaggatgcaggctcgggttggaccggcggaagagagaggaaggaaaggaataggccgattcagcctaagacaagggaggagaattttattacttttccaattaaaataatcacttaaatgatctttgaattgttaaaaatacttccaatgctcaaataatttcaagaaaaatcctgaaaatacttggacactcaaagtactatacaaaattataattagaccatttaatgattaatttaatatgtgggtaattactgaaatgttctttgtatgattaaaattaggaattgagctccgaaaaatccgagaatattccagagagtataattaaccatggagaatttaataaaaattaaatccatccatgctttatatttaggaaattttatttcccacatttaacttcacttgtaaattaatgaacatttaatataaattctaataataatttattaaataatttataaatcctgaaacaaaaatcaggatgtgacagtatcagagttacaacaactcatggccgatcgccgccggtagccggtccctctcgctatgctatgtagccatgcggttacaacaggcacgtccctctatttatgagagatcttatgacagagtccgactcttactctagtcctatacctagtacaactccaagtcctaaactgtaaccgactatgtacacatattcgacataaactctaacacggccgagaggggaggcaccggcccggcacaaggtgcggctgtggcctgacggcaagagagatgacaatggcccgatgggagttgtgttctttctgttcatgcttttctttctgttcatgtgtgttcttgttgttcttgcatgtatataaattaaattgttgtatgcaatctggttggggcgaaggagatttactcgatgcatcgactcaaatcaagccgatgcatcgagccgtttttttattcttgaaacctcaaaggtgtcggttctaaaccagcactgaaaccaacatccattttctcttcataacagtgccgccttcgttgtaccggttgaaaaaaccggtacctatggggtttcccaaccggcatctatcaggtgttctatggtagtggatgtaagaaaatcaaagagatgcatgcatatgcctgctggatggtgaacacgatccgattaacatgaggcaatcctagctaatagatcgtcttataagcaacaacgctccatgtttccaccatcaaatcaatgcactctgtccacacattcaggctcggctaaggcttccccgcaacaattggcacggttcatgctattgtcccttgcaagacgaacaggaacaccatttctgtggagattaccatatacgcacaaggcaatgttattcgactggttatagagaataacttatatgagtagaatatgtatagatcaggactcgagtattatgttaactggcgtatcaaggaaatatcttgtagttctagtcagttatgattgtaaagtatatatagagctttagactgtaagggataaagtctcttgtaatcctgactacttcgcctatataaggaggggtcgggtgccccttgagggcataaccacaccttagatcgtcagatcaataacataatcagcagaatatttctccggacaggagtaggtattacttctcatcgagaaggcctgaacctgtataaatcctttgtctcataacccatccactttcctgcttgttcgctacccctttaatattgccgaaatctagtttcgacagttagcgcgccaggtaggggtagcgtcaagtttttttgccaactagtgcgattggatctacatcaggtattactttgccttccctccagggcaggcgtaccgcttcggcagcctccactacaagaaaaatgctttgtagagacatttttctagtactatagagactcttttcaaatgcctttacaatactatagaggaattttaaaaaatgtctaataagtgtcttatggtgaattgtctctacaaacgaagatgcattttataaaatgtctataaggtggtagaggcattttctagagacattaaattgtaccacaaccatatgaaaccaatgtagaaatgagaaaaaaatattttcccttgttttttgtccatccttgaactcatgatctcttgaacaaatcattcttatcttcaaggcactaaccaactcaaccccatgtcattcattgtatatgtttatgccttaagttacttatatttagccatttagtatacttttattgtaagaagtgtctctacagagtttaaagtgtctcaagcaaatgtctttacatgttagacacattttaaagtgccgaaagaatgcctttacaagataaaatctaataaaatgtgctgaaaatatttctaaagtgtctctagagtaaaagttttctagacaattttgaaagtgcctatataaagtgtctctacgctataaaactcctgatcttagaggcaatttgcaaaatgcctctacaaaagtgtctttatataatgtttttgttgtagtgctcgacttcatcaccgacaacttcggcaagatcactcttctcgactaggattcgaaccagtcgagaagagacggcggcttggccccgtttggtctcccgaactcggccaagatctactccaacatcatctctcccgagttggcttcgaaccactagggcgagacccccaagacttctttctcttcactaagcccagctcaagacacaccggtttacccggtgatcaccatgcgactcctagacgacctcaccaccatattcggatcaaggacatcctctccccgcaggtctcgatctaatctgactttggctcatattgaatctggctccagggaggtcggtgttatcttccagccactcggatcttgctcatctaccgagatcgccagctatctcagcccttcaagcaatggctcttgtgcgaacaccgagaccatcaactacagcgacgtcgacgatgagtacgacttcgacaacttcgcttgctacgacgattactatggtctactatgacagtttcaacgataacttcgcttgctacgactaattctatgacttctttcttatgctctcagcacacaggatgaactagagcacagtatttggcgaggtaggaaatctatgagaggctaacattacataggatgcctatgcacgagcttctctacattgaggttgtttgcctcaaattccccttgcattccattcttagcgcatcacatcgtcgaatcacagagatagcgttctactatttctcacaactgctttctcacaaaacagaggaaggagatggtcatggtttgcaattttatggtgccgatttctgccctgaggagtagtggctagcttatttatttatgggcacttggaattgaagaggcgctagcactttcagtgcctcacaccaaccagacgagaggagaaaaaggagaacatttcgatctgaacattggtaacacattatttggccacatactcacatatatatataaccaaagtacaacgcaaggacagtatattttattttctacagtgaattatttttttctgtgtgatttaaggcactaatgagaacttgtactgggaggtggaaaaatatatttttctatatgatgtttgcctcaacttgattcaagtcattcaggtggacatcatcaattcgtgttctatttgatcaatacaatcatatgtacttggacgatcacaggattgaaacctatctatttaccttgagcaagtggagaaggaagtgtagcgtaggatcgaacatcaagaactaagccaatcaaagggggggggggtgaatggttgatgtacccaaaaaccaaaacttttagcggaaacaaaagttaccctcaatttcgacgaatcgcggtctgaccgaagtagatgcgtcggtctgaccgagattgtatctccggtctgaccgccaagataaactgccgtcgccggtctgaccgctactaacccgtcggtctgatcgctgcgatgccgccggtgtctcgccggttagaccgccgaacccgagtaaacacaaatcgaagaactcttgatgtagatgacaactttattacttctatctgtgtttacaaagtgcaacaatagcactcctcacgaaaatttcgactaaactcgaaaccctaactcaactctcaactcaatgctctcaacagcaatactaggaagtctcacgctccctctctatttatacatggggtaggcagcctaaagccacgaactaaactcatacaagaagtcctaatctatctaggaaaccttgtcgtacaagaaaccaactttacaaactccaattatatcaaatttggactccttccaaattcaactttgcatcccatacacacacaatatgtccatcgtatgccatataaaatcttcaccaaccacgtatattgatcgttagcctaagtatcccacatgatatctgaccgtccggacgtcaccttatctccaagttgactcctgatccatcaccggcaaaactcccccgcgaggcatcaagtcacatacacatgaatcaaacaaataaaccatattcctagaccaagctatctccaacttaactcattattagcaaacaacagtattacatacgtatagtatctatctagaagccataaatacaaaatatccacggatatccaatcaaactacccgaaaccgaaaccgacgcagagtcggccggtcagaccgcaggctggccgatctgaccggcagcacccactcggtctgaccggacctgacaaaacagcagcacctgaataacacttgtaaatccaatcatctccaaaaccacttcaccaataatcctcaaatattaaaaactataatctcatatgccaattgttcatcatagaataagaatcaaacacaatttgattttacatctagtcatgcagatcgacaggtagtggccggagctctggcgaggcaacgagcgacataatagacccagagttcttcttttcctttttctagactagtcaaggagggagtggggaggagcttctcctacctgaatgttggggaaggggtaaaaagtttcatatcacgccatagtttccttttcgggaatacgcaaaaggataacgcacctttgtatcaggaggaataaaattttacaaacgggaccaaacaaaaaggaaacaatagccaagagctgagaaagaaaaagaaactaaaaaccagaggaacttacccctattctcacactacaaaatagatgacctagtgacctagcaccctacataggaagtgcaggctacaaggccctggcaagccgccagagggtggtttcctgcaccactctggcggctcctacgtcatggccatgacgacctcgggccaggacggtgtgcagcggctgaacacatgttattcctttccttccaatccaaatagaccaagcaccaagggtagggtgctaagaaaatcattacactgcttaggaaatcatttaattactgtccaattaagttattctctctccgttttaaaatgtttgacattgttgactttttagtacgtgtttgaccattcgtcttattcaaaataattatttattcttttcatattatttgatttattgttaaatatactttcatgtacacatatagttttacatatttcataaatttttttaataagacgaacggtcaaatatgtgctaaaaagtcaacggtgtcaaatattttgaaacggagagagtacatggtgaaacattttattaatactgcctttgtgaaatcccagaatcaactggagaagacaaaaaaaaaacctaacgagataattatgcacgcgagaagttattctgcccaatgctggtcgtttcaccggcaactccacgcactgaaatctcgcaacgcgcgacgagctctcctgaggtttgcgtgacgagcaggacggccccagaagatccttgcctcttgcaaaggggacaatcgcaacgccaatcaagtgaattggagcactgcaattggcaaatattttcagtctgctaaaggctaacatgacaaatcatgcctaagaaggagccttggaatgtcatcgttgttcatctcgaattccaaatgcatcccatcctcagggtatcgcatcgtcgaactactgacacagacattctatagacgttctcttctcaccgctgcttttccgacagacagaggatgaagatggtttgggcgtacagttttctagtgctggtgatactgccgaagtagcaacaacagctagcctttttatgggcacttggcaaggtaattagggttctgtttggatcgaagggatattttttaagccctcccttaaatagcctaaattgtcaaaaaaaatctaaaaggatgagctaattgagggctatttgaaaataacccaccaaaaaaactattccacccaagaggtgctaattggggctattttgggtagggcccactgaaaaattgcattttctctctatctctctccataggaagttacattaaagaccaaatagctcttaaaataaccgttggatccaaacaacttagggctattttattggagggttattttcttgtgaaaaaaaatagctctcaaaataactctttgctagttctccaaacagggcctagataagatatatggcacttcagtgctacaccagccagagaaaaagaaggaaaacattactctctcagcattagctagttccatgcatttcttttcacacatataaaacactagcgatatcgtggtgctctctctattggtaaaattatactactagtagaagatgatctgaaccgttcattattaagaaaaaatagtaatttactaatactacagtgattaggggtaactttgtcattaatttttttcccacctagatcaatatatggtcatctataaatatgtggtcatctattgctctggcatcattcatattccatcaaaaagccaaaagaagaagaaaaaaaatgtttgcactcgtatgaggagtactaattagcactcgatgatcaaacgaccactaaggcactaattaatcactatcatgcgccaattgaattacttctgaagaagtgacgtttccaaattgcaggtttctggaaaagcaaagacctgaactgtttcttttgcaattttttcttgatttcaatacctcctcaacatctttgctttgactagtatgccatgcgttttgtttaagtgacgtgtctttttttttcttcaatacctcctccttagaacgctaaaattgtttttcggtaattaacttagagtgtctatatctataaaaaaatgatttcgtttggggtggtgtattatattgtttgatttggtatcactttcctagtatgttctttttaacaataaaaatttgtttgatagtccctccgtctacaaatttaaaagattttgcctatatataggcaaaatcccttatattacagtgctagcaaatcgtttactggccaattaaaaattgggttaattggatccataccactataactttactaaaataaaaaaatgtcactattattcgttatatcggctacatgtcactggaaatttctaaaattagaaccatgctactccagtcacttttttcatcctcctctctcataccgtctccgttcctgtctcattccgaccaccgcggcggacttcccgacgagggcggcatcgacggcgaactgggtgaggaggtccgggtgagtcgaatctacgacggcgagggccgcgtcgactgcgagctaggagaggaggccctaccaacgccaccttactgctggtggaactgccatgcccagcttcatcgtcaacaagcaatggccaaagcgaaccaatccgaacaaatccaaccaaatcaaaagaatttatcctttctctctttttgttttctcatcaagaagaggaagaactcacggccaagaaacaaaagtcgagtcgaatcaaatctaatcgaagaaatcatgctcctgttttgcgctcatccagcgatgaggcgttcacgggtaaggccgatgcagcggtggtgccacccctgcatgcagcaacccaagccgtggaaggaggcggaggaggtcctctccggctacggcagcgacgtggaggagcagtggcggatgcagaaagaaatagcagtgggtctgagcaaattagatagagttacagtccccctaccatctacatatggtaaaagaatttagtgggttctttgtgggggctttcatagtcttcacgccagtagcgggggctcgagacccgccgctcccgtactggatacgcccctgcggaggcccccgtgctggatccgcccctacggaggaggtcgtgcaggctcccaccattcacaagggtatgccgcatgttcacaagatcgtgcagactcccctccacaccaactgggggaagaaaaaaagaaagaaggaagaaacggcaggacgacgaggacacgaaggagatgatggagagctcgacagggttgaccatggcgtggaggatcccaacggcacgtgcggcgagcaggtggagggcgtcgattgccgcggtagggtgggcgctggcggagaggagggaatgggcgcggcggagcagggatgcggtgaggacgacgacggtggttgtgatgacctcggcaacggcgtcctggcctcctgggaacgagaggacgggaaggagggaggggatgaggacgggaacggagacggcgtgagagaagaggatagaaaaagtgactggaatggtatggttccaattttagaaatttccagtggcatacagccaatatgatgaataatagtagcattttttcaatttggcaaagttgcaatggcatggatccaattaacccattaaaatttgctaggaagtcgtttattgtccaactaaattttacattgcaaaagcgaagtaagcatggctgaactggttatattccttgtggtggatccaaatcaccccattgcttgtatttacaactaattattctttcagtgataggcgacttaccgtcaacagcaagacatttatggtgatttcgtcaatctcaagatatgccggcctagtattgcgaaggtgcttataaggatagagtgtgcgtgtgttgtgagtgattgtgtttgtactatgtttctaaaaaaatacatggtaaaaaggttaatttttaacacaatcttaacgaatcccataagcaacctagagatgacaaaacatatctctcatgagcaagactgcgcgcgaacagggtgtaacaagatttgtataaattaaaaccatcttatagctaaatataaatattttgctgacatggttattattttgaagctaatagcttactacactattagacttgctctgagctggtcgaccgaagtcccgtctctgtcaagcagatgggccaatcacaaggccgatcaaacgaacaagagcacaacatttgtcagggcatttaacctgtgaggggctaacatgacatgcacttcaatgtggtgatccctcaaatgggctttcagtacgtcacggcgtcctggttcctcatctcgaattccccatgcatcccatcctcagatcatcgctgatcatcgaaccaccgatcgagacaacattctaacacagctgcttttcccatgggcattggatgaatatggtttattgggcatttgggttttacagttttctagtgcccagagtacgtagcagcaacaagttagcttaaatttataacatttgctctggtccaataaaaagtacctggcaagcaggcaaggtacataggtactccctacgttttaactttgatcaaagttaaactactctaagttcaactaattctgtagaaaaaatagtaatatttacaacgccagcataattttattataaatctataattaaataaattttaataatatatttgtcctgggttaaaatatattactacgtttttctataaaactaatcaaacttagagtagtttgactttggtaaaagttaaaacgtcctgtaacctaaaacagagggagtaggagatttgctccggtccaacaaaaaagtagctcgtggtaccatcattatagtaaaggttaatgtttgcagtgtcataattgcaaatccccccacggtaccaaatcgttttcgatcgttgaatctaacaatgcccatccggtcgagctagatccaacgatcaaaaatgatttggtaccatgaggtaccgatacctcgagatatttttaataaaattttgtatgcaaaatgtggtatctcgatgtaccaaatgttggatggtaaaattgctcgtatcatacatatatggagtgacctcaagttattaggacttcagtgctacaccagccaaagaagaggaaggaaaaaaggaaaaacattctctttagttgttagcgtatataacgaagtgtagcaagaatacatgcagtttatatttcactgctcggagtaaacggaatttgctaaaaaaaacgctcggcagatttttccttttcccttaaaacttttgaatttttggccgtctgatgtgcttcaggattcaaaagcgtgatcgttaaagaatacgtctttgatgaccaaccaattttttatccgtgattttattaacggtggtgtttttctgccatggttgttttcactaatgacagtaatattatgccatcgttgtagccatttttgtattaacgactgtgctacattgcataagcaaccaattaagctgtacctaatcaggactgaaacctattgatttaccttgaaaaaggaaattacatatagagtcactatataaatcgtggctgtcatccactgtgattttccttttacccttgatagcatactcaaagcagagccaaacttgaggaccgaactgacttgtagagcaactctgaatatacacaacatactttcctagatgaaccatgcttcgacgttcggaatgaattgattgaagaacaattatgtaactcatgtctagtatatgaatggctaccaacaagcatagtgccacaatttaaccctgcaattctaggtactgaccaactcaaattcccaacacatcctattctgagtattctcagggcatctcatcatcaaaacaacaaatgcaatgctcatctcttctcgccttaggaagaaacaaatgaaggagatcatcaagcgtcacaatgttcatttgattctgcccctgaggagtagggcacatatataggttatgtatttaagtacattcagtggccgagtgacttagcactaagtgctgcaccaaccagttacagtttgatttagggagtgcagtactacgaaacactttaaaaattaaggtaactttaaatctaaataaactttatagcacagtagcacagtagtagaatttaaatctaaactttgattttgcatgagtattgaaaacattttatttgaagctttaacatgagtaatttctatcattataacttatcgtataacatacgaatttacctagggagtagctatatttatctacttgtctatttcaattctaactagggagtagctatatttatagcgtcacatttttcataaaaaaatagtcaaaatcgtttttacactgtaaatatattcacttacattataattacaccgtatttacattaatataactacaggataagtataatgtaactatggtgtaattacttggtaatttctcagtttcacttttcaccgttttctttcttctcttttacctttctgtctccaactaaattcaatggatgatgtgacatgagtttctttgggcaataaaaatgagatattcacatgagtaacaacaaactaaccgtggcaagtatggagaagctggactcgaggtctcggtcaaaaaaggcacgtacacaagttttactgattttaattaacagaaaaatatgtcgacacattgcctcccaaatttttatttttcaattttcagctcgagaatcgatgaacgatctcctggacgggccggaccgcctgggtgcacgttcacttagacgagctgcagtgatatcttgtcagatagtaaggtcgtatgctcatcacacacagaatggacagatccatgttgctgtaaccggagcatgtcaacttcagggtctctttatcactcaacgctaattccacatacatcctattctcaaattaagcatcgtatcgttgggccaccggcacaatgttctactactcttctcatcgttgatttccagcagacagagaggaattggggatgatcgaggtatatagttttaggacttttacggtaaaatatactgctagtacatactgcaagtatatatgatttaacggtgtagattgatttgattttttttgttaattagattgcagtataaagtttgaaagggtaattttatcttttcttcgttattctatcatcaaatcgtgctaccgtcacgtgcttcgtcatcaaatgtcactcaagatgctcctcctctattgcacgataagatctaagacgaggtacttccaattaaattcaatctgaacaaaaaattactaaaatcttatttttattttctatcaaattcctaacatgcccatcaatatactgccagtatatactgatagtatattgtaccgtaaaagtcctaatatagtttttgagttctgattctgtacgttctaatatcccaaggagctagaagcagctatagcttttatttataggcacttggcaagttatactacttaggacctcgctgccatgccaaccagaacaggcggagaaaggaatgcgttagtctatgaacattagtaacacacgattttgtcacatgtatataacggaagcataacggaagtacttcctccgtttcacaatgtaagtcattttagcatttcctatatttatattgatattaatgaatctatacatatatatctgtatagatttattaacatcaatatgaatgtagaaaatgctagaatgacttacattgtgaaacggaggaagtaccgttttttctccttcgctcttttctcctcttcgccggtttagggttagcggcgggaggcagggcgatgagccggcggcggcacagcgcgccatcgtccccggacagcggcagcacgacgctcttccctctgctcactgataaccattcatatctaaccttatcgctgcatgatgttagtttttacccccgtcaaagttgattttagcagtattttgttcgtcttgctactgtgattagtccgaatctatcaaaaacaatcaggcttaggaactatgcattaccttaaccaggaagagacgggtaaaaagaataagtgaattattaagaaaaaagatcattaaattcaagagatacacgcagataaagagtgatttagcctactttgtttgtggacagttccgaaatatttaacatatattatatgaatggtattttatttctacatagtgtgatcttcatatccaaatattatttgtagtgtatacattctgagaggtaacctcacaactaatgtgaagtggtaattctatctagccaacccaccttcatccctccatccaaacaattgataggatcattctaacccattatatctctcaaatcagacaaaaaaaaaaggtatgttctatccccttaaccgaaaaaaaatagaatcatcccatccaaaaatagggatggacctaacccgtcctatcttgtccccaaatcaaacacatgctaggtgtctgagtgtcgcttctatacgtatgcattacaaaatcgtcaacacatgcctccaaaatttttatttttcaattttcagctcgagaatcgacgaacgatctcctaaggacaagttttatagtggaggtgagtgtcacatctaatttaaaccatattatattcttattaattaagagataacaagtacaatatgtcacctctagtacacaaaccccaatattagtttactctcatatcattttatatttttcttagagatgctgtggagattgccccttgtatgaggggtggctcattctctctctcctaatttctctcctccaactcatcacttaatcctatgcgataaatttagagataaaatgtaggggtttacagtacttgccctaaggcaggcaaacggctggaccgcctgggtgcacgttcacctagacgcgctgcaccgacatactgttagatagtaaggtcgtatgctcatcacacacagaatgaactgatccatgttgctgtaaccggagcgtatcgacttcagggtctcttgatcacccaacgcaaattccacatacatcctattctcaaattatgcatcgtatcgttggaccacctgcacaatattctactactcttctcatcgttgatttccagcagacagagaggaattggggttgatcgaggtatatagtttttgagtgctgattctgtacgttctaatatcccaaggagctagaaagcagctatagcttttatttataggcacttggcaagttatactacttaggacttcactgccatgccatccagaacaggcgggagttctggctgagaaagtaatgcgttagtctctgaatattagtaacacacgattttgtcacatgtatataacggaagcatgacggaagtaccgtttgtgcgaatttcactctctgtttcaaggcactaacgataaatattactccctccgtcccaaattatagggcgtcctctttttaagaaaaatcaaacttgataacttttgtctaataattatactaacaatatatatgctaaatattgtgcatgttatatcactagattcatattttaaagtactttcatgttatgctaatttcatatttgttagaaacataacatgagataaattaatggtcaaattatgtcatcgaagaccgtgtaaaaaatatagaccttataatttaggacggagggagtactcggaagtggaaaaatacaatggtgacaacacatatatgtgacggagaagagacttatcaatgaaacctcatctgtgacaagtgaacatccatcattgatgactcatccatgacgggtgataacttatcacacatcacacataagaacttacaatgttatagccacaaattcatgattttttaagtgacatttatatgcatgttatagtgaaatttaaatctaagatctctcaaaacatgcaaaccaatcttaccatctcattcatagaccacttgttgataggtcttttgcatgtcttttttttcactattcttatccaaacatgaaacacaaaattgacactctagataactagaataatttcaactataaagttgcatatctcgtcgagctctacaacttctatgtatggcatgtctccatccaaggtcatttcaaaaattcaaaaaatattttggaaatagatcacatcacttataacacatattcaaatgaaaaatattgtgaattataaagttatatatctcatcgaactctttcacttcgatataggacatgtctccatccgagatcttttgaacaaaaagtaaaatcaaaattatgtatttcaagatagatttcaccacttgtaatgcgggaacatatcctatgcacataagtttttccgtatacactccgtgcacaccaactagcaaatgtcatagaaaattctagagaaaatttgacacatacttccaatagtattacacctatatatgaaattttaccttcaaattcattatattttagccgtaacaaaaaatacaaaattttgacatatttttatccttaaaactgttagattttttattttttatggctaaaatataatgaatttgaagataaaatttcacaaataagtgcaatactattgaaaatatgtgtccattttttttagaattttctatgacaattgttagttgttgtgcacggagtgtgcacgggaagattgtgtgcataggatatgttccccttataatgcatattcgggcatgtaaactatttcaaattcaaatgttgtcaattttaaagttattgatctcctcgagatttacaactttcatataagacatgtctctattcaagtttgtttgaaaattttccaaaaaaatgaattttccctcatccgtgacggcttgtaattaccactcttcacaaataaccattacggatgagtgctctcatctttaacgggttatctcattacacccgtcatggatgacatgttatatgcgacgatgtacggttgtgacctgttataggtcatccgtgatgtttaacatcacagctatatatgatccatcataattgaccccatatcggtgacgggccatccctggtagttatatctcaaacgtgatatcttttatccattagagatgaatcatcctaaacaggtcgcattagcccgtcacaaattccggaatctgtactggtcactactacttcccaaaattagatgttgtggctttctcatgcttcaatttgattcaggtgtacagcatcatttccgtgttgtaacttgtaatgcactccccgctcaagaaacaaagcgtgttctgactttcaaatgatatacctttgatctacaatttattttattgatacaataataatcacttagacaaatggtgaaatatgatcgatgagcaccattaacttcgatccctcgaaagaacagaatgctatatatggattcctcagtgctcgtcctgaacacgaaacctgaaaaaaaattttcagcctcctcaatgcatttttgtggaagcataaatcataggtcactaccacataacacgagaatagtgccggttgggaaacccctttctatgtcggttttttcaaccgacactacgaaggcggcactgaacagtaaaccggcaccaatcctattttaaaaaccggcacctttgacaccactcgtgagcaaaaaaaaaaagcttgatgcatcacaatctctgcatcacaatccctaatccccaatccccaatcacagaactcattcacagaaatcacagaaatcatttcactaatatcaataaacattccctaatccccaatcccaaatcacagaactcattcacagaaatcacagaaatcatttcactaacatcaagaaacattgaagaacatcacacaaatcatttcacagaaatcttttaagaaacatttcgccagatccgacggagggagggagccgccgccaggccgccaccgcctcttgtcctgccgccgcatcccccctcccttccgccgccactggaccgcccctccacggccgccgccgggccgccctccccggatctggcagaggggagggcgcgactgccgctgacgcctccgccggccgcggatagcaagagagagtcgagaggggagggcgccgccgccaagctgccactgcctctcatcccaccgcagcatcccccctcccctctgccgccgcatgtcgcccctctgccgccactggtccgcccctctgcggccgcccctccccggatctggcgaaggggagggcgcagccgccgctgccgcctccgccgaccgagagaggagaaagagaagagtagagagcggagaaaacgagaggagagaacgagagacggagagacgaagagagagaccgagaggagacgagcactgcggagcggccttttctcctcaaagcttcgtggtggggcccatcggctcggctcaattcataggtgttgattttttacaaaaaaaccggcacctataatttattatagattgtaggtgccggtattaaatactaagggttccggtttttttaaaaccggcacaaaatagagtagatgctggtttttatttagaaccgacacctataattacttaatggtgtcgttttttgcgatttcaacccgtggaggtgggaaaacccgaaaaaggcctataggtgccggttttagaagcactaccggcacctatagtgccaacacctatttgatgttttgtagtaatgggtttatcacatgctataggattttatacatctggtactcaaaacccgcagaacattgtggccctagcggcatatttgtaaacaaaaagtaattttaaataaaacttgttagtgatctaaaagcaaaggctgaaaaataaacttcacttaaaaaccctgaaatcaacttgaagtataaggttaaaaattcaaattttagatgataaacatgagtataagtgaaaagatgagactgttagtttgtgcacaacgggaatagcaagatgcctgtctcgggctctcgactaagccacactgtggagccccccgggtgcacctagccacctacaagctaagctgtttgttcatcactgactcaatcacttggtaagagcaaccacagtgtttggttcggccattgtattgattgaagtcgaatggagagtgaaatcgatagctgcagtgtgaaatcaatttgtggggcccataaaaagaatccatcaaccaatcagtgcgtctactttctaatttctatgcatgtatggacaacaaatattttttaactctctagagttcgacttcaacttagagttcgatttttttttctgacaccatgagtcggctgtcacaatgtgtatggttcgcttttctctgccttaaatcgattttactttcacactggagatgctctaagctcatatccgccttgaaggtagatcgagcttaactcaacttcggcctagaactagattgtgatatgctaggttggtaacgagaacaactatggcgttgcaaccatagcatatcaatggcaaatcctagagctcgcgctcgcattcctcgtgcatcccattctcaaagcatcgcatatatcgttgaagcacctaggatactgtgtgttctacactttctggaggagatggtcagggtttacatttttctagtgcgggttctagccagaggagctagtatagcacactagcagctagcttatttatgagggtaatttcaccatcactgaaagatatatagaggtaaaatttaatatttgtaagtactaagtttctcaaagtactaaaaattcttgctgtaaaatttagacacctcgagattcctttatttataggcacttggggagaggtactaggtagcatttcacttcattacgagtgacacacaacaagagaagaaaggaaattgtttactatctaaacattagtagcacatattgtcacatatatatataaccgaactataacggaagtacagtttgtatttcacaacctagagtgatttattttctatgttctaaggcactagggagaaatattgctggaaggtggaaaagtatcgtcctcttcgctagcgtattgttactgcctgaaaatgtattgtcactcaccgccgtcggtgagtgatggagctaggtgaggggagggagaagagagtggattagggaaagagataaaaatgagagaaatagagatcaggtgcgaaactgataggcggggtctatcaatttttttaataaaaaattgctgactggactgtcacgtagaaccaaaaccaccgcggattgagccccgaggagagtggggggtggaggtgagagttatttgtgcggtttgtatagttgggggtgaaggatatctgctttcatgcatggttcgggagataattcaatcgaacgtgatagtttaggaagtaattcgtactttttccttaaaacaacgtacattctttttcacttttcaggttccatcaaacttttatttttcatttttcagctcgagaatcgatgatcaatcgtctgagggtgtgattagttcgcaaaaagaaaatttttgtgtgtcacatcggacgtttgactggatgtatgaaggggttttcggacacaaatgaaaaaactaatttcataactcgcctggaaaccgcgagacaaatttattaagcctaattaatctatcattagcgtatgtgggttactatagcacttatgactaatcatggactaattaggctcaaaagattcgtctcgcgatttctatgcaaagtgtgcaattagtttttttatcatctatatatttaatgctccatacatgtgtctaaagattcgatgtgacgtttttggaaaaaaaattaggaacttaacaagtcctgaggcaaaacggccagaccgcctggagtacacgcgctgcactgatgaactgtcaaatcgtaaggtcgtatgcttatcacgcacagaacgaatggatccatgttgctgtaaccggagcgtatcgacttccagggtttctcgatcgcccaacgcaaattccacgtgcatcccattctcaaagcatcacatgcagggataaaaacggattggaaacggacggaaactagctttatcatattcgttttcattttttttttcgaaatcggaatcggaatcgaaaacttggatacggaaatgaaatcgaatattatcgaatatagatacggagcgaatacgagacggaacgaatacggtagcgaatatttaccggtatataaaaaacccctcaaattgagtttcttgatcaaggaagagatatcgtttattattttagttcaatatctccaacatttatatcgttaattttatagacggtcccacaaccgtatgtgaaaatcaattttcatggttgttcctctaagagatccatatgcaaatatgattatcattttctattcccaagaccttttactacatgtataacttacttaccattgtataaattagagattttatttattttacttcacatcttcgaaacttgtaatgtttgtattatattttaaatgctttcaaatacaaatgttataaactacaaagtggtagatcccgttgagctctataactttgatatggaacacatctccatcagatgtcgttgaattgtagatctgagatttcgtaaaaattaatatggtatattataatgaatatttagacccataaatgacctcaaataataaaatagtcaataataaagttgtagatctcatcgagctctacaatgttgatataaagtttgtcttcatctgattccgtatgaaaaggttatgtatatagacatgttttttatataatttgctcaatgtctgcggatatccgaaacaaattccggatagtttccgactgttttccgatttcgaaggatagtttccttactgtattcgttttcgtttccgagaaaaaatatccgaattcgtttccgaatccgagaatttccggataattccgatcgaaactatccgaatccgaaaaatggtccggacggacggaaactatccaaaccagtttcatccctaatcgcatggttggagcaacggcgtacaatgttctaccctttaacacaataacagcgggttatgtagctgctggatccctagctgctggatccctctctagactgtcagtcacccgggtgcacctacaatcagtgtgttgttcggtgatggttgagatcatttggtaagctctcctcgaaatcttaccaatcgagctgatctcgggtaggggtgtaagtggctaacccgcgaaacctatttatagactaaaataagccgcgagcccgcttattttgatctataaataggttcgcggctgacccacttacacctctaatctcgacctcagactgatggactgtgatacgctaggttactggcgtgaagaactatatggcgttgcaaccgtagcatatcggccgccaactctgcagcttgcgttcgcgttcctcatgcatcccattctcaaaagcattcgcgtcgtcgaagcgccgagacagcgttcgacttctacactatctgactctgctttctcatggacagaggaaggagattgccaggggttttacagttttctagtagcggagtagcagcagctaacttatttatgggcaacttggggagttgctaggtagcaagcacttcactttagtgccacaccaaacagacgatagaagaaaggaaaacattactctctgaacattagtaacacacactgccagatatatataactgaagtacaatgaaagtacagtttatatttcacaacctagagtgatttattttctatgttctaaggcactaataaggagaaatattactggaagatggaaacatatcgtcctcttcgctagcatattgttactgcccaaaaatgtacgttctagctttcacatcttcagtttgttacttggtttcaggtgaacagcatcagttcgtgttgtagtgtgctatccacacctgaaataaagctttgttctgtcctcgaaataacatgttctattttattggtacaatcatcaattgggtgatgaaatagtcgatgggcaacactaacttcctgaagttccttgaaagaatgggataatctggagacctcatagctcgtcctgaatatgaaaccaacagattgaaaatgttactgaactgtttctcctgtacctttggcagttctagagatacaagcaaatggagaagttttgtaacttacatggtagtcatacctacgatgatgaccctgcaaatgtagagaaacaaaataagatgtcagttgtgatggccatcaaccggtgtcatattactgatactagcctatgcatcagcattagcaaattgtacatgtatatggcagttagtggttagcacgcacactacctctacatgtctccacagtgatgatgtctagaattcttacatgttttgctgacagaatgtctattacttttttttcttgctacctatcttttacctgatctttgtaaattttaatacagctatagattttcctgttatatcctaaagcaagcagatacaagctaaaatttttgatagattattatggtcggtgtttgatatattagaggcaacccctctctgaaaggagtaaaaagaccagctgaattgtagaaggaagaaagtattccacatgatagcagggagaagaaatgtactctatatctatccctgtaacggtccctgcctcggtgccgatccctgtctcttcttcgtttctctccttcctctcgtgcacgccgagcctcctgtggaaaagaagcatctgttagcttccctatgaactggaattgctgagtcacaagacccaactcttcataataatgaacaaacagaagagtaaccagtgaactaaaagcaatcacaaacctcgtcttctctagccttcctccgcttttcagcctcctcgaaggcctccttttcagcctacaacacagaaaaatatattgaaatgggggtttccatgacatgaaactaatggcatggataaatttacaaatatgcgttctgtgttgttattccaggtgagcctacctctttatttgcagccctaacttcatcaacaacacttcttgcatactccgggtcgtcacaaatcaaaatgttgtcaaaaactgaaccagctttcacctgcataccacctggaatgttagcttacatagcatttatgccattcatgtaaaggactgtgtcgtttgacacagcctagaagcagcattccaacagaacaagcatatttaaccaagaaatataatacctgccaaacctcaattcccacatactgcaaaggtttcagcacatataggtctgggtcgtcctcaaattctgtgaaagatgcatatacatcacttaatattcacttcaaatttggaaggaggtgaggtccagctctaagtcagatatgcagcaagaaatgaaaaacgctaacatagtactgttaaaaaaaaaaagcccatcatttctcacctggattatcaatccatgggatcttccattttcccttgtagttagggttcttaattttctgcgtacagaagcatgttaaaaaaatgctacaaaatgtggcaatgaggagctaatcagtcaataaaacaaaccttgcgtttccaacgtcccttgtattctggattcggtatcattctaggcttccatacaccatcatcatcatcatcccatgactcaggctgatttagtgtagaaaggaaaacatatgtcatcctgtgttatatttattaacttagcaaacacaccataagagccattgaggtcatgctgggttcaatatagctaatagcagatagaaaatgctaacatgccataggatgtttctaatgaaacaagcttgaacaggtaaaatggaacctttgtctgcactcgggttcttctcataatattaagaacatatgacactatgtccattataaacggatatgccaattaaatgcgaaaatattagaagctggatttacagcgtaattcttaagtgcaaacctttttgtcctttggatcaggaatctctttaggaatagagtcatagccctggaaaattaaggtaaaagattacataacgttctttatttgtattatcaatgtataacaaatatgaaattgcaaacctctggtttaacttcatcaggatcttcaatatattccctgtcatcccaatcttttggctgcaagagaagacaaatataagag

SEQ ID NO: 21589 - DNA, 661 bp, Oryza sativa
tattaagtgctaaatcgtattttagttgataatattaaaaaaaaatctccatacaatttcaagaaacgaaggctgcagcttgggataatcaaattacataaagggaatccaggcacggagaaaatgagtacaacattgtatcggtctttagctctgttttctttagatagtgtttcgcttggagagcgagcaaagaaaagaacgaaaatatgatccgcagaaaggctgaagacagcattggcacccaaatacaagctcaatgcttcatgtgctcacaaaatcaataacctttttttaaccttctgttgcatctacaaatccccaaatcaagcatgtatatcacgcacacaccaatctatacaacaatcagcacagcgcgtatgcacaaaactacacccattgtcaccgtgtgtgcgttaactaaccgtgaacttagctcatcttcttcttcccggtgttcacaggctcgagcggcttctgcgagtccgggaggctgtcggcgtacagcgagtgcaccatcttcacatactcgtcgatcctcttcttcacccacccgtccgtttcgatcggcggcagcaccttcacggtgagcggcgccgggctgacccgcaagctgtttttcttcacgccaggtgcgtgccggtcaccaccatcgcacgat

SEQ ID NO: 21590 - DNA, 668 bp, Oryza sativa
  unsure (1)..(668): unsure at all n locations
cttacatactttcgctctttgctactgtcttaggacaccctggcggtaagttgcggcggcatggtttggttaagaagagcctggatggagttgctaggatgatactggaggataaggagaagatgggcgacgtgtatctggagctgaacagtggtgagttccggaggcagaatgctgcgcttgatttgctggctgcaattgttaagcgtggtggaaggttggcgtcggagattgctaagagctttgatttcaagatggctgttttgccgcagctctcgggggtgcggaagaagagaggtggcagagatggggggaatcggaagaagggaactgatttcggatccacaaggcgatcgtttgttgggtttgccatgtcattcttggaggttgggaacccgaggatgctaagatggatccttcaacaaagggagctctattcaggggttcttcgtgggatcggagacgatgatactgataccattgtctatatcctctcaacgttgcggaataatgtcttggtagatgagtcacttgtcccaccagggcttcggagtgtccttttttgtagtgccacactggaacaactgagcttgatatcttggaatttggatgcgggggaggcagctgacattgctcatgaggtgttatcatggngggactgatccaaa

SEQ ID NO: 21591 - DNA, 670 bp, Oryza sativa
  unsure (1)..(670): unsure at all n locations
tgccacaaacccaatgcaagcctgtctcagctgcgagcagtgatgttgttctgctaaaacaagagtggttgccactgtttccacatcaatggtttcgctgagccgcctctcacaaatcagcctcagcctgtccactccgtaccgatccgcggcaactagcaagtgctgcattgctgcagccttgccatctctgcagctatctggcagcctatctgtgtaaatgaagtgaagaagagcctcaaaaacctcaggctccatgtcgtcgatcttgatacattgcgtgccattttctttcatcggaccgaaaagctcggccttgaacaccggggaccggaaggcaagaacacatttatgagcacggaactcttggccacccacggtgaatgtcacatctgaaccttcaccatcctggagcatgttctcaaaatcggtatgcaggttggacggtgggacaacaacagaattgacctcaacatccttggtgtgggattccctgacgacggtcagcaagcacctgatggtcaggcagtcgttgtggaggaacggcgagctctgcagcttcgatttctcggcgaatttgatgaatccccaattgtcactcgccggggagaaggtgtgcttcatgtangaatnggtcacctgcgacaatttgccgtccttgccgagcaga

SEQ ID NO: 21592 - DNA, 1235 bp, Oryza sativa
ttctggctcatcatttaacaaaagactctggccttctgttggggttatcctctgtaatctcatctcatgtcgaagggctggacagtgtaaaaaactcctattcttctacagtaattgggtcagcgttggaggtaaacactgttttacattactttctataacacttttatagatgagattcttgactgtacgagttggttattgtattttctgcatgtatcactgcagtcaaacatatgccttgagattggtgtaaaatcttcaaaattcaaaccaaaccacccatgttccctatccattcattctatcgtgttacctttgcacagatattgaagcactataactgggcaggacagtgcatgtacccacatatatacacttggagaaccatttctctaggatttgtcatattttttcatgaatcttgattgtaggttgtagcccatcatttctttcatgggatctctgctggtgaccatgaggatcatttcaactaactactttgtgggactgattcttgccgttgcttgatattactagaactgactgatttattaatgttgattttgttccttaagtcaaattcactctgcagtgatatttgctgtttccttgtgtcaatactttaaaagtatatataattattgcagctgtcctagtttagtttataacattaattggtgcatgcagttctaaatatatgtttctcactcattagtaatgctgtttctttagacaagttaagtaggttgcaactcacactcctgataatgccagtcagttgtttctgtcaagcaactactactgaaacatgagtcactaaatcatatctttagaaaacagtcaatgaacccataggattgatacaaacacactattttagcccgttgtcacctgcataccattaaccatcacagattataacatttgtttttctatgagaacgacattgttcaatggtctagtattattttatgatttggagagtttttttagcaatgttttgcacatcattttctttacgatagtattgtgaatctgctttttaatctatacatatgattttatgtcctctctccaggtagtgaatgatttgacatcatcaagattaattgcagaatggctccaagaaaccgcccttgagcaactctcaagaatatctaaatacctttatgtccttgttgaagatatgaaattgttgaaaggaaatgttccattgctaacttcagtgctaa

SEQ ID NO: 21593 - DNA, 650 bp, Oryza sativa
agaaagatacaaatgtttcaatgcaaaccgaagatgtggagggtcctagcaatgcaggggatgttgttggaccatcgatgcaaaatgaggaaaatcaaccaagggaggagcaggccatgggcatggcggatgagggggagagagtcggtataattgttgatgaaatggagagggaagattcggataatgagcaagcggaggacgacgcatcatccgatgaggaaggtgatgtaatggccactgattgggcaaatgaggacttctctggtcttgttatatcagagggtgatcatgtaccctgggagtataaggagtacgaggtaattgagggtgcaaggtatgctcataaggatgagatgaaggaggcggtgaagcattgggcagtttcattgcagagagagtttaaggtggtcaagtcaacaaattatgtgtatgaagtgaggtgcatgaaggaagattgtccgtggcgtgtccatgcatataaaggtaaatggaatgattattggaaagttagcattgtgaccgagcacaagtgctacttacaaggggtggagaagtatcaccgaaacatcactttagcttttggggcaagtgagatgtacagcaatgtttgtggtaacaattgctttgaaccaaaatcaattattagg

SEQ ID NO: 21594 - DNA, 757 bp, Oryza sativa
tggaagcaaaacaagggtacgccggctacgggaggaggtggaagtaacaatcataaggaccgcaagcgtaagcctgcggaacttgttgcaaccgccagtcactcttctcgacagcgttcgcgcgtcaacacgttcgacaagatcatgaactcccaatgctcgcaccatcctaactccaaccacgtggccaaagattgtttcgtctacaagcaattcgcggatcaatacaccaagactgcacggaagaattctgacgaagaacaaagcacgtcgaggaagaaggacgacggcgacaccccggcaggttttcaagatcaccgcaaggagctcaatcatatcttcggcggccccctggcttatgagtctaaacggaagcagaagttgactgaacgggagatcaatgctgttcagcccgacacgccccaatatcttcgatggtcagagatcgcaatcaagtttgaccgctcggatcatcctgaccgagtggtccacccggggcggtaccccctggtactagacccagtggtccgtaatgtcaagcttcgcagaaccctcatcgacggtggcagtgcactcaatatcctcttcgccaagaccctggatgatatgcagatccctcactccgagttaaaaccaagcaatgcgccttttcacggagtgattccaggattatccgcaactccactcggccagatcaccctcccagtcacttttggcactcggaaaaactttcgcacagagaacatcagctttgaag

SEQ ID NO: 21595 - DNA, 651 bp, Oryza sativa
aagggtccgatcgatcgaggaagttgtgtgtactctagctgtagctgcactagtatcaggtattcgatcaggtggaattgggatcgatcgatcgatcacctgcgctggtgcggagaatgtttgtttgtagaggaggaggacgatgatgctatgaaggtttggctggccttagccccagccccagggcaaattaagtactatgtaggtgctcgatagctttcgttttcgcaagctgttgtccgaagtatttttttgaaacgtaactattgtccgaaagcagggtttcaaaaaccgccgggggcccggttaccgccacccggcggtacggcggttaccggcggtaaccgcggtaaccgcgcaaaaccgcgacaaatttacaaatcgaaatttgaattcaaaaattcgggcaaaccgcgcggtttgacgcggtaaccacgcggtttggcgcggttaccgcgcgatgtgtaatgggttgcacagtaacgggccggcccatttttttttctttttccaattttcaaatttattctccgttttgctctcaaatttgaataaatattactcttttttgagaaatttcttcaccataaaacactataaatcaagcactaccttcactattttttttttgatttttttctttttttttaa

SEQ ID NO: 21596 - DNA, 2477 bp, Oryza sativa
atagatattgcaaggaaacttgattgatataccatgtttcacgaaacttatagtgtgcagacataagggatatggtaccttccaattgtattgtcaacatagaaaccatagcccttgtcagatttggcagctttatgcatttcagctagtttccttcccaaagctgactgaaaacaaatggtttgttaacctcaaaggattttaggaaaaggtagcaatccgaactatatttgcataactttacctggtcacctctagagcaaccgaattcaataaactccatgattataaaagaaccaccagttggtaatgacccaacctatagcaacagggacataataaataagaaataaaaactgaagaagcttaagtcctctgaagaagaaaaagaagctgactaaggtaactggtgaaaaaacaacatagtatatgcctacacagcctgagccatctatgtaactggttgcctgtcaagtctagtccaatcagcaaataccaggcacccaagatgatgtaacacatatcaatattcacatgagaagaactagaaacatgtactttgatgctaataaaatggtagaactcttagttttttttttagacaatggaataaaacaaacaagtagaactcttagttaggtctggatattaacaaatcatggatatacatccatcgtgtatgtgtaggacaataaaaccactcatgtgcttacatgcaatgtactgtgctgttctatgcattacggaaaaaaacacacttgttcatgcatctgatcctttactaacccctttttatttagaggaaaaacctttactaaccttgtatggaatggaacacggattgaatttgtgtcatacatggccttcaaaccaagagcctccccttcaaacatagatggaccaatacgcctggcacataatgaaatgtacattttctgtcattgccactataaaacccagaccatgactaatcgtgccgctccaaagacatcattgattcaaagaggaagttagcacacccattggtcttcacaaagaaggaactggcatcggtcttgtagcactgagcagagttaatgcagccaccgccgatggaactgaccccggtgatcttcgtggccttcccttcagttagaatccattgcctgattggatcctcgcccaatgcagccactggcaaattcgtgcaaatccggctaagagggaaacaagaacaaaacaacatggtgcataacatctacagctattacagtattgtaattgtgcaatgccattaaactacccatggaaactggaatcaacagccaccaccccaccactatactacttgcgactgctccgtccgagtaaacccagtcccctatccaaatcttaaggccctcacttcatctcgaatactggagttcgcatctcctcaccagaaccagcactagtctagaatcgacaatacatccatacacgagcccggcgaatctaaactggaaaatttgggcgcacaagtagaatgccgagccaagtgaagaggtgaggtagggaaccggggggaggcggggcttactgatggagagcctggaggccgcgcttcgggggcagtcggaccggcgagacggccgacggcgacgacgtggcggagccggggagcggcggagtaggtgtagggcgaggcggcggacagcagcgccacgtttgccatctcgtccgtcgcgctcgctttctgcacaccgagttcgccgcgcgccgcggtgcggttggcttgccacgaaataacatagggtcttatctgcaaatgtacattcgctgtgtctctcttccattaagggctcctgcgttcaggagaatcaggagtgagggttgggctcgcacggaaaacggagcagcgattagcgcttgatcaattaaatatttactatttttttaaaaaatagattaatataattttttaaagtaacttttgtatataaactttttaaaaaacacatcgtgcgcgtaaaaaacgagggagagactccgaacgcagccttatacagtacggagtagtagttagtgagcctttttgagacggagcccaggactgatcgctatctcttgggcctataccgtacaggttgacgggccgcagatcagcgacctgtgggcctggacgttgtaatcggctttgaacgcagaattctcagacgaacatgaaaacataaaaagagagtagaaatagaatgccacgctctttgtcgaaacatgaattcggcaataataaaagggggtagcgtacgggacctaaagtggatggatgcagagacaaaggatttagacaggttcaggccctctcaatgagaggtaataccctactcctgtttggggatttgaatccgccgggtgtgtattgatctgacgatcaggttgtctcatgcccctagaggggctccctgccctccttatataggttggggggcagggtaccgagctcgaattcgccctatagt

SEQ ID NO: 21597 - DNA, 629 bp, Oryza sativa
gcttggttaatacgcacggcgagaactcttacacgaccaggtcttacatggtctttcgtctctacaggatccgacaaggccttatcggctctgggcgtccccagctgaagatcccttaggttcctcggaggccttgtcaggacggcataaagggacatgaggataggtttcaacgcaaggtgtcatctgggtaaggggtcatcaggcaggaacactgtgattgtaatatgcgcctgaaaataggctttattgatactgtaaggtgtcttacaggtatggattgtattgacttatacatagaatttacgtagttggtcaatgttccaagaatttgccaactcgcggccatcgccgtctgcaattttgaatgcgcctggccgcaagacttgtgtgatcgtgtaaggtccttcccatttgggtgagagcttgtttcgccctgcttggctttgaacccgtcggaggatgtagtcgccgatcgaaagtatgcgtgctcggatgcgcttctcgtggtaacggcggagggcctgttggtaactggctgctcgaacggcaactcgttcgcgatgttcctcgagtagattcacatcgtcgtttcgctgctcctcctgatcctcgtcggaatacctctg

SEQ ID NO: 21598 - DNA, 43304 bp, Oryza sativa
aaacgggatcaacatgctcaaagggttgtttgggatctgtgtgacttgccttgctggccttggaactcttcaaattcttctcctgcgaaaacggactctccggaaacgtcggaatctaaacaaaaaggagcaaaatcaccaaacagcacataaacaagcatgaacagtacatgtggatatttttaacatgtagatctcaattttagaaaaatgtagtgacttgaaccaactaaatccgagctaagatgaattagttatgaatttttaaagattaaatcggattaaaacacttatatggattttaattgaattatgacgcaataatgaattatttttgaaaaggaaaaaggaattattgcgtcagcggctagggtttgcggtggaccgggtgcacggcggcggctcacggaaacgaacggccgagatcgatcttatccaaaacgaacggccgagatcgaacggtccacgaccgggccacggcggacggcgacgatgacgtcagcggtgacgtcacctccggcggcggctcgagcgcgcaagctcgccggcgaacgacggcgcgaggatgcgaacggagggcaccagcacgtagagagcgacgcggcaaactcaccgatgaccaaaacagtggcgaaagaagaacggacggcggcggcgtcgaggaaaaggcggcggagaccttcggcttgacgacgacggcgatgctccggcggtcaacagcgacggcgaaggagcggacgaggacggcgacgcgacggcgaccacgatggcgacctccccgagcgacggcgatgactggaacgacggctgcacatggctggagcggcggtgacgacggcggcgcgaggctacacggtgctagggcgctaccgacggcgagaggcgaaagcaagggtggcggcgggtagcggcgggcttgggggtccttttataggggttggaaggcggcggcgaaggcccacggtgaccggcgacgcgaaggaaagattagggttcggaggaaagggttcgatccgaatcgaactcgaatccacggatttccaaacgaaattagccgacgattccaaaagagaaaaggtagaggagatctcgggaaacatttcccctcaatcgatttcaccggatcgggaaaggcgcggccgaatttggaaggagacggcggcacggcttggctagggttcgggcagcggcggccgaaggaagacgacgagtccgacaggtgggacccacctgtcagcgacagcgagcgcgcgcgtgagcggctcggctgcggactgggccgacttgggccggggagagagagaaggttttgggccgactttcggcccaaagccaaaagagacttttaaaaacctttttcaattaaattattcatgaaatgcaattccatttattaaaaatacttccttagctcaaataaatcccagaaaaatctaggaattaaagaattaagcaaagtatttaatgaaattttatctggccccattttatattggaatttattaattaaaattagatcttctcttctagacttttaaaataaattctaataattccaattagacaacaatttatatatttaggatttttagggtgtgacattctatcttcagatagagaattcggatcctgtctttgttgttcctgaggaacaaccagacaagatttcgtcttggaccgcaaagcctaccttgacccctgcccttcggttcttcgtcgaggccatcgatgacctccgagtacgaggtttgtcggggtatgaagtcgctgccaacttcgttggtaggcgaatccagccgctccaggctcgagctcatccagcctttgactattctgggccggaggacacgacccgggtttctcctcggggtatttttcttgtgtttgatttgacctccttataggcatgctcctcctggcttaccgaattccggttcttgacttgcaggcttgaacagcgaaacggtggagcgctgcgtcggccaactgatgatcaacagcccgacaacggcaagcgacatccccgtccccctttgtgagaaggaggcggccgatcgtgaaaccgcaatcaacgtgagtgtattcggcgacccctctattcttgctcctggatcggataacgacttcatgcggtgcaggttctccctctgactgacgtcatcggaccgctcgtggatcaccaggcggtggcctcgctaaaagagggtgtcgcgcagggggcatccaacgcggccgctgctgctgcctcagcgactagcgggagctgccccccaaggaggggaaggaagttcacctccgtacttggcagtcgccggaaggcgtcctccccccggtaagtttcttgagccattaaccttgtaatcagaaaagtcgttcctcaaatcatccttggtttactaaggcctccgacgcgtctccgccacctccacgacggcagaagttggtgacgctaggcgagaagtaagtaggtggagattgagttctttcctttggttggagatctggcgactagtctagatattcggatgcgatgatcttttgtaggtaggcgcgagcgaaggcggcgcaggatgggtttggtgagacctccagcgcgtctcctgcagcggtctccactgacgtcgtggtcgccccacgaagtcgggaggcgacaccccacggcctgtccggtgatctcgggcctgttcgcggcccgcctgccgacgtccttagctggggggagctccaagtcgagattgggcgcctcctcgaagctggcgctcgcggcataagttgcgagattgctgaggcgaggacagcggcggcgtcgtcggctaacgagcgcgccgacaagctggagcgcaaactggtggaagttcgcgaggacctccagaagatgagggagctggtggccggcatcgagcgacagcggcggggtcttgaggaccgcatggcggaactcgagagtaacctatcggagctccgtggctcgctgcgagtcactttcactggcctacaccagctcgccgggcaatgtggtgtcacgaccacgatcccggcgaaccccgacgagttctcgctgacgtcttcactcgcagaactggctacggcgatggaggcgataccctccaagcacgcggccaggatcaggaaggagacgtccaacgggatctataccggggcatgtcatgtcctcgcgtgcgtcaagttggcacatccgaaacttgatctccagcggatcttggagcagggggcgacgaacgacgcgcgtagaggcgtgatggaagaagtcggcgatctgggagagtctgttctcccgctctttgaagagtaggaccttagttcccctgtgtcttttctctagttacgctttgtaaaaacatttctcaacctttttgcgtgtgcagtcgtcgctttagttttccccaacattttttatcccgagcacttgttgtcctttgtagagatgtcgatgtcgaggatgtccagcagcgtgggcagcctgagtcatcagtgatccttccggatcttgcatctgaggaacccatgtcgctgaacgatgtggatgaaattttacccgcgagaatggggacggcaacgacttccttaggttggtggtctcttcatcccgtttcgctcctccgacttgattagccgtgttctcgagagagaaaagcagcttgacttagtcgtttccatattaaacagatctcgagaatgcacttgctgaccaagatcatcgtatccaatattggaagacaaaatttgaagtggcggaactcgagagagctatgttggaagtgaagaaggagcaggccgtggaaacactccgaggtcgtgaggtgtggttcaactcgtatctgaagagttgctgcacgtccatggcccgagtttgtagagagctccgagtactccgcggagatcccgaggagtcagcggccggatacatctcatggctgaatggggcctgtactcagctcgaaggcatcggcaagcgcatcgatgaagccctgaagcaggaatgccgtcgatcgagccgatatgctggagggcatgtgttggcttgcatacgagatcatcgtccgcaactgcacctcgagtttctccatgaagggttcgctcgttctcggaggactccggtggagatagaccacctggcgaagtagatggcgccgctggcggagaaggtcttccagtctatggactggcgttggccttcctggtagtctttgtatcctgtgatagatatcttaggaaaaaggtgtaatatagttccggacttgtgtggaattgtaagaagtatcttgtgaaatagaaaagaaatctatcttaatgagtccttcttactctggatgtagtgtgtaagagtgcctcctcagttcccgactttagctagtcgtttgagtcgtacactctccctagcccccagccttgtcgtcgaggaattcttctcggaggacaaggctcttggacctttgacctgcctcggttgagaaagcactgattctagcccccaaccgtgaagttggaaagttaatttctgattacacggcttggttaatacgcacggcgagaactcttacacgaccaggtcttacatggtctttcgtctctacaggatccgacaaggccttatcggctctgggcgtccccagctgaagatcccttaggttcctcggaggccttgtcaggacggcataaagggacatgaggataggtttcaacgcaaggtgtcatctgggtaaggggtcatcaggcaggaacactgtgattgtaatatgcgcctgaaaataggctttattgatactgtaaggtgtcttacaggtatggattgtattgacttatacatagaatttacgtagttggtcaatgttccaagaatttgccaactcgcggccatcgccgtctgcaattttgaatgcgcctggccgcaagacttgtgtgatcgtgtaaggtccttcccatttgggtgagagcttgtttcgccctgcttggctttgaacccgtcggaggatgtagtcgccgatcgaaagtatgcgtgctcggatgcgcttctcgtggtaacggcggagggcctgttggtaactggctgctcgaacggcaactcgttcgcgatgttcctcgagtagattcacatcgtcgtttcgctgctcctcctgatcctcgtcggaatacctctgtattcgtgtactttgatatcgtagctcgctggggagcatggcctcagagccatacacgaggaagaagggtgtttccttgttagatgttgtcggtgtggtgcatacggcccatagtactgatgggagttcttcgacccatttcttgtcgtgtgacatgagcctgtcgtagacacgggtcttgatcccttgtagtactatgccatttgccctctcgacttgtccattgctttaaggatgagaaaccgaagcgaaacatatcttgactcccagcctgatgcagtaatcctggaaatcggcgctgatgaactgggagccgttgtcggtgatgatgcgatgtggtagtccgtatctgcaaaatatccctttgatgaatttgatggcgttgtcggccttgatttcccccgtgggtatcgcttcgatccatttagtgaatttgtcgattgccacgaattggaacctgtagccgccctgtcctcgtgggaatggcccgagtatatctagcccccagcacgagaatggccaagtaagagggacagactggagcgcttgtgcgggtagttttgtgtgtttactgtggaattgacaggctttacaccgctggactatgtcgcacgcatctttgagggcggttggccagaaaaacccttgtcgaaaagctttcccgaccaacgtccgaccggcggcgtgtgacccatagatgccttcatgtatatcaaggaggaggtgtctgccgtcgtcggacgagacgcatttgagaagtaccccgtttggcgctttcttgtatagatcgttgccgatcgtgcaatagattttcgctttacgggttattttctcagcctctgcgtcgtcctcgggcaactcttcgctgttgatgaatttgatcagtggggtgcgccagtcgtctatggtatcgatatcggcaacggcgcgttctgcctctgtggcctccgagctgatgtcgggggtgtctgggttaatttcgccgctgacctctttcactgatggctttgtcaggatgtccagaaaagtgctaggctcgagtggttctcgtctggacgcacgccgtgctagatcatctggctcaatgttgtccttgcggtatacgtgtcggacctcgatcccatcgaaccttttctccagcttcctgacttctgcgagatacttggataattcggggttagagcatttataatctttgtgcacctggttcgctactagttcggagtcccctttcacgatcagtcgtttgaccccaagtgcggctgcagctcttatcccggcgagtagtccttcgtactcggctatgttattggttgccctgaagttgaggtggattgcgtgcttgaattaatctccggaaggagatgtcaagatgaatcctgcccctactccttggctgttgagtgcaccatcgaacgccattgtccacgtttcgtcgtcgatttggttgtctgatttgttatcaggcatagtccaatcggctacgaagtcggcgagtacctgggacttgatggctgttcgtggcacaaagtggacgtcaaactggcttagctctactacccacttcgcaatgcggccgacaatgtctttgtttctcacgacttcaccgagagggaaggaggagacaactgtgactctgtgggcttgaaagtagtgacgcagcttccttgatgtcatgattaccgcgtaaagcagcttttgtatctgtggatatcttgtctttgcgtcatggagagcttcgctgacgtagtagattggtcgttgtactttctctctctcgacagcaatgacggtgctaacagaataaggcgtggcggcaatatagaggaataattcttcattaggttggggagcaacgagtacaggggggtttgataggtagcgcttgagtgcaatgaatgcctcttcagcttcctgtgtccatacaaatttgtcttgcttctttagcagagcgaagaagggttgtgctcgttctcccatcctagcgacgaacctgcttagcgctgccatgcatccggttagcttttgtacttccttgagtcttttgggcgacttcatgttctcgattgctttgatcttctcgggatttgcttctattcctctgccagatacgaggaaaccgagcagcttgcccgacggtactctgaacgtgcacttctctggattgagcataaggcgatatcatcggaggttgtcgaacgtttcccatagatcgtcaatcaatgagtcgcttgtcttagtcttgacaacgatgtcgtcgacgtatgcctcgacgttgttgccgagctggtcgctaagtgcgccctggaccgtgcgctggaaagtattccctacggttatcagtccgaatggcatcttaacatagcagaataccccgaacggcgtgatgaatgctgtcttctcttcgtcctctttcgccatgctgatttggtggtagccagagtaagcgtcgaggaagctcaacagctcacagccggctgttgaatccaccagctgatcaattcgaggaagagggaagtgatccttgggacacgccttgttgaggtcggtgaaattgacgcacattctccattttccgttggccttccgcaccatgactagattggctagccactctggatgaagtacctctctgataaaaccagctttgagaagtttgtcgagctcttctcgtatggcttgttttcggtctggtgcaaatcgccacagtctttgttttactggcttggcatcaggtcgcaccaagagtttgtgctcgatcacctccctagggacccccggcatgtcagacggctaccaagcgaacacgtcagcattgtcgcggaggaaggtgatgagcgcgaattcctatttctcacttagtgatgccccgatcttgacggtcttgtcggggttggcactagagagtggaacgatcttgatcgcgccatctggtttcggcgtcttctttgtcttgctcactttcttgggaggctcagttgtagcgggtgggctgggcatgtgctcgaccatgtcgaggctccgcttgtcgcattgtaccgctagcttggcgttcccttgaatagtgattgttcctttcggtcccagcatcttgagcacttgatacgcgtagtgagatgcggccatgaacttcgcaagtgcagttttcccgatgatggcgttatacgctgtatcgaattcagcgacatcaaaggtgatctgctccgttcggaagttgtttgcttggccgaaagtcacaggcaacgtaattttgcccaatggtttggacgaggactggggagtaattccatggaagggttgatcggtgggtgtcaactcgctttgtgggattcccatcacgtccaaggtgctggcgaagagaaggttgattgagttgccaccgtcgatgagaacccgcgcgaccttgatgttccgaatagtgggttcgaccacaatcggatagcgtccttggatgacggcagtcttgggatggtcttcttccgagaattcaatcttctgttcagactacttcatcttgggtgcagccccctgccatgtcgaacagacttcatgttccactttcttgtattcttgctttgaggagtacactgtggagcctccgaaaatgtgcgagacgtggaggtcagagtctggatatgctgagtccgattcctgaggagtcgcctccgcatccttctcgaccactcgtactcgcttgcctttttccaacgccatgtgcttctcgagcgactttttgaaaacaaggcaatcttccaaagaatgtctgtccgtcttgtgtatggggcaccatgctttctttgcgtcgctaccttgtgggtctgggcgcttgggtgggttcgcgtattctgctgcgagaatttccgcttgagctttccttttcccactcttgcgatttttcttcttgcttgactcaggtgcgtccgtggctggtttcttttctccccggttttcagcttgttgttcttgcatctcagcgcatcgtctacgtgggtgcatcgctcaacgatctcgaataatctccgagtagttgtgatgcgtcttgtcgccaactcctgggtagtatagcgatctcggacaccggacttgaaggcgcgaattacagaagcgtcggtgatttcggggattgtatttctgcactcgttaaagcgccgaacatattccctcaaggatccacctgagttctgtgtcaacgcatgtaggtcgcttcgatcgcgtggcgcttgtaagttccttggaagttggcgacgaactgctgccacaggtttgcccacgaagaaatcgagtagggcgggaaatgcgtcagccatgaacgtgcagagccttttaatgcagttggcagataatttgccaacgtgttgtcgtctgctccggcagcgtagagtactgtggagtagacttgaaggaattcttctgggtcagtactcccatcgtacttctctattgctccgggtcggaatctctcaggccatcggacatcacgcagggaacgaccgaaagctctacacccagcgctaggagcagtgggttgtcggcgatcgtgtgtccttcgtggatgtctgtctgacgatgaggatgaagaagaagatgacgatgatgatggatcgcttggttttggtgtaggattacgaggtcgtcggctggattctcgagaatcctgtcgtcgccctccgttgttgtcccggcgccgatctctgtcgtcctcgtcgttatggcggtgtcctcgaccagtatcgccctgcattcgcctctcacgatcatcatgatcgtggcgattgcgagatgaattttttaagcctaattgtgccatgatttgacaatgtggtgctacagagtacatgtgctaatgacagattaattaggtttaataaattcatctcgcagtttacaggtggattctgtaatttgttttattattagactacgtttaatactttaaatatgtgtccatacatccgatgtgacacgccaaaactttacacctctggatctaaacacagcctttgattattattgacatagtagactgcttaagaaatagtacagttaaacttcaatcaccgcgatattacccggtgcaacgcacgggcattttgccagtatacatataaactttgtatttcagaaatacaaagtttatacgtatgtatataaaatatatacatatttgtgtgtgtgtatatatatatataatttttgtgtatactataaaattgacgtataaaaaatgtacatatatgtgtatgtaaagtttgtatacgcatatataaattttgcatatgtgtatagaaagtttgcatacacgtatataaactttgtatatgtacatattaaaaaccgaaagaaaaaaacacgaatacaaactttgtatatgtacaaatacaaaacttggtatacatactagtacaaacatcgcatacatataacctaaaaaaactggaaaaaaagaaagagaaaccgaaaaaacccggaaaaacccgaaaaaaccagaacataaagagaacagcaaaacggaacaaaaacagaaagaaaaaaaaccggaaaaaaccaacaggaagagaaaaccgaaaaaaaccggaggaaaccaacagaaagagaaaaggaaaaaaaaacgaaaaccccgcggcgcgccgtccgccgccccctctccgcgcgtgacacgtgtccagtcgcacgccctccccgcgcgactgatcgctagataggattttggcccccccccctccccactatctatccgttccccttcctctcctctattctacgccagcatcccgattcaccgccgtgcccttccgcggaggagcaccccctctccagcgccagagaaagagaacaccagagttattgaagtagcacttaatttgtagccaactaattaattagtagcactaatagtactactggatgactatatcaccatactacctcatgcacgtgcagcatgcagttgtgacatgcttgatctgaagtttctgaacttctatctgaaccggccagattttattttagaaaatagattaaaacggggcctctacatataaaacagatgtacacagccaatctaaactaagggtgtgttcgctaacagcagatgggaactttgcacagtgcacacggaaaacggagcagctcattagcacgtaattaattaagtatttgctattttttaaaaaaattagattaatatgtttttttaaataattttcgtatagaaactttttttaaaaaaacataccgtttagcagtttgaaaagcgtgcgtgcgaaaaacgagggagaggggatgggaactttagcatccgaacacaccataaatgaggtgcgagatgccaaaagcgcaagcatatctctccattattcagagttgcagatgaggatgaggtcatgaggaggagaggatcctgaattcctgattcctccagccttggagattgatgcacgagggaggccaccatcgccatcgctatgctttgcttggctgcaggaatgtgcacgacaggaatctccgtcgtcctcctgctcctcccctgcgtcatctacgtcctcttcgttgccgttccggtaggacgcgacagcgcccgagagggcgagaggtcgacccaggagcggcgtctgggtttgagagtgaaaaagacaaaaataccccaacacatataattttttttggactaaaatatccctccacaattctactaccatcaagtgtggtggtagtagaaatacatctgaaccgttcgatcaaatgcgatcaacggttcagattattctctactacagatagaaagcactggagtgggacttcggaagttcacacacctgacaccttttgagctagcgaatgtgttgattgagcattattagtaggattgtttcccttacaacgaaaatggtggttgcatgggggaacgagatgggaaagcaaccactttgaaaggagagtgccggagagacggcgagatcaccggagttttccgacgatcggggatgcgatagagcatgcgagtcgctgggctcccgcgggctggcggtcggcatgggcgaagacttcgcaatccacagagatttcgtcagatttcaggagggagacaggggggtgcagttcactagaggaacctcaacttaacaataaattttttttaatatcctttaaccacaaaatcagaaatatatacccataaactcactcaaaccgtttcagggaggtcccatggcagtatcgactcaatttttacctttttgttaacataacatcctagtaaaaataaaataaaataaataaatatgtaggacccatatgtaagcaagaaaaaaaaagtgagatcaacaatcctagtcagcaatctccgtagagagggagcggcactggcgcgcggctggaggcaggcggaacggcggtatcgacgagcgagcaagacggcggggcgtcggcggcggcaagcggcgagcaagtgttggtggagcggtggcggcgggcgagcgacggctccgggctcgggaggagcagacgggcttgggatgtggggggcgcggtaggtgagtgcggctgcagagggggagaggcggccggagcaggtgaagcggtggcgtcagagggcgagcgcagctgcgatggcggtgagctcgcggcgcgcggcgagatgcatgtgcggcggtgcagcacagctcggcaggcagcgctgcgaggtgcggcgacgcggcggagacccggcgcaggcgcaacggccatgcgggcagcacggcgagggggcggcggccgtgctggcggcgcggctggcaggcacagacgtcgcgctagtgcggggcacaattggcggtggttggttcttcggagcgatgcaggttaaggcgtgcgaaactctgcgtgggatggcgtcgctgtcgtgcagggtagcatggtggccagtcgatgcggtcgccgactcgccatgcgtaggcgacgcggtggctcgggataggggcgacgtcgtgcgcgaggctatgcggcggccgttcagcggcatcagccaggcgtcgtagtggtcgtgcataggtggctcgaggcgtgacactgtgtagggtgcgtccgagtggcggccatgtgtggcggcgtgacggtggtggtggccatgtggggtgtaggcagcgcgcgggcacggctcgagcgatggtgtgcggcagccatgcgaggcgccgcgcggcgggacggtgcgcacgggagagaagagaaggagaagaaaagggaagaaaaaagatgtgcagctgacatgtatctatattgttataggactttagtgcacgatttgcatgtgtttaggagtacacgtttttggttttgtttaagggactaaaaagttgagggacctccagtgaacttattcttttccaggtcgacaaaatccccctagtcgcgtctctcgtgagcgccggcgttccgctctgtcctcgcgactctgcggcggccggcggctccccttctcatgagccgccgccatcgctgcgtgacgtccccctcccacgagccgtcgctaccaccggcggtgcctcccctcctctcacgacgcatccatgccagtgccgcccccttgtcactagccgccgccggcgggcattaccctcccccgagccgtcgccaccacagggcctctccctcccacaagtcgccgccatcgcagggcctctcgtcccgtgagacagaggtgtgtcttctccttctcttcctctccttagggcttgttcgtcacgtggtgagcattttccccaggggaaacgccacctggggggtattggatgaatcccctcccatcacccaatcccctccatcccagggatttggttcccttggtcattcggaatgcaaatggcggggaaggttaacgttcacttcagacattaactcaggccaagcaacattcaacactgatatttaaatttcatatcactaaaaatacaaagaaaactaaacatatagtcctgaaatttaaaaatagcattaccgaaaatttgaaatattgtaaataaaaaactaaaatttctggagaaaataagaaattctgaagactgtctaaaaagattatgaaaattctgaataccacatagaatgtactaaaaattgcttgcatcatatccattcagtcaccacaatcagtcacgcattcacaatacctgatttactcatttaaacatcatatccatcaccacaatcagctaggataagccactgaagactaattacattcatttcatacaaacagaaactaagagtcccaaaaatccaaattctccgtaagtgcaagagcagaagggcattactgcaaggctattagtagctccattacctgctgcgagtgaaaaatgagttatcatcagtgatctgcattaggcattaatccatgctatgaatagaactagccctatattttaattcaagaggcagaactgttttggaatatagtataaaaagtagcagaattacaaggaggaaatatacatcagtagaagagcatttccttgaacaatcgatgtcagaagggaactatttgtatagaaatatatataaatataagtagatcacattagcagtatagcatcattagcaaaataggatcagtgctcaagcttatactgagttcatggcaaagcacaaagaggccgaggggggctcctgagtatttactccgtacaggaaatgacatcgatctatctatgactagacctacagagattgatcgaaatttttacacattccatgtagtagtgcatccaattcatcccaatcctttgaattagcacatctaattaatgtcagattgctaatagtatggaaaaaagaaagaactaatcaagaattatgaactattttctccatatgtttgtaacattatgaactcttttcagccaatgaattaatcaagaacacactaaagtatccaatattcagtctaatgtaatatgcaggttgcagagtttttgagacaactttttacagaacattatctgaaatcaagaacaattaattttcttttgctagtcaaatcaaggccaaatatgataggaataggctcatgaatcatgataaagtactaataaaaagtgtctaaccacagcacaatgtataaagctgtgccctcctttgtagcaaccattattacaattatattgcaacagtgaattaggaaatttttcataaaatcgagatatccaatatatttgatcataagtcaattgttaatctaataaataagagggcaatgaaattctgttacatcactttgtaaaatgaaaattcatggttccacgtgtaaatgttaaatgagctaaaaagaacaaggatatactaaatactgctagtctgctcatccctaacacaagctctatggagaataatgaccagctattagcccagtgatttctttttttgctttaatacattgcaaacagctattgtgtttccgaagaccatatttgacaataaaatctcttaaaaatctgttaggaaacgatatgcaaacaaacgataaaaaataatagatcaatcacagaagacacgagatttaacatggaaaaccctcccaaaacaggagaaaaaaaaccacgggcgtcagccagcaaaatatctttactatatctgggtgaggttacaacgccgcacggcgacttacaagaggtatatatatggtggaaccctaaaagggatgacgatccgtttcgcgggggctccgccctcgcacccccgggcgtccccaggtgcacgacccaatgggccagcttcagcctccgctccactacggcagaagctggcatttattaagtgcaaatgaatttggatcacaactcaacaaactccaccttgagacaaattacttcttatagcatgaatcaatccttcaccctgaacacaacaaagataaaaaacactttcagcgccaaatagcctcttgggctaaaccactatacaaactaagcttgagcaaagctcaaacttagcaacaggaacaggctttgtcatcatatcagcaggattatcatgagtgcttatcttgcatacctttagcttaccttgcacgactacatcgcgaacataatggtacttgatatcaatgtgctttgtcctctcatgaaacatctgatccttagtgaggtatatagcactttgactttcacaaaacaagttaatgcaagaatcaactccacaaagctcagcaaacaatcctatcagccaaactgattctttacatacttcagcaatagccatgtattctgcttcagtggtagactgggcaacaacaggctgcaatgttgccttccaactcacagcacaactaccaatggtaaacacataacttgtgagtgaccttctcttatccaaatcggcagcaaaatctgaatccagatatccaacaagccccttatcagtcctgccaaacttcaagcaagcatcagttgtgcctctgaggtacctgaaaatccactgaacagctttccagtgttctttaccaggattagccatgtatctactaaccaaactcatagcatgagataaatccggacgggagcaaaccatgacatacatcaaagaaccaatagcactagaatatggaactctagacatgtattctacatcatcatcagtactagcacattgtaaagctgataatttaaaatgaggtgcaataggagtactaacaggctttgcatcatgcatgttaaaacgctgaagaaccttcttaatgtagctttgctgactaagaaataacaaaccagaatttctatctctagtgatttccatacctagaattttcttagcagcatcaagatccttcatatcaaactcactactcaactgtttcttcaatgtagtgatttgttccttgctcttggcagcaatcagcatatcatcaacatataacagcaagtatatagatgatccattaacaaatttaatatacacacatctatcaaattcagaccttttaaagccatgtgacaacataaatgaatcaaaccttttataccattgatggggggactgtttcaaaccatataaggatctttttaacatgcaaacataatcctccttaccagctactatgaacccttctggctggtccatgtatatctcctccttaagctctccatgaaaaaatgctgtcttcacatctaactgctcaagctcaagatcatgcatagcaacaatactgaagaatgtacgaattgaactatgttttacaactggagagaacacatcattataatcaacaccagcaatctgactgaaaccttttgctactaaccttgccttaaaccttggaggctcgctgggagataaaccctcctttctcttgaaaatccatttacaacggacaggcttcttctgttttggcaagtgcacaagctcccatgtgccattcttctcgagagactgcatctcctcctacatagctgagatccacttctcacgatttccagaaacaacagcttcagtgtatgtggctggctcaagagtattctccacctgttcagcacaactaaaagcataataaaccatatcacattcctcaataaggcggactggagctccacaactcctctttgttctgcgatgtgcaataggttcatcttgtggctgcaaaacaggaggtgagtgctgaacagtatcatgaacatcattaccaacaatttcagtttcctgatcatcacgtgctccacctgcacgttgacatattgctgctcctcatcagaaccacctggtatgacatctgtgggcaagctgtcattaaacataatagattcattaaaaacaacactcctactcatgaaggtcttattagtttcaggattccataacttatatccttttactcctgaaccataaccaagaaacagacacttaatagctctaggctctaattttccattatcagcatgagcataagcagtgcatccaaaaactctcaactgtgaatagccagcaggcataccagaccatacctcaatgggagttttcttattaagtgggatagaaggcgacctgttaatcaagtagcaggcggtgttagcaacctctgcccaaaaacgcttgttcatgcgagcattggacagcatacaacgagccttggagatgatggttctgttcatgcgctcagccacaccattctgctgtggagtgtacgggatggtgtgatgccgaacgatgccttccttcctgcagtaatcatcaaaagcatctgaacaaaattcaccgccattgtcagtgcgaagtacttttacctccttttcagtttgcctttctatcataactttccactctttaaaaacagcaaaagtatcatctttatgtttcaggaaataaggccacacttttctagagtaatcatcgataatggtaagcatataacaagcgccactaagagagggcttacgagaaggcccccaaaatcagcatgtacataatcaagtatacctttggtgcgatggactgaggtattgaattttacctttttatgcttaccaaaaacacagtgttcacagaaattcatgttaccctgagtgcagccatccagcaggttcctcttcatcaattctgccataccaagttcactcatatgtccaagacgcatataccacaggttagtcttactaggttcatctttagaaacggcagcagcggtaacagaaccatgtaatgtacttcctctaaggacatataagtttgcagaattcatatcaccaatcatataaacgagagaaccttttgatacctttacaactccacctgaaccggagtatttgtatccttctgcatcaagtgtgctgagtgagatgagatttctcgccattcctggtatgtgtctcacatctttcagcgtgcgtgtcgtgccatcatgtgtcttgatctaaacagagccaatgcccacgatctcatgtgggttatcatctcccatacacacaacatctccattctgcacagacttgtaagaactaaaccaatctctgttaatgcagatatgaaacgaacatgcagtatcaagtatccattcatcatgactagcaacacaaccagcaaaaacgacaagacaatctcctgaatcagagttttcggcactggtaacaacagaggccttaccatcagattttcttttctccttattctgcagcttccaacattcttcaatgaagtgaattttctttttgcaatacttacagaactttttacttcgggacttagaacggcttctactctagctcttgtcacgatcattgctgtcgttgtaggttctttgttcagatctgcctctgacctacaatgcttcgcccttagaggacgaggcatcagactgaaccataactttcatcttctccttgttttggagtgcctcataaacttccgcaagggttagttcatcacgacttaaaagtatggtgtcacgaaaatttgcatatgaactaggcagtgaacataacactagaagacctaaatcttcatcatcaaaatgtacctccatcgacactaggtcggcaacgatctccttgaagaccgatatgtggttcaacacagaaccactctcctgtaacttgtgcgagaacaacttcatcttgatatgcatcttactggttagatctttagatatgcagatcgattccagtttgagccaaagttctgcaacagtcttttcctacaacacttcttgcaaaatatcattagatagatgaagttggatcagcgacagagtcttacgatcttttcgcttctcctcagcggtctattcagtcgttttcttcttcccgaagctttccagcgcctcatcaagatccgaagtttgcgctagaaccatccgcatcttaacttgccacagcgggaatctcgtcttgtagtctagcagcggtagatcatacttcatcgacgccatcgtgaaaccctaatgtggaaacaatgctctgataccacttgttaggaaacgataggcaaacaaacgataaagaacaatagatcaatcacagaagacacgagatttaacgtagaaaaccctcccaaaacaggagagaaaaaatcacaggcgccagccagcaaaatatcttcactatttcggcggcgtcaactttcgccttcttcgttgcccttgtgcgggcagacggtggagcttggtgggaccttgacttggaaggtgccggacgaggagcttgaggaggagttgacgcaggagcctgaggtggagacggtgctggagcctgaggaggagatggcggagccagaggagatggtgcatgagacgccgcttgtcgcctagggaggatgatgtaccgcttgcgccatagtataatggcgtggcttgtgtctcgtagatgcgtctcaccgtctcctccagggtagtccaactcgaggtccttgtacgcggcttccaccaactcaacttcgaccttcgagtatcctgctggaatcggcctgcagtggtaagtccctgaagggtccgttgggatggccattcccgacgccaccttcacgtggtgagaggttatctattagtaatcaacataagcagcaacttgcggaatggacaagtcaaaaatcataaaattacgagcataccttgattgataagttcttgaagggaatatgcagctcacatggtgtccgctgagtgatctcatcaacggggcaggtggtttcgtcctgagtttgcatggcgtccatgctctatgatcctacctgtcccgttgaggcacagctgctacgattgcctgatgggctgaccattgcaggaggaatgtacagctggggatcttgggaccgatgtgcggacatgcgtttatccaccttccttgccacctcctctttcatgctgagctcatagctcgataccctgtacttaagatctgcaatcttcgcctcggtatctctcttgctcctcatccgactcctgtacgtgtggatgtcctccttgaatccaatcttccaaggaatcacccctttccctcgtgttcgtcctggatgctcgggagtctgtagggcaagtgacagctcgtccttctctctgtcgggtcggaacgtgccctgagaagaggcttccactgcgtccgttagtcgactggcagcctcgcgtatctgatcgctgaagaccagggagccatcaactgggttaagcgttccaccatgagcatagtaccagaacttcgatcgatccgaccatttagcggtggccggttcgatacccctctcaagcaagcttgcctccatctcctcccacttcggcatcgcgacgctatagccgcctgaccccaagtggtgatggtacttcttcttggcggcattttctttgtttctttccatcatcgcctgcccttgttgccctgtcttgtaagcaacgaactcgtcccagtgatcccttagcttcgggaatatgttgaagttcgttgtctgccccttcaggatgtatttctggtagagatctccctcgaagctctgaaactgttctgccattttctttagagtccaaccttatgtgatggcataaggttgtagaattgagtccaagatctgcttattaattcatttcatctgtgctcattgttttcgagaaagaattatgctcttattataaaagaagggattgctcctgtagatttcttaagactatattatctagtacttctgttgttaaatccaactacaatgtacatgaaaacgcacatggaagttagagaatctatttaattcgtacgaacaataaacatttgactatagtggtctgccgaacccaattccgttctacctatatatgagcagccattaattgttttgcttagtttcagcctaagtggatttttgttgccccatagtccaattattcttgatcagcgatgatcatcaccatctctggttctgtatcctggtttccatttgcgatgatttcggctaactgtcgttacaattgttgtttatttttgttcactgcattgcagagtggaggaagaaactggtcatagtatattaatttgggcgggaatcatggctggtcgattgagggaagattagttttgttttactagcagtagtttcctgtactgtatcgagtaaatgtcctgttttactaatcttcctagacaatccttctttcggcatactttcttcaatttgacaaataatactatgcatgtatcctttctttagttctctctcggaaacttgttgtttcaggaagctatactagctgtagcaaatagctgtcatactaaagctgagttcggcatatggggttgggaactaatcccacccgtacgcaaaacggagtctaattaggtattagctaatatttttgaaaaataaattaatatgatttttaaagcaactttcatatagaaaacttttataaaaaatacaacgtttacgcgtggaaaaagagaaagatgagttgggaaagaagggggaagaacacaacctaagtagttggttcacttcgctatacactgtcatattggttctggttcagtcagtaagtgcccataatctatgttatgacactctgcattctctcttgaaaacgaacatgcttttctatttattttgatgatgccatcccagaacaattattcttgtaatggagaggatgattgggagattcaagatgccttattggatatggttggcacacatgcatttcatcaagtttttgtacctggagaacatttggcagattttgtacatacttttatccaatcgtgatataagcaaacgctagctagcatgggttctctatagtctggtctgtagacttcagccctatttatttgattactcatcattcgttcttgttctagacattataaccttgtatgaaatactatagtatttgcatgtgttgatgcatggatgtcattgatacttcttcgactttgatgatatatagtgttgttacatcataaagctcatcatgagctcgtgatctcgtgatctcatgatctcagtatgttttttttttttgaatcgatctcagtatgtttttagatcaatttcttttatgatcttgtaaaaagtacatcattttcatatgactgtattttctatattcttgttgaatatttttatttttatttttattctagattttctgctgttttttttcaatttatctagattttccctttttattttttctgcgatttttcttatttttcgagattttatgtgatttttatttttttgttttttggctacatggaaaatttcccatagcatgttttccaaaatttttcccaaggtctttttcccttggctcccaaatgagctctcactcgattaaccttggaccacgcacccttcaaattcaagcttccactaaaattcccccatcacaaacttacctccttactggtagcatctttcggtctaagtacaggaatttgtgtgtggttttggtttgctgttatggtggcgtagtgggttgttctgtgcatctattttggttaattgaaagcattttgttcaactaacaccatgtgatgcgatgcacctgttggtatagcctgcgaggaaaaaattcctgataatgagaccatgatttcctgatacaagcatacatgttatgcatgctaaaattaaaccctttatcttggcactacctacgtactccctccataaaaaaaaagtgaatctaaaactagatgtgatatattttaatacaacgaatcaaggcacattcaatactaggttggtttttatgggacagggagtatatttgactttttgtattatccacggatcttctcaagagtaaatcttaatcttctctcttgaaaagaaaggcttatctctgtcctaggtttgtccaagttttggtccggatatcaccaatttaactcttttgagtcaatctccaaagacataggtcaaacccaatttaaagttcaaaatcttttccaaatgccctcgcaaaattccctcaaattcaaatttaagctcaatttcatagatcaaattaaaatccaaattctcttactttaattcttcaagatttgcatgtgtgcgcttgttggagtgagtgtgtgcgctattatttttctagaaaaaagctttttgtaagttcaaatattcctcaattaaagatctttgtaagtgcccaagtattgaagatctttcctcaattcaatttcccatgatgatgatcgagagagccgcaccgacgcttcagcgagcgtactcacgcgggatcatcagacgtacgcacgcggacgtcgcacgggtatcgcacgaccgacaatcggaaatatccttatttaggttacgttattacgagttcgctaattcgtgcgagtatttcataattgcaattggccaatccgtgtacataaatatatatagtgtttaggtgaattttttatcatgatcgattagaatgtttaagtgaaacttttcaacagaatgtttaattttaaaattgaaaattttgaaaactttcaactcaaattatgaaaactttccaacagtaattgaaactttcaactcagaatttaaaaagttaccactcagtatttgaaaacttcagtctcacacagtagcaggcaaattagcgtacagcaaaatgaatcaacactagcacttgagtccctagaaagacttatacgaattgataattgcagcgtcatcctgcttccagctaccaaactttgtggattcacatcttcaccatcgccgttatgaaaatggcgctcagaacagaagctattgcaatccgtttcacgactagctttattctgtcagtaatggacacacaaaggcaggagatgagtttagaaaaaaaaaatgtacagcacgttacatacatatattatactattttagtcagcaaaagaaagaaggcattattaacacgagattacaatcagtagtgcaaatttacttacccgtaaccattaactaggtgcttaagttcacggtatggcggaagctgcctgagtatcctttcgtcctccaggttggagttctcaccactatattccagctgcgatagcagatggaacagctcgattttcttctcctcgacttgtgccctaaggctagcaggttctttgttgctgataccagactccccgttcacagtaggttctgcgtgaggaaaatgccggtcataccaggtcttgacttgtggcctaatgctcgcagggatacgagacagctccagctccacatccacgatatgttttgattgaggcaaatgatcatgctggccatacaaggagttgtcagcatgaaggtagaaaagatatatatgagaaaaataaactaaacatattcgatcaaagttgtcagcatgaaggtagaaagcttgaatgcttggttcaaatttgttagctaaatttctaatgatcaacgagtacatgaggcaatttgtgcacaaggttagagaaggaaacatagagtgcaccttctctttattaccaaatttgttagctaaattttcttctaatgaccaacatgaatagcttaggcagctttgcacaaggtcagagggggggagtgcgtggaatcatttcagtattaacatttaagcaggtaatattgaaatcgatgtcctaaaaagctgtatgcgggtagaataaggaggattgtctcctcaatgtccttatagtttggaactaaaacctaaaactaaaggcggcggagaatgaagaaacataccctacttcaacatttaaagaagagccttgcaggttaatgacaagatcggcttagaaaaagggaacagctctagagataatgaagctcgaagtgctttccgatcaatcagtagcaattaataccagttaaatcataacggacggggcctagatgagtttatagtactaagttttcactactgtcacagggaggtgttgtgaggtagagtgttgtttactattgtcattcatctcatgtgttgttactagaggggcttttagcaagctagctcagatgatttagcttcaattaatataattctgctttctacaatttaatccatgttacttgttactaagctcctaatctggtcacattttttttccttggtagtgatgaagtcctcattgggtggagatggaatgacaggaacatcaactttaaaagaaatagatttgtgaccatgtgttgtcaatagagcaatgttatatgcaagtttgtgtgtaaactgtagttagtatatgatgccaactgctatagatttagtccagttgacgtcaactacagatttagtcgagttgttgcccatggagtaccaaaggttgtgttgttaaattggaggtcattaagtcaaatgtttgcaatggcaagcactaattacttattctgcttgttttaaaagtttgagaagtttttcttgtgactatattggaatggtttactggaataattactaactgaaatattttggtcctattttatttttttcacgcttataagttagtttttagaaatatttttattttctttaaagtttttcaaattttctgtgggttgtaatttttgaccttgtcatactatttaaattcgatttttttgtgtatattaattcaaattttgggtaacattactgctacaatccctgaatgttatttaagttatgaactttacatgagacatttctatgtgatccaaacagtaacgattcctacacccacagtggagatggattgggaggggattaacccaatccccccacctgggtgtatctccacagggaaaattcacaatcccccaccagggtgtatctccccagggaaaattcacaatcagcagcaattaaaataccagttaaatcttaacggacggtgccaatcgtgtcattaggtcttaaaattgttcagttatatttttatttattccaaatcgatagataccaaacaggatagctcgtcatctattgccgagagaggacgacggtaaaagggaaatcagggacaaacgagcacatacctttttattgtttggagcagctccggcggagctgaatgagcggaggagcggcatccggccgccggcgccggggataagcctcggcaacaaccgccgttgttcctctctaaccgccggcgacggcggtacgaaagccgtcgcctgttgaagggcgcgaccgctgaccttcctcgccgcaaatcgaagcgccgccgccatggacgattccgctgcaagatccctgggcggtcggttcctaagctcctatatttactccaattcctcgatccctcctcagatctgaatttggggccgcaagacaccaggtttgctatatatgtacgcacactatcagatacaagtcggatacaaggagccgagaccgacgccgtgtcgtgaccaacccgcattcgacttactacatatccagtccagatacaagtcggaactcggtaagtaattactactatttcgtgaacaacttatcttgttatcttaatactaaatatcaatcttatcttatctccatctatcttctctgtacatgccaatgcgttgcaacggaaaaatctaccacgccttgagaatctcaaatcggtaagaatcaagtctaatttgatatattaccaaattaatcgatagaatcgagtctaatttgatgaattagcataggatttagaattcagccttagatttatttttcgagcctacttagaaatttatccaacggagtttaatttaaaaaatatgaaccatatttgataaatattttagtcaaaccagggaattacattgcaatgtgacggaaaaaaaatcatattatataggtacacacaggatgatgtgacgaacaataacaactaatttcaacactggtgagaaaaatattgacaaattaaaacaacaatctctgaattaaacatcgagtttaaaaggaaaaagttcacaataaaatgatattgcactttgataacatttattataatatactctacaagtacagaaaaggtaaaggaaatcaaaattggctcaaaataatgccaaagaaaattctgtaaatgactaaatgaattaaatcaacaggaattaaataaaatcttatttcagcccattacttccgtaactggcccaaaatatcggcctgacccattcagcacgagcgcgcagcaagcggtgcgcgacccatctaccggcgatagctcgatgcaaggcgaactgagtgcggcctagttatcttccgcggcccaaagactgcgtggcccaacagcagtggtggctagacgcggggccgatctgagccgtctgatctgatggacggctcagatcggtcccgcgtcgatgaaatcatcggccggaggggggatgggtccgaaaaccttaaccctaatcccctttctcacctactctccccgatgcaaactctggcgacgcgagagagtggatggcggtgatggtggtgacgacggtccgttgaggtggagtacgcacgcggcagcgagcggctatggcttcacaggctgggaggcgctcccgagggcagcgccatgcgaagccacggcgtcgggggtccgacgaagcgggtgcgcaagtggcgacgggctccgagagcggccgggcttcgtcgatggagtgtgggggtggggcgccaagccaacgcgaacgcatgggacagaggaggaactcctagatctgcgggctctaggagcttgacgcgaccacgaggaggtgaagtgtgcggcggtgctgcttctcggcgagacccacacagtggtggggtttgccggtagaattagggctccaaatctactaagaatccaaactcgagcttaattttcttactttgatttggttttggatttgattcggatttcggggcttatgattcttttcaatttggggatttcgggaaaattgaaaccgactgatctcattcttcccttcccataatttattaattctactgacataaaacatgaaatttaaaataagtctaaacatagcagtgcattatgaaccctaattcaatattattaacttaatttgaacatgaacaggagctaatctttactaagcagtaaagataagaagctaaacagattagattaaacttatttgactcaaaattgttcatctcgaatcaagatgggaccgatggcttctaatcatagggatgatgtgaataaggaattgagtaggttaaagttaagctctgacagcacaatgttagagttctaattcaagatcttattgttttaacctataagcaatcacctttcaattacgaaaattaattctctgacctaagatgaagccattgaagtcgatgtctggtttagaaataatttcatttagaagctgaaataattttttagcaactttatttggctaagaaggcttataaacaaatttcttaacattataagcattaaaattggcgggatttagttaaatttgcttttggcccacgtcttccgaagccaacccgtcttcgcgcgaatgcactgtgtagcggggacccatcaatttgatggcccgcaagtcaagcaaacaatcgcggcccacatacgcggcgacgacccgatgcacctccgcgctccagtggctgcgtaattagcagcggcggcgatctgacgcggggcgaatctgagctgtccaatctgatggactgctccgatcatcccggcgccggatgaagcgtgactgggagagaggggcaaaaccgtagctcccaaatccttctctcctgatcctctttctctctggcgacgagcgagcggaacaacggcgaaggcaacgacggcggtctggcgagctggtgtacgtgcggtgacgaatgccaagcggctcctacttcaccggctaggaggcgcacccgaggacggcacctagccgtgtcacggcatcgatgatccggtgaggcgggcgcgcaaacgacgaggtcctcgtcggcggggaggggggtgggtgtggggggagggtgcgacaccaagccagcgcttcccgtctccggcaagggacaatggcagggtgctccaggacagcgcgtgcacggggaacccgacgcgactccgaggaggtgaaggtgcggcgatgccgcttcccggaaagctccggttagcttaggggcttcaagtctggtaaataacccgaacccttaccataattgatttggattttgactcttagggttcttacctgaaattaggatcttcgaatttgggggaattttgtcgggaaatttcagtctattttattccctcttctcgagtttggggagtttcaatctcgtttatctcctctttaattttgggaatttcaatctagtttatcccttttctcaatttggggaagctatttgtggacccccgtttttataacaggaatcaaacgtgtaaacagtaccatttccctggatcaagtagtttggtacacacgaattcatacctgaaataccaagtgcacatacatgagtgtctagtacgaattattacatcataagcccacaggcatagttttaaatcatcggaccgagcggtccggaatacatcccaaaaatagaagtagataaggcagcggagttaaggcagcggcacgccattgccacaggcaacgaccgtaactaagacctactgagcgccatcgtcttcatcaccctcctggtagtaagcgtagggatcctccgaagcttcatctctgacctctaattaagtttgtatattgcaagggtgagtaccaaccgtactcagcaagccaccacagcaacaatgcacatgacaggggtattcaaaggatggctatggttctttttgcgcaaagcaggttttgtaattcttttcatgtcacgcccggaatttctatccaaaattccaaacgcttacatgtgtgtgaaccctcgtccaggaatcagccgaggcacacaataacaaattgataatagagtacaattattactctaattaataagcgaataaaatgtcattacagaggtagatagttcctctcaatcaataaagatctaagcagcggaaagaaagataaacggcgcagacggctccacttcacaggcagcttgaccaaggctacacctaatcctccacaccttcagcatcattgtagaactcttcctctgatgaatgattgcaaggtgagtatatgacatactcagcaagccacgcagcaaaaatgcaagtgcacaggataacaaaggatggcatagtagggtttcatttgcaaaagcagcatttagcaaatatttcagaatttaataaaacagttaagtaataattaaacaatattaatccaacgctatacaacataccctgttgcataggcccaaccactctgaacaaccatcccggccgcacagttctatctccaaaccaggaatataccattccaaaccaggagctaatcaaattattaccaattatagcatcatttactatggtgagaagggtgagactaatcacgaaagacattgttagacccgcccataaccgcgggcacggctattcgaatagttttactctgatcagaggtgtaccactgtacccacaagacacaaccccacatcatgtcaccatgtgcctcaataccaccacggtacctcggaaaggagttgtgacaataccccttgcataacacaatccaccgcagcgcaccttcctggatcataatcacccccttataaacaaggcatggactccccagcgacccccgtgggcttatcaccgccacttctcagtctggtgccctgcaatgaaccatgctatacaaaagataaagccgttgcccacgctggcttgtggttggcacggttaatgtttcacaaccgaaactcgtgaaccggtccttaattgtcatgagcacgaccatcaaaaccatgtgctcacaacccaccattatcaagttttagttggcaaataattaattaaccaatcacgattgaccatcgtgaactatcattaagccatcattaaataatagtgagtcataaattatcccaatagtgagctaatgtttctaagcagggctaagcaattatatctaatatctagttgaaccaatatatataaagctcaactagtccaattatattaacccaaggtatcaaggaataaagtaatcaagaacaaaagggctataacaaagaataggttaattccacccaatgacattcgaaaataaatgcaatagttgaatagaaacaatagctttaaataggatcaacatgttcaaagggttgtttgggatctgtgtgacttgccttgctggccttagaactcttcaaactcttctccggcgaaaacggactctccggaaacgacggaatctaagcagaaaagagcaaaatcaccaaaacagcacataaacaagcatgaacagtacatgtggatatttttaacatgtagatctcaattttagaaaaatttagagacttgaaccaactaaatccgagctaagatgaattagttatgaatttttgaagattaattcggattaaaacacttatattgattttaattgaattatgacgcaataatgaattatttttgaaaaggaaaaagggaattattgcatcagtggctagggtttcgcggtggaccgggcgcacggcggcggttcacgcgaacggacggctgagatcgatccatccaaaacggacggccgagatcgatcgggtccacggcggctcacggcagacggccacgatgacattagcgatgacgtcaccaccggcggcggcggctcggcggctcggacggcgcacgcttgccggcgaacggcggcgcgaggacgcaaacggagggcaccaacgggtagagcgcgacgcggcgaactcaccggtgaccaaaagagcggcggaagaccaacggacggcgacgacgacgaggttgaaacggcggcggagatcgggtcgacggcggcgacggtgctccggcggtctccgacggctacgaagaggcggacgaggacggcgacgacttggcgatcccgacggcggtcttcccgagcgacgacgatgactggaacggaggcggcgcacggctggagcgacggcggtgacggcagcgctagggcacacggcgctagagcgctacgggcgacgagaggcgaaggcgagagaggcggcgggtagaggagagctcgggggtccttttaaaggggctaggaggcggcggcgaaggcccacggcgaccggcaacggcgaaggaaacttcgggaagaacgaatccgaaacaaactcgaatccatcgatttccaaaccgaagtagaggatgattccaaaagagaaaaggtggaggagatcccggagattgtttcccctctataaattcggccggaaacggaaagggagcggccggatttggaaggaaacggcggcggcggctcgctagggtttcgggcggcggccgacgcgaggaagacgacgactgacaagtgggacccacctgtcagcgacagcaagcgcgcgcgcgcggctgcggcctgggctgggccgactgggccgagggagagagagaggaggttttgggccgactttcggcccaaagccaaaagaagactttttaaaacctttttcaatttaaattattccttaaatgcaattccatttattaaaaatacttccttagctcaaataaatcccagaaaaatctagggattatagaattaagcaaagtatttaataaaattttatctggccccattttatattggaatttattaattaaaattagatcttctcttctaggcttttaaaagaaattctaaaaattccatttaaacaacaatttatatattttgaattttcagggtgtgacatttcacaagcctaagacctagcacagactgatcaaattttagtaccagtgttcatattaaacaatgacggttctgtccaccatccattgtgatcccaaggatagcttcccgccatcgagtcgtcatggttttctgaggacgtccaccttcccgcctctcaggaagtggctccatcagcatagaaatcattatgcaataccccattccataccagttaagaattttgagtctagccaagtgtaatacatgtcccggtgctcaataaccgcgagcacggctattcgaatagatttggtttactcacactgcagtggatgtacactttacccgcactccgcgactgcccaatacatgagcctcgtcccaacacatgagacgcgtcacggcaaagcttttcgataacctcgcattggcagtacccgctccatgaacttaaatcctcatgcactctaggcgtccatgtttctagcagtgagaggagttctggcgctcccgggaaagagaagtctcacacacatattaaattatggttcaagttaagttctctctcacacacactcatggcagtcctaccaatggcgacaccgctgtagggcacgcctctcggccctacctcaacgactgtcccaccgtagcgcacctgcctcgctcaggggtgaaccatctatacagggatactgcctccgctcggctatctaatccgctaggtctatacccatacgagaagtgcggttgtacggggggttgtttcatgcttaacttcatggctcggtccttaattgaccggggacggtactagccctttccagataccacccaaatcctccgtccgccccagtcgaaaacagttgtttagttttatttctcctttcgcaaatcatgtcatcaatatcatggcaatgtggtgctcatgtctccacatgccgcatctcaattaccttcccaaaggtaattgcccaagcatatagcatttgataaatatgagtatgcataattctagaatagcatttctaagcatttgtcatagttgactaggcactcatacgtaaacatggttacgaaggaataaggggtaaacaataattaaggcatggcataatcgcaagtaggatgttcatcattgcatgcaattttatttgtaaacaaaacaatttcgcaattgagatcaacatgtttaaggaatagtgatgacttgccttgctcaaagtcttgcgggtcttggccttcgcttggatccgcaattccctcgggctctatagttacgtgcgaaaattgatttgaattcggttagaattcaaataaaatccaagtaaatccaagaagatatcaagcgcgaaagtcggtttcatacattatctattttcgttcgtgaaatagagctacttcgtttgtttaactccatccatccccaaactattttgtagcataatcattttactagcgcaagtttttaatttaatccgcccgggtattatatccatataataggttagaaatttctatcgcgagctaaatatcggacgaaatccaagaaatattatacgatttaatttagtctatgactaaatgattaaatataatacatggctaaaatccctagtaattaaatccgaattttctatcgtgaattgattacttatagagattacccaaaaataatctataataatctataagaattcatctatttgtttagttattaattacatctaaatcactaccgcgaattgatttcttatagaaattaccaagaataatccataatctatattaaattttgcaattcttcgactataatcaacctataattaaattctaattattttaaatttctaagcctccttaacctcttatttattttcctttttctttttttttctcttctctcttttcttttctttttctttatcttcctctcttttctttttctttttccttctctttctctctctcggcttctcccttcctctctctctcccggctctctctctctctcccttcccgaggctgcggcggcgacagcacgcatggcgggggaaagggcggcggcttaccgacggcggcgacggcgacggtggtgcaaggcggcgatgcacggcgcggcggcttcgaaggcggcggcgcggcggcacgacgacggcggcacgtggagaagggggagagggagaggaggagggaagggagtggggtggagaagggggaaggggccgggggcttttataggggagagggggagtaaggggagagggaagagagagggggcgggtgacgcgacggcggcacggcggcgcggggcgcgaggcggcgatgggacgcgcgctcggcgacgggacgtcgacagcgacggcgacagcggcgacgtgacgggcggcgacggcgcgcggcggctcggggcgcgaggggacggcggtgcggcgacgcgtgacagggcacggggcgcggggcggtgagcgcgcggcgcggcaacggcgatggcgacggtgcgcggcgcagcggcggcggcaagacgcgtcggcgacggcagaggagaggcggagcgacgcgcggcgcgcggggcgcgaggcagcttggcagaggaggggctgggttaggggaaccgcgtcgagcacctagagtgcaatgaacagtgcattttcctatttttctcattttagtctatttcttttataaatttgattccacaattcctaatctttgcatatatgaattttactcaatatttgtgttatcttaattaatgcattctcccgagactaatattacccatattttatataatttatttgaatttttaattagggttaattcttattccatcgcatttaaatttaattgacacaaatatggtcgtggtaatattttatttatttcaatccacacctaatctttattttaaattataatttatttatttctttaaccaacctaatttcaaggttaattcctaattaatgtttcctctatttgtaatcgatgaactccgagatcaaaatccaataaaatcatcgaataaaatcggtatgatgcaatttatttaaaaagttttcgaaggcccacattttttttagagtttagatttttgtcggtcaaattttcagggtgttacactattgaagctgatgtctggttttgctttttggtttgtcacctcttctcaatgccttttcacatttttatttgtaacttgtgcggctcaggggcaatccagatagaattcttagtttgttaccaccgatcatggtaacatttaaatctatctcttattttcttatttgattcgatctctgatctcttttttttttttgcaaaattttatgtgtgatgatcggaaagttacgtattttatgagtagttcagattgtattatactagaaaacatgcccatgtgttgcaatgggaacaaattttgtaccaattattaattatattgtacggaatgatgttaaatattttaaataatgatacaaaatggaattgctaaatgtccattggtagaaatttgggtcaatatcttgcaaatttctaacattaggatttgcttcatgatttgtgctttggtgatccctggtccttttcccccagcttcagcgatcaacgatggctcgacgagttagggtttaaggtttcgggttagagtgagggtgggaagggaggttgggggagagagaagatcggcgagtataggcctgtagggggatggtcgtgggaggcagtggaatgggcgggcggtagggcaacggcggcgcctcaaggtcgagaatgggtggtgggtcggtgctagcgttaggggcaaagcagaatgacgggataggaggtagcggtctatggtggtggatccgctgcgcgggggcagctcaacgccgctggcttgcggaaaaggagaggaggggagggaaaggaagagggggacactcgtcggcactgttgacgcatttcagccatctagcaaggccaaaaggcgacgtgctagggtgacgacggcggcgcagaagggggagtcatgatcggtgctggtgatagtggcggcaacgtgaggagggggtcaataaagggagggaagaacggggttttagggttttgttgtcttgcacgtatctcaaaacaatccaacggttcaaaattcgcattatttttggggtggtctctagtcaaatgatatgtcatatgggtagacagtaaaaaataaacatacatgggcaatcgcactgctaccgctataacccaagttgagccagccgacgtggacatgtattgcgcaccatttgctgcccatcgtcagtaactgatcaataggctttggttaaaacttcggaaagcaattgagtaataggattgtcatcaatgctttttcaagagcatatggttgtagtcatttagacctaaacttgttgcaacaacgtggtaaaccataaaatacagaaaaataataataataactcctacaaggaatctgttaatccatgatgaaaaatttccgtcacggatcatcaaaaaaccgtcactatgcagcatctgtgatggtttcagagatggtcacggattgagcgtcatggattaacctctatgacgatttaccaaaaaccatcacggattaatggaatcggtgactgttttaaaccatcacgatagagcccgaggcctagttagcccagcccaagttcatttctatgacgaaaaataaccgtcacggattgaatgccacatcatcatggatgcggacatggttgcttacgtagacactacctcaacctatttattaacaggccaaaatcaaagatgggccaatttttagcccaatttcatccattttcgcagctccttttcagccattttggcagctcattttcaatagctttacaacccatttcagcagctttgcagcccaattttgtcaccattttttagtgcccttttcagcccactactacatcgcttacagcccatatatacagcctaatttcacaactaaagcccatatacacagccagcagcaaatcaaatagaaatatcatttttccattcaatatcatatcacatgatttttcatccaacatcagattacaacattcaaagtgcatacaaccttgcagtttaccatggctcaagccaacaacaaatagagattccaagcaatgcatacaagtctaggagcttaatgaatgctgcggcagcaaaatgcaagcatgtatagcttagcttagtcaaaattgacttgacacaagttagcagcagcagcaaaatgcatgtagtagcaaaagatatagcatcatgcatgaattaacttgatcgaacttgactgagcaaaagattaagtttcgcttccatctcagattgagtcctcttcatcgaacttgtagacagcttgttttccatttgagtctagcaagcaaggagcaaacattgttgttgatgagagaattaaaaataagcattacaaagagcaaaaagtttgaaacttatcttacaatagcctcctatacagcagtggtgtagcaatttttttttcttgctgtagtggaactccttgaacaaatcaaatgcattaggttcttcttcattgtatttgtcaccctgaaaacaacatatatgcattatgtccagcaaatgtgtacagtgttgaacttaaaaaaaaggatgaatctagatagcatcaaatcaccgttgagctgatcaaatcaagcatgatccatggtatcccccaagtaagctgttttctgcacctctttttctttttgttggcaaatggattaaaacactattcagttttgaagatctctgaaaatagcagtcgaagttggggcgcttcaccaatcaccagcgcccctctcacagtagcaaatcccgcctccgccctcctgcacatgggtgaggcacatgcgtcaaaactcgccaagaaaactaatgcaagaaacaaagaaagaaaggcataaagcaagaattgaagactggcgcctctcctcttctttttcatccgtgtcaaaccgtcctggcccaccatgatcgcctgccgtgctccctatgctcacgcgtgcagcagtgcggcgtcctcatcgagcagcctctcgatggacggagctcgcgagatgtaggaagcaggcgcgctgctgggaggggatctgcgccctgacctgctgccggagaaggaggaggaggaggactcgtcggagctctctctcgccggtgcttcttgcgcttcgatccacgtcgccggtggctgctccggatgctgcgctgcacgcccccaccaggcccgagaggcgccggcggcagcggatccacagctcccgcgtccggcagcggtggagacggatgccggcacggcaagcggcgaagggggaggaagccggcgcggtgagcggcgcccggcggcggcggagacggaggccggcggtctcatctgcagtagcgcctcgcgtgtggtggcggcttatctgatttggattggctattttactaaaatacccatggtgcatccgaagttaccactaaaatatctggacaaaatggtcatttcacattgaaattttgatcaacatcctgccacactgaaagtttggcgccagctgctccttcgggccgccggcccagcgtctgtttttcctccctcctctcaattaatttcaaaatattaaaactgcaaatcgaattttatcatattaaataaacttatgtgaaaaaattgttaaaaacaaagttatataacttaatgagatctacaacttttgtttgggtcgttttgctatatgactttgtttcaaaattttgaatttgaattttaaattataacaacttcaaacaatattttcaaataataaattatttcaaatgaaaaggtcatcaacaacaaagttgtacaactcatcaatatttacaacttttgttttggtcatttttctatatgacttggtttgaacaatatgaatttgaatttcaaattatgacaacttcaaacaatattttcaaatactacatgatttcaactaaaaaagtcatcaataacaaagtggtataactcatcaagatatataacagttaacggggtcgattgctctgctatcgaagtcctgctgccctgagatcactcaatgtacatatggctaattcagcatacgagctatgataaagaaatataaatttggtttataatatatctgtaacttcgtcggatgaatcaatgaccaaaatataagttatagatattgatgatttatacaacgttgttattcatgactttatcagttgcaatcatttaggatttgaagctattgttcgaagttgtcataatttgaaattcaaattcaaattattgaaatgaagtcatatagcaaaatgacaaaaaaaaagttgtagatcttgataagttatacaactttgttgttgacaatttttttcatttcaaattatttactacccgaaaaattatttgatttttcttatattttaaaattcaaattttatataggttaatcaaactcggatggagaaataaccataataaatttgatagatctcattaagttatacacctttgtttttgatactttttcacaaaagttaaaattcgactcggagttttaatgttttgaaattaattaagaggagggaggcaaaatggacttctcggcgagagaggagtaaatgggcaaggccggcagcccgaagaaggaggaggggatggggaagccggcccaaggatcaggagagaggctgcgggctgagggagagggagagtaacacttgggccgaaaaggcacaaggatagggagagggattttaatttgttttctatttattttaataggttaaatgaactttgtggtattaaaactagttattgagctctaaaaattcacagaaaattttagagaataatttagaccacttagaattttacaaaaatatttctggccatgatttttaaaggaaaattttagtaaggtgatggatttaagtggaaataatattaatattcagtccactttggattctatggtaccttctcctaatactattaataatggtaagaaaggtaaaaaaagaaaaagaataataaaaattagttttaaacgaaaggaatcttttggaattgtgatgggttcaaggacccgaaaaaacataagtttatttcaaacataagtttatttctaacttaaccaaagaacatcaacttgactttattgctttgtttgagactgttaagaaataattttctacaactgctcttaacaatctttgtgctggtgaagattttttgtggtattgtaaacccactagaggtagatatggtggacttctcttgggcattaatttattaaatgctgatattggtttgattgatgagggtgatttttatattaagtttcatttgcgaagtaaggctgacaattttaagtgggccttagttttagtgtatggacctgcacagaatgagtttaaggatcaattccttgcagaattactgcacagtcatgagactttaccaattcttaatggtggtgatttcaacatactttgtagccctaatgaaaacaataatgacaattataatgatagatggccctttttttaatgctattattgatgggttgtgcctcaaggagttacaaatgtctggtaggaattttacttgggcaaataatttagcacatccaacctatgaaaagctggatagggttttagtgttgacggaataggagcaaaagtaccctttatcttctgttgttgctcttaatagagatatttcggatcatactcctttgcttctaaataaaaaatcttcctcttttagtaatgctgaacatagttttaggtttgaacttggttggcttttatgtgatggttttgttcatatggtaaaggaagtttggtctagtgttgatgaaggaaatactcctatggagcgttagcaggcggaaattcgccgcttaagatagcatcttaggggttgggttaaacataccagcggtatataaaaaagagaagacaacatcttaggggttgggctaaacataccagcggtatatacaaaaaagagaaaaagcagattttagataggttggatgcgctggataaaaaggcagaaactgttctcctgtctcaagaggaaattgatattagatggttttttaggaatagattatctgctatcctacgggaagaagaaataaaatggtattagaggtctaaaactaaggatattttggagggtgattctaatacaaagtattttcatttagtggcaaatggaaaacataggaaaactagaatttatcaattacaggatggtgatcaattaataaatggtgatgtcaatttaaagtcgcatgttaccacttattataaaggtctttttggccctcctaatgagtctgaccttcagttagatgagaataatattgctgacatttctcaagtctcacattt

SEQ ID NO: 21599 - DNA, 4135 bp, Oryza sativa
attttacttgggcaaataatttagcacatccaacctatgaaaagctggatagggttttagtgttgacggaataggagcaaaagtaccctttatcttctgttgttgctcttaatagagatatttcggatcatactcctttgcttctaaataaaaaatcttcctcttttagtaatgctgaacatagttttaggtttgaacttggttggcttttatgtgatggttttgttcatatggtaaaggaagtttggtctagtgttgatgaaggaaatactcctatggagcgttagcaggcggaaattcgccgcttaagatagcatcttaggggttgggttaaacataccagcggtatataaaaaagagaagacaacatcttaggggttgggctaaacataccagcggtatatacaaaaaagagaaaaagcagattttagataggttggatgcgctggataaaaaggcagaaactgttctcctgtctcaagaggaaattgatattagatggttttttaggaatagattatctgctatcctacgggaagaagaaataaaatggtattagaggtctaaaactaaggatattttggagggtgattctaatacaaagtattttcatttagtggcaaatggaaaacataggaaaactagaatttatcaattacaggatggtgatcaattaataaatggtgatgtcaatttaaagtcgcatgttaccacttattataaaggtctttttggccctcctaatgagtctgaccttcagttagatgagaataatattgctgacattcctcaagtctcacatttcgagaatgaagcattaactaaggaatttactgaaaatgaggttaaggatgctattttccaaatggagcacaacaaagctccgggtccagatggatttcctgctgagttttaccaaattttttggaatgtcattaaatttaacctattagaactgtttaaagactttcattctgggagtttgcctttatattctctgaactttggtactatgattcttttgcctaagtgtgtagaggctatgaagattcaacaatatagacctatatgcttacttattgttagctttaagatttttaccaaagttgctattaatataattatggatgtcgctcaaaaggtaattactcccacttaaatagcgttcattcctgggagaaatattatgaaaggggtggttattttacatgagacattgcatgaattacatcgtaaagataaaaacagtgtaatttttaagattgattttgagaaagcttatgacaaagttaaatggccttttgtacaacaaacattgagaatgaaaggcttttctcctagatggtgtgagtggatagcatcttttattcaaggtggtcatgttggtataagagttaatgatcaaattggtaattgttttcaaacttacaatggtcttaggcaaggggaccctttatctcatattctttttaatatagtagctgacatgtttactctattgattaagagggctaagaaggcgggacttttgaatggggttattccccatcttgttgatgatggtttgtctatcttgcaatatgcagatgatactatcatctttttggaccatgacttgcaactggcaaagaatctgaaattgattttatatgtatttgaaaagttatctagcctaaaaataaattttcacaaaagtgaattattttgttttggtcagtcaaaggaatgttatgatcaacattctgatatctttggttgtaagttaggttcctatccttttaaatatctaggaattccaatgcattttaggaagctttctaataaacattggaaagttactgaagagagaattgagaaaaagcttagtagttggaaaggcaagcatttatctgttggcggtagattggtgttgattaattctatacttttaagtttagccatgtttatgacatctttttttgaggtaccgaaaggggttcttcgtaaaattgattattatagattgcggttcttttggcaattggatgatcataagaaaaagtacaggctcactaggtgggatattgtttgccaacccaaggaccaggggggtcttgggattcaggagatacaaaataaatgtattttgagtaaatggttgtttaagttaattaatgaggaaggggtttggcaagacttattgaagaggaaatatctttataataagtctacaacctaagtaggcaagaaacaatatgactcccatttttgatctggtcttatgaatatcaaaagtactttcttaaatatgggttcttggattgtcaatgatggggaacaaattagattttgggaagatagatggctaggcaacttggctttcaaggataaatatccgtctttatacgctattgtccgaaggaaaacatcatctattgccactattatgggatctgttccgcttaatgtttctttcaggagagctttagttggtcagaatcttatttcttggcatgagttgtgtgcctctattatacatatccagttgaataattcgtttgatagttttagatggaatttccatcagaatgtcttgttctcgatgaggtctatgtacatagctttaattaataatggttatattgacaggaataagtgcatttggaagcttaagatgccacttaagattaaaattttcatgtggtacttgcttaaaggggttgtgttaactaaggataatttggcgaggtggaactagaatggcagcttgaggtgttctttttgtttgaagaatgagtctattcaacatctctttataaattgtcattttgcgaagttcatatggagagcagtccagttctcatttggttttaaccttcctattagcatatctcatatttttgataggtggcttttgagagttgataagaaaacgactaaattgatacttgttggagcttctgccatttgttgggcaatatggttgagtagaaatgatatggtttttgataaatcaccattattttcctatatgcagttaattttcagggcaactcattgactccagttttgggcacaattataaaggtgtgatgaagatgaagagtttctgaaagttgcatgtcgcaagttggagactacggttatgcaactttttaccaaatatggttggagatttacaaatagacttcaatgattgtgatctctttacgttagtttggattctttgttatcctttgtggtatgttttattcgtttagaattacactctggtctttagtgctattatgcgataattggctgtacctcttttgagcaaaggctggaattttatattctattatcttaaaaaaatgtgttaatccaccgtttgattcagtgtgctaggtgggaagggttcccaaccctttttaccgaacacagtgctaagtggtaagggagttgtaaggtagaagatgacattacgacgccgaggaccacgcgccagcctgccagacgaggcaagaaatatggcaaaattccgagccagatcgccacccgcgcacatcgcaggtcactcgatcgcttcgctatcgcccccgctcactcgctatcatccagtggttggcggcaacttggctttatgcgcagcggcggatccatcgatggggctgattggggctccagccccagctctggccggccatagccccataggtgctaacaggtatctgcgtgcagctagccattgtgacaagaaacgaaatagctggctatgaagcattaccgcctagtgctttcggtcatatatgttggaaataatgaatgggccttagcccactcgaagattaattctttggaaaatcacaaaagcccacctcatgggatggcatgcatgtggagtttagtaccaccttgcttattctaggagagggggacctccttaaaagggaggatgccctcctagccacttgaagcatgtgtggtggagagaagaggggaaacacgcgcgcgctcgctcgcctcgcctcgcctcgccgggcaggacgtacgcgtcgaatggtccgaaaaattggcttctcacccttgcgcagatgcagcctccttttgcagttttgttttgctgcaaattcggattcgtttttgttttggaaacgttccgaaaaatccggtgcgt

SEQ ID NO: 21600 - DNA, 2764 bp, Oryza sativa
gacgtcctgcaccgggagaaggcggcaataaggttttgggaagcgcttcgcgcgactgctccctgtttgttcgcgacggctcgccttcctcttcgctcgcgtgtttcgtgccttcgtagacacctgcgaaaagtttcgaccaagcagccggtctttccgtcacctcggtacgtgttcaatatgttgcgcatatttgatctgttcatgttatactgtgtagtttacatgtatagatctaatgatgcgttcatgctagttttcatctgtaatgtcatgatttatttatggaatagattaaatcattatatgtctataatctcaacaatcgaaaaaccttattataggcactgtgattttactatggctggttttgccgatgcactgaggccggataaattcaccggtgtgcattttaagagatggcagatcagggtcactctgtggctgacagctatgaaatgcttctgggtgagtactggcaaacctgaaggagttcttactgctgaacagcagaagcaattcgaggaagccactactctctttgtgggatgcattcttagcgttcttggcgatcgtctggtcgaggtgtatatgcatatgaccgacgctaaggagttgtgggatgcactgaatactaaattcggtgctactgatgctagcaatgatctgtatatcatggagcagtttcatgactacaagatggctgacaaccgttctgtagtcgaacaggctcatgagatacaaaccatggctaaggaactcgaactccttaagtgtgtcttacccgacaaatttgtggccgggtgcattattgcaaaactacctccatcttggagaagtttcggtactgcactcaaacacaagagataggaatactccgttgaggggttgatagcgtctcttgatgttgaggagaaagctcgggaaaaagatgccgcgtctaagggcgatggtgggcagtccagtgccaatgttgtgcacaaggcccagaacaagagcaaggggaaatacaaagctcagcagaccaccaacttcaagaagcagaagaagaacaacaacaatcctaatcaggatgagaggacttgctttgtgtgtggtcaagttggtcatctggctaggaagtgtccacagcgcaaggggatgaaggcacctgcagggcagacttctaagtctgctaatgtgaccattggcaacactggagatggaagcgggtatggtaatttacctactgttttttcagttaatcaatctactaattggtaggttgatactggggccaatgtacatgtttgtgctgacatctcattgttttcttcttatcaggtcgcacggggttccaccgtcctaatggggaatgggtcacatgcttctgttcatggtgttggcacggtagatctgaagtttacttcgggaaagatcgtgcagctgaagaacgtgcagcatgtcccttctatcgacaggaatcttgttagtggctcccgtctgactagagacggatttaagttggtttttgagtctaataaagtagtcgtgtctaaacatggatattttattggtaaaggttatgagtgcggaggcctgttccgcttttccctttctgatttctgcaataagtctgtgaaccatatttgtggcagtgtggatgatgaggctaatgtttggcattcacgtttatgtcatattaattttggcttgatgtctcggctttccagcatgtgtttaattcctaagttttccattgtcaaaggttctaagtgccatagttgtgtgcaatcgaagcaacctcgcaagcctcacaaggctgccgaggagagaaacttggcaccactagaactcctacattcagatctttgtgaaatgaatggggtgttgacgaagggtggaaaacgatatttcatgacattgattgatgatgctactagattttgctatgtgtacttgttgaaaacgaaagacgaggctctagactattttaaaatttataaggcagaagttgaaaatcaacttgacagaaagataaaaaggcttaggtctgatcgtggtggagagtttttctcgaacgagtttgacttattctgtgaggaacatggcatcatacatgagaggacgcctccctattctcccgagtctaatgggattgctgaaaggaagaaccgcacactgactgacttggtgaatgccatgttggacaccgcgggactgcctaaggcatggtggggggaggcattgttgacctcaaatcatgtgttaaacagagttcctaacagaaataaggacaaaacaccatatgagatatggattggtagaaaaccatcactttcttatttgcgcacatgggggtgcttggcgaaagtcaatgtaccaataacgaagaagcgcaaacttggacctaagactgtggactgtgtttttctgggatatgctcatcatagcattgcctatagatttttaatagttaaatccgaggtactggacatgcatgttggtacaattatggagtctcgtgatgctaccttctttgagagctttttcccaatgaaggatacacatagtggttcgaatcaaccctctgaaataattcccagttcaatcacaccaccagaacaaactgaacatacacatgaacttgtctctgaggaggatgtcagtgaagctcctcgaaggagtaagagacaaaggacggctaagtcttttggtgatgatttcactgtgtacctcgtggatgacactcctaagtcaatttcagaagcatatgcatctcctg

SEQ ID NO: 21601 - DNA, 32769 bp, Oryza sativa
tttgacacttactcacctgttgctagattgaccacaattcgtgtgctactttccctagcagcctcagatggtcttctcgttcatcaaatggacgttaagacagcttttcttaatggagagctggatgaggagatctatatgtatcaacctgatgggtttgtagttgaaggtcaagaaggcaaagtgtgcaaattgttgaagtctttgtatggtctgaaacaagctcctaagcaatggcatgagaaatttgacaaaacattgacatctgcaggctttgcagtcaatgaggtagataaatgtgtgtactatcgccatggtgggggtgagggagttattttgtgcttgtatgttgacgacatactgatatttgggacaaaccttgaggtgataaatgaggttaaatcattcttgtctcaaaattttgatatgaaggatttgggagtagctgatgttatcttaaacattaagctaattagaggtgagaatgggattacactcttgcagtcccattatgtggagaagatcttgaatcgttttggctacattgatagtaagccttctccaacaccttatgatcctagcttgttgcttcgcaagaacaagagaattgctaggaatcaactggaatactcccaaatcattggctcgttgatgtacctggctagtgcaactaggcctgatatctcctttgctgtgagcaagttgagccgatttacctctaatccaggagatgatcactggcgtgcgcttgagcgagtaatgcgctatctgaaaggtactgtggaattggggcttcactatactgggtatcctgcggtactggagggttatagtgattctaactggatctctgatgtggatgagatcaaagccactagtggatatgttttcacactgggtggtggtgctgtttcatggaggtcttgcaaacagaccattttgacgaggtcaaccatggaagcagagctaacggcactggatactgctactgttgaggcagaatggctgcgtgatctattaatggatctgcctgttgttgaaaaaccggtgccggctatccttatgaactgtgacaatcaaacggtaattgtcaaagtgaatagttctaaggataatatgaaatcgtctagacatgtgaaaagacgattgaagtctgtcaggaaattaagaaactccggagttataacgttggattacatccaaacaacgagaaacctggcagatcccttcacgaagggactatcacgaaatgtgatagacaatgcatcgaaggagatgggtttgagacccatgtgagttatactatggtggtaacccagtctatgtgatcggagatcccgtgaattagatcctgggaagaacaaaccattaataaactagaggagagtaccaatatatataccctctccaagtgaagatgcatatactctcgtgagctgcaaggcaggttggctatgccttaatgagttctgttggctttaattagcgaagatgttgtcctgcagagcattcttgaaagaactcacctttgtgagcttgactgttggtcgcagtctatgaagattttgggtgaatcttctaggaagcttactaaagacctaggagtatgacttatacgctccacccgaggggtagtctacagacggtctagtaccagataagactttgagtgaaacttgcttgcacaagacttgcaattcaaggcgtagtccattgttcaagttgtgagtaagtgtagcttggagttctaggtggatgttcaaccttaattggtctccatcgaaccgctggtatataaacagtatattggaaaaggcaaatctcagtgggattttgagatttggtgggggattgttggaattaatgaatgggccttagcccactcgaagattaattctttgaaaaatcacaaaagcccacctcatgggatggcatgcatgtggagtttagtaccaccttgcttattctaggagagggggacctccttaaaagggaggatgccctcctagccacttgaagcatgtgtggtggagagaagaggggaaacacacgcgcgcgctcgctcgcctcgcctcgccgggccgggccgggccgggccgggcaggacgtacgcgtcgaatggtccgaaaaattggcttctcacccttgcgcagatgcagcctccttttgcagttttgttttgctgcaaattcggattcgtttttgttttggaaacgttccgaaaaatccagtgcgtgcaaacggcgtggagtccggataagttacgcgcgacttatccggttcggttacgcgcagtagagatcgtgcgggcgccctgatcaagcgacccttctctatataaactgacctgccgtcttcacgcaacacttgcgaaatcaatctagggtttttctcctactctgtactacgccgtcgctcgtagactactccatcccgctcgccggcgtgcaccggcgattgggagagcaggtctccggaacctctgccttcgtcgtcctgcaccgggagaaggcggcaataaggtttttgggaagcgcttcgcgcgactgctccctgtttgttcgcgacggctcgccttcctcttcgctcgcgtgtttcgtgccttcgtagacacctgcgaaaagtttcgaccaagcagccggtctttccgtcacctcggtatgtgttcaatatgttgcgcatatttgatctgttcatgttatactgtgtagtttacatgtatagatctaatgatgcgttcatgctagttttcatctgtaatgtcatgatttatttatggaatagattaaatcattatatgtctataatctcaacaatatatatatccaactaatttttttatattgtaagtgcaaccaaatacaaaaaatggaaaaaaaacattgcaccgtttttcaaatatatatttaccagcaactacagttatcacacttgttgtatttttattctttattttgagtcctttctggtacaagttagaaatttgatcgacaagagattggtgtgtatagtttacttgctctaggccctgttgttctttcagatctagagttcttgagttttttttttgtcaaaccgttaaatattatgatttttcaaaaaacttattatagagaagtttcttcaaaattcaattaaatcaaaatttaaagtttgtaagagtgaacacttatctaatcatacgttaattaagaggcttgtctaaattctgataagctagatgattgctcgtccgaaactcattcaaacaaggcacctctttattttcatcctagattcgtcgctgttatgcgccgagccacccacgttgactagctagcaatttgtacgtatactaaaacaaggaggtgcaggaactaattaatctggtcagctctcgtggtcaatggttggaaaagtacacacatatcatggtctagaagaaattaatccaggtttgttagttgtgtcctgtgtgtttcaaaccatttccaacgtcaaattgcaccgcggtctggcctggctcactatataatacttcctccgtcccaaaatgtttgacgtcgttaacttttttttaaagtaatgtttaaccgttcgttttatttaaaaaatttaagtaattattaattcttttcctatgatttgatttattgttaaatatacttttatgtatatatataattttacatattttacaaaaaaatttgaataagacgaacagtcaagtatgtttaaaaaagtcaacggcgtcaaatatttagtgacggagggagtaagtcacacgagccatcgatctcgaacatttgcaaagcacctgagaccatccctgcgccacagccttcctccctcaacgcagggcaggtaaacaacttcctccgccctttgttttagttcatcgaatttgcttagctcattataccggagtatattgttcttactagctattttcaggaaacacgtatgtttcaattattcaatccgtgaaggtttccattgaagtggcttatattgggtgccaaggccggtgttcccaatggaggcgaaggtagcagccggcgcagacactcaccgtggccgtggcggcaaccttgcttcagctgtggtgggaatcacggccgcctcatctgccgtcaccatggtcgccgccggcgacgtcagcccgccggtggcatttgggctcttcgtccttctgctcgccggcctcactctcgctgcctcgcctgttcgccgtgggtaaggtgaacaggtgatggttacaaataggcactccggagtgagaggtgtcaagttttcaacttcatctttgtatctttggtttgggtgcgtactgaataatttgggaggaaaatggtgatcgatgtatgttttcaaggtttgataatgggatgattttaacattctcctaccgaattttgctgtcaattcaaaatctcaggctccatgtacaacatactacaaaattcttttcattatcatgtgagaactgagtagctcctggtaaaacctcgtcagaatgaattttcgatgtaacaaaagcatatttcttctattcatggaattaaatatagcatcaatatgatgcacataaaaagttttagatttggtctcctctgcacagaagggcagaacagaagaacattgaaatggctactgtgcccttgtcctgttcagtctcaaatgctacctaggagatgttcttttctcctgaaggtgaagatgaatattaagttttttatacaaaatgaggtggtattaacgtatgattgattgagttttaattattacgaacttgaaaaattgattgagtccacttccccttcccctgacgggacttagagtgacatgaatgtgagtgtacctacataacagttgggtacaaacacaatgcagattttgtattgttctagaaagtgtgacaattttttgttatggttctagaaagtgtgactaatttttaagcgattattgtttgatgtctatagctgatcctagaattagaattgttcttcggtgattttgttcttcgttgatcctgtgagtccattaatatatgaaaaaccataactgcagttgaaaaggagccttgagaaagcttgatctgttgctcaaactcatccaggaccttgatctggtactgtacagtgcacacagaccttggttgtaggtgcctactgatctctttcagtgtctaatgcagaaagtgaaagtgttcccatccaaagtcattcaattgccatatggtcattgatttctgtagatgatatttaccgcaatccttaagtgcttccctttcttgcttctcgatattatctattcacatcattatcttgttctaatgatttctttttgcagatattattggaaaaattattgccatctcctgtgcagcaatgaaatcaacaagttcataagaattcaggatgagaagattagcgcctatattatccaataaaataaagcatgacgtaataagtatccctaatttcttttaaataattagtattgcataataattaatactttatttttttatgtagagctcatcttcacaaatggagtcacctcaagatatccagagcatgaaagttgagccatgtcatttggacacaaccaacatcttaagcaaacagacctatgaagatccaaacatgattatccaaacttggattttacttactgtaagcattgtggtttatgttgtctttgatttactaatgacaaacatgattaatagctgcgttaattacatgttcttggaactaattttgagtcatgactgagcagggtaatgtataggctgcctagagtaagaattgcatttattcgagatggagtatacatgtacaacctagaataagaattacattgttggtctaaagaaaaaatttcattcgacacgttcattgtactttgactcaacgatgttatccttttttttatataccacaagatgtttggggtttgcctgctatgttcacagttgaaagtaaatttgaagctttcataagcaagctgtgatgattctttacataatcttagtattatgaaatctaactgtttggcataacgttattgtccttgagtcctgaaaactccagcaaaatattgttgtggttagaattaggtacagacacctgattaagttattataaatcacatccaccatttgatttagtgaaggtatccccgaaacaaacaacatggatacaaattaatcaccttacaaaggatgattcctctatctttacaaagttcataaaaatacatccattgcagcaaaagaagtttcttttctacatagttcaaatgtttatgctgaagaactttactatacagtgcaatttatatactttggagtcatatatatatattagttttctgaaacattggagcaaatgtaatacatcgaataatatgatttatgatgccatttactcattacttatatcattgcttttttcaatatttgctattataaaggttgttgattcattgattcttaactatcttaattttctaggtttttactttagtagaaaagtagtagtgaagaagacatcgatcatcgtttgattcaaacaaacagtaaaaatatataagcgctctgcttgataacatatccgataaaaactgcacactttttttatatggattatgcacatcactaactttacttttggtgtatttataacagatgcattacatgtccatcgagaaaattgaaatatggctttatcaaaagctatgatcattttaggtcctgaacaatgtatgtctatataatagacaatttgtatttatatattcaataatctacaataatatgtctaggcactagactcaagtaatgcaaacttgtggttttatatatttttgcaaggaatgtaaagttatggttacgtactattgaaatggctctcataaagttccagtttagatgttcaattatcattgattaatcaagtgccagctttatctgtttacatgttgaagtactccactgtactgactgtactcatttcaatgactttgtgatatactcatatacatgtaacatgtaattacaatttgttcatggatcttgaattcctgattcgattgggcactatttcatgcagtgctggggctgtctcctgaatagttttaccatccataaactgaaatttctatatgttgaaaatggccattaaatagaaaagaatcatttctgtagaacagcacaatgataaatatggaactgagagtgtgttttttttccgaggtgaactaagggattttaggctttgcaatatgagcatatggcaatcagaacatgattaatgccttatttagctgataaggcttaataattaatacgatatacactgcgtccaattggactggtcttccgcgcgaagccgcggttactttctagttcaatatagtacttgtagtaatacattataggcgcattcactatcagcaaatacagtttcatcacatagagtttcatcacatacattataggcgcagtcactgtcagcaaatacagtttcatcacatagagtaacattatcatttactggtctctgggagacgcagtaaatacagtttcatcacatagagtcatcgaaatgaaaactttgacaggtttaaaaccgaaactttgtgcagccaatcatgtgattttcagattcgaagacggaatcttcaagttccatcaccttcgtatgaatccgtaactgctaacggactacacaaaccgaggcggcggatggggaggtttgatcacgccggcggcgaagggcagcacggaggtaaggggggcggagtcgggaaagagaactccgaaaccccattattgggccgatcgacgagttcccgaatgggccgcatgtaatggcctgttagaaaagtaaacgtgagatgcacgtaagggaacagtatcatggcccacgtgcaggcccatgattgggtttatgtgggcccactgcgaggtataatagagataaaaaataatagagtaaagtgcacgagttcttaaacttgtaattggtgtatcatttagatcactaaactttcaaaatgtatatctaagtcttaaaacttatcatattgtgtcatttaagtcccaaatcgccacaacctcttcgagatcctacgtggcaccgatgtggcatgccacaagtcccaaaacttatcatagtgtgtcatctaagtcccaagtcgtcacagccccttcgagatcctacgtggcgccgatgtggcatgtcacacggacaagacgtgacaaatggaacccatttaaaaaattttatttttattttttcttcttttcttctcctccttttttttctcctttctctttctctgtgacccgagcagaagaaaggaaaaaaaatagaagaatgagaagaaaaaaaagaaaaaagaaaagaagaaaaaaaaagagaatgacacgtcacgtccatgtgacatgccacattagcgtcatgtagaatcctagttgatttgggacctaaatgatacactttggcaagctctgagacctgaatctgtattgagagtttgaggacctagataacacaacagtacatgtttaaggaccgcctatgtactttactcttaaaaaatatgattgcgcccttatatgtacccactccgtaaaaaaaacaatcataacactggatgtgacattgtgatatatcctaatacgattaatctagatagaagcctgtctaaatttgttgtatatgttatcacattcagttctagttttttttttcagacagagggagtattttctgcctacgcatgcaagacaagattgcatatgagcgtttcaatagtgtgctggacagacttgatgtcttaatgaatatgtgtgttcctaattaactctctgcagatgaagatgttctcctagatttattaattagctgtagggtgcacaaacattttggcagagcgaattatttactgacatgcacgcattactctttaccttagattggtagtctttggtttgttttcttctttgtgattggttttgcctttatatgcttctctgaactatactgtatgatcatatagagtattgggatgttttattccattataaaaaaaagttaataatcctgtcctgatatcctgatggggtctctgccagtaattggcttattttgtttacattgatatggagtaatcaaatatatttcagattatatattttctcatggaatcttacattcttataaatggaacatggcctcacgtccttcaggtttgtcgcttcgcttactttcccattggctcttcttcttctcctacacttttttggagctgtctatacatttatcgagtgatttctaaaaaaaaaattcacctatttttttttagtcttagatttacatccaacagactacaaaagaaaataacaagtacatatttacttacatattatttttatcaaaattacagtacatttaaatgtcatatcaactgaatttgtaaatgtaattttagttatatagttgtaattttatattttaaagaaaataacaaatatatatttaattacacattaatttttattaaaattatagtgcacttgcatattatatcaactgaatttacaaatgtaattttagttatataggagtgtaattttatatttcacgacggctatgagagaagcggtgtcgctcgccaattcagaggccaccttgccaccgtgcttctctattatcgcgcgagcgtgagctagctgggtgacacgaaggccgacgtgccggccggccggcgagctgtaacgtttcaccttgcaagttgccgctcacgtcactaagtggttgtatatatagcaggcaaaaaaaagttaggctcctatcggttgcccattttgccttagaaaataaaaattaatttataagtaaaatttttatagatttgttcatagcgacttaaaagccaacattaataaaaattacgttaaaaacatcttaaaattaagtttaaaaatttaaattttagtttattctttagctgtttaggccaaacaatggggctgtcaaatgccaggaaataaatcacagatggatagcaaaattgacacttttttttttctgcctcagcctgagacaatggaagggcatacggggcaccaggcccatcaggcatgcggcccagccgaatgcttgggccgccctgtcccggcgtccctagcgagtagcgacctagcgccgtcttgggatttttagcgccgttttgggattattttttcctcagatcaattgatgatttatctgtgacatgattaacgataagtggcccaatcatctcggcttgagatttgagaatgattgatgattatgaagtaaactctgtcgaggtggacaggccgcaaaaacacctagcgggataaataaaaggaataagttcaatttcactcccttaattagtggtcgaatctgaatcgtatttctaaaccacaatactggatattttcaccccaaactattaaaatcggtgtaatttgaccccctcgacagttttggagggtggtttcgctgacgtggcgcatacgtaacggcattgacttagtcttcgttccacgtggcgcttacatgtataaaaatttaaaaaatatgagcggaacccatttatcatacacacaaatataatgtggcaaaaaggaaagttttgatagggtaaactgcgatgaatggcttacacagggagtacattctctcgttgataacacttgtagattaacatctccatccctccctgctgtattttttggttgcttacacctagagcctaagttaaacccaaataggttaaacatattaattaagttacatacatttataatcaatactaatccagtcctcatgcgcgaaatagaagtggattagaattttatttatttaattaattgtgtagacagtattcgaactaagagtgtcctctgaatttgctatcattttaagttgtatgtaccaaccagtttaacctaaaatttaagttggtgaataaaggtaggcaatccacttaaactctaacaaaaccaaataatgtacttgacaattgaaagcttaatcaagtacgtatcaggtatcaagtatgtttgttccacttaacagataacaaacgattcactttcaggccattagactacatatatgcaaaagtgttgagaagatccttacacaaaaggaatcgtttgcactaggcagcaggtataatcgccaacgtgctctctactcccttaaaccaagtgcaatcagttaattagtgatgaaaaagatagcactgaacaagctaagataacactggagaaggaagagaccaatgaggagacaacacactgatgaacatttcgggtgctgtagtattattgcaagtgggcatttcaatatgctgcattgaatttcgtattcgtaacctgaaacagaaggaccagctgggaaaaaaaatgcatttcgtcgtgtttcaatctcgatctgatgaacattctaatatatgccactactatctaccgctccagttatcagtatcaatgaattgtttgtgcgctacgtcgcatgcagttgcgcatcgacatcaagatttgaggtatacagctcctcagaacgcaactcttatctctacttttgaagcattttcaacatgtttttgtcgctcagatttcttctactatcgaaattccctgtgcttcttgatccgttcaatgataaaagatggccggggctgtaaaaagttggtcgaagacaaacgcacttgggagcgctcctatccctaaacttattagggtaaatggaaattctggataagcacaaaaaaattctggtcaaagatttcccatttgcggaaaactcaagtacgttttcgcatattctgatttgaaacgtggtcaagatcctaggagaggacgtcaccctcctacgtctgtcctcacgtacgctgtcacgcactatcagcaggagagagaattaatggaaaagagagggaaaaagaagaggatgagcaaaaagaagaggaggagattccaattgacaaaataaaattcacagtgttagatagacctcccacccgtcgggcccaacggcacaacggaccttgaccgcgccttgatcaggggtgtccagcccaatggctggtgggcccccgtcacactgcgccatataaaagaggggtggaggccggcacggcacaaggtacgagatttgtcgccgccaccaactctaccctacaaaccctaatccaatcgagagggggcgcagccagtgacgggaaacgccaccgccgcgccacgacctcgccgggatcgcccacgaccaccgctgcaacaacaaccgccgccgtcaagcacaccgtcgtcgccgtccacatcaagccgcgacgacaacgacgatgtccggcgcttcttcctccacgaacacctcaaccggttggtatctaaacccctctccctttcatctataatgtcaaacatcaacctaatagatccacccgactagatctaacctaggtgatcctagtgcaaagtctaacaatggtatcagagcgaccctagtgtttagatcagttcggggaaagaaacccacagaggaaaagaaagaaagaaatgcaaacgatccaacgatcgaaaagaaaaccctaaccctaattcttacctcgtcgccggccatcgttgacgccggcaacggaggggggaggggcacagaggcaccgccgagcagccactcgatggccgtgcgcgcacccgcgagtgcacgcgcgtgtcggcgagggggcccgcggcagcgccaccatctctgtcgtcgccggtctctcactcttcactcgcgtggaggggtgagacggtgggggggggaagagaaaagaggacgcgcggcggcgcaaggtcgccggccatggcgcggcggcgcaagggctgccggcgtcgaccatgccgctcggcgcgaccgcgcgcacgcgtgagagagcagagaagaagctagggttcggcgcggcggctgggggtcggggttttgatcgcccgatctccctgcccggccgtccgatcaaaccctagcggattggacggccgacgccggccgggccgaaatcggcccaagagggcacgccgggagggggtgctttcccggcccgggcccacgttgcggccgcgcgtgagcgcgcgcgctcagccgtgggccgaccgtgggccgcctctcccgatggaccaaaaaaaaggaaatgaacagtagcaattttcattatattctgtctattttcatgcaaatttcaatagaatttgaatagatttttgcatgttttacctctgtttaaatttgaaccaacgggtgaatttttacagagagtaaattacagagttttgctactgttcatatgaattttatatagttttccgctggaaatagatgaaattgatgaaaattagtgtttctaaaattatatgtcgaaccaacgggagaatttaattttaggaacattaattatgtgctatgatgttgtaattttctaaccaacgttgataattgcaatgttatagttatggttacatgtgttatgtctaattctgccaattccaaagtggcaatcatatacatcaaaatccaactttgatacacttattaaatttctttgcaaagaaggaatataaaagacatctcgaagtaaaagtgtgaagccattcgcgagttctagaggaagatctccaacagcttcaactttttcttcaactccattggcaactctaatggagctttctcttctttgcgtagtcctcgtcgaacggaatgcctttaaacaattacaagcatgaatagttgctctagaattaatccaccatgtggatctagagtaatcaacataatgagattcatttacaaatgtaataatgttctcacctttccttgccatgatcattttcaagaagtctggacaatctttcttgtaatgtcctgtcttcttgcagtggagacactgatctttctcaacagcgaactgttgttgctgaggtagatgctgagactgtttagcttttgaggtgggagacttgtggttctttttcttattatctgtaacatagttaattgaaccaccatttgactctttgtttctctcctcctcttgcacacagttagcgatgagcttttcaaagtttcatttctctggacttatgttgtagttgacaataaaattgtcaaactgctttggcaatgaggccataaccaaatggaccagaaagtcatctgttatgcccaaatccattggcttcaacttgaaagccatgttgctcatcctaagtatgtggtctctaacacctcctccatagtacctctctgtcacaagctgcttgatcagctgtgtagcataagtttttgaagagccagtaaactgactcttgattctttcaaggtactctgagacagcgtcacactctgggattgagcccaatatggtaggctcaatcgtgttctttaccacagccaaacatttcttgttagctaaggaccatttcttttgttcaatgtcatacgacatgacgagaggagcatctgttactgggttacttggcagatttcagagtagtccaggcccagagcactggaaattggtaaagaaagtcttgcgttatttgcaaggaacaaaatgcctcatgctgtcttacagaagatcagaatcgctccagatagtggggtattcagattctgattttgcaaaagataatacaaagtcaacatcgggatatgtgttcaccctggcaagaggagctatttcatggaaaagctcaaaacagactatcactgcagggtctactatgtatgccgagtttatagcatgctatgaggcaacggggcaggtgaactggctaaagaagttcatacccggtttaaaggtggttgatagtattgagaaaccactaaagttatattgcgacaatgaacccgcagtaatgtacgttcacgacaatcagtcaagtggtgctgcgaaacacattgacataaagtactatgttgtgaaggacaaagtccgggatcaaacaatcagtctcgagcatattagaacagaaaggatgctcgcggatccgctcacgaaaggcctaccacccaacgtgttcaaggaacatgtagccggcatgggtttaagggaagccttatgaatcctggactacagggcccaaaagtaaaagtatctatttttgaatagagatgtgtatagtggctgttgaatccatcggtgattgaccgtgacgatgaaacatgctctatttacaaatctgtgatggaatagaaaaagctaaaagaaatagtgagatcaagggggagaatgttagatagatctcccacccgtcgggcccaacggcacaacggatcttgaccgcgccctgatcgggggcttccagcccaatggctggtgggccctcatcacactgcgccatataaaagaggggtggaggccggcacggcacaaggtacgagattcgtcgccgctgccaactccaccctacaaaccctaatccgatcgagagggggcacagccagtgacgggaaacgccaccgccgcgccacgacctcgccgggatcgcccacgaccaccgctgcaacaacaaccgtcgccgtcaagcacaccgtcgctgccgtccacatcaagccgcgacgacaacgacgatgtccggcttcttcctccacgaacacctcaaccggtcggtatctaaacccctctccctttcatctacaatgtcaaacatcaacccaatagatccacccgactagatctaacctaggtgatcctagtgcaaagtctaacacataggactagtaagcaggaggaaaccagatcgatggacgatcacattttgacttgcgttatatataaaggaattgcacctacaaccatatctcacactctttatcagtggtgagctagctcatccgattacttccttccattatcgcggggagaagatcgatctgcatttgtcactatggagcctcgaggtaaatcatacagattcttggtgaatttattttctttcttcgcgatgggttctctcggcggcaagatcatcgccacagctgggtgcgccatcgccttcttcgcggccggcgccagcggccatggtttagtactcagccttctgggtgtcctcgccggcgtcatcatcgccatcagctccgcaacgctccatggcatccctctactcgtcgctgtggctctgcgccgccgcaacctcgccgtccttgggctcgtcatggcctcctccgccatcgcggcggccgccggcgaggcgagcccggcgctcagcttcattctcttcgccactctcctggtcggggtctccctcatcgccgccggagttcttggttcataactaattaatatcgtatgtaagctgcgattcatgcatggacaaaaatcgatatatacttatactctggtgattcaggtgaggcgatgttatctgattcttgaaacattcacgtcccttgaactgtttaattacagtgtctgcccatacctgcttactatatagtaatatactagtgtcatttgtgcagtgtgctttgtaacttttcacatgtgtgtatttgttaattgccttgtatagttgtcacatcctgaattttcgtttcaggatttataaattatttaataaaataataatagaatttatattaaaaaaaatctttaatttacaagtgaagttaaatgtgggaaataaaatttcctaaatataaagcatggatggatttaattttttattaaattctccatggttaattatactctctgaaattttctcggatttttcagagctcaattcttaaataatacaaagaacagttcagtaattatttgatcattaatgatctaagtatatttgttaagtgcttttcttgtttaaaatccttaaaattataaattgttgtttaaaaggaattattagaaatgattttaaaagcctagaagagaagatctaattttaatttgctaaatctcaacataaaattgggctagataaaattttgttaaatactttgcttaattctataattcctagatttttctgggatttatttgagctaaggaagtatttttaataaatggaattgcatttcatgaataatttaaattgaaaaaggtttttaaaagtcttcttttggctttgggccgaaagccggccaaaaaccctctctctctctttccttcggcccagtccggcccagtccgccgagcctccgctcttctctctctcggtgtcgctgacaggtggatcccacctgtcaggttcgtcttccccgagccgtcgtcgcccggccgaaccctagctgagtcgcgccgccgccgctttccttttccgtcgctcctttccatctccggccgaattgattgaggccaaatgatccttgagatctcctcttccttttctcttttggaaacatcggctaattttctttggaaaccggtggatttgagttcgattcggatcgacttctctctctccgggcccgacctttccatcccgccgccggtcgccgtgggcctccgccgccgcctcctagcccctttaaaaggatccccggtgtctcctctacccgctgcctctctcgccttcgcctctcatcgtccgaagcgccctagcgccgtgccgcctcgcgccgccgtcgtcgccgtcgctccagccgtgcgccgccgctgttccagtcgtcgtcgtcgctcggggagatcgccgtcgtggtcgccaagtcgccgccgtcctcgtccgccgtttcgccgccgccgaagaccgccggagcaccgccgtcaccgtcgacccgatctccgccgccgcttcttcctcgtcgccggcgccgtccgttgctcctccgccgttgttttggtcaccggtgagttcgccgcgtcgccctctacgtcttggtgccctccgtttgtgccgtagagccgccgttcgccggcgagcgtgcgccgtccgagccgtccgagccgccgagccgccgccggaggtgacgtcgtcgctgacgtcatcgtcgccctctcccgtgagccggtcgtggacagatcgatctcagccgtccgttttggatagggttgatctcggccgttcgtttccgtgaaccgccgccgtgcgcccggtccaccgaaaccctagccgctgacgcaataatccttcttttccttttcaaaaataattcattattgcgtcataattcaattaaaatccatataaaggttttaatccgatttaatctttaaaaattcataactaattcatttgaactcagtttaatgtggttcaagttgcaaaagttgtataaaataaagatctacatattaaaattgtccataaattgaattaaatttatttaattctttttaaatgggctttaaatagatttaatcttgtaaaattcataataaattcatttgaagtcagaatgaggccgtttaagtctcataattcatctaaaattatgatctacatgtttgtttactttttatgtattgtttatttggtttttattagtctttttcttcgttttgcgtgttagcttgtcgtttccatcgttgtgaaggttcgcgagtgcatcggaagtgttcaagaagattaattgaagaccgaatattgcaaggcaagtcacacagatcctaaacacaatcctttgagcatgttgatcctatatttaaattctctatttatttcaactgtgcatttattttcgaatgtcactgggtggtgtgaacctattcctttgttatggcctgtttgcattgattactttaatccttgataccttgggttattataatttgactagttgagctttatatattggttcagctagatattagatgtgattgcttagccatgcttagaaacattagcacactattgggataacttatgactcattattatttaatgatggtttaatggtagctcacgatggtcaatcgtgattggttaattaattacttgccaactaaaacttgataatggtgggttgtgagcacatggttttgagagtcgtgctcatgacaattaaggaccggttcgcgagctactattgtgaaacattaaccgtgccaaccacaagccagcgtgggcaatggctttaccttttgtatagcatggttcattgcagagcaccagactgagaagtggcggagataagcccacgggggtcgctggggagtccatgcctctggtttttgagggggtgattatgatccaggaatggtgcactgtggtgagttgtgttatgcagagggtattgtcacagcctctattcgggtactttccagtatcgcgacgcatggtagacatgatgttgaggctgtgtcttgtgggtacagtggtacacctctggccagagtaaaactattcgaatagccatgcccgcggttatgggcgagttgagcaatgtttttcgtgattagtcccacacctctcaccataattatggatgttatacctggtaataatttgcttagctcctggtttggagttagatctgttcagccgggtatggttgttcagaatggttgggcctgtgcagcatgggtgtgctgttcagtgttgattaaaatttccgattaattactccactgttttacttctcttaaatgttttgctaaatgctacttttgcaaatgagcctatattatgccatcctttggtatccttgtgcacttgcatatttgctgtgtggcttgctgagtatgtcatatgctcaccttgcaataatcaatcaacctcagttgaagaaaaaggatccagaaggagaagacgtttggcttataccccagttgagctgcctgtgggagtggagccggagcttcgctagattttatttttccgctgcagttttcttcatgttgaggactaagtgcctcttaagtaagtatttattcgctttagttattgatgaatctgtatattaaattgtcagtttgtgtacctcggctgattcctggacgaggattttatgcacaaataagttcggaaattactagtgaatttccgggcgtgacaatagttttgtctccattgagggagacctgttataataacttgattaagattgatgttcctaattatcagtgtgccaactgtcctggattagtaggcagagtaaaccagcaattgaaatccagtaggcagagtaaaccagcaattgaagctagtagctagtacgtacttccgccctttttaaatgtttgatattaactttttaagtacatatttgactattcgtcttattgaaatttttttgtgaaatatgtaaaactatatgtatatatgaaagtatatttaacaatgaattaaatgataggaaaagaattaataattgcttaatttttttaataagacgaatgaacaaacatatttaaaaatatcaacgacgttaaatatttagaaacggagagagtaatttattcacaaatgattctgcttgcattctgtttgcttactggctttgaatccaggggtggaggtagtatatgttaggggggtgctcaggaacccggtcaaaaaaaatttttagctatacctcatctattttcaccatgtatgcaccccctcaatacaaatttaggcacctatatcagcttaaactcgatctaaattagagtaaattaagcaagtggcaccaccctctgtttcgctctagctccgccctgtttgaatcattcagcatggcttctgattcctgaatcgacgaccaggtttcctgaactgattgattatattattgtatccaaatctctgtctgtttgcaacatgcaaggattgtttgtcatgtgtgttcctctgtgctacaaaacatgcctgtatcatgtatgtcagtatgtgagaatctcttaagattcacgacgtcttttgaaaaatgtgtttatttaagctatattgcatccatgcttaggtactattattttcttattatatcattgtctgaatattactgaaaattggtagtccaaaatagatgattccaaaaaaaatggatgaaatctttagaattgctatgtctattactagcacacactttttttttaaaaaaaaacatcatctcaaaactttcatatgaaaatcaattcgaaaaacatttacactactaaaaaaatacaaatagatgcttcccaaccagcacccatatagcggcactgatgagagatatcaaaggtgctcccctgcaccctgaccagatcaaagaacacacatgaacatcaacagcatccaaaaacacatgaacatgaacatcatgaacatgatgttgacgcttggatggactactgcccgacgatgatacacggggcatcgacatcatactccacccctgccaccatcgccggatggagaggaggagcgagcctccttttccccctccagctgcaaccaccaccgccttccctcccgccggatctagcggaggagaggacaccgccaccaccgctaccatcgccaaaggctgccacctcccctcccgccaaatctggcagatgggagaacacagcccctgctgccatcagaggccaccgcctccctcatcgtcggatcaggcggaggggagggcacggtcaccgtcgctgccaatatcaccaaaggccgctgcttcccctcctgtcggatctggtagaggggagggcgtagccgtcgccgctagagagagagagagagagagagaggcatcggagagagaggcgtgggcgagagggcaagtggataaggtcgggtgcttggctcgccggttcggttcggtttggtataggtgccagtttgtttaaaagattaacacctataatatattaaaaaccgacacctataatatattaaaggttatggtttttataggtgtcagttttatatgttttcagcccgtggatgtgggaaaagcattataggtatcggttttagctgttctggcacatatagtgttaacttgtatgtgtctattttagtaatgttatttgaaagctttaatctgaaaacttccatatgtgaacttttaattatatgaaagctttcatatgaaaaactattggccgggaacgtacgtatgccaaaccgaaatttcggttcctcacgcaaaattgccattcaacagcaccaacaaaaaaaaggataaccttttcatgcagctgttccacaagcaatgaaaaaagcaccacgaaatcgtaatccaccgattttttagtactttcataagctttacttggtaaatagaaagcaatactcaattatttatcaactgttaggtatgatgaaatttatccttagccttgtattcaaagagtcaaatgaaggcaacactggtggagaaaccgtctttactcccggtttgtaacccactgtagtcccgatttttcaaccgggactatctttagtcccgggtgaaataaccgggagagtaaagatcgatctttaatcccagttggtaattaaagagagggatcaccgggagtaaagatcgatctttagttccggttagtaactaaagagagagatctttagttaccaaccgggactaaagagaggatagggacagtctaggttggtccatttcctttttattttctcccaaatcgagtgggatgtatatacccaaatcaaacaccaaatccccaaattgagtgccatgtatatacaaatcaaaccccaaatccccaaatcaaaataacatcccaaatcatccacatcacaaatacaaatcctaagttggttacacacaaatcaaatacatcaaaattacacaaaaatcaaatgcatcacagatcgattatacatctcagatccatacaatgaatcacaagttctaaaaaaaagaacaaattatacatctcttaatctcaaattacaaaaaaaaaagcggagaggagaaccagtgtgctgccgctcgccatatgccgccgcttgccagccgcgcgcctgctgccacggccagcacctgccgccccaccgcctgctgccgcctgcccaccgccgtcggctgccggatgtgaggaggagacgggaggaggaggaaggggaggagggggggaggaaaggggaggggagaaggaggaaggagatatgagggataggaggagaggggatgatccgatcttatataaatatcttggtggggaggaagtctcgtttgggacttaaccgatcagatatgggagagaaatatttaattccggttggaattttcaaccgggactaaagatagatttttagtctcggttgataatatcaaccgggattaaagatctaaataatttttacttccgttggtaaagttgtaatctttactctcggttggtagtatcaaccgggactaaagatcctcgacctcctgacatgcctttgacaggttatgaaccgggactaaagatcaattttttttataaccgggattaaaaataatctttagtcctagttctattgtggaaaacgaccaacccagcaaagatcacttttctagtagtgtagagaaactatatgccagccaaagaatcactctaccacttgacttagacatttttttttcatttcaatagcagaatgaccatgcttccctattagaaaatatgatggattaactgtaaaagaatgctaattaaagtagtggggggtggaggaacaacaaccaccactagtagtggttttcatagttgtatagattagtagtcgcttttccctgtcacaatataatgtacgatccatttgtacttttctaagtactttatatcttcaccatatcaccgtttactttatcgcagcttctttactatttcacatgacaattttttgcaattttcttgcctacttgtttccccccaatggtttcaatttttttcattaagcatctaccctcttcagttgatattcgaatattcttatctcatctctacttttatgtatataatgtattcagttccaagctataattgtatgtcggtcatagtagttgctatcctcttttcccactgcccgcgcgcagataagaagcatgaccttccaacctgaggaatctgaatgttgacccttttagagtttacgggccgcatctgtggacgttctttggaatttatttcgctggcaattgcctagctatgttggagtactgtacgacagtacgttattgacgcgacgcaatatcacacttgatgccgttttctcacgagttttcagttcgtcgaatccaatacggtccttgtccttataccggagtactccctccgtacgatgaatctgggtagtactttatcgagattcgtggtaagaaatcatatacacacctaaattgtgaatttctttttcacgcaggaaacaccaaagtaaaagtcgttgatgtgatgcatatttagacatcagtacatgggtacgtaggctgtgtttagttgactttaaacttctaacttttccgtcacattaaatgtttgaacatatgtatagaacattaaatatggacgataaaaagaaaacaatgcatagtttgcatgtaaaatacgagatgaatcttttgagtctaattacgtcatgatttgacaatgtggtgctacagtaaacatttgctaatgacggattaactaggcttaatagattcgtctcgcaatttacggaatctgtaattgttttgttattagtctacgtttaatacttcaaatgtgtgtccatatacgtcaatttttttttgccaaaacagctaaacacggccatactctctctatcccataaaaaataaatttatgattggatgttacacatcccaatactatgagtttaaacatatatatatatatatatatatatatatgtttaaactcatagtactatgatatgtaactttcggtactggaatacttcctcgatccatatacaatgattctggataaccctttgtccaaatttgtctggatgtgatactacctaggagaggacaacgagttcttagatggtgttaaattcgtactatgtatttttttaaaggagtgagtacgtacacgagaattatcgtttttctaaaaataattatccttttttttcaatgtgtgtcgttgcacctagattaatcttagccttgtgttcttcgtctcggacttgtgttgcgcacttactcttgtgttgcgagtcagcttgccccctccaacctgaagaatctcgaatgttcacgcttttcgagtttaccggccgcatctgtggacgctctttggaatttgtttcgctggcaaaattgcccatggtggagtacagtacgttattgatgtcacatcggaaaattgcccatggtgtttagttcacgaaaagaaaatattttggtgtcacatcggatgtttgaccggatgtcggtagagaatttcggacatgaataaaaacactaatttcttaactcgcttggaaaccatgagacaaatcttttgagcctaattaatccgtctttagcacatgtgaattactgtagcacttatggttaatcatagactaattaggctcaaaagattcgtctcgcaatttcccccctaaccgtgcaattagtttttttaaaaaaaatctatatttaatactccatatatgtgtccaaagattcgaagtgatgtttctgggaaaaaattttgggaactaaaccaggccttagttcttaaatttttttttccaaaatcatcacatcaaatctttagacatatgcatggagtattcaatatagacaaaaataaaaactaattgcacagtttgcatgaaaatcataagaggaatattttgagcctaattactccatgattagtaataagtgttacagtaacccacacgtactaatgatggcttaatttggtttaaaagattcgtctcgcggtttctagacgagttatgaaattagttttttttattcgtgtccaaaaacctcttccgacaccggtcaaacatctgatgtgacacaaaaaaaatatcttttcgcgaactgaacacacccttgataactttttcgcactaattttcagttcgtcgaatccaagacaggccttgttcttttaccagagaacttcctcctctgtgtacgacgaatccaaatatttttttatcgaaatttattatattagaagggatcacatctctatctatatatatctagattaattttttttaacggagacggatctctagattaatttttcttaaacggagagagtaccaaagtaaaatcgttgatgtgatgcatgcatgttcaaatattagtatgtgactacatacttcatccatactgagataaaccaaccttataccagtacacgagagttgtcgtttttcccaaagaataattattcttttattttcagcgttgtactgtcgtttgcacctagattatatattcttcgtcttggactcgtgttgcgcaattgggcttgtgttgcgagtccgcactccagctgcttgccccgtttgacaagaaatctttcaggagaaaagaaacgagccaacaaggcgctccgcgcattttgccgacctatcaaagccgaaaaacttcggcgtctctggcagtttcgtggaagtctcgaagcaacgaaccgcgtccggtgtgtcattattcggccgtgtttagttttcttcctattcacaattttccatcacatcatatcacatcaaaaacttttctatacaaataaacttccaactttttttttctaaacttccaattttcttcaaacttttaactatttcagaaactaaacacacacttcgttcccttataatactccgtacttacatatccatatccgtacaaatatgatttaattgcttccataccggttttcatgatgatttaggtttctagagtatttttttaggtaagatcgaattatcaccgaactattgggtgaatacgagttacctccttagacctaaaaaccagatatctttcaccattaactattaataccggatgaattacctctaacttaatccggagtgattttagtcctatgtgacagtgtagtaggcaattcatttttttaaatcaataggccccatctgtcagttggagtgaagacatggaaataaaaatatattctgaccttatactattactagtatagctaccaaatttaagtaatcttgcatgtacatgcctatgttttcaacaattaaacatttggtctgtaaattaaaatcatgtagcaattgatctatgttgcattgagggctatgtctgtaatgtactattgatatgtgaatcatctagaggcctatgttgcatagagctacatctggtctcagctagtactaactaaagtaagttttgcatgacattttctaaatggagaaaaagggaattttagagaaacatatcccttccatctgctcccactacttagggctttgcttggatggagccagtgaatggatcttggcccagaccgatggccattgattcgagccaagtccaagtttggaagcggcggtggcagtgttcccaaaagttcttgatctagttcttgttcacaaccttgctggccttctcgtaaatcgctgcctgcagattgacgtagtcctgagctttcgagcagctgccggtgatggtgcggccctcgatttcctccatgcaactgtccaggaaggctttgagctccgcctccgtccggtgtgtgtgcccaccagccatctaacaacccaagtcaagcaagctagtatgttgaaatgaacaaggcagaacctgtgctttacctttcgtaggtagtccgaatcgaggaggccccagtctagagaacactggtggagaaaccctctgtagtcccggttcgtaacccccctttagtcccggtttccaaaccgagagtaccaatccgggactaaagatcgctatctttagtcccgggtgaaataaccgggagtaaagatggctcagccggccacgtggctgagccatatttaccaaccgggactaaagatcgagctgaccttttttttttgcatggccctgttgctgcatggtttatatatatatatacatatatatatatatatataaaccatgcatatatatgtttcaatacatatatatgcatacatatatatatatatatatgtatatatatatatattatattatattatatgtatatacatgcataatatatatgtatttatacatatatatgttatgcaaatgcatatgtatatagatatatatatgaccaaaatatatttacattatagaaaatgtgtacacatgcatatagaaacatatgtagtcatgtattaattacaatccattatatgtcctagctagctacgatttcgacgtagtagtactcgctgctagctcagaagctaaggaccggtgaattgtgtttccgtcgtagtagaattcacccttgggatcaaggatttcttcgttgatgaatcccatgagttgttcttgaaccgccgtgataaattccttgtgtgtggtcaggttatccctcatgcgaataaaatatatgaatgtatgaaattgattagtaattaaacaagaaatcgctacgtaatgaaattttgaatttatttgtacgtacatcgagctctcttgtggtgatgatttggtttgcaaggcagtggcaatactcgcacatgtaatagccgcacaagttagttccctgcttttgctttgcgcactacaaataaatgacaaacaacgagagatctaattaatatacacttgtatgtatttgaatcggagaaatataaatgtagagcatgtgtactcacaggaaatttgaacttccgcctaagtctttctctccatttgccgcggaccaaatgacggaaccgataccaagccctacatggagtttaaagctatgattcgtagtagcaattaacataacaagattttcttaattaacaaaggaacttatgacggtacctgtctataagttcgaaaaccttgtcaaacgtagactcttttttatccattgagtcatatacgttgacggtgcaggcctccaggtcgaagagtaaaagcacccagtggaatctgcaatgtgcgtgggatgcattacatatgaaacacttagcaagttcgtacgggaatgaaatttggtatgtaggaagacagtaaaattaaactaactctgtgttgtatggcaacagtatgaacgtcttgtaatgctgcgccttcaggagatggacgagattgtcctctgtttcttgtggatattggtcgagcattgcgacgttttctttccgagggtcgatgaatccagtatcgaaaaccctccgccgtcgggccctttgaatctccattctacaacgataaaagggagtatattattttctatagtctacttatatacaaggacctaattaattaaaggagacgtatagtaagaaatctaactgaacgatatacttacaaaatccagcaactcataatagagacgtcgagggcgtccagctggtatagttcgtagattcccctgaaattgatccagagaatgtcatctccttgcaagaagtccgtgtccctgatcctcgctccgatcatctctctaccggtggcgctcatctccatgtacagctgatggaacttgtacatttgtgtgggtagggactgcagcagctcaggcttgacaagcggtttaccgagttcgtacatgtatttcacttccgccttttcgattggtgcgactcctagcaattgatccgtagttagaccggtgtcagtaataaattgttctatcgtcatttctttaccggtcaccaacggctcgatctcctggtttggttgctctccaagctgagggactggtttggactttccagaagatgctttcttcagcgttcgctcatagtccgatagcttgatggcctccttgacaggtgcagacatacccctgaagaagttcctgacactggggtctataggaatcttcttttctggacttcgaggcttgaattgtctcttgacttctgatgcaacgtaagcgtcaagctcctcttgcgtgcaatcgtaccccgggtccttgttcttggcggcgtcaactttcgccttcttcgttgcccttgtgtgggcaggcggtggagctgggggggccgttgactttgaaggtgccggaagaggagcttgcgggggagtaggtgtaggagcacgaggaggagtcggtgcaggatcctgaggaggagtcgatgctggagcctgaggtggagacggtgctggcggagcatgaggaggagacggtgcaggatcctgaggaggagatggcggagccggaggagatggtgcacgagacgccgcttgtcgcccagggaggatgatgtaccgcctgcgccatagaataatggcatggcttgtgtctcgtagatgcgtctcaccgtcccctccagggtaatccagctcgaggtcctcgtacgcgccttcgaccaactcaacttcgaccttcgagtatcctgctggaatcggcctgcagtggtaagtacctgaagggtctgttgggatggccatgcccgacgccaccttcatgttgtgagagattatttattagtaatcaacatatataagcaacaactagcggaatggctaaatcttacctttattgataagttcttgaaaggaatatgcagctcacatggtgtccgctgagtgatgtcatcaacgggacaggtcgattcgtcctgtgtttgcatggcgtccatgctctgtgatcctacctgccccgttgaggcgcagctgctacggtttcctgacgggctcaccattgcaggaggaatggtcggctggggatcatgggaccgatgtgcggccatgcgttcatcaaccttccttgccacctcctcttgcatgttgagttcgtagctcgatacctggaactctaggtctgcaatcttcgcctcggtatctctcttgctcctcatccgactcctgtacgtgtggatgtcctccttgaaaccaatcttccaaggaatcacccatttccctcgtgttcgtcctggatgctctggagtctgcagggcgagtgtcagctcgtccctatctctgtctggtcggaacgtgccctgagaggaggcttccactgcatctgttagtcgtcgcgcagcctctcgtatctgatcgccgaagaccagtgagccatcagctgggttgagcgttccaccgtgagcatagtaccagaacttcgatcgttccggccaattggctgttgccggttcgatacccctctcaatcaagctagcctccatctgctcccacttcggcatcgcgacgctatagcctcctgaccccaagtggtgatggtacttcttcttgcggcattttctttgtttctttccatcatcgcctgcccttgttcacctgtcttatatgcaacgaactcgtcccagtgatcccttagctttgggaatgtgtcgaagttcggtgtctgccccttcagtatatacttctggtacagatctcccttgaagctctgaaactgttctgccattttcttcagagtccaccttttcactttgtcctctgtacccgcaggaagggtgaatgtctcgagcattgtggtccacagcatctctttctccgaatctgggacaaagctctcatgatctccgcgtgcccttgttcttcgccagtacaccgtactgacaggcacgttatcccgcacaacccaaccgctgtgacgtacatagttcttggcggcttcggccggggcactaggacgtccatcttcttgcacttccgttatgatgtgccgaccctcaagcttcttcgctgcacctcattgcccgcgtgccctcttctgtccaacggagggttgactaccactagcctcctcctcctggttcccctctgcatccctctccacgtttccttcctcgttcaagtactggtttggatcctcgttcccctcttcttcataccagtactggctgcttccctccgcgattgtatcgtacaatatctgttcctcatcgcggtcagccatctgttgatacaagaaacatctgctaagtcacgagacatttatgttttaacaatctaagtcatgtatgctaagtgtaaatgtcgtacattagaaccctacacaaccttacgtgctaagtctaattacaaatcgtgatataagctaagtctaggtgacgtatattatacaaccctagctagtaaataattatatactaagtctaattacaaataaaataatcttatattaaaactcaaataatattacatgctaagactacaatagtcatgtatatgctaagtgtttcgtgcgtatatgctaagtctaattaagactacaatagtcaattgctacttgtcgcaccaattccgtagtcaataattacatactaagtctaattacaaataaagtaatcttatattaaaactcaaataatattacatgctaagactaaaatagtcatgtatatgctaagtgtttcgtgcgtatatgctaagtctaattaagactacaatagtcaattgctacttgtcgcaccaattccgtagtcaataattacatactaagtctaattacaaataaagtaatcttatattaaaactcaaataatattacatgctaagactaaaatagtcatgtatatgctaagtgtttcgtgcgtatatgctaagtctaattaagactacaatagtcaattgctacttgtcgcaccaattccgtagtcaataattacatactaagtctaattacaaataaagtaatcttatattaaaactcaaataatattacatgctaagactaaaatagtcatctatgctaagtgtttcgtgcgtatatgctaagtctaattaagactacaatagtcaattgctactt

SEQ ID NO: 21602 - DNA, 857 bp, Oryza sativa
tttgaattctcaatactagtgtatggtttccttcaattatgtagatgccattcatctcttaggcagagtaactgtattctttttttttaatttctaaagcttaatcagttaattgagcataatatttccttcagataaagtttaatgtgttctttcgtgaatatgatgtcatgataccataattaagtttctttttgttacccttcattctgttaccattaacatgttttaaaattcttatgctagatctttcaaggttccaagttaaattggaaagagatgatggaaccaaaagaagcactgaatttccagatagcaggactgcacacatttatggcgttgttcctgctgagagggatacctatcagcctcatattgagtctagtgaatggtattctgggagatggtcatgcaaaggtggtgactggaagcgaaatgatgatttcagccaagataagccttacaggaagaagcttgttctcaatgaaggctatcctctttgtcaaatgccaaaagggaatcatgaggatcctcgttggggctgcaaggatgacctctactaccctttacgtgctaaaaagcttgatctgccgttgtgggcattctcatcaacagaagaaaatgatgacactgtagatgatgccagtaaaagtggtgttatgcctgggaggtcaggtcagactaaacaacctcctaagggagtgaaggggacaacgcttcctgtcgttaagataaatgcccgtgttgttaaggaccaatcctcttctgaactccgtataaagcccaaagtagctgatcggccaccttctagatcttcgcgctcccattcaattgggactgataggagttctacccat

SEQ ID NO: 21603 - DNA, 559 bp, Oryza sativa
ccctttacaagctttcatcagaaaacttggtacacccacgccctgaaccctctatgccgttggcttattgcagcttcaggttgaatgaaccacacatcacaacacaattttttcaatggccattggacacttcggtgacggcttgacctttgacggcgtagaacctcctgtacatggagtcgacgtgggtgaggtagtaggtgcctggagcgagcaggctcgtgtcctggctcgtcgtgaaatccttggcgccgtaccggtgctccatcagcttcagcgccgccacgaacttctccggcgcaacctgcggcccaaagcatttgttgatcaggaattcaggttcatccgttcatgtcaagctactagtttcaggttttcagtcaacaagatgaagcagtggtcagcagctgcacttaccacatgcctggactccagtttcttggagacatccagtatgcctgcaatgtttgataggatgaatggatgctggccttcattgatcttgaaagagaacattgttgatgtcaagccactgccgtatgagaacatgacaatcctt

SEQ ID NO: 21604 - DNA, 678 bp, Oryza sativa
tgacttgaagaagctggtggaagatggatatcttctttctgatcatctaataaagcatgctgacagcaatcggtgggtgactgttgagaatgcagcttcaccactggttccatccgaattcccctcagtatattcagatgtctcaacacagctggttagcccgccagaagccccaggtaatttacttgatgaagctcgagaggaggcatctggtactgaccatgaacaaatgaaggaagcttctgcagaagagcaggaagatttctacattgatgacagggttgatgcattgatggatggatctatcatggtggatggtcaggagcttgagattcttggaggtaaaaatgctcccttgtcgtttgaacctgagattcaaaatgttttttttttcccgttctcttttggtgccaatgggctagctcaatttgggtttttcttcagtttgcttggttatatcctttttggggttgcataattcttggtggtattggtacacccctcgatttctttgtaggtttgtagagggcgggtgatgcttcatccgtgattttgctgtttaaacctaatggtgaggtgtttcatgctgtccacgtggttgggcccgggttttataaggtgtatagatcttcttttggatacagttttttccgttgcaaaatctagtagcgcggacct

SEQ ID NO: 21605 - DNA, 3303 bp, Oryza sativa
ggatctttactcccggttgttctcaacaaccgggagtaaatatcttttcccgctatttcgaaattctttttaaacccggttagggttaagaaccgggactaaagattatagcactgcatatgattttcgcttacatatgtgtttataaaatagaagttaatgcattaacattatttaaagtacaaagattaatgacaattacttcgaaaaattatttttgtctgtaataaattaagtagataaatcgtaataagcaaatatatgacttataattaataaaaattccaatatatatatatacttagcatatatatgaatgatattattatattggtaaaaactctaattaagatatgtatgtacatactgcatgatttaaaattaataaaaattgtaatcatcatatatacttagcgtaggaattatattaaattaaatgctaaaaactctaattaacatatgtaaatgccacatgcatgatttaaaccttttaaaaattcgaatagtcatatataagtagcatatgaaagatagtaaattaaattgtgaaaaactctaatatatgaatgatagttttaaaaatatattaaatttaatacttttaaaaattctccagtcaattataatttgcatatgaatgatagtaaattaaatgttaaaaactctaattaacatatgaaattgccacttgcgtgatttaaaactttcaaaaatcctctagtcaattataattagcatatgtatgctagtaaattaaatgttaaaaactctaattaacatacatatgaaattgccacctgtgtgatttaaaacttttaaaaattgtaagtatcacatataactagcatatacatgatttaaacttgttgaaacctctaataatcgtgcgtaattaacatatgccatacatcaattgatttatatggataatcaatacatccaaaatagtttacatcgtgtacacaataattacggcattacatcggcggtgacggttgaccgcacgtactttctcctcactattgttccctccttgtgatcgctgcgtgagtaaggggtgtcttcatttgataggaggatgctagggtcaatcgtcaccgtgaaagggggttgcccatccaactgatcgtaatcctcgtcagtcttgtcctcaactccgacgatttttcttttgcctgggagaaccacttgacgcttaggctcatcaggccctctgcccttctttcctttgctagacatgtccttcacgaaaaagacttgcgttacatcattggcaaggacaaaaggttcgtccgagtatccaaccttgttaaggtcaacagttgtcatcccactgtcatcaatcattacgcctccaccagtcaacctaacccattggcaccggaacagaggaaccttgagaggaccatagtcaagttcccatatgtcctcgatggcaccgtaatacgtggcagttgttccatcgtgtcccatggcatcgacacgaacaacgctgttttggttcgtgctcttcatgtcttgggctctcgtgtagaatgtgtacccattgatctcatatccctggaatgtcgtgatcgacccagacggtcccctcgccaggaaggcaagttgttggttgatcgactcgttacccatgagatgttgtcgtagccacgcggggaaagtatcaatgtgatgccgtgtaatccatgcatcggacttaccgatgttcctggcgcgaactagagccaagtgctcctcgatgtaaggagctaccaatgaagagtgttgcagaacagtgaaatgggctttacggaataaattgttgtctaccgtcattattgctttccttccgagagttccctttccccgtagtctcccttcatggcgtgattcaggtaccccgattgggcgaaggtcttcgataaattctacgcaaaattcgatgacctcctctgttccataacccttggcgatgcttgcctctggacgagcacggttacgaacatacttcttcagaacgcccatgtacctctcgaaaggaaacatgttgtgtaggtacataggcccgagaatacggatctctttcacaaggtgacaaagcagatgcgtcattatattgaaaaatgaaggtagaaatatcaactcaaaactgacgagacattgcaccacttcattctgaagggcttctaatctatctggatcgatgaccttctgcgaaattgcgttcatgaatgcacatagctttgttattgttgcccggacattgtctggaaggataccccttattacaactggtagcagttgtgtcatcaacacgtaacagtcatgagactttaggtttgtgaacttcttctccttcgtgcttattattcgcttgatattcgtggagtatccagacggtacctttatgctctccaagcattcaaacatactttccttctctgccttgctaagagtgtagctggctggactcaagtaatggcttcctttctcctttggttccgggtgaaggtcgccgcgttgttccatatgcttcagatcattacgtgcttccagtgtatctttcgactttccgtatacacctaggaagccaagaaggtttacgcaaaggttcttagtgaggtgcatcacgtcgattgcgtggcgtacgtccaagaattcccaatatggtaactcccaaaatatagagttcttttttcacatcgccgcgtgaccatcttcgctctctatatgctggcttccaggcccctttccgaacactactttaagatctttaaccatagcaaacactgttttcccgctgcgatgtttaagcttcgtacggtggtcggccttatgttcgaagtgcttgcctttcttccgtaccgggtggtttgctgtaaggaatcgacgatgacccatgtatacaaccttcctacagtgcttaagatacgtactttctgtttcatccatacagtgagtgcaagccttgtaccccttgttggactgtccggataggttgctaagtgcaggccaatcgttgatggttacgaacagcagcgctcgtaggttaaactcctcctgtttgtcctcgtcccacacggggacaccttccttcttccacaactgtttaagatcttctaccagtggtcttaggtacacgtcgatgtcgttaccaggttgcttggggccttgaataataatcggcatcattatgtacttcctcttcatgcatagccaggggggaggttgtagatacacatcgtaacgggccaagtgctatggccgctgctcatctctccaaaaggattcatgccatccgtactcaaaccaaaccgtatg

SEQ ID NO: 21606 - DNA, 52251 bp, Oryza sativa
aacgggcagactatcttcttagcttggtacgttgtctcgggcaatttgtttccccccggaagaatgttcttgacgagtttcaataaatcgccaaatgccttgtcactaaccccattttttgccttccattgcaacaactccagagtggtatccaactttttgtgcccctgctcgcaacctgggtacaacgaagttctgtggtgctccaacatcttgtccaatttatgggcctctttttcactttcgcagtcctccctggcgtcctgcaacatctgaccaagatcatccgcaacgtcgttaccatcagcagctatttcctcctcgcccgtttgatttccttcaaatccaacatactgagcaaagtccggaatattgtcgtcttccacttcatcttcttccatttcaacaccttgcactccgtgggatgtccaacaattatagcttggcatgaaccccgactcaaacaagtggaaataaatagtcctggatgcagaatactccttctaattcttacacttattgcatggacaacaaataaaacccctttgcctgttagcttcggccactctcaaaaaatagtgcacgccgtcaataaactctttggaccgccggtcagcgtacatccattgccgatccatctacatgagtcaaaaaaaccgtacacaaataattattcttacaataataacagtcatacaataattataagatatctttattcatacaaaaatcataaaatattacaccaaataattcttaaaaactatttgtaaagttttaaactaattttaatgtgttttacttcttttaattttcattttagtttgttttctattatttaagattaactttcactagagttttccttctcaactattttataaaaccttgtttagcaaatgaactaaatttctatatattctttcttccccacacacattttctctctcatcaacttacaactaaattttggagacaaaaaaagtgtgcaaaacataggtgcaaatgtagtatgacaaaaaaaacattggaggatgaagttgcaaaccttttaggcacctccgatttgtatgtaatcaccaaaataaattcaatagaaattttggcatgacctcccctcttttttgaagaaattttaaagcttgctcgggcagctggaggaggaagaagacatatatataggggtgggactttagtctcggttggtagcaccaaccggggctaaagatcaccgggatcttaccaaccgggactaaagttacgatctaccaaccgggactaaagatcccgggggggcctgacaggccctgacagcattcgaaccgggattaaagatgagtaacacaaactgggactaaagatcaaatatgcccgttacccttttgaaccgggactaaagatcatctttagccccgggttttattgcatccgggactattgtggaaatcggccgaccgacgaaagatggaagaagcaactttcatcggggtgatgaggcgtcagaccagctgccggattgcttcagggaacttggcggcgatgaggattatggcgcaggctacggattggacgtcgtcttcggcagtggtggtgtagctggcgtctgagcgcagagaagtggaagaacccaccgaagaatttagattcggcgccagctctcgccgtttagccaaagtaaatggcaacggcggagagcatgcgacgagctaggtggaggattggtgaaagatgcagcttccgcttcacggctttggttgccatggccggatccataggatggcttaatatagccgccagctgaactccacctctccaccaaatctggcaatggcgcctccttggacatgggaagggacgcgaatctccaccactattaattcggcacgagagctcatcaggatcagcaggcgcacgcagcgaaagctgatgcagagccggctggaatcgacgccgatgcccacgccgactgcggcgctcgtctttctccgcctccaatgcgcgatggaggcagagattcggtcaagctgagtactccgatgcgcctaccaaccatgcttgcccgagccgtcgacgtcgatcgtgtggtctgccgctacagatctggagccgcctcctcgaccgccggtagctgtagtgcttggaggagaaaggaggagactcggcaatatccaatggacaaagcaatgcacgcatgctcgacagaagaagacgatggactaacacccatacatgccatcatacgtccggtgggcttctacggtactttaacaagccagcccaaaacgcgctacagtagtttttgcgcaccataatttcagcccatcagaatcatcgcatcgaacgcacccctaataattcaggtcaggtgatggctgctgtccgattcctgaatcatattattatcactttgtcggatgaagaaatgactaaaataagatcgatcggtggctaggtctttcagtcctccggattgcttatggtatggttggtggtgagattatgattcgatgatcccgtacccccgaagggcttgtatttatatacctctaagtagaactcagagagggcttcacatatataagatcataaagttggcatcccctccgaataggattctaacacctttgaattctattcaaggggacagtttctttctacattggtcaaattcctcactattaagacaaccttgccgtatactttgtatactgtgtaaccccaaggatagatggtatatatcttatccataaacctaataccccttatttttttttgcttgtcatccaaaaagtcatcagaaaatttaaaataatttaacaagagagatcaatatatgacatatctttccacaaacatgtaagttaaaatttaatttatacgagtagaaacaaaaatagaagttctgactttgaagagaacacataattcacaacagtcaaatttgttattttttttttctaattatataggtcgaattttaacttgtatgtttatgaagtggcatattacatattaaattatattatcaatttatttcaaattctaaattttcatcatcttattgcgtagctcgatcgattgctgcaatcggtttatcagctgtagccaaaatttaaaatttaattttaattatattttgatgtttttcatcgtaatttatattttgatggtattcaattttgttgtcatgcatgttcctaggattgttgtcatgcatacttgtattaaacagaggggcgatcgagaattttactcggtcacaggctctccgacatgtgattcctgaaccaatcattttgttttctaaagtctgaactacttggttattgtacctgaattactgtatgcttcaataatttagggaaaatagatcctcttacttactgggcctggtcggtaggcctgcctggctgcagccagccagccaacagccggtctagtcgctgtaggggcccaacagtcgctacaggatatggaaacgataaggagcgatgcagccgctgcagccgaacggctgggctgtgcagcgcagcctagacagctgcgaaaacgggctgccaaataggcccactgtcatttgattttaagtggttcatacgtgggctccacagcttataagcccacagatgagcaacctatgtcatttgattttgagtggttcatatgtgggctccacagctcataagcccacagatcagcaacctatgtcaaagatcagtaaatcacgtactccttccgtccaaaaaaaaaagggtaaactctagctatgaatcgggacatgcatcgtagctagagtttacctttttttttttttttgaatgaagagagtaggcctgaggccaaaacaggagtataatactagtgtgttttcaaggattttttttcccttctggttatgctgcataggtgacatcatgataagaatccctggagacctcaccattgttactatagttggttttgaccactttgctgttgaatgctttagttgattcgatgttggggcagtacgctttgctttagccctcgaggtatttgaggccagtacccctccctctcgaatcacctacagcagtaaaaaggaaaaatgaaaaggtaaatatgggttggcaacatgaaactatcttctgaaattgtccttagtcggtgcaatgctacactttgtttgattcttaaactgtcttctgacataaaaggaatttgacagccaaacgactgcattatataattgacatagcttaaaatctagagggctctgaactcatgaacaaaacagataattattttagtgctgaaacttagctatccaaggctaatcttgtgtgttcaaagtcagcgccaaaaaaagcagttacatgtaaattattttttaaatttgttttcatgtgtgctgttacatgtaaattgttgtttaatcactaactttagagaaaaaagaagcagtgcgtatatatagtaacgagtttatacataataatgctgaacaggaatcgaacagcgaataaatcagtctattcatataactcaaaacaaagtctgaaaagtataagattaatgtacaagattcaatgatgttaatcaaacaggcatatcacatatttacatcccaggtgaccatcaagcatgttatgtaaaggcaagccatcaagactgcacattgttatgtcacgaaagcaactaatcacaaacaagcaggaactaaataatcttctttttttaggtgaagtgatgcgtacatccttacaaaattaaatatggtttgaatctgaaaattacatccttgctttctggattcatcctactcagattcactgcatctgcatctccttttcactgcatccacatcaggggaaagaatcaagaactcacctgtgtagaggttgatgggattgaagcagaagctggtctagcaccacccacagaaattgacagaacaggtggagttggtgcgacgagcaacgatgagtgcgctgctatgaccgacgatgaccacgaagatcccttggagggcgcattggaagcggcagtgatggcggaggtctgcgagatcactaggaacggcggcggaggcggaggcggcggtgaaggcggcggcggaggcggcggaggaggaggcggtggaggaggcggcatcgaatccatggcggcagcggctagggttcaagccgcaacagcgacgaacttcttcgttcccctcctctttgactcctcgttcctcctctttctgatgctcgatgtgggctgtggtggcgccgccgtacgtggtggactcgccgcatcagcccacttactcctaagtggtttggcctaagtgggtaagtgggtaagtggtgcgggcctgtccagcggctgcatcagcccacgcacgccactgccagccttagttatgcgtgttctgctgtgtgctctcgatgctagttgagataataatttttgtttgctgcctacggccacatatagtggagaaggtttgtgtgaattgaattaagtcctataaaatccgtgcaatccaaaagatccttggtaaaatttacaagttcatcagtctctgaaaatctttaaaaaataattactcccatgacccattagaggataaccatgggaagcgattcgcccttacgtgaattgggtcctatatatgaataagaaagcttgaacaaggaaagtgattgatcgacgtcccgtttgatttattcatcacataagtggacaattaattctttgattttgcctttgatttttttagtgacgtcatgcatgtgccttgatggagagcacgtttgctatgcatttatgcggcacacacctcgtcgtgtactacatacgtgacaataattgttatctacgcattttgttttatcatgtatgacgtcactaaatcatttattatatttattttagtggagtaatatagtactaactgttgggattttttttcttaccatgctacccaaaataagaatgtgatatattatcatagtataatgaatctggataggatatatcctatccccttttacgttgaattattttgggacggatgatgttatgaagtcatacgaattacatacatttctgttgctcaatcttacaaatgatagttatttgttttgcttttaaagtaaccaatgatgcactcgtgttaccaaaatattggttttggtatcaccaatatggctgcgtttgagaggagggtttccaaacaaaatatatattattgcatgattaattaagtattaactaattttttttaaaaaaatagattaatatgattttttaaaacaactttcatatagaaattttttaataaaaaaatacactgtttaacagattgaaaaacgtgcgcgtaaaaaacgagagaggtgagttgggaaaacttagaggagaacacagccatatatcatcatgatagtatgataccaaactaaaccagccctgaaccaatcgatgaatatggtgatataattatatttcgattcaggtagatatactacaatcttttgttttggacggttggacacaaggaagaaaataggatgtcatgcgatgcgatgcgagcgtgccgtggggcgtacggtcgcgcggggggtctttgggttggcagttggtgacttggtggatggatgcatgcagcgtcgacgcgggcggtggcgtgcgcgggagggccgtgcgaatgccaaaccaagttgcggttgatctgggagtaccacacacgaacaaggaaagtgacttgcaaggcggcagatagaataatcagagaacgagagtattaaggtcctgtttggcacagctccagctccagctccacccctcctggagctggagctcagccaaacagtttcagctccaccaaaactgggagtggagttgggtggagctctctcacaaaatgtactagagttgtggagctgggtttaggcagctccacaactccactccagactcaactcctgaagttatatttaggagttggagttgtaccaaacaggccctaattttctcgtcacgtacgtcgggatgtactgtttggtttgcggcggatactaactttaccaactttttttccctaaccgaaataattagtcaacattaaaatttggagtaaggtttcagtttggtttgctatcaaaaggcattgccatgggctattttttatttgactaaaccaaaatatttgacaatgccaatttttctgagaaattttcttacaagtccctaagttttttttgcttaatctcttatatattaaattaaatagttgataaccttgttaataaaagcaactttagtacgtacagtagtgcttgaaaagaagagtaataataagctctacttttgagtaccgatggaagtctatacgaatagtcactactacagaatactcttttggtaccagttggaaaatccccttagatgttggttttcccaaccgacaccagggaggcggcactattgactccccggtttcaaaccggtacctttgaggcgttcgctagcaaaaaaaaaaaaggctcgatgcaccggctcgaattgaccacatccatcccccgcattgcccccaaatctcaaatctacaacatcaacaaatcaaccaacatcatcacaacaaatcaaccaacatcataaagaaattacatactataaactcccgaatcaaccaacatcaatcacagacatcacataacaaacattgaaagaacaatgaacaccaccgctgctcaccgtcgccgtctaccagatctgtgactgctgcctccgtcgccccgaggattcgctgtcaggccgccatcgggccaccacaacctcccctcccatagtcgggccgtcgcctccacgccgtccgccaccgcccctcccctcccgccggatctggtggaggggagggcgccgccacccctcctgcccctgtcgggccaatgccgccgccgccacccttcttcctgtcggatctagcagagggagggtgcctccgggcacccgccgctcctccctccacgcatcgctgacgccgctcctccagctgccgcctccgccaccaagagaggagaaagagaagagaaggtgatcgaaagagaggggagagagagcggatagaacgagagagatcgagaggagacgagagagttcgagcgagtgagcggacactgcggaccttatctcctcgacgttgtgttcgtggtgggacctgccggctcggctcaatttgtaagtgccgacacctaggtttttaaaattaaaggttccgtttttttttaaccgacacaaaatggaataggtgacggtttttatttagaaccaacacttataattacttaaaggtgttgattttttgcgattttaacctgcggaggtgggaaaaggcctataggtgccggttttagcacttccggcacctattgtgccaacacctatttgatgttttgtagatgagtctgtttgttgatcttatctattttttctgaaatatgtactagatggtgagacaggaacggcggagtctggagcggccgcgacgatgcatgagcggtgatgatgggagagagcgcgatgacactggaggggcggcacgggcttgagctagcatcggcggcctcacaacgggcagatccagccctccaacaacgacgaaggggtaaggagtgccggcactggaggaactggatctagcgctactgggacgggacaacgacaacgatggtggcaagccgcgtagtggcagcagccttgggagcggtggggactatttcggctatgacgacgacaatgacgcactgcgacaacgacggcggtggctagggtttcgaattttagaaattttctttttttgctttttttaggtggacggcttaaccgattttcatagacaccttgaggcaggcgggcagcgcagccatttgcaaaaattttgtttttaccatttgtaaaaatcgtttcggactttctgtagtagtggttgctaattacactactagaaaaaacatttttcccaacataggggtctttttttcgcagacggacatgactcttagagccaaatgaccgcctacaaaaatataaatcggggtgaagtttgttgtccgcctgcgaaaataggcggaccacttaagcggcgcctgcgaaaatctattttcgcaggcgaaccttatgtggtccgcctgcaaaaatcgtacctaacaaaaaaaaatccacccttatcttctcctcccacccctcccaccactcaactctctctctctccctctccctcactgactcagtctcctctcctctcctctcctctccctcactgactctcctctcctctcctctcctctccggcggcgcggcggggacggaggcgcggtggcacggcgggaatggaggtgcggcagggcggcggcgtggtggggacggcggcgcggccgcggcatctcccctccctcccttcctcgcagatctggccggaggagggaggggggaggccggcgggggcgacggcggcgacgacagcgtggggcggcggcggcgacgacgcgcgcggggcggcggcgagccgcgtgcggcgatttttttttttcgtttttttgcattttcgcaggcgggccgttgccccgactgcgaacgttgtggtgcaggcggacctccctcccgcctgcgaaaattagttttggtcgcccggaaaaattagttttctagtagtgttattcgtgccttcattgtcctttaggacacatttttagtcgatcggttcatgtgatgtggccttttatccacttgccacagaagcttcctttttgtcttttgcaacgtttcatcgaaagcattttttgttccctttttcctctataccaacgttgagaaaaatggccaactttgccatagatatggcccagaagactgcggcatcgaaataccgaagtaacaagggtaaatttcatcgaagctgccgcttataataaaatagagtccatatggtgtccctaacctataaatagagaagagatcagatcggtttcacgccgtaacctccatggttctatcttgacagtcttacatatagagattcaggaattctccgctcactcgcattcgatcattgtctcggtagaattgatgttctagctcttgtccctccctagaatttctggtgctaaagattgatctcagcgaagaagattgcagatactttcgtttgatgttgacgttttctttccatcgtttcttccccattcgggcgatggccggcctgtcaactgcaccggaaatgggagctgccgtcgtcgccggcgtctgcgtcgtttcggcggccgtcgcagccgccgccgccgcctcaccctcaccggaggctccaccaggtccgtaccagacgtgcgccattatggccttgtgcaccgtgttccatggcggcatggctctcctgatccatggattccggcgagcaggagctccgctgcggcgcccttgacaccgccgccgccgctcgccgccggatatgcgggctagtcaccgcagttcttgactaggcctaagaaggacttggcttctctgcatctacgtcaagaatccatttgataaattaagcttgcattttctttccttgtgaattcttggttggatgcagggaagccaaggcccgcttaggcagacgctgctcctttagtgtttgggaccaaatcaacaagtggtgttctttcgaattgtccgtctaactgacgttgcttctactttgatcttgatggcagtaagaccgatgatttcgaaatgattccactagctggattgcttccaaacacagacggagcaccgtttgcccaagtgttaattagtgttttttatcctactgattttgcgttttattctttgtatttatatatactttctccatttcaaaatatatgacgctattgacatacattagtgtccttttttaagtataagtgtccaataccttttctttaatagtactacctccgtcccaaaataagtgcagccatgagtttccgcgtccaactttgatcgttcgtcttatttgaaatttttttataattagcatttttgttattataagatgataaaatatgaatagtactttactcgtgacttatgtttttaatttttttcaaaaaactttcaaataagatgaatggtcaaagttgggcgtggaaaatcatggctgtacttattttgggacggagaaagtacatgagatcttttgtgtatggtcaactaattatgatgacattttgctatttttagtgtctattgtctgattttgaagtgttacgaaagcacggggtcttcatgcgttcgtgcgtactatacttgtcttgattagtatggtcataggtcaggttaggtcccaaataattggcttccgagacggttgatggcttgatggttgtgtgtaaagctactatgtactttctctgtttcacagtgtaagactttctagcattgctcatattcacttaaatattaatgaatctatacatatatatatatatatatatatatatatatgtgtgtgtgtgtgtgtttagattcattaacatctatatatatgggcaatgttagaaagttttacattgtgaaacggagggagtactaattatctgcacgtttaatttgctactgaggtcaatcacagtgcaggccttacatctgagaaagtacttttcgtgtggatgagggatcgatcatggctattgatatgtttcaattctttttcatgtgtcatgatccctacaagaattgaaaattttcgtgcctctataaggaggtgcatgcctggattgtcctattaattgatcaatggttgacaacaaggaaaggaaacggttgaatgtttggaacattccacccatcgtcgttttcacctttctataagccacagtactcatgatagttacgcatgacttaataattcagcactacaactcagatggacgattattcttacgataaacaaagacaggttgggaatcttgtgatccagacgacatctcattaaacgttaaatattgttttcttccttgacttgtgcccatctgaacctatatatccatctgcagtttactccttccgtcaagaaaaaaaaggcaaaccctgagtttccgtgtccaacgtttgaccgtccgtcttatttaaaaaaattataaaaaaaattaaaaaaacaagtcacgcataaagcattaatcatgatttatcatctaataacaatgaaaatagtaattataaaaaatttcatataacatgaacagtcaaacgttggacaagaaaattcaggtttgtcttttttttgggacggagggagtaggtcacaatgacagtaaagcgcttgaaacttatacccaccagaatccaaagcttgacgtccattttttatggtttgtcaaagttcagagataagagttcttttggaacatatgtataggagttccatcgtttcagagataagagtttttttaatatatatctataaagagaggccgcacctctcccgctttcattaacgaaaacaatagaaatacaaggtttgataggtccaggtaacaattaaacaaaacaaacagcaaaacgatcacagccgacatatcacaagacattgctcccatgcatagacaagaaagaaaagcactgaaagccagcaatcatcatagcatcagcctaggtcatcatcaggtctccatcccaaacgtctgttagctcctctctagccaaaccttgagtgaaagacttcatttgctatctgtttgagaagctgagccccccaaagcaccttttctctgtctgcctccttgatctgcaaattgctccaagaccccaaagtgaaacaaatggtggatatcaattcagtaggatcagttggtaaaatatgatcaaaacaagctctattcctggctttccaaaggatccataacacagcagccacacccaccaggactatttttttttgtattatttccaaagaaattcccttgcccaaacatactaccaatatccttattaggtctcacccccagggcacactcgatcacgcaccaaataaaatgagctacaaggcatcgtgacttcgcgattttagctataggacgccgcacgaagtgactttagggggaacactctcaaaacttgaatatttggtggttgacagagcacccattaaaataatcattttcgattgaagaggaaagagaaatcatgtgaatgttagatctcccatctctcttctctctctatcccctccttccacactgccgggaactcgagccactctgaggtcgacgccgggggcgaactccttgggttggattcgcttggggtggttctcgacgagggtggagacgacgatgggaatgggcacgaagtccattctgctcacgtccatgagcagcctcacgtcggtgaccaggcaagcgttggtggcaaggaggttgtgctcgccgtggcccggcacgcccatcggttgccatgcaaactgcgcctgcaccagcagtgtcgtcaccctgaaccagtaggagccaaacatcagctggcgatcagcggcgatgagatcccgttgtggctgaggagtagggggagcggcgccgccatggagggagggggaggagtggagatggagggcatcgctggctgaggcgagtgcgcggggggggggggggggagaagagataagggtgagggacagatgagaggagataaggataggtgggagaatcgaggcgcgcgggtacactgctctctccgctctgatgggcggtaaaaaaagcacttttataacttactttttttattaaaaaccgacatatataaaatttataggtgttggtgtttaacttttatcttttgtaaaagtcatatggattagaaaatgctctataaatactgattttaaataaatcagcacatataggggtgtccctaatctgcacgtataggggtgtgtccctaatcagcaacatacggaacaagtaagtttatccgtggaaaatttttaatttttagtcaatttagtgattattgattccctgtaatctctagaaaaaacttatctttttatttattttctaagtatagtcaatgcatgtgtaaaaaaaaaggaagtaacttatgatccttccttgggttcgttttttcaatgttggtgcatattcgattgattacagtctcacaggtgcgaatgtatatatatactagaaaaaaaaatgctcatgcgttgcaatgggtaaagatgcttttttcggtgatacaacaactgttagaagccgaacaagaaattgaaatattgggatcactatacactataattgaaaaagttaataaaaaatcattttttggttttggaccgcgaaacgttattacttccttccttttcagccctagcctagttcaatacctccctacgctcggcatgtatttcttcggcccaacacacaaacacgtccaagccacaagcacaagtggagttgtaggcccaactcacatagcctactacgatcttgaacctccagaagacatcccatgcatgcatgatgccggagccgatcctcgtcatcaaatccggccgaatctttctcgatcttctaaaattagttgagggcttttgatccactcgatctcctcttgagagaattcgtaaaaatcgggataaaaaggcgaagctcgctagtcggccatcttcaatggagattaaaaggagaaatcataggaaaaataatgagttaggagtggggaatcgatttttacaatcaataatacgatgaaacgtgcggggagacaaatcgatatcgcggcggtgctagggtttgggcccgggccctgagagcggtaaaaaggggcgatcgtatcggattgagtggaaacatgcgatgatgaaaaaaccggatggataaaaaaaaagaagcccaatcggagatttaaaaaaccgtcgaaaaaaatagatgggacaataaaatatattcaattaaaaccgaaaaccgattcaaatacggatgtacaaaaaattcagcaaaaacattttcaatttttataatagtaaagatagatatatttcttgctaaaaggacacatcagtatatactacactagctacatttttcccaagcactaaactctgagcacgcatgtttcaagactagtaaagttgagtgtatatactgattttacacaaactcgtgtgcttcaatttgtttggtatatacactgatttttgggtagatgccaatttttggtatgtgcactgactttttttgcgcatacatactctgaacttagatacactgaatttgtgtgcttcaatttgtttggtatatacactgatttttttgcagtacacgggaacttttcggtacttattcatggtcatgcaaactaattaatacggtgtattttggtacatcgacagaatatacacggcacacgagacgtatatacctaaatttagatacatgtactggtcagctcgtactgtacagacttcagcaatattccacatacatacctagttagagtaaaaaaaataacttaattaaaaagcctagctagtttcaaattcagttctagcaaaaaaaagggtaaacttcataaaaaatctattttttcagacgcatttatatgggtatataccctattagaaatggtatttacccaaaatatgtgttttagtggtatttaatgcgtgtttaaatagatatatacccaattagaattagaattattgtacgccagacatacccaatatatatggatgttctcaatggatatatacccaaataaatggtacatctggaatgcatgcatctatatacctagctcagtgttacatttggaatgcatgcatgtcgcatgtaccactttttgggtagctgaaaaaaattgatacacacatcgaattggatatatacccaaatttttgctaccttagttgagttggtatatgtagcttacaaaatggaaaatcgttgatacagacacacggagctaaatgtctcaaaaacagcgggcaaaaaagtctttgaacggttaccttattaatatgtacctaaataccagtacagatacctaaaatttatattataaattttcaaaatatttgatttatataattggaaagcataatgtgctaatttagatatgtgtacacatgcataccatactataaatgtaccagattatttataaatttgattacaaaatatttcaaataattagtttttgtatttccaattactaaatacattattttcatattttcaaatatttagattccaagttccgatttatattaccatataccaaccatcttatgtgagcagcttcttgagctttgtgtggattatgagcaggcagtaatgtagtagataggctctgctgaaggccggcccagtggatgcttcccataaaatggctcagtctagggtttgaggctcggctgaaggccggacagtggatgcttgtcgtaaaatggctcagtatagggttttgaagctagtggatgcttgttataaaatggctcggtcttgtgttttgctcctcaattcgtcttgggagctgctccgctagtgtcctctgtagccgccgccgcaccgtcaccaacatcagcctcgccttcgtatggccatgtcgagcatcaggaggctttcgtgctgccacgtgagtaagcttccctagatctcactcttctacctccctctctcaatttctctataagatgggtgtgggattttgtttctcccatctttgcgcactaacaccttattcccttaattccttatacgagagacctaacataattacactaccttggtcggcttctaaatgggattccttcttctccatactgatggtggtgcaaaatagctaaaggtatacataatagaaaatcaacatagtttgtgtatatgaccttgacataatgggtgtatatgacctttaaaatccacatagttaacatactaatatatttttttctcttttacgattttgagcattaggtgtttagatttggcataagactttacatatggatccaacacagacataagtgtttgttttattagaattgtagcattttttaaagttgaaagatttacatattatttatttttagtataagcataaaatacatatatttagaaaatggttatcataattacagagtttaaaggagcaaattgtttacgtcatttacctgtttattatttttagtttcttgaaacataggatatatggtcacgatacttgccccgaataatttgcttgaattttacaaaaggtattttttttgtctttttaattatttttagtttttgaaacatatgatatatggtcacgatatttgccccaaataatttgcaaagaactttacaaaaggtttttttgtctttttaatttttctcccaccccttttacatgtttgtgttagtccgatcaggcattgttgggttgtagtgctgtgtggtccgctacgcacatggagcggctcttcttctctttctcttgtcctcttttttttaattcaccgtcgtaacttgcacgcttgctagttttatacatagggttccttacctgacgcttgtgctgcttgtatcttgccacgtgtcgctttagtaaggatggtaagggcagccaatcagctaacacgaaaccaaccaacatatatatagatagatagaatgcaaaggggaaatatattttgagaagccctctagaatttggatattgtgctttttgtttcttttcttatggatattctctagatttatgtcaaagaggatagataattgggaagtctcaaatggatatatgtcttttcttttcttttggctattttttcttatgcataattttcttagatttatctcaaaatttaacaccgtcatgtggcccaataagatgttcgagacgagccatctttagaaagataagatatctttttctctttggatatgttttgggtagattattttgttgattattcagttcatttgttttggttagattatttggttgattattcagttcattgttaaaaaaaaccccttacgattagattaaatgtaaaggtggtgtttagtttgacaccttatcaaatctatggaaatttggttctttactttactattttatagtgacccattatagtgacctgttatggtcttagtttaatttgcatttcgtaatttaatatgaacaaaatcaatctatctacttctattattgtagtttaccttcagctgagaggcatagcctctcttatttccttaaaaaaaattgcttttatttttcccttttttttgctttttttttatggacgaaggaaacatctcttattttttaagtagtagagaagagaagagatatagcaggaggaaaatacagcccctagggataaaaaagaaaaatgtccaacatagctatacactatacaagatgcggtagaaactcgcgcagacgcttagcactggctagcatccacagcctagcctgttacttgattttggcaagcaggtatttcgatgtggactacatgtggtcgaagatccgttgattcctttccttccaaatttcccacacgacaaggaggatgagggtgcgcagttccttcttggggacttctgtcgtgtttgctagactttcccaccaatcctggactgactgagcggcctcccatagtgcccaagttcaagatgttggtttcccacccagctggctacgaaggtccaaatcctttttaagtagtgacattcggcaatgaggtgcagtgccatttcaacctctcttatgcaaagaggacaacatccattattctgccagcccctggtcgcgagtctgtcagaggtccacactctgttttggatgataagctaggcctgaagtttgcacttcccaggcgcccaaaccttccagatcagcaagttgaaggttgtgctgggggcccaaaacattgggcttcataagctaaagatgccgagtagtgcccatgactggtgagcttccaattaatctgatggggctactcgtcgctcaaatgcacgttgtggaccatagtccacaaagccaaaagctggtcaattagctcgagcgacattagcgggttcgcttctaggtctagatctcagacccatgcgtcgttcttctttccttggtgcaaggattttcttttcttcatagagattgcgtagacaagtggcatggcgtcttttggcctgcgcccatcaacccatggcgagttccagaagcgggttgtgtttccatcactgattgagaagtttgttgctgccgcgaagagggtcttgtcgattacaaagcatctcgaggcccacccaatgcttgctcggctctttccattcatgccataaccaacgcagtcgtaaggcccttgtgaatttcgccaagtttggtacgccaaggcctccctgtttggttggcatgcacgtccttgtccagatgaccttgcatccccctgcgatgtcccccgatgtgttacttctacctctcttttcactatccagtggcaacactttactcgagaacaccacttttagcaatactaatgtgtttttaatcctactcagtggcaatgctaatatgttatattctctcatttcagtttcctccagaagacaagggacctgagggtgctatggggggtgacaagggacctgagagtcaaagctgatcttggaattatacattttggtggaggggtcttcaattgatgcaagggatgaactgagtgtgttttttattagaaacttggttgcttaaaaacttaggcagttctgtgaaatattttttggggggcgcatcattttgccctggcccttggggagtactaattccatgaacttaattattaatatggcatgtttatcttaatgcttgaattaaattcaaagtggctggctggagaaatgtgaaagtttctttgtctagattactgcaagactgcaatactattgttgaatgattctattgaatgacctgccttacattactttctcttccattgactgaccttaatttgagctatacttctgcactacttccttttgaaatgtgccccttaatactcctaaatctgccttctggagctcagttttaatccttaggcaaaccctaagagagtccgtcgcctggcagttggctaaaggccaggtttccatttggagccagccatgatatgaaatttcttcctcaatccatgatcatcttaaccttgactctattccagctcacatatgtgatttaaaagttataagtcattaaagaggttaaaaaaagacatgcgccatactaaagggagatttatatatgggatgaagtggtcttcggttaggatataaagcgctaccgtgcattacctagtcacggcccgagagaggacactcttctggattaactcaacatgtatttgcaatacaaagagtgcctacaaggaaattttgaaaagaaagaatcaatctttactggaggtggcattcgaacggcctacacagaaacttctttcaactctagagaccattcactctctttaacattcacctccaacctttctgacctgagtttctccatcacaaacatctaacccctgccgataacaaaataatctttgacttcctagatgagcttagctatatagccgctcctcctcatgagggccttcaacctcaccagagacccggggaataaaaacaatgataactttgcagcgaacctagcctatgccttcaatgacacaaacaactccttgtttctttttgaattgcctttgccggacaaactctataccaggtcaaacaaaagggagattcccgtgctcgccctgcttgatcgagttttcatcaactactagaataatcttatccaaaaccccatcctgaaaggcctcatttggcagcccgggatctggccgggatcccggcccataccttgggaaaaagccccgctaggaaaatttcccagggccatatttcctgaccatttggaagcccacgaggtggatttttcagacccaaaccgtgtgggatacttggggaaacctcccatacctcacgaggttaggaaaaaaatcctcgttgtggagcctcatcacctctgtgcctcttcctctcgcgggaactccctccatattaatatgtaggaataagttcatttgaggtcccttaacttgaccacaatagcagatacaacaggtccctcaactatcaaaaccggttcagacgagatccctctgtggtttagatggcggttttggctgacgaggcgcctctgtgggccctattgactaggtcttcgagccacgtggcacttacgtagcaattttatccggaaatataataaaaccgcggggctcacatgtcagtcacacacaaaataataaaaatggtggtgccatttggccccacatgtcatccctcttctctctatcctttctctcacctaggcggcgcaggtgacgggcgagatggggcagagcggtcggcctgtgaagcggggcggacggtagccggtgtaggccggcggcggttggagcaagccggcacaagcgacggagaaggcggcggaagtggcacggtcgcctcctccgccattgtacctaccgctgccttcgtaaccacatgttaacgaccaaattttgtaagccatgaactaagttcaacatcggaatcgaagcggattcggcagggaatcatattatgaaaacagagtgcgcatcggctacgagagcatcggctgaaggctgcatcagctacgagggcatcggttgaagactgcatcggctgagatggatcggacagaagatagccgatgtagccgatttcgttgagatggttgtataatcgtctccaggattgatcaacgtgctacgcaaggattgtcgcgatggagataagctcacagataggcaattgtatctattagttaagatattttaaatagtttctttagagatgtgtttcggcaagagtctgctgtatagacttgttcgtatcttagagtttgttagagataggagttgtgtccggcaaggaccagtcatgtatctcgggtataaatataacccgatcccgtgtaatttacaacaacagttcaataacactttcggcgcatcgccacccttttctactttcattgtttcgacgagttcttgctttcgggttgaactgcatcgatttcaatcttcaacaagaggtaaaacttgtcatggcggcttgcgttctcgggattagtgcttccatctttatgatactgtaatcttggttatgtaaatcgtcaagttatcatatatgcttcataatctttattaatatcattacctaatcttaaatcggctaacagctaccacaagaaggtagctgatagagttagatatagttgttaatatagattgtatagcatatctatcatcttttagaggttttcatcaactcgtctagatcttgtatttattcttatgcttaatgctgcatcggttgggttcgatctattaagtaatattcataactacaatatctagcttgtctcatgatcatcggtagagatagtatcggggtttcagccgatcttacctgatttagctacctttattccctatatgtttacttgatatgctgaatctgccctttatattaagatcctattgcattaaaatatattgagcttgatgtttgatatattctatctgttttaacatcttaatatagagttgtatcggagtattagccgatacatgttagatatatttgatcggctatgctatgaacgtatatataatctttatcttaaagtacttttaggcataagtgatttatactatctcgacttgctgttcgatctatcccaatcacttagcttaaatatatttcgagaaaatgattatacatcattgatatctatagccgatcgagtagacttaactttatattgctttattattcatggccgatctaatgtcagttacattggctcaatggtcaacaatatgtcatcggtccttatccgatcggctatcgtttatagatttaacctcgttttctttgttcttccttcttgttgattgcaggatcaaatcaactggcacgcctttgaacccaagagcaagatttaggacttgcactggagttaagcagatctcccaggccagtgtgtgtttttcgcatcaacaccacggtccccgcagccgctgggaagggatccgccggtgagcgcgacgctgcctggcacggtgatgtgcacggccttgatgcggctaaggtcgtcgtcaccgacggcagtgacttgccggtgttgtacaactggatggactacgcaccgacgttgtgatttcgcccgccgctggccacgactttgcatgtcgccgctgctatctcgccatcgctgccaagcaaccgtcgctttctaccgtctcaagccgctgtcgtcgtgtcctccttggcgacttccaccggaatcgccactcgccgctacggaccaccgctgctatcccactcgaatgcgacggtggccgccgtcttctcgcttccccaacggctgctgccaccgatgtcattgaggtaggaggctgaagaggacggcgccgctcctggccctgccaactgctgcaacatcgcgcaaggacgatatgggacacccctggccgcgccggccaccacagcatcacgcaaggaggatattggacaccacccctggccccgtcatccgccggcgctggagtagcggagggccgagcgccgtccctagccccgccatccaccactgacatgagggagggaggaggaggcgctgactcgctgttgagatagagaggagtgtgggaccctggtcccactgtttttttcgaatggtatgtgggccacacattttccaatggcataccgtcgattagaccaatggtatctaggcggttagacctaaacatctacactagtcattccaaacttggttcgcacgtatcagataagttggtgcacagaaatgagtattttataagttggtgcactaaatacacccacatgacaagtccatatacttcaaatgcagcttacttttatataaaaaaaatgctttttagagtttcagaaccaaaacttttgtgtgcttaatgcgagcctcagatttctgaactgaaccatcatgtttcggacatttgcccgatgtgtctttgtacgtactgcttccatgcttcaccctttcttccaaaacagtgaaacagaattcttaaacagggaggcaaaagcaaagttttatccaattggcaaattttgctacaggcgcaacttcgtggttttagctctagaacactgcacaaagtcacttttgggaaggcactctataatcttggttatttgccaatagacaccacacccatttattaagtgttttagtgctgactaggagagagcgggcccactttttgttgcaatgtgaccaaattgtcccttcccatctttctcacttaatccaatcccctcagccggctccttcctcccctcacccaccgaccggcgccactcccccctggcgcccttacgggcggcaggcatggaggggagcaactgcgcgctaatcgagcgtgcctccgctagcgaagtgagcgaccgcgccaccacctcgactccgttgctcgtgggccagcaccactctccctccccctacccttggccagtacagaggagccactgcagcggaggcgaaggagggagggccggggtggtcgttggcagcaagcggagatggtgttgtggccggagtgtgagagggagtgagatgtggaggaagaatatgacaagtgggtccaggggcatttttgatatttcacattgtttatctctcctattcaaccaaaaattaatattataatgtcggcggtgtccatcagcaaataaccatattttcatagtgcattcccccaaggattgacttttgacgtgttctagagctaaaaccacaaagtcataatgtcccacggcaaaatttaccttgtttctttggtggttccaattaattgtggacaaggagcattgatcccctttttctaaaaacaaaagaagatgagggatgtggtacattttctgtggtttcccattgctgcaataaaacagtaaatcattataccagatgacagaggaatttgttgcatccaactcattacaagggtaatatttctacttgtgctgttgtgcagtgctaaaaaacattgaccgatagaatagtcaaattagccacagactaaacaaaaatacaaagtaaacagcagtaagtaatgatgtccatccctccatgctgtaatttagtttggctaaacctagaggcaaaaccggataaattaaacaaaatcatggcaactgaaagctttatcaggtatctttatctcacttaaaagatactaacaacgaaacattcacattcagaccattagactatatgcaaaactgttaagaagatccttacacaaagtaatcgtttggactaggcagcttgtatgtaaacatcaacttgtcatctactcctttaaattaagttaaaacagttgatgataaaaaacataacactgaacaaaggaattgtccatcaataaggagacagacacaggaacatatttctggtgatctaggtcaagttggaatttcataatgctgcgtagaatttcttattcataaactgaaacagaagggaaaaaaaatggcaaactccgtcaggttttcatctgatgaactagtgaacccccccccccccctctctctctctctctctctctctctctctctgtgtgtttaaagagcagtagtataaaattataatacccggtgcctctatatgcttttgcagctaccgctactctttgtctgctcggtcgcaatcactcatccatatcgatataaacacagtatagaagtgctttcaacatgttttttttttgcttagatctaatcgattatggggattccttatgcttccatttactgatagaagatagatagacgaggctgtaaaaatgttgatcctcctcgcgaaaaaaaaatgtttatccaacatagttcagagtacgtgaaatgcaaattctgaatataccccaaaaaaaagaaaagaaaaatccagggccgacataagacttcgatttgtgcaagactcaagaaggagaaatcctacacatattctgatatcaatttgcacaaatcttgctcaaagaaatgaatatgtgtacagaacagattccagaccttgtccttggaggaagaagcacaatcacatcagcatgaatgtcacactcccacttactccctccgtccaaagactcaatttctagctttttcgtgttcaacgtttgactatccgtcttatatgaattttttttttacgattattattttcattgttgttagatgataaaaaataataatattttatacgtgacttatctttttaatcttttttataatttttttaaataagacggacagtcaaatattgtacacggaaacctaggaattaagttattttggaacgaagggggatcaagacaagaggaacatgacagagagaggatcagggtgggtcaaaagataaaagggtaggaatgaatgagacaattggcatttttttgactttccatgcatcggatcgaattccagctacatgcagacgttgcttctccaaagtccattgcggaattgcaccgcccgattctccaaagtccaaactcaaacatctcactcctttcatctcttgtctcttccatcggcgatgtcgtctgattaagtttggagaagtattgttcagcctcatctcggttacagtgtgcctgtactgcatactagtgtcatttgtgcttgtaaaggaagtaatagtagtttgtacgatgatggctttacgtactggatatggattttttgtgtcccttgtttttttcttttcatgtaaaccatatatcactgcacaagtacatggttaaattcgatttctataaattgtaaccaaaataataaattaaactctaactaacatatgttatactctatatgaaggccaaatatggatgtgcatgtttgttgtgtgattatctcatattagtatatcttaatgtttttagaaaagatataagtatttaggtgacataaaagaaacgataaaagaaacgataagacatctccattgagtgataaaagaacactatcctctttttaacacaaacaaataaaatacatttcgacccatgtgttcaatggaatacaactaaatataattactagttaaattttctttgtgatttctctgagtatcagagggcttaaaaaaacgtgtaagggtgcgcgtgtcttgcatgcataccctcaggccattcacaatggcgttcagcctcaccaccaaaaaaacgaatattccttgcatatcatcaatctgcgcagcctcattagtaccgcggagccaactttggctatgggttcctcgtggtgatgacgttgtttaagtacgtttagtcaatccggatctgttaattggatatggtgagagcattagcagtgcgccgttcacaaatgccgaacctcaccagccccatagaaaaagaacaatataagctacacgtcttaaatgtacttaaacaacgtcatcaacgaatataatattgtgcgcatatatcatcacgcgaggcttccatctctctctactctccccagtttcctctaggactcccttcgtcccattttaagtgtaaccataattttcagcgctcaactttgatcgtctgtcttatttgaaaaaattttaaaaaaaacttaaaaacataagccatgagtaaagtatgattcatgttttatcatctcataacaacaaaaatactaattataaaaaaagacggacgataaaagttaggcacgaaaactcatggttgcatttaaaatgggacaaagggggtaccttctctctctccagtcttgtacgcggcagacaacttcgcggatgcttcggcgggttcggcctcacactcgactgcaagcaagactgccgactttcggacaaggtgtgaaaaaccgccggtaaccgcgcggttaccgcccgtaccgcgggggtacggttacccgtaccgcgcggtacggtttaataaaattcgtccaaattcaaaaatttaaaaaaaaagaaaaaaatcaaaaaaaaaatagtgaaggtagtgcttgatttatagtgttttatggtgaagaaatttctcaaaaaagagtaatatttattcaaatttgagagcaaaacggagaataaatttgaaaattggaaaaagaaaaaaaaatgggccggcccgttactgtgcaacccattacacatcgcgcggtaaccgcgccaaaccgcgtggttaccgcgtcaaaccgcgcggtttgcccgaatttttgaattcaaatttcgatttgtaaatttgtcgcggttttgcgcggttaccgcggttaccgccggtaaccgccgtaccgccgggtggcggtaaccgggcccccggcggtttttgaaaccctgctttcggacaatagttacgtttcaaaaaaatacttcggacaacagcttgcgaaaacgaaagctatcgagcacctacatagtacttaatttgccctggggctggggctaaggccagccaaaccttcatagcatcatcgtcctcctcctctacaaacaaacattctccgcaccagcgcaggtgatcgatcgatcgatcccaattccacctgatcgaatacctgatactagtgcagctacagctagagtacacacaacttcctcgatcgatcggacccttgtgttttcgtttcgcggattctgccgatgatgaccgggctgggcatggtggcggctgccgtcgcggccaccaccgtcttcaacgccgccgccaccgccgcaccaccgccggtgggggccgtgctgcttctttgtgccgcgttccacgcaggcatggcgctcattatcaacggcgttcgacgcggacggtgacgacgacgccgcccccctcgacggcgaccgagcgggtgcgctagtcaccatccgccgcgcggcgccgcccgtgactaggcctaagcgggagcctggctcctctgcattcacggtcagaatccatggggaaatttctcgtatctgaatattcctttggactctcacggtgaaagcagtggaagcaggcctctcacttaggcagatgctgttcttccagtgtttggaatcaaaccatcaagtggagttcttttggatcatctgtctaactgttgttgttgtctcagtttgaacataatggtagtgagacggatgatcttgaaatgattccactcgctggattgatcccaaacactagcagaacatggtctgcccaagtgtgagctgatggttcctttttttttctttgcgtgccttgttttttccccttgtttactttgtttggtgggttcagtgtctgtttgtttttattttctttctttacagagagaatgagaataactgtaaaatttgtctatcagggaaattaaataaatatgacatggtcaacgacaaaataattccatgtgtcggctcgcaactgatcagataagttgccatctgaaatgatctgtcagacaacgttggattgatccgaaacactagcacaacatgcgcaagtgtgcgctgatagtatttttctttttttccctctcctacttttggttttctttttgtcatggtgtgtgctttgtttggtgagttcactagtgtctattcggttttagtttatttcttcctttttttagagaggaaaagatttacatgaagtactttacaaggaaataaatgtgagctttattattttgtacgaaaaggacatagattttagatggtcaacgacaaaacagaaattccagttgtgttggcacaaactgacgtgccaactgccaagagcttccatctgaaataatctgaaggaagaacggactctttcctcgactttgtctgaaactctatggctgtgttagttcctttctaagttggaagtttgggttaaaattggtacgatgtgactgaaaagttatgtgtgtataacaggttgatgtgatggaaaaagttggaagtttagatccaaaatttgaaaggaagtaaacacagcttatgatagacagaaaagtgaatcttctggcaacgtaagacgaatggtcaaacgtatataaaaaattaacgacaacgacgtcgtgtattaaaaaattgaggttaattttctgattcttgaatctcgtctgcgtccaccacaaccgcttaattaccgtgtacaaattgaggttaattttcaaaattatctgtttgcagatattctaaacagttaaactagtactggggagaagaatttagcagagccaatcagcggttacgcagaaagatcgagaattttatatttttattcggtcacaggctccgacgtgtgattcctgagccgaccattttgttttcggaagtctgaactgtttggttattttacctgaacaactgtgtacttaataatatagggaaatagatctctaacgtattaccgttctcagattttaagtgacacagtatttagttccctttaaacttttaaaaatttcatcacatcaaatatttggacacatacatgaagtactaaatatgaacgaaaaaaaccaatagcacagtttgcatgtaaattgcgagacgaatcttttaagcctaattacaccataatttgacaatgttatgttacagtaaacatttactaatgatggattaattaggcttaataaatttatctcgcagtttataggcgaaatctgtaatttattttgttattagtctacgtttaatattttaaatacgtgtccgtatacttttttaaaaaattaggccacgaactaaacacggcctgagtcatatatcagccccacaacccatgggttcacatgacaacgacctaggttagaggtcagtaaggccaatatgcatgggagtataatagataatactagtgtgtttgcaaggatttttttttctttttggtcatgcttgttctgctctgtgctctcgatgctagttgagataataagggggtgtttagatccattggtaaattttttttcatcatcacaatgaatatttgaatacatagacggagtattaaatattgataaaaaaaaactaattacacagtttgcgtgtaaattgcgggacagatcttttaagcctaattgctccatgatctgacaatgttgtgctgcagtaaacatttgctaatgacggattaattaggcttaataaattcgtaccgttgttttcatgcggattatgttttttttattagtctatatttaatactttaaatgtgtatgcgtatatctgatgtgacccgataaattttttttgccggtggaaattaacacagcctaaattttgtttgatgcctacggccacatatagtggagaaggttttgtgtgaattgaattaattcctgtaaaattcgtgcaatccaaaagatccttggtaaaatttactagttcagtctatgaaaatctttaaaaaaaataatttctcccatccaacgaataaccatttgaagcgatgcgcccttaggtgaattgggcccatgagtaagaaagcatgaacaagtaaagtgaaggatgaccgtacgtttgacttagtcgaatcagtggataacggtgtttctttgtctcgacaaccacacacctcgtcatgtattacgtcacaacatctagtttctattttgttttatgatatatgacgtcatgaatttatcatttgttttgatgaacttatcttttttttctgacgtacggagtatatacatttccatggaatataattatttttcttgcttccaaagtaaccaaaggccgtcgtgttgtaaaaatatcggtacccaaattaagaaaagaactagaaaatgggcgcacctttggcgcaccaactaagagtaccctgtaaatatttatactttttttaggatgtataaatgttttagagttatttacaattagtttgatttcttagatacacacacacacacacacacacacacacacacacacacacacacacacacacacacatatatatatatatatatatatatatatatatatatatatatatatatgagatggagtaaaaataaaccgaagcgacaataatcaatgatatttctatttggaaaataaatctggagtatttttatttgggaaaaattctagaaatgtttatttctcaacaaacatattacacttggataaatgaaaactggcaaaaaaaaaatataagctcaaaataatatctcaaaagagacacggctttgccgcataatgggtcattggcgcgcctgcttagtttgcatatatgttcataaatatatggtgcaattaatgatgttttaattcctaatttttggtgttaccaatagtagaggtagtacttatgtgaagatttaaaacatgtccaaaatatatattattttaaatatcataggtctataaatatttttttctaagttaattgtctgagtttgtagaaaatgcaccagtatatataataataaataaataaaataaagacatatttcatgatgaatctaattaaactaatttggtgttacagattttttttttataaagccagccggtgttagagaagtttaactgaaagataaacttaaattacaatatgaacatatagagtcagtgaatttccgttgtattttagagaaaagaaacatgaaatgctaatattttttttgttttctatgcatattgtttaggccccatttatctttatgtttgtgtatttaatcttgtgttaaacatctattgctggacttcgtgactttctgattttaactgtagcataaaagtgaacacacttttaaaatatgcatgcggttgtcataaatgtatctaattaatcgatcagtgatagtcgcaattaacttaatgttatcggtagatatttctcttattgatgtgatatactccttaggtgattataagttatagcatattctaatatagcattaggttaggttggtgccattttagggagtacgaccgatcacctagtcggctagtcagttggtctaatctatactccttaaaaaaatacagaatttgtcatctagtgaatatgtctatcacacctactttcattgtaaattttataagttgccccttaaatttcttaatattaaaaagattaagtctaaatagatagtcacataaaaaattgatattatgtggtgtttgaatctgctgaagatgaagataaagatggagattaagtgtttcatgcaaaacgggtggtaataacgtgtgattaattgagttttaattattataaacttgaaaaatggattaatatgatattttagagcaactttcatatataaagttttcgcacgaaacacaccgtttaacagtttaaaaagtgtgctacgagtatctaaaattttatcctgagattccataagaaatgaacagggcctaagatgaatattccctatagcaaaaatatggttaacatattaatacattttttatctatagcaaaacacaaacatttagttaagtgttcgaagacccattatttttaacaattacttagaaattgcttttttttaaggatcttttctttcagtccatgtaacattggggttaccaatatttgttgagaatcttgggagaaacatctagttagaaataaatcacaccaatatgtagttctgctatatccagcccacatcaatctgctatatccgtttcaggatggaggacgatttatctagaaaatagagatcctatcttttgcctccaactctctctaaatagcaaattttacagttaggttctttgcaccatctctaccgttgattttaaatcagatggttgtgcgtgggtgatgaggaacataccctaaatttggagggacacatggcaacatggcagatttttagaggggtccaactaaatttataggttgccacgtggcttaatgggaagccagatcctacaccctgcaatcggttttagagattggatgccatgcgatgcgagcgtgccgtggggagtggggcgcgcgcggggggtggatggatatggatgcagcgtcgacgcgggtggtatgcgggcggtggcgtgcgcgggagggtggttgatctggtcgacgccaatgctgcagtttttctgcttggcacgtgggtgggggctcctgggccggcgacgcgtgcaaatcaacacacaaaacaccctgcagcgcttaaatgagcaggaaattattccctatgtaacataaaaaaccaatctagtattaaatatgacacatcttaatattataaatatagatatacatctgaacagatttatcgtattataatatgtcacattcaatactatatttgttttactacgagagaagggagaagagaaaaaggacgaaatagaaggaccctgcagccttgcgcgcccggccatctcctgcttagcgctaatggtagtgttaatgttgctagttagtgttaatgataatttttatatctaatctattatatactaaaagtcgattaatcttcctataaacgctcctaaacttatcatatggcgctcctacaaaagcaaaagcagatgccgtttatagggaaaaaaaattcccatcggtatgtgtttggaaaaaactaaaggtacgtttaggtactgttcacttaaaaaaacgacgtactttacatacgataaaaactataaatcaggaaaaagaaactgttcacttgaaaaaataacaaaaaagggctggcaattttcatttaaccgggaaaaaaacgcttctacaaacgctcctaaatcaccacgtggcattttataatctcatcgtcgattttcatttaaattggtgacccattattttaaactattagattagatatatttgcttatataagcatagatgccgtttatacgggaaaaaaaattcccatcggtacgtattcggaaaaaactaaaggtacgttacttaaaaaaacgacatatatatactttacgtccgataaaaactataaaacagaaaaaagaaactgttcacttgaaaaaataacaaaaaaaagctggcaattttcatttaaaatgatggacccattttttagattattagattatagtcaccgtcacatgatactcctacaaacgttcctacgccgtcacatagcactctaataaattagagaaaacattagaaattcttaaaaaaattcaattaaagcggtgaacccattattctaagtcattagattaaatctattaaaagattgcatcccacctaaccttccaccaaataaaaaaacggttttactatatttctgtcaccggaattctggctccatagcagtcagttttgtggccactggatacgctataagtttcgtgtcaagttaaatccattgtgctcataccatcgctgcccgctgttttgctgcgttcacacttacatgtatgtgactgctggggtagttatttatatatttacaaatttacacagtagttacaccccacttacatatgtattaggatgtaattttgggatttacatatgtaattttaggacttacatatgtaattttggtatttacattgtcaatacactaaaattacatatgtaatttagagacttataatgtaaatacatgtcgagtattttttataaaaaatatgacgccataaatataactactcccataaaaaaatagaagaagaagcagataaggatgagcgagggaaagagagagagcaaatagataagatctccagaacgacgcgactctctccctctcccgtgcggcttgccttggtttgtaggctacctttttaaaaaagtgactataatatattataggtgttggtttttttaactaaccggtatctataataaataataggtacgtataatattggtgttcatttttctctaataccgacacatataattgttcaaggtgtcgattatatatttggtcaacatgcgggagtgagaaaagcactataggtgtcggtttatctatttcagcacctatatactgacctttaggtgtcggtttatctatttcagcacctatatactgacctttaggtgtcggtttatctatttcagcacctatataccgatctttatgtgcttttctgtagtagtgcttcataattctcgaataaaaaaaatagacaacaagtaagaaattggtgtcaatggtttctgctaagtatacttgaggagactcgaaaccgggttgatgggtgcatcatgaatgctaatcaccactgccaccgtgctatgaccacatcttgaataaaaacgttattatgtttctatgtacaagaaaatatccattagcttcctgttaaacatatgtaaattatataggattacatataatattaactatatattaatttaaaaatattacatgaaaatatatttagctctatctttctcatccaaattatcttaataattttttaaataattaatagtagccactgtattcatttacgaaccttcaccactcatattttcttaacattaactatatttttattaaacagataccacatgaaaccaaaatttacattcttccatgtcattctcgtccaaatagtgttacaattagtaaaaaaaataaatttaacaatatatattattccatcatatattatccaacaaatattcataactaataagaagagaaatatcactcatgtattagcacatgcatgtatgaaggattactgctcgagctttttttcgtgtggttctcagtttctcaccacttaagtattagaccttttaagaggtagatgtaatcaatacaaacaatgtgattggataaagtgccaaaatttatctgaattaaatgttgtagcttaaagctaatagttagattgaaaaaattatccaagcaataccgatgaagaaaatttgtgaaaagatattacttttgaagtgtggcaattatcattcgattgatattctggccttataaattcttcaaatacatataatcatacatgcccgcgcgaatgcgcgggctaccttcctagttttcttaagaaatacataaataatttagtttaaagttacagaaaatagttgaaagtttcaaatcatgagttgaaagtttttaaactttttactaagatttggaaaactttcagctcagatttgaaaacattcctatcaagatttaaaacttttaattcagatttaaaaattttcaactcaataatttttttagaaaaaaactttcaacttagattttaaaacttttaattctgatttaaaaactctcaactcaagatttaaaacatctaactcatattaaaaaacattcatctcaaaattttaaaaatttaaattaaatttaaaaatttcaaactcaaaatttaaaagtttgactaaaattttaaaagctgagcttatggtcaaattgtccagctgacattctgtcaatctttttttcatttttgtttttcaagatagaatggaacatatcgaccccaaagtagaaaccacaccgccttctcctcaccccacccaattcgttttccagcgcattacgatctcagcgtcgcattcgtcgtcttctacctccatcacttgctagttcctactagcaaataattaattaatttttaattattataaatttttaaagtgaattatttaatatttttaagtaattttaatatagaaagttttagcatgaaatatacggtttaacagtttaaaaaacatgctaatgaaacaaagataaaatctctattttagttagataagaacggagccatatgtagatgttggaatccaaaattctcaacccaccaaaaattaatacttcctccgttctaaaatataacaatttatagcccttacaatttatcccaaaatatatttccaaccagtcacaaatctttagcatttaattttcttcgctaaccttcatttgtcaatcaattataatatcctacattaaattcttactacttctttattaatatatatattcaactctaaagattcttatatttgtggaaaaaaaattatatttgagatggaggcagtaacttaagtcggtagtcaatggtcataatagtacgtacgtactccttttggcatcttgcgatccatcttctgcaatcgtccgtgcgtgcgtgagcgtcgtcttggcccgccgcgccgcgcggagacggcacccgtacgaccacgagacgcgggttactctgccgaaaagcagagcatttgtgtgagcgacgagagcgacagttcataaccgacaggcttgccgccaccgagagcatggttaatagtatagtcaactattagctttaaattatttataaccaatgtaataggtaattcttataatagttgtttactatactattaaatacctagtcccacctctcatacacacattacgtcttggagtccatgctgcagctgattacagctgctcttctctcttttcttttatctttttaaaatatatttatagctggcttacattatactattgtacctgctctaaccgacaggctcggccgccaccgagagcgacagcccatagccgacaggtcccatgatcgagtccatgacagacaaccgagagcgacaggtccgctgcatgacaaccgccagcgcccatcggacagcggctcgatcgatccggcgtgcgtagcggccacgcgccccttttcaccctagaaaatctatataagtgcggggctctctccgttcagcttaagcgcaaactcgatcgcacgcctactccctactacgcctctccctctttgttccttctcccttcttgtgacctgtgtgaaaaaaaaaaaaaaacaagaagagaatttctgagactgacctcaccggaaatgcgcgcctcagtcgtcggcgccgtctgcgtggtctccgcggcaatcgccgccgcgccggagcttccgcaagatccgtcgtcgtgccaggcgtgcgcaatcatggccttgtgcgcggcgttccacggcggcgtggctctgctcatccacctcctccggcgaggcccgaggggcacccgcacctccggcgctactgcggcggccgtggcatcaccgccggcggcgagcagctagtcacctcgttcgtgactaggcttaagtaggacttggctcccctgcatccgaatgaccaatccatgggggtaaattttgcttttttttttttttttttgcctccatgaattcttcttaggttgttggggtgcagaggagccaaggcccacttaggcagacgctactccatcggtgtttgggatcaaatctaacaagtggtgttctttcgaattgtctgtctaactgacgttgcttctagtacttgatcttgatggcagtaagacggatgatttcgagataattccactagctggattgattccaaacacagacggagcactgtttgcccaagtgtgctcactcttataatcttgttttgccctaattgtttgggttctttttttttcccttttccttgagtcactctgctttgtccattgtctggtcagatccatatgttcttttataccatattcttctgttttgttctcctgtgagaggaaaacactggcataaacataagtgagatggccaacgagaaaacagcatcccgtttccgttaacaacaaaaccgaccatgcatgctggcaagtgaagacatagcagattgcaaacaggggcacccagatccagcactattacaattattaccattttccacctttggacctgacattccaattgcatcaggtaaagaaaaaataacaatcggaaaaaggaaccatgactatagtgtcttttttgaggtagaattgcacccaattatatgtaaattttagcatggcaaaaaggttctatctgtcgtcgacacttacacatcagccccaaggtaaatgcagtaaaacccatcatagcaaattcagaaaccgcaatagtaactcaatggcactaccattcacatctgtgttataatcctaaaaatgccgatacaataaataacattgtacgatacatcagaacacccagaggtgtacattttgtacattccatgacaaacgggtgaacgactagttctatacacatttggagaagaattgcagaaatattaagacatactatcatctgctagatgtctaatacagtaagccgaatgagcagtaaactctttccaacagtgtcctagattcctaggttagaagtaccatgagtatgtactttgtgaaaatcttcagcagcaagatgtcttgtacagcatgcagcctgcaaaattgttgacaggaacgtctaatgttagaacattacagagataaaaagagagcaattcgatgagctgagcagtatttgaatatagcagaatgattttattcgatccaacctagaagcaaagtcatgatccaagcatgtctacatacaacataagctaacagtatgcctcacatccatcagattacaacctatctatctaccactacattggtttgaactttgaagtacctacctactacgagatgatgctgtgacaaactttaattttgcattcctaaaagatgtttgtcgaattctttctcgagaagtaagaagcaaaagtaaagtacgaaccatgaagcaagcacatgcttatttaaacgaactcacataagtagctaaggaaaacaaacagaactcaggactgcagaatttaccattctatctaatccaatcctgggtacacacaagcgcctcaattgtcttgatgttcaaagtgctccattgcttatgaattactggaccctcactgctgaaggcggccttgcaatgaagagcagatgatggcattgccaagacatcctgtgccataactgaaagagttggatactttgtagaatgaatcatccaccagttcagaatatcaaaatcatctttccttggaacaaggccatcctcgagataattgtcaagctctgacaaccgttggctccttgattgtgcactaagatgctgatcccaatcctccaatgaatcactgtcaaatccatccatttcaacatcacgagcttcattgtttgacgtgtgaacacctttatccacagggccgcaatattcatgaaacagctccctgattatttcacgtacagcagctacatactttgctgcttcagcaccgaaagctcgtttaagacggaactcaataaaagtaattttgaatctgggatcaagaactataggtattgacagccataggtatgaattttcccaatattcatggaatgcttcctgcatctccctcaccatgctagcaacttcagtgtgatcagtagatgcttcttcttgcaaagttgttctaactttccataattcattgaagtacacatttgctgttgggcaaacaggaccagagattacttcaatagcacgataaaaagccctcagaatcttgcagatagactcaacgaccttatagtcttctgcaggtaacaactcttcagatggaaatgccttcttgcaatgcagaacaacttcaagcctgaagtaaattttgtgccaccattttgcgtcttcctggggacacttcaaacccatgtttgtaacagcttcaaaaagttgctgttgagttaacgatgagtacgcatgtgccagcataaatctttctagtatattatcaacaaggtgaagcattgattgcccttttgaaacaatgttgttaagcacgtcatccacacaggcaatattgtatagctcacctctaataggaagactatttttttgtatgagcatgtccttaagctttgtggtaccttcatggtttctaatttcactgacggatatcaagctaaaaagcttattatcaagattccaatcacttatagcttctgctatgacattatatggcccactttcagagtctaatacacaagcctccttataaagtatcattctttccaaatcagtaggcaacgaccaaaacacaccaaacttgattattttcctttgaagcctccattctgcatcaataaagtgcgctgtcaaacagatgtacttcacagtgggctcagctccatgaggagcccaaatgcttgctgataaggaaatccgtcgggatgaaagtgcagcaattttctccttaaggtcagccttttctttctgatataaaagagttgaatactcttccacatcaatgcttgatgccatgttaaacaacgggttgaggctttttgcaaatcttttcatttcttcatgttccacgattgacaagggatatccatgcaaaactatcattctaattagctcttgataagatgtttcctgatcaaatttactggtgcttacatctggagcagcatgagtagatgaggtattttgttctttggtcatgttgtctcgtgctggcaaagctagaatgtgctggctctggggagttttgtcaactgagctattaaccttgagaagtttgctagcatactctgcaatctgaactttaccgtttgtcaaggcaggtgaaagctcatcctgaaccccagatttaaaacttggtgcactggagggagaaaacggactcttatgatttattccagtttctcctcgtgccggacaagtctgagtatgccggttcaaatggcttctacctttatctgcactaagtcgcttgtggcaatggagacattcagcaccctggattctcccctcaacatatacaggcgtaaactcctcccacacctttgatctgaacctgctgttgtcactgtgacttgccaattttatatcatcaagtgaatctggatgaatttgatccaccggattaatatcattcatcactattatgtataaagcatggatagtttagtcagaatacacataaagatgaaagatatgcaacttggccgaaaaaaaaaaaaacaaaaggatgcttccaccataattacagccacagacagataaaataatatacagcagagaagtttaaaaattcccatggcattgacagaagaagaaaaatactagaaattcccacagggggaacatctaatcctaaaataaaccaagtaacttgcagcttttcaaccaccttggtagcagccattctactcttgctaaactaaatgggcaatcgtatcactcatcttgccagaaaaagagttattctatgagcaatgcagaccagcagggtgacggagatgaaaaaaatttaaggttttgaggtaaattagtaaattatttgtaacttatagcttactctgatgctcttagtattgtgacggtatagtttagatttaaaatttttaacacactattttttgcaaacaatgctcctggccagggttgctggtaaccaccagttaccagcagtttccagtaaggacctgaaccctgattaacatatctatataattccttatgtgatcttcttaatcatggaaaatcatcagctaaagcctagcccattctgtcagctcctctgataggggatcaaaatattaataaaatattgtcattgttttaagaaataacaaaatatataccacctaagtgggaatgccctataattcctatcattgatttaaccaacaagctaatatacagcacctaaaaggcaatgccctcaactattgtcattgttaaaatgtccctaatcattatcatcattgcctaaagtaggttaaagtttgaatgctttatacaagggtaccataataagttgatgatcatccaaaactctctcaacgactataaaacagtacaaaatttacacactgtcaaatcaactaatacaccgatgcagatgccaattaaactgaagatgatccccaagggaaacaaagcaagcataccatatgggaaaccagtatcatgtaactgagccagatccaagtcctctttcgcccggcaaattttctgatgccgccacaaatgactcgttccattggaatgtccatcagaacctttgcaactcatcagaatatggcagtagcggcattccgcgctttgaaccactccgtttacatagataggcttgtactcatcccacaccttggaccttttcttagttctcgctctgaaggcaacgtgagcttcatctgacgccacccctgacggcaactcgtcactgtcatgatcatccatgggatccataactgcctacaaagatacaccacaatcatattatttttacagtatgtggttaaacaaaacacaggaaaagtacaacaaagctaagataagatcatacgtaaatgattatgaagcatgcagcaagcttaacacaacaggcaacctcaactacagtctacagagagaagtcccaacaagagatgatacgactacgattttgtgcaaattagcagtgcttgcgagcttcaaccacaatttacaggggcaaggccacacgggagttcaactgaacatctggaccccaaatttttttcggaaacaaactgctcttaggccagtcacaatggctagtgtcattgcacggctacccaaaatattataccatcttctctcaaatgaaatcttttatgaaacaatccccacagtggaggggtttcactttgacgtttccaagactaagcaaagcatttaattgatacaagttgctgggatcatttgtacccaaaatccggcgcggcgcgggagaatgcggaggtcgcacggcggaggcggacgcaagagatccggtgaatgaaacgaatcggcctcaacgggggtttcactctgttaccgaggacttggaaacgacgctgacgagtttcaccaggatgaaactctttccttctctctcatccccatttcatgcaaataatcattttttattcagtcttacccctattaaatgtgcatgacacaccagtgaaacccccattgtgactggccttagttctgcaccgctcatcaacgaattggagcggaagagatgaatccaaatcctgacagatctacagtctacgccacacaggcacacaccgctcgcgaagcgctgtggaggagtaggaggatggaggagctacgagagaaagagcgaatacctccaattcgagccgaaccgagacggaggccggtggagcgaggccggccgcgtcgtcggggcccctccctccttccacctacctgctcgccggccgcgcgtggtcggtccggcaagtaaaggaaggccggtccaacgccgcgcacacaaagctcttcgccggcgggcggggtggcgcttgcgaggcggcgaggcggcggggagatggccggcggcgcgtccgccggaagcagaggagagagagggggatggagactggagagaagcggaggcgggttgagatcctctccagtgcttagcttcactgcaaattgagcggtcgcgctcatcaccgttggattgaaaatgaacggtgcagatcgcccaagatcactttgccgagctgctgtagcagtaattaggaaaacgcctgttagccaaagtctcttaacggttcatgaacttgacggatttcgatcaatctagagctgtgggtcaaaatgcgcgtctcgttcaaaatttgtcgaaattcattcgaaattatgtgttaaaattagttcgaaattagtggaaaaaaaaaacaaatctcactaggcaattgggattgtaaagccgggtctcaaccattcaaatttcaattccttttttctctaggaaattaaatttcattcccttttttttgcgaggaattcaacaattcggaggccgagttatacaaaaaggctaattacagtatattgagattgaaacaaactaggacagatattgagaagtatccattgtcatggattaataaggatctaaccgcattatgttttgttcatggtaatttgttatactccactatagcataaactgaagctccaaaaacctgcttgagcattccacttcagtcaacttgcatacatagctcatttctgcacaacagatcagcagcagttctaaaacgtatggagtgactgaacccagacaccattgattggagacaataaaccagtcccgagtaccgactgatgtaagatgaaatttaaaaatgctaagaacaattttgcggaaatcaactagaacatgcaaactgaaattatcgagagtaaccatgaaaacattatggagagaagtcataatgaagggctggcttttttattgcagtgaaccgttacttttcaagacatgataattgcaaactgttttgcaaactgttttctttgcttcacagggctagaataaactgtatcaccttcggaatgttcttatacccttacaactataccaaaagagagtgacaatattaacacaggctgcggagtgaatgcaattagacagaaatatgtgcgtacgattgctcgatgtctcgatgtatctgagaacgagactgtaaaagaactatatcaggtgcaagtaactcctatccacaactgttcaagttccttccactaagcccaagaatttgctagtctagttgatgtagtgatggacacctggtacagtaaacatagataatcagccaagtaaaagaagcaaagcaccgcaaggcagtctgatgatgcatatacgtagtgtaataacaagatgaagcaattggtgaacattgaacaatacatgaaaaagaaactttgttggcactacatgtgctgcaaagaataaaatagaggaaccagggaaatatattgcctactctttgctagcaatcagtccttctcggtcaataaatctacgcccaccaaaaggaacttctataacgatttttcatgaatctggggttaatgttataacacatgaattctagatacttccatccctccaggcaatttaatattgaagtactacagtaagcacaattaaaatcttcgatagttcaagactcaggataatgcttcaagatcaggacaacaagtagcttaatacagtttgtctacactttacaatgtcaggcaagttctcagtcaatcgccatcagcagtatgacaaatgcatctgttcaaaaactgtctttcatgaaaaactactagtttatgaattaataccacaaggcttaaggataactttgtaaagcatttggaaacccatgatacccacttaaaattccaattggcataaataaccgaaatgcatagcatccacattatttttaatgtgtagaaggatgagtgatcatcacctcaagttgaacaaatgcttattcacaaatgagaaacaaaattgcccatgctacacagtgcagttagaagccattctcaaacaagagtggtaccctatcaaataacaccaaaactgttttgcagaagtgataatgtaggcgtgtagcatggcatcaggcatacatggtgatgtcatgttccatgcattgtaattcctaccaccaaaactacagagtttgggaactcatgtgtcctacttccatcaagcagataaacacaacaatgaaatggcgagactatcctagaagggatgattacacacaaggtatgatctatagacaaaatcatcagtgccatgtatacagcagtactcaacagtcgtgcagaaacatcaatgcacaaaagatacagagtatcataatcaatccatgatttccatgtccagaaatgtttacctagtcagtgaacataggtcacagccagaactgcaaactaagctgccgtagctgggatgttgtagcggctgcgcagtccatcaatagctctgtctgccgacttcgccatctcagggatagtcaccttgcacactgaccatcaccggaaagttagagcacaacacatgaacacaatgcttaactgacttgagcaacatgtggatctgaactaaaaatcaagcgaacatagcaatgtatcttctccacgccgtaccacgagatgtagaagcctgcacctccgccacaaacttcttgtacgaggcctggggttcacaggaagcatcagaaattcagaatattaaccaaagtgcggtcaaattggatgcaaaccgtagagaacatagtgatctagggtaccttcactgcctcagcatgctcggagatcttgtcggccatcttcctgtgctccttctccgcctcatccgccagctgcaggcagctctgagtctgcatctgaagagagatcatacgcgaaatcacgacatcactcggtgcgatcggcgatcatcggaagggagcggagaagaagggtcaccttgaagcgcttggagatgcgggagtgggaggcctcgaggtcgcgggcggagtcgccgtggagcgcgtcgagccggcgcttgagggagtcgaggtgggacgcggcgaggatcctcaggtccgcgacggtggagacggaggcggaagcgggggaggcgtagggggagatgggggaggaggccggggcggcgagcggtgacctcggcttgggcttcaccaccggcgaggagggcgagaggaagctgaggtcgtcggccgcgtcgccggatgccggcgaagagccgccggagaggagggaggcggggctgggcttcgtcttgggcttgggcttgggcttggccctagccgtggccctcggcttgggcttggacgccgcggcggttgctctcgccttcctcatcgctggccgccgccgccgcctgcgcgcgccctgtgcgaaagggccaaaggggtagagagaagagaagaggagagggggtggttttgggatttgcttttttctttttttgaattttgaatgagaggcgtattgcggctctgcgggatggagacggctttctataaagggaaacgtacactttccgctttctcgcttaggatacgggaagtttaactgcacgagttcattggtttgtagggcttggagatcgtggggtccacatgccagctacttctgctctttgaatttgcgaaattttgatcattttcagctcaaagtcttgaagatccaactgaaagcttaggccatgtttagatcccaccccaaaacttttcaccatatcacatcgaacgtttaaacacatgtatgaagtattaaatataggctaaaaaataattaattgcatagattgcgactaatttgcgagacgaatcttttaaacctaattgctacatgatttgacaatatagtgatacagtaaacatttgttaatgacagattaattatgcttaatagattcgtctcgctgtctactgacggattctgtaattagtttttttattaatgcccaaacattccatgcgataccctatataatatccaatatgacacgccaaaactttacacccccatagatctaaacaaccccctcagagtctcaatcaagcgtttcaaggcaatgtcaggctgtcagcgacagaatagaggaagagaggaagagagaaaatggaaggggtgggcgtatcactgacaggtgggacccacatatcgtacgaacagcaatacccacaagcagcgtatgcccactcacacatgcaataagtagtgacagaatactcttcgaatattaagttatatgttacacagaacaacattatatggcacatatatatacaccaccagatggatctcttgataaaacagggagcaatggcagaattctcctacaagctggggtcaaatattcaacacaggctagcgactaagcctactacatttcgtctagcaaatcagagcatgacaaaactggagctgctgcgagccatggaaggacacaaatccgcagtacctcgcaccaaaatactcagcagcggtacacagctgttggagttgcatctaggcaaagatcacaggctactatacaatgtcattgtatcgcagagatcacgggtgcttccaatcaaaacctaaatagatacttcagatcatccacggtgagccgagtcgcgtggccacccgatttgtcttcgccaaaagcagagctaaccatggctctcttttcctcctgtaaagaagcggaaacatcattggacgagcatacccccaaattatcagggatgttggttgtgtcaagataattcatatctacatgagattatgcaatcaaaattgttgtcttaacccccatgatcgataaaaaaaaagtattaaatcaacctcggtaaagttgtttagttatcggtacacaactaacaccccctaaaataacaataacaagaatattacaacttgcactatcagctgccctgttcattttccaaccatcacattaaagttttgaaaagctgggcttgaatttcaagcacctacgacatattcaagtacaagcatcgaatgaacgctgacacgatttgagaatatcaatgctactagtataactcatccctcaaaaaaaaaaaaaaaaaaaaaagaggcgtatgttattgttatctaagtaggaaaaagacaagtttatgaaagcacagtgcaaatgaaagacaagctattacctgcagagctaaaatgcgatcttccaccgtatctttaatggttaaacgggagacagtaacaggacgagtctgaccaattctgtgtgctctatcaattgcctggtcctcagcataaggattccaccaaagatcaaggagaattacatggcaagcagcaaccatattgagaccaagattacctgctttcagtgacatgatcataaccctgacctgaggatacaaaaggattcctttcagaataactgctgaatgaatggctgaaagtaataagagaaacaaggtagtaaaaaagagagtggaaacagaaaatagggacctctgggtctgtgttaaaatctttcactgctttatctcttgaattgagggacattgttccatctagtctcctgtactgtatgagattgctattcaatgaaagctccagcaaatccagcatgccagtccactgggagaacacaatggctttcactggggccactcggctaggatttgattcgacggtatcactgtcggtaagggcataggtgttaatgatcgaattcagtatatcgattgccgcctgtatctttgaggatatgtaactagtttgactaatagaagatgactcgtcatctaatgatgaactccctgatgcatgagaactggatacaccagacatgcaaatccttaacgctcctgacgaaaatactgaatcggtacttaatgtgtttccacaattaggggagggacacatattctcatcagtagttatccgctcgtatatacattgatagcagaagacatggccacacatcgtcacgacggcatcctcaggtacatcctgccgtaaaagaagtccaaagattgcaaaagaagattgaattacaccagtaattagattgtccaaagatatagaaacaagaagggcaaggatatttgcaaaaacatatagcctgacagcttggcattgcggcattgtagctctggatgcataaccccaaggtgttttctcgttaaatatgaacagttgggctgattcaggttatcagatattctatcattgttatcatttaattagcatccactgcccctccacaatgcatattatgattttattccaaggacacgaaataacagaggatataggtaggacaaatttatgtttcagtctgactacacaatttttcatatgttgcatggaggttgtgcgcctatacatacacacacagccccagacaataacaacaataatactggtgattacgtgtattatcatttcaacataatggagagagaataggtcagattcaacataatggagagagattagattgcttacactgcatacagaacaaaactctccaacttccagctttgcaagcaaatttattatcatttctttaggaagttgctttgccatttctatagaaccatcgcctttatactctgactgatgccccttcacaagaagaggatgatcgcaggcctgcctaaggcgcaacagcattagaagaatgttggcatagttctgtttgagtgtaccagcagcagcgtatgcctgaaatggatcacaatatatcagcattcagaaactacacttgtgaaatctccagtaatcagaagggaacacaaattaacatccactttataacatttgatatgagacaatggttcaatggaagcatgaggaaactttgttggatcataacaacaatattctacacatacttgctccagcctccaggacaaaaggaaattcagtaatgttgaagatttaacatcacttctcctggtcacatcaatgtcattttggacatctacgtggtgttcaaaaatgcaaatttgaccactaacttttataatatttgta

SEQ ID NO: 21607 - DNA, 1439 bp, Oryza sativa
caacagcattagaagaatgttggcatagttctgtttgagtgtaccagcagcagcgtatgcctgaaatggatcacaatatatcagcattcagaaactacacttgtgaaatctccagttatcagaagggaacacaaattaacatccactttataacatttgatatgagacaatggttcaatggaagcatgaggaaactttgttggatcataacaacaatattctacacatacttgctccagcctccaggacaaaaggaaattcagtaatgttgaagatttaacatcacttctcctggtcacatcaatgtcattttggacatctacgtggtgttcaaaaatgcaaatttgaccactaacttttataatatttgtaaacctcaataaaattatgatattatgagaagtgccttcacatgacaaatctccatgggtgtctatcatgtatacaatccaaatataaattttcaaagttttgaaagtttagtcgatgcatgaccaaaatggcatttcatgactagaattcggaataccagatgcaacacaaatctacactatacggaggccgtccacagaaaagtttgactttaaaatttaaccaaccttgaactgttgccgcgagcgttcttccagcgtcaaatagaaagctcgctcctcttttgtaaaatctactttatccagattaattgtctttggaggtagctttatgattggctcaccatcaatcagagtttctacataaaacaaggtaacatgtgatcaacgacagataatttaatcaaaggaaaaactagagtaacatactagcattaatatgctattaaaaatcttgcaacaataatgtaaccatatcaaatttctttgaaaaagagaaaggaggtatagcatactgagtagaaacaagtagctgaggagtgaggacttgtagtaaaatggcaactggcaagcaattgtaatgcagtgtcctttatattgacgaaaaaaaaggaaatatcataactttccactatctgctcatcaattaaggtaaattgatcgaacctgtctacctaatgtttgtatggcatatatcaatttaatacaaagccaccacaatagcaaatacagaccctagtagatgtttaaccacatgcagagtgttaagcgtgtttctgtaatctgtagcaacaaagaatgctatgtgttgtggttgaaattgcttccttacaatgaaatatcctaagctagtatataggcaaaaaaggaacagcagaaaacatatggaataaaaaaagttttatcaccttttgtgcggcgcaggagaactatcctcaacacagtctgaagtttcttatacccatgaactgcatttctagcaatcgggtgctttatcattgtacaaaatgaattataagtagaatatggatcgtatttcaagaaatggaaatagctgtagagctcatc

SEQ ID NO: 21608 - DNA, 12499 bp, Oryza sativa
tattaccagcaaaaaattcttcaccattcttctgatcagtgtcatcatcggcattctgtttaggcacttcattggccacaattgtgtatgtagtgataacaacatcatattttgccaactcatttggatctttggtccttgagccaccatgatagaccaaaacagacaatttagcactttcaccaaccttgtcagtcaattcgttcgcccattgcttaagaacactagctgggcacaccactagagtacctgcagcaggccttgtcatggattgcatagtagatgatgtgcttgccttactcttcttcttacgttcaacatttctttcaaccgtcttatctggagcagtattcattaggctagcacatgtttcaacgtcaccagtaccagctgctgttgatgacgaaccagctcctagatccttcctgggttcatcattcttagtctgctcccccttattatccgcaacaggcgctgcctcatcgtcatcatcaaggtttagcgcttcagcttttaaacgatctgaatcaacagacataaacttagactgctggatcctctgtttctgtataagggcaattgtagacactgttttgccaagaccctgttaaaagaaaactgctcgactttaaggatggtaacacaataagaaattgatctttgtcaagaagttgtgaaatcagaagtaacctgatcatctgcaagaattccacctgcacaatgagagctattctccttcgaaaccatccaagccaatgccattttctttcaaaaagaaaaggtatgtaatgaacatggaatacactatcaatcataaagtaagccaataaataattaatattatgtgagaaatatttacctggtgcctaagcagaggtactgacagaacaccctcaggcagatcatcttcccttttatcctggataatattctgtataacatagtataaaaagaaatatcacaaagcagactcaaaataaagaccaacatatacctcaatcactaaagtacataacttctacctggaaaatgtatcctagactggataaaaacttgtcatggacaagataaacatacaaatgagaaatttatatgcctcattcaaaaaacaaaaatacaactttcatgattgcaatataattcaacaaaaaaaaatcaaaacaaaatatgaaacaggtttgaagtaaaattagaagtatgtataatcatcttcaaagaacttctatctttctacttgaagaatggagaataaatagtatgattttttcaaggacaaaacaggtcaaaaaaattgagggcagctatagtatgttcaaaggtcagaaaaccaaataatttgaggagcaaactgaggaacccaggagattgataatgagcaaatctaaacaaatttgcaaatttaaacaacttaacaccaaactagctatctgtggttctcttcacgtcacaagagtatccttttgattattgatgaactaggaaaaaaacattatggtgccaactgtttatattatctatcaaatcaactctccaatttgattcagaaaacgtagaagaaaaacaactcaatcatacaaaattgcctcaataactaggaacaaaggaacacatgcctgtagtgcttcctggtacaccgctctctcgtcagaatctataatcctattttccaggttcagacgaccttgcatatcaatgccattagcaaattcgctgtgattagcagaactattgcgaccaaaagatggaggaagaaccctatgtgaactggagcttccatatacatagacatcctctggcaaacacaaaaaggggaaacattagtttttcagagaaaacctggacagatttcaagcaactgtaagaatgaattacaatcatttgagactaggtatacaaaccattgtcactgtctgtgatgaccttcttgttgtcagtaccaaaagaacttcggctcggaaaccttgacgatgaaggctccccaattccattggcaacattttttcccatcctattttcagccaatctttgtgaatttccattggtaaaagatggtgggaatttgcgtgtctcacttgcaaccactggatgcatagcatttgttgtgcggccatttgaaaaggatgagggaagaatcctcttgccattatcattttcttccgatgcaaaaccattgtgcttcttgactacaatatcagttctgttggaagcaggagttgcccttgcagaatcatttggtgaccccctataagaacttgaatgcggataagctctgtcacctgaacctaacgcatgacgagcgttatcaacatgtctaccatttgtaaaagaaggtggcagagttctatattgaccatttatattttcagtaggcctagaagaagatgaagctagctcctggtccaaaccaccaactgaatcatctgagtcgaagtcaaaatctatatcactgtctgaactcaagtcaatatagttatcgttgttcatattgccagcaagcatgcgcacagcatctgtatagtcagaactccaattgtgcttagcagtacaaactgtgcataaacatgatcagatcacaatgtgccaactactagtttgaccccaaatatttccaaagcaaacccacttcctggtttatgcagatgattgggaagccaaacacacaaagcaaaccacagaggtcacaacagtagacggagttattagctatgctgacttaacctgcaaggtggatcaaataatggtgtagatgagtaaatattgaactgtgagaaaacactaaagaaaaaaaaaacagcaacgctaaacattttttaggaatttatttgcccttctcaaagtcgttatcaagcattatccatgaggggaaaaaaatactagcataggtaccaagtcatttcttccctaaaaattagtcatattaattaggaatggaagttagtaaccgcacagttcatacgaaagcagtattcacatggtacactcccgaccagttcaaatctaggaagcaatcacacatggataaactaaagcctaatctgatccagacagagagctacaccctacgaactggattgaattaatcaggtcatttcaaaaaaagaaaaacagaaatgcgcaacgggaccaaatctcgccgcgggacacccctaatcgacgggatcaaccaatctcccatcccaaccacacaccccaaacctcgctaacctcccagctatcccccataacccgatccaacaccgccaaaaattacacgcgaggaaaaaaaaaactcccacaccttcccccacacggcacgcccaaacaaacatcggggcctcaaacctcaaacccccccgaccaaccaaccaaccaaccaaccaaccccctcgaaaggagccgctacgtggggggggggaggagccatcatacgaggatacctcgatgaagccgtcgaatccgcggagatcgatcccggcggcgggaggacacgggcggcggcgagggaatcggcgggtccggagggatcctcccggattgggaggcggcgccggaggctgcggctgcggcggcggcggcggcggcggtgggggaggtcgccgccacggagtttcctgggagggggagggggagggggaggcgagacaggtggaggaggcgccccgagaagcgagcgagtgagagagagagagagagagcgcacgaggaggaggacgcggagcggggggtggctcggaggggggccgtgtcggatgttgtaaatgcgatgcgcctgcggtttgtttttctactgaatctactgctgtgtgagtagagtaggtgggtcaccttgtcagtgtcacagtggcaaaagaaggtgttcattttcttttcttttatttaagatgcaaaaggtgttcatggctgcccctctttaggttttgctattataccatctttaaaatgagttttgaaaaaaatatcaatctcaagcccgcgccggattttgtcattttctcattttcactaatttccgaaatctttttgtctctttttttggtgatcatacgaaatgtttttcgctcttcttcgacgagatgagtgctgccagcgtaaccgcctcgcctcacctcgttccatcttccaccaaacaccctcctcgccaagccctcctctccgccgcaccggagccctcccatcctcgtcgctgccggccaccacagccagtccagtccgcctgtgcgatgccgtcgacctagcctggtgtcagacggcatccgctacacggcaaacggtgatgacggtcgcatccgctggtaggggatgatctttgagggcgcttgtccaagtgctcaggccacggggggagcaagagggggtttgggttcctgatcgcatacggacctatgctagacatggagttgtagatggccataaggccaaggcccaacggcccaacccaagcacggcacggcccgatagttcggccatgcctgagccgagcccttggcacaatgggccggcccgacacgacacgatcaaagaaaatagtagagggatccaaatagacttaatcaactatagttggcaaggcccaaagagaagaggaatacaaaatagacttatttctagccatataagacatagcccaaagagttgaggaacgaaaaatagatttattctatggagaagcacgatgggctgttgtgcctttgggctgtcccggcacggccgcacggtccgagtcttattaggtcgtgcctaggccgtgtgtgtagtccatgggctggcacggcacggcccgacgtgtaggtcgggccaagccggcccgactgacctcagcctaggcatggtcgtgccaggctgggcgacccatttggccatctatacatggagtgcgtgcgccgacagcgcgctctccccgtcctgcagcacggctacgtcccccacgagctgtccagtgagccgctgccgctgggcatctacatgtcgaaggcaccatcgcctcgcacggtcagattcagagttgtcctcctgatgcaggggcccgccgtcgccgccgacacctagtgggaggtttcgcatctcgaggaggccgccactggttcaggtggatggccagctcaacccgaccaccctggcgccatgtacattggttcatcagtgactctatgcgtgacattccacatacttcatcaaattaggcaatttttgctacaggatatccaaattttgtgtaatttatttatatactaaaaacgtgtcacgacttaaaatatatctaaaaaactgataaaatatgctagaaaacactttcaactcaatcgtaaagataaatcccccctaggacaacatgcttcaaacgtggtgttagagtataaattaaaaattatgcaactttaaatttatcatcaccccaagtacatcattcatatacatcatatttcatcttctctccaatctcagctcaaaaacttttaactgtagaggcattctcgtttttctaaagaatttctttctccaattgaaccgaaagtatcctctagcaaattaccgtttttttagtgtcattttgccttgatagttttttcgatgtttactagcaaattacacatttttaaaatgtcctgtagcaaattttgccatctggtctagcaagataattgtgcatttataaaagttctctttatctacctatctggccaaatatctaaaacttaacattacatatcagacatttgtgaaacttatgcaattccagtttggctagggagagtggtgaatgatgcaataacagcatgcatgtgtatcaagcaagtaatttggacccagaaattgcactaagaaatcgccgaatcaaccagctaattaaaataaattgcgccggcacccacccagcttcttcttcccctccccttgcccatgagtgaagcagcacattatctaaataaaatgagtgaagcagcaacgattacgaacatagagaggaacttaaacctaccgtttgtcctggccgacgacatcagcagcgacgacggcctgctccgggcggcggcgcaggtagctgagataccttgtcccatccatggagacaaactttaacctcgagagaaaaaaaaacaaccgattttgtacggatttctggaggctgtgatcagcttaaggccatattttagttcgtgaaaagaaaattttttggtgtcacattggatgtttgaccggatgtcggaaggggttttcggacgtgaatgaaaaaactaatttcataactcgcctataaaccgcgagacgaatcttttgagcctaattaagctgtcattagcatatgtagagcacttatgactaattaggttcaaaagatttgtctcgcgatttttcatgcaaactgtccaattagtttttgtttttatctatatctaatacttcatgcatgtgtctaaaaatcagggccagcctttaggaggggcgagcggtgcggccgctctggcccccgactcagaggggccccacccccaccctgcaggcctgcgccgagcgtggcccaaaatgttacaggcaaagcatcaacatcgaacatatcacaaaccagaaaccgactcgtccgcgtcgctagtcagcgagattgtgccgccgcccacgtctcctctaagagcaggtacaatagcaggctataagccagctataaatatattttattattttataaagagataaaggaaaagagagaagagtagcgggctacagatatatagccagctgcagcacgacaggtgggactagatattaatattatagtaagtaactattgtatgaattacatatcgtggatcggacataagagtaaagttttgagaaattccattagcatttgatttgaccatgttatgtgcggacataagagtaaagttttgagaaattccattagcatttgatttgaccatgttatcacataaacaaactagtagcatgtgtgattgataggtataggagacatgccaattttggttctggattcagccctgctggactgcatcagctcctgctcccaagctgggattatggacagttgtttataagaatagattaaccattatgaatagggtttagaaaaagaagtattgtgtagaaacatcacaagcctctcagatttgtggggtgctagtggtactattcacccttggaagcaaaggcctaattaatcagctgccttgacgcccttcaccatagtcgatactgggtcagcatttacacgacattactcctcatggctccaaaaagagacattactcctcatggctccaaaagagttgcagcaggcagttcattcaaggaccagcttccagcagtcagcagagtgtacatatgggtgcattattgatttattgtccacccaaaaggagaaaagaggctcaaggaatcccattctgacattcatgtattaagccaccaacacacacaaaaaaaaatgtcatgaactgaacatgataggaaaaacagaaagcagctgctacccatttgcctgcacatctatcctaactgcacaagctcaaggtgaagcatatgttttctcctctcatgcgaaactttcacccagcattcattatcacagaccacttctgtatcactcctgcaaaaaactacttcctgaaacttttattaggtcaaacagctcgaaactgagcaacagaaatgcaacgtccacttcctacaatctgtaacatatcactggaatttaagattgctactgttttgcatttacacatgaatatccacattgcacattgggaggtgacaattctacgcaacgggaaaaggcgctacattaaatcaatgatggatctatcagttaataatggaacacatctctacaaggtaaggggaggagggggctgtacaaatggggaaggtgagagagactgttgttaccctgccatctaaaagctaaatccccatgattaggtaggaaaggtgtgagtaggaagaaaaaagaatggtgtctgactaaaatctccaaaggaaaaaaaccaataccctctgcctacaattccttggctagcctaggaagacgttggatcttgtcttgagccaatgcaccatctccttgtcaaggggggaattattcaatacggcatccatcattggagtaccaaagaatcttgggtcactcttgaaaacccatatccggtccttgggccatggcctttgtgcctggttctcctgtaataaaaccacgcagtttcattgagaaagatgggagtcagggaaagaaactgtaatatattgcatatatgaagagaaatactcaatccaacagaagatgatttaatattgtctagaacaaatattctcttttgttttccacactgaacgagttccaagaacaaaatttggaatattttagccacaatgacatataaaaggtaagcacttaccatgcgcgctaacatgaatctcacagttctgctgccatagactcgctcttgtgttggttttactgacttcacatagaaggaggatacatctggcaatgacatacaaccctttctagctcttgtcaatctagattcaggctccgcattctggctataccaataaatgagttgacctaagcaataattttctgggtatgtcttacagtactcctggaagcctggtcccagtttatctgcatatttgggacctaaatcaagaggactgataagaaccggtggagattttaccgtcttgtaatcctgcatgtggtgatccttgagtcagtcctttggtacagagaaaaatcacaaacatttgttgcaaaattaagaggaagttttcacttactcggactctgaaaaaacactttgtgtaagcatacatgtgaatcaaatcagcagcagcatcatgccgacacttgtatgtgcatgaaagagttctcagctcatcacgcaacctgaagaaaagggcggtcagattccagatacaggtgactggagggaagagtcagattaatggtcaaacaaaacaagaatatattctaaactcaccataaaagagaacttcggatttctccctcaatgtcctcggaaccagatggatcatgagcacgaattttggctttgaggtcagtaagtacatcttcctcaacatgaggttccattgactcaagaagttcatcaactaacgagccttcccctttccagatggcagaaactagacttctcccagttagcctcaccagtggaggaggagcattcttgggatccccaaatatgcatctcatgacatatcttacctgaacataacaatgatccataaaaatgcatcagaagagacttcttttgggttgttagtgcatagtgcatgttttttgttcacttatactgaataacttcaagctagggggcataaaatgcgcaccttgtcaagtgtatgagtcaaattctgtaatcttgaattcagaactccctcggcctgagtagtgatgacagaattagatcgattttatgtaaattacgttgcaacttgtagccgttcgaagacccacctgaacctcggcatcattcttctcggaatccatgtttatatctgtgaaaaactggcgcttctcgtccacattgtgtttaaagatctcatgaggaagtttctgtctctcaaagaatataaaccgcacctttgtttacaggaaaaatagccatgagggatcacgatactgattactgtatcaagaaaaaagaagctttaagaaaatggtaactacaattaccaggtgagcagtgtaagcaacaagccatccaggcaaaccagcaagcaaacaggtaccaagaccagctctccccaagtcaattaagtcttgttgagaaacagagtttgcttcacaagcctgtaacagaagactatgtcgatcgagcacaccatggaattccatcaagacctgttccaaatgatattagtagatgagaggaaatgatgcagtataaaattcagtgtatgacaatttgataaactgcaagtgtcagttcctaaattactgtaaacaagaatgaagtttaccttttcaaaagctccttccccagaaaaatttaaatagctgcccctgcatatttgacttccacagagacaaactgacgcttcgtgctcttctttactctggcataattagaatgtattcataagataaagcaatttacgttagaacttatacagaaactagaaatggcaatcacctcagtaacagagttgtaatcaaaagtgatttcctcgccttctgcaattggtcgaacagtgtaaattccaatctgataatgaccatccacagccgttactctggaaatatattttaataatcgtgagttattattacaggtataacatgtaatcttatgagtgcattttactaatttataaatttgactagcatggaaagtgggctttgtggaaaccaatatgggccagttctccttcaatcttaagagtccttcaatattaggtacaggtgtacagaaaatgcttaaactataaatgtgcagttcagtttttataaattgttagccatccattgattgctgcccccttccctgtttgttctcaatttctgaatttcactactggaacaacaaaaacaggccatcagggactttgttcagaaaaaaatacaacagcgcatggtgaaccaaatagaatgaagtagacatgcaggaagagtgaaatcgcattcccccactacagttcaaagcataggatggatccaccacagaatacaacaacaatgaagtcacaaaggcctttcaaaatatgaaaaagacaatagaaggtagttgcgtaaatgatagggccaagcatatatcacgtgcaaactgcaacaccacatatataaatttagttaacagagtaaaccccttccacaaatacagtccaaaagtacaggtcaacactaaaaaggtactccctctgtttcaaaacaaagggcatattttgtttcgttaggacgactttgaccaacaatcgctctattagaatatcatttgtgatacaaaagtataatcataagtacttctggatatgaatctaataaatttatgtgtcgtaaaacttatatcataatagagtaatcgttggccaaactcttgtcctaacgaaacaaaatgcacactatattttgaaacagaggaagtactataggaggagtgataaggcagtacacatacaccacacaaggtactaatctgaagattaagaagcttactttgcttcacagttagggttgcaggagtgacaaattctgctcgcatagttagccttatgcattgcatcaacgaaaaccaagtcatacccatcacggtctccctttttatcataacaaaggtaaaacgatcagttatatgtaccttgacctggaataacataagtcacatgcaaggtcacattaaaaaatttgagattgcactaatacctttggccgttctagcataatgttgtaaaactcaggagcttgatcgtcgctattgttttgtatatgcttaatgccatcttgtttttcataccatctccaagaagggtatacctgcagatattgcaatttcacaaatattataccattgttatatccctttgcatgtcatctaggaagatttgttgatcgtaaaaatcacatacctccccaaagaactcgatgacaaagtcgtctacaccaaatccacccgttttgttacaaacaactccaagaccctgaaagaaaatgcagagaaaaagttaaaaagactgaagttagttaagatggtatgcagggattagttatcacgaaatgcatgccttcctataggcgacatagttatattctgggtggttcctcatggcctttagcattccaaggcacatctttgaagtccgtctgtcaccactctcctctgcagacttttggatttcttcaattacaggtttaagggggtaaaccatgggagtatttccagaaccagtgaactgcctcacttgcttattcaaggtgttcagaagcaactgcagtgaaaaaaaaatagtacaagtgcaaagaattaggcctgcatgtaaactaaaaacgaaattaaaatggctattcaccaggacaaacctcttcaacaaaggtatgtttgtcagaggatggccaatcaagttcagtaggcatcatttcaagtaggagattatgtgtatatggatctattccatacacttcttgctcaagaacttcatccccaggtacttttctaggttgataatccttaacctctggtagttccaaattttcagtgccgttcttctgcgagagcagtttctctgaatagtcatcaggtaaagcgacccgcatctttctcagtacttcctcctcatctgctacaattaggtacttctcaataacctcatacttcctagtcactgggggaacaaggcttgcttttgtcatgcgagcaccccatccacgatcatccgtcaaagactcgcttgattcaaataacttcataccatttccctttaaatcccatgctcccgaatttacatcaagatcactctctgtatcagaaacagtagtttcact

SEQ ID NO: 21609 - DNA, 1355 bp, Oryza sativa
ctgtcccatctctatcagaaatcaaccttgggttctcaagtttctttgctagctggatgaaggccacgacaatctgtttcatatctcccaagtcacttcgacctttatatctgtaatggcatatcaaatgtcagatagtgcattatcacataaaattcaactactttgcaagccttcatttcatttagacccactttaccttaatgcatcttggcacatagaacggatgtcattcttgatataactaaagccatggcgagcatagtatccatttttcaacctaacttcaattttcgcaacctggaatagaaaataaagtaccgtgaactattattagggtcaaccaaaacatcaaggttcagaaaattgtattaaaggatttcgatagtacctttggaacaaaaaaatcaaatctactgctcttcatgatttcttttagtttgttgatgacaaactcttccatcttccggtagctattctcggccttccgctgcatcaaacgcctcatctgtgcatcccttgacaaaaccgcagacgactttctaatatcaagccactttgatcgtttatagaacccttgtccaaaggaaagggtggaactctctctatttgaaatatcagcaaaatagccatcaagctcatcagaaccacccatctgactggtcaagatccttccagctttggatgtgctgttgctcccatcatctatctgcttcaagcttctaattttctggtatgatgcatctggattcaaagagctcttaatccattttacatgctgaaatttgtttttaagatcccctagctgactgcaaccttgaatgtgcacatatgatatgtgcggaaaacgcttaagtacttccgcaagggcaagagaactaagatttgaacaccctgttaaaacaagtgttctaatattttgcatgtcataaccagcctgaaaggaagatacatgattttgagcccgaagttagaagatgacaaaggaaacatcttgaagttagaaagatgagcgaatataccatgatgtcgtggaaaacattatcagtgcactgagggcccaaagaagacaaatcaatgaatctacaaacactcctgtaatacttggctgcagtgttccaccagctacaggtagctgcagaagaaataagtgacttcacgtctgccctcagaaaatggaaaattcttgctaacacatgttcatttaataaaccccagctttcactttccgttctggaattcagagggctttctttaacatgagcagccccctcaaataagtcttcaaaacaacaatcatccttctgactggcaagaatgtcctcagacatatcagtatattcatcactttgatc

SEQ ID NO: 21610 - DNA, 1145 bp, Oryza sativa
tgccctggacgtgttcgagcgtgtagccgttgtccggcgtgacgccggcctgaaggaggccctcgcgcagcgcgcactgccaccgcggcacgtcggggcggaacacaagctcgcgctccacccacgggtacgacgcgttgacgaggcgggggtcccagccgacggcgcgcacgtagccgctgctggcgcgggtgtagaagccggcgttaagccagctgccgccgccgagcacgcgcgcccgggcgttcacgacgccgtcctcggagacgaaccgctgggccggggacctcggcgacgtgtcggccagcgcgtcggcgaagtggtactcgctggacacgttgcggttgccgtaggggaggccgccgcgctccaggaggagcacgcgcgaccgctccgacagcgtcgccgccagcgggcacccggccgtgccgccgccgacgacgatgtagttgtaatatgacaccagcggcgcgtcccgcgcgtgcctcgcgaaccgaaaattgtaccctttttgcgctgccacgacacacgcacgaccacattgtcaaagttctataaaaaaaacacaacacatgagcaacacgtacgtgatttctcatgtaccttcgggtgaagcggtgaggctaaggcagagggagccaagcacagtggctactagtaggagtaacaccactggtggcactgagccgtgcctatgaccaggcgccattttggcagagtaatcttgagatttgaagataaaggaggaggtgtggagttaatttatacatgacgagttgcgattcgattagatgaggagtagataccaattagggtgcagcagatgtcaaagatggacaccgaggaatacgggcaatggtggtcgaaatatttgagatcagcgtcgatcagagcctttgcatgcgttcccatcaagcaacgagttcaccaacgtggagactatttttctgcgtactctgcagagtacttactagttcctggactgggccaaatcactcaattattgggcccaaatctactattcctcgaaggctcgaaaggccgcagccatggcgtcgagctcaacgtcggcagcggccagcaaaaccctccgtggactgcttcccggaggagtccgacctccaccgccgctaacttcccttcgt

SEQ ID NO: 21611 - DNA, 940 bp, Oryza sativa
ttcaactttttcttcaactccattggcaactctaatggagctttctcttctttgcgtagtcctcgtcgaacggaatgcctttaaacaattacaagcatgaatagttgctctagaattaatccaccatgtggatctagagtaatcaacataatgagattcatttacaaatgtaataatgttctcacctttccttgccatgatcattttcaagaagtctggacaatctttcttgtaatgtcctgtcttcttgcagtggagacactgatctttctcaacagcgaactgttgttgctgaggtagatgctgagactgtttagcttttgaggtgggagacttgtggttctttttcttattatctgtaacatagttaattgaaccaccatttgactctttgtttctctcctcctcttgcacacagttagcgatgagcttttcaaagtttcatttctctggacttatgttgtagttgacaataaaattgtcaaactgctttggcaatgaggccataaccaaatggaccagaaagtcatctgttatgcccaaatccattggcttcaacttgaaagccatgttgctcatcctaagtatgtggtctctaacacctcctccatagtacctctctgtcacaagctgcttgatcagctgtgtagcataagtttttgaagagccagtaaactgactcttgattctttcaaggtactctgagacagcgtcacactctgggattgagcccaatatggtaggctcaatcgtgttctttaccacagccaaacatttcttgttagctaaggaccatttcttttgttcaatgtcatacgacatgacgagaggagcatctgttactgggttacttggcagatttcagagtagtccaagcccagagcactggaaattggtaaagaaagtcttgcgttatttgcaaggaacaaaatgcctcatg

SEQ ID NO: 21612 - DNA, 926 bp, Oryza sativa
  unsure (1)..(926): unsure at all n locations
tatctgatccaagggaaggaagagaggtggaaagtgttgctgtgtcaaatcgagattgtgtgggtgttcagtctaccgctcatgttcgacgctatcgaaaatcatgcattggatggatgcccgggcattgagaaggaaggacgctttcagaggcgaaaggccatggggagagagagcgtctgtgatccatggatctccgatcgggaaaccgtatccaagctccgtggctagtctgcgctctttggacttttcaaacttagcgaactgaaacatctgagttgcttaaggaaggaaaatcaaccgagaccccgttagtagcaacgagcgagagcggaacaagggttttcatcaaaagaaatccgaagcggtttcattcgatttgttgtggattggatgatggaaaaaccagcaagcagcaagcgtaggctgtgttgccgtagtgcgccctacggagttgtacaaagtcagcaaccgttttggggcgcaagcataggcaacacaggactgatgacggggtggggcgcgcagtgaactggttttctaaaaagattggaagatccggccaaagaaggtgatagccctgttcattcgttcccatggttcgatccttcccagtaaaacgcggcgtgttcgaatgatgatcgcttttacgcgagaaagggggaccaccctataagcttaagttannnnnnnnnnnnnnnnnnnnnnnnnnnnnnnnnnnnnnnnnnnnnnnnnnnnnnaatcggggagtgcaatagagaacctgagatccgatgcgaacaatcagtcgaaggagcggagcgcgggcgcactcactctaacggcgtacctttcgcatgatgggtcagcgaggaaatgggaacagcggcttaagccattaggtgtaggcgctttccagaggtggaagatttacgttcttcctattt

SEQ ID NO: 21613 - DNA, 7515 bp, Oryza sativa
  unsure (1)..(7515): unsure at all n locations
aggaataggtgtaatcagacctgcttttgacatatctatcctatccttatttgggtaccatatgcacctctttgggcttctattgaatcgagaaattggattgtacatctttttgattttgatacatataaggtgtcctacggataatgcaaatcgaagctatttgatgtctgactcaggcctatatgaccgatcgatcgaaatactccaagactccacctttgtcatatattccatatatcacattagatagatatcatattcatggaatacgattcactttcaagatatcacattagatagatatcatattcatggaatatgattcactttcaagaaatatagtgaaatcgtctttcccattctaaccaaggatatatgtatcaaaatcgctctaatacggtcccgaatatgcaacggatcggcgtttttatttgcatcgctcctattattactaaccaaggggaaaatagataatgagcatgaggtaacaattccatattgatccgaatcaatccgtatgctcccatctttaataggattcccgctaaaagcatacatgtactgtaatgcgcttccccatgggtatctggtaaccacgtatgtaggggtataatcggcaattgtatggaacaaaaatccatcttggctagctattcgggaggacttctccatcggatcagaacatgaattgaagggcatacttagtagatgcagatctaggtactcattcttcctcagatggggaatgggccaagccgatccgttgttggcactgaaagtgcatttgctagtttgaaagaagctgaatccgggtgggattcaaaatgattcttatgtttcgtagcatgcagcgcagactcacttggtaaatagccttccctaaaagaggcaaggtgctcacacatgaaattccctttcttcgtgcactcatttactagatagtcaggaaccttcttttgacttgaccagcttacttgtatagtatagtagtaggcctttgcttctgaacgaccttacgaatggatcaactagaaatgaatcggtgtcataaacgaatttagctaaccgtagtagtaaattgcgtgacaccaagcaatcgatcaaagccaactcaaaagaaagcccatcccttcatccaacgtgaaaatattctcaagaagaagccaaaagaaagagaggtgaaacagagtagagagaatcgggtgcttccagtgattagttatcagaaagcactgttttccagatcggattcgatcacagtcccataagcagtagggaccacgagtgagcatgagcctatttcgtgatcggctagttgctcaaaaaatcgtataaaaatcaagcaagaaaacgtatgcgctttagcaacaaagcgctcatcccttgttctttcgcgctagttgctcaatccgttgcttgcttctcttctgtcttggaaaagtgaggatttcctatctgatccaagggaaggaagagaggtggaaagtgttgctgtgtcaaatcgagattgtgtgggtgttcagtctaccgctcatgttcgacgctatcgaaaatcatgcattggatggatgcccgggcattgagaaggaaggacgctttcagaggcgaaaggccatggggagagagagcgtctgtgatccatggatctccgatcgggaaaccgtatccaagctccgtggctagtctgcgctctttggacttttcaaacttagcnnnnnnnnnnnnnnnnnnnnnnnnnnnnnnnnnnnnnnnnnnnnnnnnnnnnnnnnnnnnnnnnnnngagcggaacaagggttttcatcaaaagaaatccgaagcggtttcattcgatttgttgtggattggatgatggaaaaaccagcaagcagcaagcgtaggctgtgttgccgtagtgcgccctacggagttgtacaaagtcagcaaccgttttggggcgcaagcataggcaacacaggactgatgacggggtggggcgcgcagtgaactggttttctaaaaagattggaagatccggccaaagaaggtgatagccctgttcattcgttcccatggttcgatccttcccagtaaaacgcggcgtgttcgaatgatgatcgcttttacgcgagaaannnnnnnnnnnnnnnnnnnnnnnnnnnnnnnnnnnnnnnnnnnnnnnnnnnnnnnnnnnnnnnnnnnnnnnnnnnnnnnnnaatcggggagtgcaatagagaacctgagatccgatgcgaacaatcagtcgaaggagcggagcgcgggcgcactcactctaacggcgtacctttcgcatgatgggtcagcgaggaaatgggaacagcggcttaagccattaggtgtaggcgctttccagaggtggaagatttacgttcttcctatttnnnnnnnnnnnnnnnnnnnnnnnnnnnnnnnnnnnnnnnnnnnnnnnnnnnnnnnnnnnnnnnnnnnnnnnnnnnnnnnnnnnnnnnnnnnnnnnnnnnnnnnnnnnnnnnnnnnttagttcattaaagcaggaaaatgaaaatggaaaatgttttaatgtttgatgaccagcgtactacttgccacggtcctttgtttgaaagtcagtgagtgagcccatccgtattgtcttcatgccagaatgggaactaagagctgcggcttttgatcccgggaggagcagaatggctatgtgccttttgtccgtcctcacctgtacacttgtgtgattagactcccctactttcctgccagaatcggttgcctgaatacctttatcctcaccggaaaatagagtctacctttttcagttatcaaatcgactagggatagcctattgatgtgaagattaacttatagcatcagtacttttattaatcctcgaggggcgaatggcggatggtcggcaatgaaaaaaatagcacttcataggtgatccgagaatagctagagtgaaagttttcctaaagacgcaagagcttgatcgctaggcgggtcggtagaatctatggaccgaaggttccacgctacacttacgaaggacaaggctattcgaaatatgtaagtcggcgaagtcaaagagtccttttgaaggggttgtgcagaacacttacttttggtttatgagcaactgttatccgctgaggccccccatggtatgcggatattttccattatttggtcactaatgagctacctgcaggtttgtcaaaggctaaaagggaaaaggcgcgcagcggtgaagcccattactctgtatgggatgatccttacctttggtggcattgtgcggatcaggtgagaagaaagaacttccgataatgaaagaaggccttttagcaggcaactgatcaaaagctattcctcttagccctagtagccctagctatctaatgcatactttccaactggccctggcctataacggcaaatcactggcgcatgacttgaaattgagttagttagagagcattaattacatcacaaattccacctagggattcctctataaaaaagagtaatctttttctttatgtaactagagatgtagcgacgagccagcttggatgtgacgagcaagtatttataattacgcatgaaagctagtgtacagaaatatcccgggggaaaagaataagtatgcttcacctatctttcaaagggcatgccaggtaataagctagaaagcaagtagcccaggaggaaagcttctaaaaaagagttgtcagaaaagttagcccgatattgaatagttgcttggttaaaaacaaccaacactatacagagcatacagccggcatttgaaggaaactaaagaagcaagaagaaggacctttctggcgcttgtagtatggccctttcttcacatctaattggtctgggataggtgcttgacttaattacttccagcctgatagatggcgttcattttcttataagcacctctctattcaagatgcattcaacatgggcagcagattaagtgatttattattgtcccttcttctagaggaggtgatacatcatattgtgacagtccatattccatgctttgctggtgagaaagataaactacttaggatccccgacaaccatgacatcttctcaacgagatccgcttttgatgttatcagaaggccaacgggtgattccactctcctcgctagcgtcgatcggtattctattacgaaagagcctcttcttccccccaggaagatgggcataatcatattcatttcattttcaggcgagctctttgcctatcgactacgcttgccgtattgcttaacggcgtactctattccgcctacagacaagtcctatacttagcttccttatttgattattggtcttgttgttctcggaacttgtgcctaaggctctcactcgcgatactcaccgggcgatagatagtcacctgagccaagaaagtagatgaaattgagaatagaatgagaatgggctttcagctttcatagatctttcctctcaaaagaggtgttacctaatccactatgtcctttgtttaatactgcggtaacctggaatttcaaaccttttttctaccctcgccacttctttcgctgaccctatccacctcctttgcggaataccagatcaagagatgaattagcggatcacagggctaagtcgaagcatgccagaaccttctttagtagtgagccgtaccgactagctcctagcaagggcttcaagatcacagtaatgcttgccaaaactttccttgggtacgaatgtcatgttcaaagcaggtttctctagacaccttggaaaagatcactgacgagctcaatctcaaagtgtgaatgaaattatcagtttcatcctctttatgagcctgagatcatatgggtcaacaattctcatttcttagttatagaaagcccttctcaaggaagtgagccactcaatctgagccagcggattctcattcagctgtgccggtgcgcaaagcaagcacgcttagacaacgatgtccaatctttggtctgcccattaagggctgactccgctaggcaagaggactactactgggattattctattactaattgatgacctgggctcttctttctccactacagatattgactgacctgttgatagtatagcgggggcagtaaagaggaaaggaggaaaaagaagtagagttaggttctgttcttgtgtgtaagccctcggtcgattcgtctgctcattcgcagcgtatgattcttatccaattgcttcttctgaaaacgcggcgtcggttaatctttcttattctcccttcggggctcctcatgttgctactaatagaaacagttcggaccttgctcatacaatcctcgggactactattggttaatctttgtcctccctagggaaagtaaacaagacgagactttttgggaaagacagggttagcgccctttggttggcggaagcgagaatcatcttttgattttttgaagttcaatttctatcagaggacaatatgaatattataccatgttccattaaaacactcaaggggttatacgatatatcgggtgtagaagtaggccaacacttctattgacaaataggaggtttccaaattcatgcccaagtactcatcacttcttgggtcgtaattactatcttgctaggttcagttatcatagctgttcgtaatccacaaaccatcccgaccgacggtcagaatttcttcgaatatgtccttgagttcattccactaaaatacctttgaatagcgctgaagatatcattgctataaattgaaagaatagagtgagatttgtatttgaactagctaaggcatacttcactgaactcctgctttccagtctgcgcttcgcttcctctcggtcgagtaagattcccttagctttgatttgcttccatctttctaaactctgttgtctcggaaaagaaagtatcatgttgctcctcggaaaacgcgtatagtagtctcattggccaaagtaaagtcgatgggacgctccagtgtatgcgttactgtactgggaagctagcattttattttgtcatggcgcaaaagcagatatggtccggtattcccttgttccccgtattggttatgttctttattcctcgtctagcagaaactaatcgagctccgtctgatctccctgttccgcatggcatgaaaaaaccaatcaaatcttcgtttccttggaaaaaccgaggccagttgagatcagtctccctttctaggagcagagcttaaaaagatgggaaattccaatgaatttcgatcacaatcatgtggtaataatgggtttgaatcagagagactcgatctggaaactcctcaatgattataacgtgaactcgttgaagagaaggagacaagcagaaatagacgctttttttgaaccatttgagagggcgcagcgtatccgtttcaataactggcagaacggaatagagttgttagatggggctgaatggaggaacggcgatatagttatccctggaggcggcggaccagtaatttcaagccccttggatcaatttttcattgatccattatttggtcttgatatgggtaacttttatttatcattcacaaatgaatccttgtctatggcggtaactgtcgttttggtgccatctttatttggagttgttacgaaaaagggcgggggaaagtcagtgccaaatgcatggcaatccttggtagagcttatttatgatttcgtgctgaacctggtaaacgaacaaataggtggaaatgttaaacaaaagtttttccctcgcatctcggtcacttttactttttcgttatttcgtaatccccagggtatgataccctttagcttcacagtgacaagtcattttctcattactttggctctttcattttccatttttataggcattacgatcgttggatttcaaagacatgggcttcatttttttagcttcttattaccagcgggagtcccactgccattagcaccttttttagtactccttgagctaatctctcattgttttcgtgcattaagctcaggaatacgtttatttgctaatatgatggccggtcatagttcagtaaagattttaagtgggttcgcttggactatgctatttctgaataatattttctatttcataggagatcttggtcccttatttatagttctagcattaaccggtctggaattaggtgtagctatattacaagctcatgtttctacgatctcaatttgtatttacttgaatgatgctataaatctccatcaaaatgagtaatttcataattgaataaaaacgaggagccgaagattttagggggcgggagaaaaggtcaagtctaagcgacatatggcacgaaaaggaaatccaatttcggtaatccgaagcccaccttaccttaatccattttcttgaggatcttgcatttgttcgttctctgccgacctattgtttccatcactcctgttgcttcttcctttctctatccaacccgagctctatcgcccatggctgaactcttctctg

SEQ ID NO: 21614 - DNA, 5265 bp, Oryza sativa
gaaggaagtaaataacaacacttcagcgtttaggtctaccttcagtaaaccaatagttttgcagcattggaatttgagttggccaggtaaggtcctctaaaaagaaaagaagaaactacttagaatagataaatgccattggttttctcgtactatacgatctttttttgttttgttttttggccatgattgtgctgctcctgtgaaggctagtgggaaagctcaccgttcgttgtgatgagtgggggccttgtatctgtattcggatcagctccttaacagagtttcctgcttgaaccctggctgggagctgggagaggtgtcccactacaggtgcaaataaaccatttgaccttacaggggaaaggaaacaaaccactcaataatcggtagaaattcctcctactgaacagctttccttttctcgccttaactactacttcaaagcaaggcggaatatcacgggataggaatgaaagaacttcttactcaactttctagctatataaaaatagttagcaatatgaaacgagtaacttaagccctagtaaaaggctactctttgaatcccctctttaaggcatataaaattagtactcttcctgagctagcttaagcatatcttgagcgagtgagttgtatttccctccatcaagttctaagcgatcaaataaggtccttgctctcgagccaatgccaataccaatagagagggtctaaacgaaggattcaaaggaggttaccggttaagggcaaatgcaatctctaagccagttggagaagaaaggtaatcaaagaaagtttcagttggacttaccctgccaaccctaccctaatttcataccctgcggttttcgttcctctattgatatttcgttcctctccttacgtcgagcgacctggattattctgagcacttcgcacttctgaaaatcgtataaaaatgtgtggttccgaatgagataacgcgcaacggctttcgcgctagttgctcaaaaaatcgtataaaaataaagcaatcaaaaggtgaaggcagggcagtgggcgtgggactgtaaatcctttttcgttcgctgggcctgggccctttggactctaaatccaaacggagtgagtggttcgattccactttagaacgaaagcaaatgcaagtgaaacgagacgagaatcaaagatttttcagtgccgctaaaaccagatctggaaaagtgttcagtgcatcctaatctgaatctgcgaaacctttctattctaagacggctaagtcgagggcagacacaacaggtcccgaagaggttcgaaaaggcgtacatgagttcctcctacataaggggctcattggttgtcaaccaagtgagaggggtctaataaagctgaaggatgagtatagataccttcagccgagatcgcttgggaggcatagccgcctctaccaggagattctctcttatttcttaagaaagtatgaattgccatagaattcttcgaggcctgattcaagatctgaagtatgaattgaacattggttaaaaagaagagagagagatggcgatggcagtctctctctctcttctttttaagggatattattgacaggcaaaaaccgtttttgagaatgataatacttcatggtgtatgtagaactcaacatctcagtaatttgcttctcaatttcatctttaagggctggattatgccggtaattacttacctcacaagttacattaatttgcttaccgtcagtgtctcgactcttgactaccaaagcattataaatataaggtaacttgcccgggggaaaagtgacatccagcacgggtccaataatttgatcgatacgccctgtacttttttcttcaattgtagaaaccccgggacgagaagtagtaggattggttctcataattatcacataattttcaaaaaaaaggaatttatcgaaattttgatttttttcttgttgaataatgccaaatcaacaccaaaaaaatatccaaaaatccaaaagtcaaaaggaaatgaattagttaattcaataagagagaaaaggggaccagcacttgatttcgttgcccaaacgaatcccattcaatcgtttactcatggaatgagtccgtcggaaagttcaatcaatctttttttcatatacattttgccttttgtaaacgatttgtgcctactctactttcttatctaggacttcgatatacaaaatatatactactgtgaagcatagattgctgtcaacagagaattttcgtagtatttaggtatttccactcaaaataagaaaagggggtctattaagaacttaataaggattagaagttgatttggggttgcgctatatctattaaagagtatacaataaagatggatttggtgaatcaaatccatggtttaataacgaagcatgttaacttaccataacaacaactcaattcttatcgaattcctatagtagaattcctatagcatagaatgtacacagggtgtacccattatatatgaatgaaacatattatatgaatgaaacatattcattaacttaagcatgccccccattttctttaatgagttgatattaattgaatatcttttttttaagatttttgcaaaggtttcatttacgcctaatccatatcgagtagaccctgtcgttgtgagaattcttaattcatgagttgtagggagggacgtatgtcaccacaaacagaaactaaagcaagtgttggatttaaagctggtgttaaggattataaattgacttactacaccccggagtacgaaaccaaggacactgatatcttggcagcattccgagtaactcctcagccgggggttccgcccgaagaagcaggggctgcagtagctgccgaatcttctactggtacatggacaactgtttggactgatggacttaccagtcttgatcgttacaaaggccgatgctatcacatcgagcccgttgttggggaggataatcaatatatcgcttatgtagcttatccattagacctatttgaagagggttctgttactaacatgtttacttccattgtgggtaacgtatttggtttcaaagccctacgcgctctacgtctggaggatctgcgaattccccctacttattcaaaaactttccaaggtccgcctcatggtatccaagttgaaagggataagttgaacaaatacggtcgtcctttattgggatgtactattaaaccaaaattgggattatctgcaaaaaattatggtagagcatgttatgattccataaatctacgcagttgcccaagaattaactattcttcttaatcaatgatttcttatatagagagaacggccctcacaaattgcaaatactaatttgttaagaatcaatcgaattgaagtcatagtgtcatcgttggctggaatcgatatattcgcgagatctgggtcacaatttgtatcggctaaagaaatagtaggaatccccaaaatggcacattcccgaagagctatatactctttttgctgatcgaggacgatcacaatgtcaggcaacctcgtcatatatttgatcccgccgagatatctttgcaaggtagataattttctcttcaagattgccacatctctttttgggagatggtggaatttttccatcttttcttctgttcttaagtctctaaattgagaaagtctagttttagtaatcgaccaattcgttaacataccactgaaccactttttattaacataatgacaacgagcccttattgcagctgatgctactaaatccgctgctctttttttggtaccaacaattaagaagctttttccctgacttgctgcatcaaaaactaaatcacaagcttctgataaaaaacgggtggttctagcgagatttgtaatatgagtacctttacgctttgccgagatgtaaggggccattttaggattccatttcttaataccatgaccaaaatgaactcccgcttctatcatctctttcaaattgatgttccaatatcttcttgtcattttttccacacttccttttgattttttcttttttttcatcctacctttccattacgaaatttctttcttttcgaagattaagaaagagccgaaatagcttgaaataaataataattgttccgatggaaccttctacatggtataagcataaccttaatgaattaactaaacttctttttaaattaaaataaaaatagaaaatctaacctcttagcgttctaaggtcaaaaatctagtttaaagtaaaaaatctgctttatgtatccttaaatcatataaatggggtaaatggtgattctgatgtctcatagaaattgtttgttacgtcagaatcagaagaaactaattctgtatggagaaacaaaatatctctcatttccgacgcaaatagttttttttttttgaatttcgaaataaaggttcttgtcttgtgggtaacggtgcacaaatttttggaatccggtaccaacaggtataatcccccccagaactacgttttctttcaggcctttcaaccaatcaatacgacctcgtaaggcagcttttgctaaaactcgagcagtttcttgaaaacttgcttcagatatgaaactttgggtattcagggaaacccttgttattcccaataagattgcccgataatagatcgattcatccaaagcccgccctgctcgctctgctcgcaatagtccaattaattccccaggtgaaaaaacattagacattccatcttcggaaacccgcacttttgatgttacttggcgtataataatctctatatgtctattatggatctgtaccccttgggatcgataaaccttttggatcttattaaccaaagagatacgactttgggctatggttaactcagctccaatcaagaatccccaaggacccccaagaattcttggtatacgctcattccaatcctcaattctcctttcgagattcggcgatagtgaatcaattgaacgcgcttcgaagatttgttctacttttggaagaccttgcgttatgtcactagatctcgctttttcgtatataaacgtaactaacctatcccctttgtaaaggatttctccataatgaccatgaacagttgctcctgtagtggccaaataaggcttagctgctcttataacaaaggaatctatatttacaatgaaaatttgacctgatttttttatgtgcgatttaaatagacatacattttcgcaaataaattgtccaagtgat

SEQ ID NO: 21615 - DNA, 1295 bp, Oryza sativa
aatagttgaggatcgaactctatctcaaaagaaaaatcgatgttttactaccagccacaagctttatgttcggcgcagtactaatactggaacttatgagcaagaattgctctatcaatcaccatctactttagacatatcttctgaaacttttttcaaatccaaaagtccagtatcttcctacaaattagtgaattaggaggagctctttgtgccgaaaaagaaagagcagggcaatatttcaaacttgcattcgaactgcgaaatatttatacaaaggaggagagatcaagataatgcagcagggttggttatctaattggctagtcaaacatgaggtggttcatagatctttgggcttcgatcatcgaggaatagagactttgcaaataaaagcagaggattgggattccattgctgtcattttatatgtatatggttacaattatttacgttcccaatgtgcttatgacgttgcacccggtggatctttagctagcgtgtatcatcttacgagaatacagtatggtatagataacccagaagaagtatgcataaaagtctttgcccaaaaggataatcctagaatcccatctgtcttctggatttggagaagttccgattttcaagaacgcgaatcttttgatatggtgggaatctcttatgataatcatccacgccttaaacgtatcctaatgcctgaaagttggataggctggcccttacgtaaggactatataacccccaatttctatgaaatacaagatgctcattgaatgataagaaattcatgctcacttatacaacacaactccagattttatgcaagtcaaggaatatttttacgctctgttcctagatgaaacagaatacctattacattctaattaattccaattatacaaaaggttcagatagactaagcaaaaaagggcttcatttcgttggaaaatcacatattcatttccttcgtatgaacagaaaaatatgatgactcaaagaagttccctaccacgaactttgtaccgcgtgcattacttagaacaactaggaaagtaagataagataagcaagaataaaaaaatatttgtcggaatagcggaatagaaaattaagaaatgcaaaaatgcagaaaaagaagtgcctctatttagagatttatctacttagatgaaaaaatcatactctatctatattattaacgaatatgtatcccaacccatctcgaggtatttgtatcaatacctattcggaagatcccttttttctgtgccaggaaccagatttgaactggt

SEQ ID NO: 21616 - DNA, 1724 bp, Oryza sativa
gcgttccttttttagagtattcaaaatcatactataacgcttgatattcattctttttttttgctaatcagaattagcaatttcatttgctatgattctatgttctccttagtgaaatattaatcattaaattattagcaaataacaaaaaaaacaaaatatctcaaaaaatgtctataatgatggactgaaaatacaagaaattcgcatgttctctttattatgttttcgtatatatattatttattcttttccatgtattagattattcgtccgagccatatcaaattaaaaatatctaaaatcaaattcaatatagaaattggaatagattctattagaaaaatagatttgcgaattagagaaaaaagaaagttcaaaaaaatctatctaactttattttatgaagttctagtatttttttctaagtagaacttccaatttcgaactagttaatagctaagattaataattaagatctgacattttacggatttcctatactatacatatttctatttgttacactatttctgttatgtaagcccacttagctcagaggttagagcatcgcatttgtaatgcgagggtcatcggttcaaatccgatagtcggcttttttctctatcaatgttccatgaacaaaaatacctctttttctccgaattaaatggagaagccaggatctattatgtcgttctaccctacaattttgctagatacaaaacaataaaataaataatatatatacaaattttttgtggtacttttagtagattttactctgtttatcctttactttaattcagttttaatttcgatgtattctgtaatgtaaatacaatgaaattaattgtgtaaatgaaatttcaataaaaaaaggagtcttcatgtcccgttatcgaggacctcgttttaaaaaaatacgccgtctgggagctttaccaggactcactagaaaaacacctaaatccggaagtaatctgaaaaagcttaacatggtggttaaccgtattatgaaagacggaaaaaaaatcattggcttatcaaattctctatcgagccgtgaaaaagattcaacaaaagacagaaacaaatccactattggttttacgtcaagcaatacgtagagtaactcccaatataggagtaaaaacaagacgtaataaaaaaggatcgacgcggaaagttccgattgaaataggatctaaacaaggaagagcacttgccattcgttggttattagaagcatcccaaaagcgtccgggtcgaaatatggctttcaaattaagttccgaattagtagatgctgccaaagggggtgggggtgccatacgcaaaaaggaagcgactcatagaatggcagaggcaaatagagctcttgcacattttcgttaatccatgaacagaatctaggtatgtagacacatggatccatacatctcgatcggaaaagaatcaatagaaggagaatcggacgatatctttctcgaaacaaacaaaaaggaaaagaaagagaaaacagaaatcatgatcaactaagccctctcgggggcttgcttaagaataagaaagaggaatcttatggaaatagcatggaataaggtttgatcctattcatggggattccgtaaatatcccattccaaaaatcgaaacaatcgggactttttggagattggatgcagttactaattcatgatctggcatgtacagaatgaaaac

SEQ ID NO: 21617 - DNA, 10801 bp, Oryza sativa
  unsure (1)..(10801): unsure at all n locations
gctcctacggaaccaaggtcgaaaggattgaaaaagtcagtcattctcaaccactgatgaaggattcctcgaaaagttaaggattagtagttctttttcgaaatcgatttcgaaaaagaatggattcggtcttatacatacgcgaggaaggtaatcaaaaaagaaagaagacaagttcttctttcttttatcacttaggagccgtgcgagatgaaagtctcatgcacggttttgcatgagagaaagaagcgaggaatcctcttttcgactctgactcccccactccagtcgttgcttttctttctgttacttcgaaagttgctgcttcagcttcagccacgcgaattctcgatattcctttttatttctcatcaaacgaatggcatcttcttctggaaatcctagctattcttagcatgatattggggaatctccttgctattactcaaacaagcatgaaacgtatgcttgcatattcgtccatagggcaaatcggatagcattaatagttgagtctgaaatgaattttctcaatgtatttcatttacacaaaattacttaacattaaagacactgttttacctactccagctcccccaaatagtccgatttttcctccacgccgataaggagctaaaagatcgaccaccttaataccagtttcaaagatggataatttcgtatctaactcgataaaggcgggcgcggatctatgaatagggaatgttgcactagtatctacaggacccaaattgtcaacaggctccccaagaacgttgaaaattcgtccaagagtagctccaccgacaggaacactgagaggagctcccgtgtcaatcacttccattcctctcatcaacccatctgtagcactcatagctacagctctaactcgattatttcctaattggatattggctaaaagacaatcagatagattttctcttcagcaggcatttccatataggacttgttataataaaacaagcaggttatagaaaaaaactcttttttttattatttatcaacaaagcaaaaaggggtcttatcaaaccaacccaccccataaaattggaaagaaagataaagtaagtggacctgactccttgaatgaggcctctatccgctattctgatatataaattcgatgtagatgaaattgtataagtggatttttttgtatttccttagacttagaccacgcaaggcaagaatttctcgctatttactatttcatattcttgttactagatgttctataggaataagaagaaatcgcaacccctttccgctacacataaaaatggatttcgaaagtcaatttttcttttcaatatctttagtttttttcagaatcctatttttgttcttatacccatgcaatagagagcgagtgggaaaagagaggttactttttttcatttttcccttaaaaaataggctttcttggaaataggaatcatggaataatcctgaattccaatgtttatttctatagtataagaaaaactaattgaatcaaattcatggatttaccacgacctcggctgtgaccccatagataaaaatgcaaaatttctatcttcgagaccattgaaaaaaggcattgaacgagaaaaatcgtccacagataatctatcgtatgccttggaagtgatataaggtgctcggaaatggttgaagtaattgaataggaggatcactatgactatagcccttggtagagttactaaagaagaaaatgatttatttgatattatggacgactggttacgaagggaccgttttgtttttgtaggatggtttggcctaatgctttttccttgtgcttatttcgctttaggaggttggtttacagggacaacttttgtaacttcttggtatacccatggattggcgagttcctatttggaaggttgcaatttcttaaccgcagcagtttccacccctgccaatagtttagcacactctttgttgctactatggggcccggaagcacaaggggattttactcgttggtgtcaattaggtggtctgtggacttttgttgctctccatggggcttttgcactaataggtttcatgttacgtcaatttgaacttgctcggtctgttcaattgcggccttataatgcaatttcattctctggcccaatcgctgtttttgtttccgtattcctgatttatccactggggcaatccggttggttctttgcgccgagttttggcgtagcagcgatatttcgattcatcctcttcttccaaggatttcataattggacgttgaacccatttcatatgatgggagttgccggagtattaggcgcggctctgctatgcgctattcatggggcaaccgtggaaaacactctatttgaggacggtgatggtgcaaataccttccgcgcttttaacccaactcaagctgaagaaacttattcaatggtcaccgctaatcgcttttggtcccaaatctttggtgttgctttttccaataaacgttggttacatttctttatgctatttgtaccggtcaccggtttatggatgagtgctattggcgtagtcggcctggctctgaacctacgtgcctatgacttcgtttcccaggaaatccgtgcagcggaagatcctgaatttgagactttctacaccaaaaatattcttttaaacgagggtattcgtgcgtggatggcagctcaggatcagcctcatgaaaatcttatattccctgaggaggttctaccacgtggaaacgctctttaatggaacttttgttttagctggtcgtgaccaagaaaccaccggttttgcttggtgggccgggaatgccagacttatcaatttgtcgggtaaactacttggagctcacgtagcccatgcaggattaatcgtattctgggccggagcaatgaacctatttgaagtggcccatttcgtaccagaaaaacccatgtatgaacaagggttgattttacttccgcacttagctactctaggttggggagtagggcccggaggagaagttctagatacttttccgaactttgtatctggagtacttcatctaatttcctccgcagtcttaggcttcgggggcatttatcacgcgcttctgggaccggagactcttgaagaatcttttccattctttggttatgtgtggaaagataganataaaatgactacaattttgggtattcacctaattttgttaggtataggtgcttttcttctagtactcaaagctctttattttggcggtatatatgatacctgggctcctgggggaggagatgtaagaaaaattaccaatttgacccttagccccggtgttatatttggttatttactaaaatccccttttgggggagagggttggattgttagtgtggatgatttagaagatataattgggggacatgtatggttgggtttcatttgtgtatttggcggaatttggcatatcttaaccaaacccttcgcatgggctcgccgtgcatttgtatggtctggagaagcttacttgtcttatagtttaggcgctttatctgtctttggttttatcgcttgttgttttgtctggttcaataatacagcttatccgagtgagtgagttttatggacctactgggccagaagcttctcaagctcaagcatttacttttctagttagagatcagcgtcttggagctaatgtgggatctgcccaaggacccacaggtttaggtaaatatctaatgcgttccccaacgggagaggttatttttggaggggaaactatgcgtttttgggaccttcgtgctccatggttagaacctctaaggggccccaacggtttggacttgagtaggttgaaaaaagacatacaaccttggcaagaacgacgttcggcagaatatatgacccatgctcctttaggctctttaaattctgtgggtggcgtagctaccgagatcaatgcagttaattatgtttctcctagaagttggttagcgacttcccattttgttctaggattcttcttttttgtgggccatttgtggcatgcaggaagagcccgggctgctgcagcaggatttgaaaagggaatcgatcgtgatttggagcctgttctttacatgacccctcttaactaagattttcttatttatacctgttctactgtttttttctgttctggctcggttattctatctagccgagccattcattcctttctatgaaagaaagataaggggacagaacaaaaaaaacaaataaagaaacaaacgtattcaatacgcaaaagaaaagagagaggaaagcaaaaggagagagagggattcgaaccctcgatagttcctagaactatannnnnnnnnnnnnnnnnnnnnnnnnnnnnnnnnnnnntctctccacagcctaatccttattttattcctacaaatagaacatagccatacgaaatgactcactaacctctagaaacatctcaaatacaaatcccttttcgatatatttctgtatactgtatccatgtatacaggatccgctatatccgcttgtgaaataaagcataaaaccccctcaaccccatatccaaataaaaaaagtggtgagtaataagttttaaagagaagaatcaatggattcatgattaaacccctcctacttcttgtattttattacaattttgattaagtgagggatcaaatataatatgtagtcaactttatttgatggtaacttggaggattagaaatatgactattgctttccaattagctgtttttgcattaattgtgacttcctcagtcttagtcattagtgtaccccttgtatttgcttctcctgatggttggtcaaacaataaaaacgttgtattttccggtacatcattatggattggactggtctttctggtagctattctaaattctctcatttcttaaatgtgtttagtatttagtagcccgatacaaaataaaaaagggccgtttattcggattgtgagacgcattaaaatgcaatttgcgccccgaattgattgacagacaattaaattaataaaaagaaaactcaaatagaaaatgaaacggtcgacccagacatagacggtcgacccaggcggatataccctataaaatataggacgtagcgagcgtagttcaatggtaaaacatctccttgccaaggagaagatacgggttcgattcccgccgctcgccagcttaatttagtaaggtactatgataaaaaatttagtctacttttattaaagtaataggtgttagtctagtaccgtacccctttactatcttagccccctttgcaccccactcaaaaaaagagcactacagcggcgggaatcgaactcggcaacagggttccctaaaccggggattcaccgaaacaaacaaccagcaaacagcttttaaagggaagggagatagactgtgcctttctttcatttattttttcttttctgcaaggtagggggccttgagagttcctcttgtggtagcaagttacttcgcaacctgctcaatttggccttatagggtcgggaactaatgaataaaaagggttggataccgcccaaccacccagccctctaccatatctagacaaatagaatagtccttttatacagactgctaagtgcggagacgggaatcgaacccgtgacctcaaggttatgagcctcgtgagctaccaaactgctctactccgctctggagcgctggaaaccggtggacgaaaaaggttgaatacaggcctctaccatgtctagacaaatagaatagttattttatacagaannnnnnnnnnnnnnnnnnnnnnnnnnnnnnnnnnnnnnnnnnnnnnnaggggttatagtcgacgttggttgattattattaacgtctctaattcaaaaccgaacatgaaattttgatttcattcggctcctttatgggtattctcaccacttaacatctaagtcagcttttttgtctgaatggaaccaaggctctctgctttctagatgatccctaaagagtaggagatagaaatttgcctaaatctatctaatctaattacttcgttccctaatttcatttaagagatcctgagaaaagaattgggtttccaccgagctgaaacaatatgctgatggttctagtaaaccaaaactaccgttttttagctatttggcttccatttccttttttaacaaaagaagatttagttacgattggaaataaatttttttgtatctttatccatagatcctttactcatattttaaaaattggaatccttaatccaatgcaaaattatgcttcgcgactctgtactcataatccaaatcctatttgttttttggatgcaatttcaattagtctttgggtacaaatcgcgaaaatgcatattcttcctcaatatgctattgagagaaaaaggagtaaatcctttctaagaactaaagttttcatcggaatataaaaaaccttaaggacgccttaagtatatcatttcaaattcagttattaatagaacgaatcacacttttaccactaaactatacccgctacatgtaaattctgataccaacgctaccctttgtcaagggtagccattcgagaaagatgctaattccctcttagttaatgaaacagagaaggttcctcacagttagcggttggtacttcgatcgcgggcctttcctttactttcttttttgttcagaattgaacaaagaatttggggaagaaaacatcttcccccacttatcatgaaatctgggccatagagaaagagtgagatgtttttttttatttatcatagactttccctatggcttgagagaaacaataaataacttaaagaaaaaggcacataggagccgaaggatttacttgatgtaaagaagattctgaatgtctctgcttagtcgattctctccgtttaactttttcttctcttcttttccactcaattctagtttattagattcttgtttaaaagaatcaaagaagatgaatagaactaagaacacacaaaaaagagcatataggcccgagaccattaccaaaagttcttcccaataatcatattgggtatctgttcccttccttttcctattaggatggggcatgttggattttccatatccatataccattacagaaaaagttttcatttattgggaaagaatcaatgacatacaatgcattacagacgtatgatcattaccctttaaccgggttattctattccacttctagatagagaaaaaaactaaaggagaatgaatgaaaaaagacagagtttggaagttagacccctttctaagactctctttcaaaaaagaggacattttgaaacttttaacaggcacaatcgtgagtcaacaagtgactcgaaatgctcgtaagaaaagagaattgattttcaaaatggtagaactagatgacgaagttttctataaccttgatgaagaggtagttttagtttacgactccgatcaagagcgagaagtctttcatttcagattggacagctatagaatctggacccatcgtagagacgttcaaaaggctcctgatgataagaatcatactttcacggaactccatggggctatgggcttcaacgcggtagacgttttgttccgaatttttctggagcaaacctccgacccaacgatacaatgaattttttctattcacaaagaaaaaagattcggaatcgcaatgctactatacgcacccggaggaatattcagaattatattcttatataatccatttttgcgcggggtcttactaacaggacttcgctgcacgagacgaggattcgtcgaaaagctaaggtcatccggtattttcataccctttgggggtggtatatggccttacaaagtctaaggggtagtatgagatctgtagtaggtaaaagaatttgtcccttgattgagtatgctattttccctcctttaccgcgcattattgtatatgcttctagaagagcacgtatgcagagaggaaattacagtttaataaaaaagcctaaaaaagtttcaactttacggcaatatcaatcaactaaaagtcctatgtatcaatccttacagcggatttgtggggtccgagagtggttgaataagtattgcatgtggaaggaagtagacgaaaaagattttggattcgaaataggtgcattcgactaggtcgtactttgaatccaatttcaagttcgattagaaggatagaaaggccgcgaggatcggaaaagaaaaatcaaatctttttaattgcttctccttttttgctattttcttattatttatataatccattcgattcttttttttttagaatactaaagtattctaaaaaaaagtattctatactataaaaaatctttttttgcaaactcaaaaatacaatagtcaatattcgttataatagatatacttaattatatcataagaatcttaagatattttttgaatagatcaaatcgaatagatagaaatagtaaatttgaatggagacacctattctatgatggattttaacttaccctctattttcgtgcctttagtaggcttagtatttccggcaattgcaatggcttctttatttctttatgtgcagaaaaataagattgtctagaaccgacgggaccgaattttctcaatgtatttccacacaggatcataatatggatcttttgtagtgtaagtaatataatatggtatgttatgtggctctttctacacacaaatgcaaacccgctatggatggggattatggatgcggatataggctacaagcataaatgcatgcatatgcggaaccgggtatagcgagtttttttaagtggatcaacaaatactttttgaatagaaagtcaatgtattctaaccaattattttacaggagtatctagttggcgaaggcgatttcagaatcaaaaaaagtaaagtcaaaattgtcgcgaccgggaaaattgccttttcccgaacgctagtgtattaatccccgtcccaggaaaagccggggtacaccatacaaacatgatataaaagacacatctttattacatcgataatatttacattattacaaaggcgcttcaggcctgacaatcaaaaataaacagcagcggactagcgggcctacggctccatcttcacaggcgctcaactggggtataagccaggactccacctaagacatcttctccaaagcttctcttactgaagaggggaaagattgagcaagaatgagtacaaccacagtactcagcaagccacaccggcagatgcatgattaatgcaagggggtacaaggggataataatataggggttaagttttgcagtaaacagcatttaaaagtcacttagttgcccaaagccattttataaagacgatcctagagctatacagtattattaatcacggccatgaaccctcacgaacctgccttaacccaaggcctatgatgattcagaccgaactggcaacccgaccctgggtcccagctcgtcccaagccaacccaggccaaccattccacattttagttgttgagcaaattttaagaattataacactgacttgggtacattgctcggcttgcccataaccgagggcgcggctattcgaatagattatactctgatcagaggtgtacatctttacccacaagacacatcttcctcgcgtgcaaccacgtgccacataccaccacggtatacggacggaagacgtgacatagttcccaacccatcctagccataaacaagagtaccgacccaatcctcctacggccgggacacccgggacaggcaggcaggactgagccccctagcagcagggcaccaaccctctgccatgacatctcgactaccgggccgcagctcgtgtagccttcatttgccctggagaatgtccatcgacccccgacttcatccatctccaatccgtgtacttttgtttatgaccagactgagccacaaactaagccttacccactagacatgtggaagtacggtagtgctttgcaacagaggcccgagcttaatccttatagtggccggggtgctacttcccacaactggcatgcacccaaaccccaccgaaaacaggttttaggggttttgaaagaggaagagaggtgtatgtccaattctaccataaaccaacaattccatagtgtccaaaagatatgagaattcccaaagtctaaagttataaaaccacctaatgttgtcctattaatcagcgaagcatctacctaaattcatactagtggaaccataaatagagtgtccactagttggggttttgtttattctagggtgaacaaggtaataataacaataacaataatagtatggtcataacaaaggtaaataggcatagctaaataaaacagtgataacgcgggaatttaaataaagcgataatgcattaatttaaattaaaaaaaataattttgtaaactgggattcaatatgctcaaggatgatgtgacttgccttgctcgctttcccaaacgacggcttcgacttccacgaagagcggatcttccgaagctgcagcgtctacacgaccaacggaaaagaaaagggcttttactctactaaactccacataacagcagaaacaaagcacaaaaatgggttcttgacttcttaaggaaaaaattagagacttgaacggtccaattccgagttcaaatggccaagatatggccatttgaagtttatatgctctttaaatggatatttgcgaatttcttcatttaaattttaattacaaa

SEQ ID NO: 21618 - DNA, 1230 bp, Oryza sativa
gtctctttctcttttaacaaatgtctggaactttggattaagaattggtggaataccaggcaatcccaaactctcttaactgctattcaagagaaaagagttctagaaagattcatggaattagaagacctttttatcttggacgaaatgataaaagagaagccgaatacgcatgtacaaaccccccctataggaatacgcaaggaaataattacaattggccaaaatagataatgagggtcatctccatatcattttgcatttctcgacaaatataatctgtttggctattctaagtggttctttttttctgggtaaagaggaacttgttattttgattcagtttactcacttaaaattgagtatccgtttccctccttttcccgctaggatcggaaatcctgtattttccatatccataccatcaagtccttaggtttccgaaatagtgtaatggaaaaagaagtgcttcgaatcattgctatttgactcggacctgttctgaaaaagtcgaggtatttcgaattgtttgttgacacggacaaagtaagggaaaacccctgaaagaatttccatattgaccttggacatataagagttccgaatcgaatctctttagaaagaagatcttttgtctcatggtagcctgctccagtccccttacgaaactttcgttattgggttagccatacacttcacatgtttctagcgattcacatggcatcatcaaatgatacaagtcttggataagaatctacaacgcactagaacgcccttgttgacgattctttactgcgacagcatctagggctcctcgaataatgcgatatctcacaccgggtaaatccttaacccttcctcctcttactaatactacagaatgttcttgtaaattatggccaataccaggtatataagcagtgatttcaaatccagaggttaatcgtactctggcaactttacgtaaggcagagttgggttttttggggttgatagtggaaaagtcgacagataagtcacccttcctgtccctctacagaaccgtacatgagattttcacctcatacggctcctcgttcaattctttcgaagggatccttttcctcgtgcgagagtctccgcccttcttccactccgtcccgaagaataactaagaccaattgagtcacgttttcatgttctaattgaacactttccatttatgattaaagaagaagattgttcttttac

SEQ ID NO: 21619 - DNA, 2356 bp, Oryza sativa
gatctgtttatcataaagagattcgttgttcctgaccctgcttcaccttaattgttatcgaacaaaaagatcacaataaacttttggtaaaagttctgtcttggtcggagtggggatagcatttctcttctgcatatctatggagttttgcaaaacccaaacacctcagagatagatatagaggtaggaatttgtcgaacgaaccacactccttcgtagacgtcaggagtccattgatgaaaaggggctggggaaagcttgaacccaagtcctacagtgatggatataagcgcaattgaaattcctagggagttatacatttgtgtattgataagaccgttcacaatttcttgaagctcgatctcccccccagatgaaccatatagccaagagaaaccatgaaccagaatagaagagcttgccccacccatgagtaaatatttcatagtagcctcattagaccgtagatctctcttggtatatccagacaataggtaggaacataaactgaaacattctggagctacaaagatagttattaaatcgttagcaccacataaaaacattccccctagagtagctgttaatacgaataacagaaactctgttatagccatttctgtacattcaatgtactctacggatagaggaatacataaagttgaacataataaaataagaaattgaaagatttcgttgaaattgttcgtttggaaatttcccgaaaagctaattataggttcttctctccatcggaacaatagggccgttatgcttattactaaacttgttgaagagatgaaatagaaccaaggtctatctttttgatcagaggttaaatcgatcatcagaagaagaattaggccaaaaattaggatacattctgggaaaatgaaacttccctggaagagaagcaaatgaaacgctttcataaaaattctcgtagaatcgagaatgaagttttcattctgtacatgccagatcatgaattagtaactgcatccaatctccgaaaagtcccgattgtttcgatttttggaatgggatatttacggaatccccatgaataggatcaaaccttattccatgctatttccataagattcctctttcttattcttaagcaagcccccgagagggcttagttgatcatgatttctgttttctctttcttttcctttttgtttgtttcgagaaagatatcgtccgattctccttctattgattcttttccgatcgagatgtatggatccatgtgtctacatacctagattctgttcatggattaacgaaaatgtgcaagagctctatttgcctggatttatttctattcctatttagctgggcaattctagtttttgttatgatgatctcatggatagtagtatttagttcttcttttacattcagattggtagtaggttttcagatagcttagcccttgatatgatgaaatttctattggagaagacgggcgccaacccgaaggggaatgtagctatgctggacttctttctactagctacggtgctacacctgctcctagctacgatgctgctcctgtccgccccttgatttatcacccctttggtcttttattggtcattgatttatagacgggaggataagtaccctggctcgagcccagatatcgatttaccattcctttatcggatctccgaaacgggaaacaagaaaagtaatagaaatcgtgtgccagcgggagatacgaaattcactggtttttactctcaatccacaggtggagatacctggggtgggttttcatggcctatagtcccctgccgccgaagcacgaactacttgaaatcgcggatcggcagcttcctgcgacattccttcaatgcaaacgtggtatttttctaccctttgatagatagcaagcagctcctataacttgatcgacaggacccaaccaactaaactattgattttggcaaagctagaccttttgaggaaagcagatgcagataacgaaaggaagctattagtttttcttgtactcgactcggcttttctttactgaccgcttgcgtaaggaaagttgacaataggaaaaccaggtgagaagttttagagcaaccgatgcctaccgtccggcgatgtccctaggtggagctggcttaccacattccgatacctcggaaccttcccttcgtaaatttggaataacgaaagtctcaaccgcttgctggcatgccaaaacacttattatgtttatgtgaagtggattcatcggaagagagaggtaaagcattttaatttcttcgcttttgagcagtaagtatttcgcaaggcggcccaggggtcttcttcgtttaaggggcagttgagc

SEQ ID NO: 21620 - DNA, 5180 bp, Oryza sativa
caagtgcgaagaggataactgctaaaagcatataagtagtcagcccaccccaagatgagtgctctctcctccgacttccctagagcctccggtagcacagccgagacagcgacgggttctccacccatacggggatggagcgacagaagcatggaaataggataaggtagcggcgagacgagccgtttaaataggtgtcaagtggaagtgcagtgatgtatgcagctgaggcatcctaacgaacgaacgatttgaaccttgttcctacacgacctgatcaaatcgatcaggcacttgccatctatcttcattgttcaactctttgatgaaaagatgaaaaaaccaaaaaaaagctctgcccttccatctcttggatagatagagagggagggcagaggcctttggtgtcccttccagtcaagaattggggcttcacaattactagccaatatttctctcatgcctttcctcgttcatggttcgatattctggtgtcctaggcgtagaggaaccacaccaatccatcctgaatttggtggttaaactctactgcggtgacgatactgtaggggaggtcctacggcaaaatagctcgatgccagaatgataaaaagcttaacacctcttatttgactttttcactattttgaaatacgaaaaagatccaaatccaaaatgcaaaggtcgtcttattcaaaacctcaatcatcacatcccctctctcccacttcacacctcggaacgcactgttcttatagagagaaaggggctttcccatcttcttaacccgaaatgaaatggctgaggagagggaggttccttttggggggtacccccgggaagagatccagtggagacggggtgggcctgtagctcagaggattagagcacgtggctacgaaccacggtgtcgggggttcgaatccctcctcgcccacagccttccaaaggggaagggcctttactttccccctgagggtaggaaaaccatgatcgggatagcggacgtaaagctattgaacttgggtatgctctttccttttgtcgaagtggaatcgtagaacagaatgtgatacgatgagataaaatgcaatagaaacaaggatagcgaacgggttacctactcctaagggtcaaagcaagccctttaattcaattctttattcttacattaaagaatgaatcaaatctccccaagtaggatctgaccgtaccaccagtcagttagcagccgcccgttctacctctgagctactgaggaacaagggggattcgacctcctagagttcaactcccgctctcaacccatgaacaatatgagtccgaagcttctttcgtaactcccggaatttcttcgtagtggctccgttccatgcctcatttcataggtaagcccagagtggctctatttcattctatttcacttcctagcacttcctatcatttaatatccatccctttggtcttattgacataagagatgtcatttatagtctatctctttctatatatggaaagtcaagaaattctcatcgaaacatcgagaaattgtgcatatagaaaattactactctaaaaccaatatagaatcttattaagattactattaatcttaaacttaaaccaatatagaataagtagtactgaagcctcttgggcgatgtagggcaaatcttactctccaagacgtccaccttcgtgctcagttcctgaaatgcagctcccaattcatccaccttcttctccacaactggaatgcgcgcttccacagtccgcttgagatccagatactccgcccgagtgcgctcatccgcctccacgcgcttcttctcattcccctctacgagttgcagcaggagatccagcttcttatcagtatccatggtttactacttgggaatcggaaccaattcgttctcactccgaattccgcaaacctggggtggcaagtttccttttcgcggtgtcgatccaaagatcaactccaatccgccccaaggaattttaccgcagaatcaagaggattgagagaacaagagaggctctgataccagattgttaggatccaaagagcaagaacaagaacacacacgcaatgatagggatttgacaactaattggtagtctattgctctaatccgacaggattaagccttccgccgccttcgccgcctagttgccagttcataccatttcatcttgggttcccctgttttatacaagtatcaggtacattacccactctctctctctctcgaattcgcatcacacacgcaacagccagctgtacagtgccaactggattacacagcccattcaggcccatggtaacgggggttgggcttcatcgttcttgatggcctaactggcacttgagtattggtctgaatgtcctcctcctcatcttggcgccttatgccctcagagtcttgatcatcagtaggttcttcatcagcttcaggttctccttccttctcctcctcttcagctggaacagccatgtcaggtaggcacctgacaatttcgtagagacgcgctgcatcgatgcacgcattgcacacacatatacctggcggtacatgacacgtaggttgtgatcaacctgttggttgtcggtgaaccgtggctccctcccattgtagtccagatcgatcagcttcggcggcacgtgccgcccgttccgccggggatcgaacaacggtgaggactggtcggtgtacatcgccggcattctcatcccgtccggtgcatcccagttccagaacggtatggcgaaggtgggatcaccgatcaagctccccaggatccgctcgaagaagtagagatagcacctatggaacggcatgaacagccaggagttgtgcacctggagatccagccccgggaacccgtcggggctgtacgacccgtcgcagtaggcgcagtggacgctcgcctgcgccgcgaagctccgggggtcgtccgccggcagcgccttcatggccgcgatcgcgcggttgaacttggcgacgtagtccgcgccggcggagtgcgcggcggggcgcgtgcggagcggcgaggacgacgcgtcggcgggcggggcgaagtccaccggcgaggcgctggagggcggcgggcagcacgtcagcacgttggcggacggagggagctggtcgggcgggccgcaggaggagatgtcgggcgtcgcgacagggtcggcgccggcgcggcgcgggaacgacaggaggatgcccgccgccgtggcgcttgcaccggccgcgccgagaccgaggaggacgtcccggcggtcgagcctagaggcgtcgggctccgcgggagacgatgtgcacgagacccgtccgacggcgccgcggcgaggcttaaggcaaaagctcgctcctggagaggaggggctcggtgatgatagagagcaggtgattagctgggagagtgatgccatggccgcgcgcttgggtcaaccgagcgcgatggtgatcggtatagctctcttgcaaatcacgatttgccatggtacggtatatataaggcgagcgcacgtctgtgccaccgtgccacgcgagcgcacgtgagcgaatgcatgcgcgacagcgcgttgtagggagatgcgacgcgcacgtgagagcgaacgagaaattgaagacggggatcacagcgtagcccgtagcagggagcgcacgcatatatccctcggaaaatgctccgcatgggggagtagctgggattcgtcggtgtgcacgttgaagatttgttatcagctgtcactaattttatgcatatcatataataatagattaagagcttatatgtaagagtgaggataatagtaagtcaactataaatttatatggaagagagataaataaaaatgaaaaatattggttctcatgcaaatattacaagacattttcactaaatttatagagagaaagatgaaggagaaatatagtcaaccttatagttaatttattatacatattagttagctatactattaaacttgttctaattgtctctaatttataatctctaataactctaacactctataacactctcatatttttattgaagtttgtgtagggattatccctttcatgaggaatgtcaatttctctctctttcactcttcttttctccatctcaccattcatgaaattaaaataaaccccaatgataatcatatttgatttttaaaatcgcaatgataataaaaatgagaggcagcgggcgggtcgtacatgagtacaatggcagagccgccgatgattggtgtgacttctagaaagtaaaaaaaaaattccaacgatagttatgttcgatttttagaaccctaatgtccccacgttctcatttgttctcttgttctcataggtttactggtgattccattcgcaatggtaggagtcccttgttttttttgtttttttttaaaagtaggagcacaaaggtacttgtagggtgccacgatagagggattttggactatttgttattctcttcaatagtaccttcttaaataccgtctttcctaataattttgattatttatcatcgtgattaccaaattgtttatattttaccactttacactaaaagaaaaaaaaacctcactcccctcccatctttcttctctctctttctctccgctcttcttcctctctgacgtgggaatcacaggtactgttgcaattggatgtatggcgtgagccttcgggatttggtagtgaggtcatcgatgagcgaagatacgccgagtccaccctgaccatgagcgagatacctgtgttggtgagggagcatacaacttgacccatgccggctccaacgcctcccccgccacacctccgtttgcgtcgcttctctcaagttcacaggatctatacgagatagagagcctgcaaccaagatgtattgctttcaccccaacgacccatccgacgaaccatcaagcattgttgcgtcgtatatctcgcccgtttagctgcccagttcatcctgacactagccattcctactacttggcccatgctagagactggtttcatgtcatatcgcagagaaagaaggtataaagaagatgaatgacaggggtaataaaggttatttccttgttgtttcgctgaattgtcagtcaaaagtaatactacctccgttttttaatagatgacgtcgttgacttt

SEQ ID NO: 21621 - DNA, 16368 bp, Oryza sativa
cttccccgatgcgtactccgtcaagcccaacactgacaccttcaacgccattatcaagtccttcgccgagtccggcaccacaaggtccttctactcggtgctcgatgaaatgtgccagaagggtgtgaagcccaacgccactacgtttactacggcgattgctggtttttacaaggaggagcggtttgatgatgtagggaaggtgattgagctcatgaagaagcacggttgtggtgagtcgctgccagtgttcaatgttagggtccaggggctgtgcaaacttggtcggagtggcgacgcaaaggcattgctgaatgagatggtgaagaaagggacaaagccgagctggctcacttataatcatttgattcatggattctgcaaggagggggatttggaggaagctaagcggctatacaaggagatggcaaagaaagggcttgttggggatagtagcttctattatatgcttatttattacctttgtaagggtggtgattttgatactgccgttggggtgtacaatgagatagcagccaggaattgggtgccgtgtttttcgaccatgaagatgcttgtgaatgggcttgctggaagctcaagggtcgatgaggcaaaaggtatcattgagaagatgaaggaaaaattcccagataaggctgaagggtggaaggaagtagaggatgctttgcctcaatagaatagcagatggacgaacttgcaggtatttttcagccatctatacatacaaaaaagatagttaggtgaaacatttgctttgctttaatttggctgcatattctgttaggtttcacaagatttcctgtttcacttgtcctttgtttcattgtattgtcgttccatgtgtcacacaagctactgtacatctgaaatgattcacaatgtcaattccagttcaacttgtggtaaagtgatgtccttctgaattgagatcctctaacttacttcccttcgacgccagtcactgaaatgtgtaccctctaaccaacgggcccacatgtctgtgactcaaagtcaaagggaagtaagtcagaggatcctcttccatttgagagaagtacctgtcgctacggttttctcttttaatccatttagatgaaagataacgcttgaataaaagtatacgtcattgtgccctttttgtttaattcaaaacgatctactcttgataactttgttcctttcatgctccggtgtcgtggattgagcttgttacatgtgactagaatcttctttgcttccatcatgtaaatatattcctggtcataagaatataatgctaacagaatcgttttataatctatacaccagcaagaaccctttatttttctttaatttggtatattcatctatattagagtattgagaccaaagggcattggtgagagcattgcttatgctgacagttattacagtaacaaaatggttttatttaatgatatcattggactgtttaaggactaagcaaatccaagtgcataaatttagcttatgaggtcgattttgttttttttttttttttgttcctagatccaccaaacaaatacatcaactattcaaatacagtataagtctaaatgttgggactttgtagataaactcccaataatgttcaataaataccttgagcattttggctgaactctagtaaaactagtggtttatttgagaagaaaatattgtttcaagtggaagttcaaagagatatattgtatctttaatttgacaatgatgagttgatgccaacacttgtatttgattctatctattatgatttatgaaaagaactattgatacaatttgctaccttcagctaatctatattaaataccctaatgttgtaatccgagatatatatttgaactgatgatgatgaacatgatcatacttatacaataaaatgtggtgcccatacccatcttagctattatttctttggtgctactgttccattctgccaacctttcaatttgtgcatatctttaagttcgtattaactgtagcataggtgtaatttagttttgttttttcttcatgttacatgtttgactacatttggtttgtgatgccaaatggcctgaattagtcaaaccgaaatagtctgtattttccagaaaaaaagcaagcaactttatttttaatctatctatattacttgagaaattactatattggaggatagataataactagtcgcatagttgaaatatggatatgaaatagtgtcaaatctgctggagacgatgaagtcttctgcacttcatccttgacttggtcatacaggatgtgcttttctggttccttgatctcacgaattctttatgcagtaatctggaaacaatgcaccgcaattttttcttgctagggttattttgtttttgtgagtattatatcatttcaacccttgtcaagctatttttcccttgttcctttttcagatgaacagtactggccattgattcaattcaatcgttgaacatgtctttttcagaaatcaggaacttcaccaacatttgatcgattgacttgagcagagatttgttacatatgctagttccagctatggcgacaatattttccgtctgggatagttgaggcgtttgaaagtactgtcttaagtcatctgccgaatatgttctggacattattatctggtatgctgttacaaattagtgtggttcaggagatcgatataataaccatacattcatacttttgtcatttttatatacctttttttagaggaatatcgaattccattataccactggtgcgacagaatcgccagacctggagggataccatccctaacgagactggtaaggtgaggacaattacatccataagcagccagatcataggctactttgttacagctaccaggacagtgattaacatttgaaagcactagaaaagtcctcagtgaacaatttatttcgtggagaagacctcctgttgcagccaaactgtattttgccccctcatagcgtacattaacatcatagaatcagttcccaactttacttgcactatacctttcttcgctgccgcatcaattccagccatgactgctatagtttcggcgtgaaaagcgtccatcagatatggggtttgcccggcttccgctacaatcaccgaccctgaatcatccctatgacataaccccatccaccatttccagtttgtggcatatatgttccatccacattactcttaatcttaagtgtctcctcatcaggtttcctccatttctgagttactgttttgctctgcttcattgcttacttttactcgaatcaccgaacccctctactcgtttcagcacagtcaagcctaggttgttggcttttctgctctcaccttctctaattctgggaaaaaattgcgattatacttatttttcaataatttacatttatatacctgtatgagatggatttgcaaaaatatacccgttccgcgggactgcgatggtcccgcagctccaaaacgcaggaaggaagttggcttgccacgaccgcaagccaatttggcagcgccgctgtcgccagactgttcgacgccctcatggttaggggtggacaaaaagctcgggctcgtgagctcggctcgggcttggctcgagctcgcaaagctcggcttggctcgaaaagaaaacgagccgagcccgagccgcctccagagctcgtttgtaaatcgagccgagcccgagctagctcgcaagccgctcggtaggcttgtcaagctggtgaaaaaatgaccttggcccattaacaattccccatcccaggcccaatgaaaaccctaaccttcccttgctacagaaactattccccttcccacttcctagttcgtcgccgccgccagtccgtcacgccgagaccgagtccctccctctgggcggcgcaaggagttgccggccgctggcccgccgcctccctcccagtccccagcagaagcgccggtgcgccgctcgacgcggcagcctcagttccgccagctagccgcctccctcccctgcgccctgcgcggctgcgctggctccggcctccctccccagccgcccagcgacgctcgaccccagtgccgtcgcggcgccgcctctctaccctgcaccgccttcggcctccctctcctgtgctacccgcgtccctgactcgacggtcgacgccgtccatcacctcgccgagacgccaaccgatcgacgacagttcacacagcgacgagcctaggatgaagaggttcgtgatgtattttctgatttttgagattcatttcttagtagctgtgtatatgcgtgatgaattgatgtgtatgtgtgcagtgtgtgctattatcaatgattcaatcacagaaaggttgaggcaaatagatcaaaattgttatacctacactaatatactatacttaattcgagccatatgttttgtgtagtaaatagaatctgtaacgcacacttgctgttaacttgctgaaaattgattgtactattgttgaagtatttacttgctgttgtgcatcacaagctggctcgagctggctcgagctttgaaacgagccaagccgagctgcattttttgctcgttctctttatcaagccgagccgagccgagcctgttcttgaccaagctttcacgagccgagccgagccgagcttggctcggcttgactcgtttccacccctactcatggtgcagcagctgaaaatgccacacctcgctcgccccaacccgttcgatcgacctcttccagcactgcggcaatgacgaggaggcggatgaaccgacgaagatgacgaggagctccagctacgggcgttgtagtcaccagcgttgcggccctctcacggcggcccggccctcgtagtcttccacggcggcgacgaccaggctcatcttgccccaacgttcttcctgacatcctcgccctcgctgctcacgacggcatcaacctggtacgtacatacatgcataaaccttcatggccaaggcgccaagtgtacgcgcatctccatggccatggtgttctgcacacgcacgtaactaatgtgcttcttttctgttgcgtgggagcagctgggaggtgtcgccgggccggcgcaactcgacgacggcgagcagtgacatcgtggcggtgttcggcaagaagggcgtgagcccgcgcgacatgacggggtcggggagatcgattcattcgaacaggaggattgatccaaaacctaaccattccaatgcgggaatgcgggatagtgagggcaattttgtctctggtttcatagttgcggtaaacaaggcggaactgctataaatcagaacattttaatagagttgtgctttcaaatgggggcctcaattttttgtgctattttctggtaccggtataacagccgtgccaccaatcgaattctctcttcatctttgcatttcttgtttcatgccagtttgtcgatgtggcccaaaggactaacaccgatacacatagttacaatttaaagaaacgttcgcatgaacatcggtttcaacttaaaacacaatataatcaatgtcagtcacatgaaatagaaacatttcatcttcaacacaatataggctttgtttagttcacaaacaaaaacttttcaccctatcacattgaatgtttggacatatgcatgaagtattaaatatagaaaaaataataattacataaattgcttgtaaattacgagatgaatcttttaagtctaattgttccatgatttgacaatgtggtgttacataaaacatttgctaatgatggattaattaggcttaataaatttctttcgcggtttactaacggattttgtaattagtttttttattagtgcccgaacaccctgtacgacactatatataatacccgatgtgacacgccaaaactttacacccctaatctaaacacccccataattagcgtgagtcacgtgaaatagaggcatttcatttcaaaaagaaaggaaaggaagaattatcttccaatcatctatgcgttgtgaagagagccacataatttgctgtaactttatttctctatcatgggcatggcgcataatttccatataatttgtggtggattttaagccctttaggttatagagattcatttgtttcctgtagttcaaatgattttgatttttttaaagaaattagataatatggattattatgttttatccctctacaattatcgaaggtcaaatttgatctagatatgaagaaactaagagtaataaatctacgtgaatgtcattgttattttttaatttgattttctgttttgtttttttatatgtagatcgaatttaaatttatatgtttgtgtatgcctatttatatggcatttttttttacagatgcggcttgtaagcaagccaagatacatcaatggagaaaccgaaaataatattaaagggcacacttttgtcttagctagttcgaaaggcaatcttgagtgatgaatgttgtggaaaagaactccaaattaatattagaatatgcagcaattcagcccaatgttatttttttatgggtgcatgattattcgtattaaataaatgcaactgtcctttatcttacggcgttaaatttggttctattttatcaaattttactatagctccgtgcctccttgccttcttggtaattagtgcttgagcatgacaaatattttgaaacaaagagagtaactactcagtatcaatatatccacaataaaatttctacttgtatatactactccatacttataaagaaaatcgtttaggacaatgtttaaagtaaacattgggaatataaatcatgaataactctcaagttgctgagtttgaaaatgtaaaaattatatgtatagatttgtcttgaaaaatattttcataaaaatatacatatatcacttttcaataaatatttttataaaaataaaaagttaaaattgtattttggagatcatgtcgctgtcctaaacgatttctttttacgagtatggaggaagtatatattttcacattccattgtattctattctcacgcctccgatcctaacctttccatgtcttggcaccaaagtcacagtcacactctcatcttgctcggcacctaggtcctttaagatatcattcagtgccaccctcatggtggtttgtacccctctccgtgtcacattgttttgcgtgttgtgatgccttaaacacacaaagctcccgaccatctcccgtccacatggctcgattttcttgtgctccctagcattgacaaacacatcaaacttgcacacgccatctgtctggatgtgctcgaccaccagcacctcctcttgtgttgccccttttggctgtctccacaacattagcggtcgtctcacctctgcggtcaccacattgccaagggatactggaaacatgacgggcttctcgaccctgtttttcactctgtacttcacgttgggagtagtgggtggccgtgcatccaaccatggtaaaccaacgccacgatacgtgtatcggagcttgtccatgtcgagcacgtcacggacggtgatgcgcacaagacgggcctcctcatcgtagaagagaaacgaggagtcgagccaatcagggtccgtaaagtcttcgcctttgccattgctgcgccatacatcccacagccgatcgatgttagcatgatgcgtgtagaagatcgggtcacgaccagcggcgtagtaagctcccatatcctcggcgttgggataagacaataagtcgccaacccaaacatgcatcaagttatgtggttgtagctccacggttcccgcacctggcttgctagcctcacctgcacgaaaaggttggccgtggaataaggaggccaacggcgcactgctaatcatctgaaaaagaattacagaagttaatcattttgacaccaaatggttactcacaaatatatgcaaaatattaagatctaatatatgatactgatatttgtagtcgttaaaaaatacgaccatattatatattttattatttttagtaatttattattagaaaaaataatgatcaaatatgtgctgcctcaaagatcatgcctatatcctagcgacaacttaaaacataattatatctcgatttttcataactttgcatatattggtaagttaagaatttaatactcctatttgtttatatttttataatacatcattctaggagagtagtttttttaaaacttttaaatataactataatataattagagtgtaattacagtatgatttaacttatatatatgatccgcctataactaatcacaaaacacgcttggtgtggctggctaccaattaatgctcccctcactaaacacaacgtggtttgatggtccataaatcaaaagtttgcgccatgatgtttttttctttcctcctatcacgaatctcaacacaattttgatgtccctcctcactgcacgaatctcaaccggtcaacccgatctgacagttcacaaattggcatccctcctccctgcacgaatctcaactcgatctgacggtacacaaatagtaagtttttttttttgaggggggcttgcaagaaaaatatagcaattccgtttatcaatttttctctcctccactcaccaaacacaacgtggtttgatggtcataaatcaaaagtttacaagtaaatttcataaaactacatatactttgaccaaactatcttaaaaaactaccgatttaaagcattatatcataaaactatagattcagtgtaaaatttatcataaaattacagatttaagatgaaagggtcacaaaactatagattaagttccaatttaattacaaaactgcaacgtttatagcttccacatgattgcagtcttaggtattgtagctctgaaatccgttgttctgtgatatctcgatattaaatactgtatgtagttgtgtgatatttgactttaaatatatagttttctgataaatttagcgttaaatatgattttttatacaacacattaaatctatagctttgttttgtgaaatttatttaaagtgtttttagataattgatagaaatccggcttgtatatacataagtggatacacacaactacaatcaaaatatttacactactacaaaagatgtcgtaggttctggtttgtaagggtccatatgtgttggattttcatccagcaccaatagaagctaccgacacctatgaggaaaatagaaccgacaactttaggttcgcatgagcccaaaaaaaaaaaaagtcagccagctcaaatcgagctgaactcaccaaccatgttgccgtcgttgtcatcctgctctatccgctatcttcaactactatcatcatcctgttgtatccgccatcttcatccggcatcgtctccgtcaaagcccagtcccgccgccaccgtctcccacctatcggatccgaagacaaaaacgaagaggccgaggggcagagggagagaggggcgcactgctgtcgttgcgtcgttgctgccatcattgtgtcgtgccccagccatcgttgcgccgtgccgtgccccgccatcgcaatgtcatgctgtgcgtcgtgccaaggaaacggctgccgcgcgcgccatgccggcgatgggagagcgaaaactgataaggttcggccagtggataggcgacatgttttttttttgtgaggtgagtggataagcacaggctcggctcggcttataatggatgcatttttttttaaaaaaaagcatctatagtttattatatgtgctggttttttttaaaaaactcgtaccattattatgggtgtaatttttttaaaaatcaggtaccaatatataggtgctattttttttaaaaaaatacctatattataagtgtcggttttatctagattttttgttctataaaggtgaagagcggtaataggtgtcgttttaaataaatcgacgcctataactgagtcgatatctatgaggtgttctgtagttgtgttagcaaaataacttacgtaacaaatctatcaattgataaagaaacaaaggcatgcaacaagaggaacggactgccgtatatatagtgcacctgcttgtacatgatccagaggttgtgctttatctgctcatcgtcggtgtagttgttctccacgacgtccatggcgtaatccaggtccacgagcttgggcggcgcgtgccacgggttcctcatttggtcgtacagcggcgacgacgcgttggcaaactgcagcggcatccgcatcccctccggcacgtcccagctccagaacggcaccgcgaacccggggtcaccgagcagcttcccggcgatgcgctcgaagaagtagaggtaggcgcggtggaacgggaagaagagccaggagaagtgcacctggacggccagctccgggtggccgacctgccggtacgcgccggtgcagtaggcgcagtggatgtgcgcctgctggtagaagctgcgcgggtcgctccgcggcagcgccttcatcagcgcgatcgcgcgctcgtacttggccatgtactccgcgccggctacgtgcgccggccgccgcgtccggagcggctcgctcgggtcggggagcgtgaaatcgattggttcggacgtgggcatcggcgggcagcattggaggtcctccgggaaatctggaccctccggttttcggcactgcaggaggtcagtgacaataggcccgcccacgcggccggcgttgatcttgtcgtgaccgccgtcggagagcaggggggtcgagacgccgtcgtcggcggcgcaggagacgacgtacgggtctagcccggtgacggcgaggagggcccttgtcagagtttgggcgcatgggttcacggagactgcaggcgaggaggtgtagacagcggcgtaggcgaaggcgcaaacgatgaggacgaagagcgcaacacgacatcgctcgttggccatggttattgcacgagctgactagcacatgagctcgaaaactgtttgctcaagcaacagctgcatgtagtactttattatcgattaggagtgtgtatatatagaaacatgtatccaatgacgtgaaactgtggacgagagggatcgagcgtcctggtcctggaacttggattgctcatatatacatggccacaaacgaaaccaccaacttggcttaggcctgtttagttcctaaaaactttttctaaaaacatcacatcgaatcttctttggacaaatatatggagcattaaatatagataaaaagaaaaactaattgcacaatttacatgtaaatcgcgagacgaatcttttgagcataattagaccatgattagccataagtgctacagtaaccaacatgtgttaatgacggattaattaggcacaaaagattcgtctcgcggtttccatgcaagttaagaaattagttttttcattcatgtccgaaaaccctttccgacatccgatcaaacatccgatgtgacacctaaaattttttatttcaccaactaaacatgcccagttcgctgctcattctagaagtggggaacgtaggcactgtacatgcactgttacagttactcttgatgggaacctaggcactgtacttttgcaccgttgcacttactcttgatgggaacctaggtattgtacatgcactgttgcacttaccgttgatgcagacggcctgggatggcgtcgaccacgccgtttggctgccaacaaaatccgtcggacgcaggccacggcgcgggttgcgcgaggctgccagccggtgcagcacaagtaaatgcacagcagcaaatgctacacgcacatgcggatgaactcacccgggttataatgcaatgaaaaaaaataagtaatgaaattaaacattgatttaatttcatcgattttatatggcttcaatttcataattgtgcgatgtaaattcttaaaccatttcattagtctgaggtatttgttattaagaaattattttttgataagattcgatgagttctaccaatatattgagaagaaaatgattattttcgttgccggaaatattactagggtaacaattatgaagaaatgatttatcacacaattcacacaaaaataagtgaatcaaatttattgtgaaaccgatgacataaatttataccctcttccggtgctactatgaaaatcagcacacaaaattgacgctgtgctgtaattttgcaaataatatgaaaaaactttgcacagactaatacaataaagttgctaccatgacatttgcaactaatatgaaaaaaatatacacagactaatacaataaaggggctgctatataacagaatcccgttttcgaacgggatgatcccgagtaggtatcaggtgtgatacctatcaggtatcagacgattctacgcaacaggatgatcccgagtaggtatcaggtgtgatacctatcaggtatcagacgattctacacacgtttcaggtgatacctgcaaagtatcatgtgatacttatgaggtatcatgcgattttctaccacgtatcgtgtgatactcgcgaggtatcatgtgaaacctgtcaggtattagatgatttcaaccacatatcgcgtgatactcacgaggtatcatgcgatacctgtcatgtatcagacgatttctaccacgtatcacgtcatactcgcgatgtatcagacgatttctaccatgtatcacgtgatacttgcaaggtatcggatgatacttactaggtatcaggtgattcctactagatatagctgggtatctcgttgtgggaggagcaccccgacacgtgcggtcgccccctgcagccgtcccttgtagacgaggacggcgacgacggcggtagaggacgggcgtggcaacggcggcggtagcgggggacgggcgcggcggtggcggcggcgtcgacgggggacagacgccgcggcggcgggggacagcgacagcggcagtgggggatgggcggcggcggcagcgaccggggacgggcgcggcggtggcggcggcgtctacgggggacagtgatggcggcggtgggggatgggcgtggcggcggcagcggcgtcgatgggcgcggcggcggaggcgacgggggacgggcgcggcagcggcgggggacacgaattgtgttgtggagaggagctatcccgttgagggacggtatcccgtcccttagcattcccatacaacaaaatttgcactgttgctactatgaaaatcacggtacaaaatttggcacgagactagcacgggtccacgagtctcgtcgtgtttcacgctgtctgaaagcatcggaccgcgcgtagtacgtcaagaggcgggcatactactaccttccaacaggcccgtcgctggttggggagagggataaatgcaaagatatggacacacggttcacacgatgcctccgctccggccgttcattaggcgagggggagagagagagggggccatgcaacgccctctagcaggagccccgtgctgcacatggtcattccgacgtactcggtactatgctagacagctggccacgaaattatcagcgtgtgacaggcttagggtctgtttagatcctatcaagctgtttcactgtgtcacatcgaatgttggaaacatatatgaaatattaaatatagacaaaaaaaactaattagatagattgcgtataaattacgagacaaacattttagcctaattgcttcatgatttgacaatgtagtgctacagtaaacatttgctaaatacggattaattaggcttaataaattcgtcttgcagtttacaggcggaatttgtaatttgttttgttattagactacgtttaatactccctccgtcccaaaatatagcaacctttgagcggatggaacagacgtctgtctagattcatagtactaggatgtgccccatctattcaaaggttgctatattttaagacggagggagtacttcaaatgtgtgcccgtatatccaatgtgacggcaaaaatttttacccctgcatctaaacagtcttaattagtttttcttttttaagagagagccttaattagttacattaattagttacatgtacatcttgtgtatttttagacaatagaaactttattaaaactaggtcaattacattaaaataatacaattatactgagcccacttccaacctctacatcaagacacccacagccaaaaaatgacacccacaacaaccaaaaagagatgcggaaatataatgtttaacacctatcaattcacacactagattgtcactcatactcatggctaaagtattcctgtgccatatggtccaactgtccaactattaagagaccatcggaatatgacaatagtgtctcaaagtttcagcttatagaggacagcccaacaaacgaagccattgcgtaactaaggaaataacttaaaaaaaaggagaagatccatttctttttgtaaaaaataacttcattcttgcataattaaagtaaccaacaaagagttgttacaccccattaacaaatttcaaaaaagtttccgaaaagccggtgaacatacacaaaaacggagaaaacaaccatggaaaaaagttgaaacacacttaaaaaaactgaaaacatactataatagagtagaatggaacgtttaatccatcttactagatcccgttgcaacgcacgagcatatttgttagtgagaagaaaattccgaaactaccaaattttggtagaataacattggtaagacaatgttttgtttgttaccctatcaaaatttggtgaatttgataacaccaaaatttggtaggtttgaaattgataataaagtgaacatgcccacttctccatataaaaaagtgaatacaggcagtttccggtccaatctcaccgctgcaaacgatggccataaaattctccatataataaagtgaatacaggcagtttccggtccaatctcacccatgcaaacgatggccataaagcgtaactgctgtgttcatgcagccaggggattatggatcgtgcctcaaatcgttgattagctagcatgagtcattcagtcttttgtttacgatcagatttcaaattttcaatacaacaaagtacatacattttctacatgtatttgtcaattactatatgacgaaagttatgtgaaccctacagcagtgtaacacctgtagcatcaagggtagagatttactgtacattcacgcaatcataatcttccttatttgcggaagttgcttcgtagtaacaacaaagaaaacaattgcatacctacagactacagtgatatgtacagctaaagtacagactaaaagccagcatatatcaaaatgcaaggcgtaataatgtgtaacagatcagcaatttcgcggtctgttataattcggaggcagagaaggacacctttcattcatgtgagggtacggctgcatggtgttgtatccaggcaactccattcgatacctgccctttatttggcagaaggggagcttgacactgtcatctttgttgcaccacacgggaagccgtgtcatattgttctcaaaaaagttgaggctgtaagcatcttttatctgcatggaatttaaggagaacatatttttttaccagaagttggatgcgggcaattaataatgatcaggaaatattcataattcaaatcatttggtagtgcagaatggcaatatgccaactggtagactagccttccactatgagtcaattactgagcatatgatatagttccatcggtgatgtctgaattaccctagatctcatggaagccggaatttaagcataaaccacacaagaaatcaagagtacttacggtgaattcagtaacttctatagagctggcaattgggtcaaagagtccagcctccttgtacatcataaggacgtaagccacacaagaagcagactggccatcagtatagacccacttatcttgctcaggaactgttagcaatttgtcaaatgtcatcccacgcttctctgattccactatgatttcaggtagatcaagaccctgaagaagatagctccattataagtctatccagaaaaactcatagcattgagcacaacggagctataaagcaatgattttctgtgtatatagaaactcatagcatggagcaccttccactgttagaaattggatatgcgacaaaagaactaagagaattactaactaatcaactgttgcaggccaatccccgtatcataaaataggatcccttggtgtgtcataacccttatatatacccaggggacgcttgagtaaatgagaaattctcatgcagactacgtcttatcaaaaataattgagggtagtttta

SEQ ID NO: 21622 - DNA, 5455 bp, Oryza sativa
  unsure (1)..(5455): unsure at all n locations
ggatacttccccctctagcctatgtctcagaaagcagcagtagcaaacaaaaccatgcatttcctccacagcatcagataaaagaactacagatccagattactgtagcttcaaagtgtcccaactggctgctcactctaatcggtatgccagcattcattcccaaacatgatgaagcaactgtttgatttgaactaacagaacaagaggaaaggtaatataacccccaaagactcttcagagagcactgagctgctgatgaaccatgaaaaataaatacaatcaaacaaataacaagcgccaattgaaacaaaccttagttccaagccgtttgttaagggcttctttccacatgttggcagcatactctggttgaagtttgttccacatagtcatcacagaggcaacctaggccaatcgtaagattttgttactacaatcagcaaataaatctcaaatgcatagctcaaccttgcaagcaatccttgctatatctggtattaaaattaatccactaggtatgcagcatataataatctataactctaagcaaccagcctatgaaaatatatggcgataagatatagcacacttaataatataagcgttagcaaaatgctgttggcaaaaagtgatattgatcataccacatgagcatctaatggcggtggatagttgtcgcttatggtatcaatccaactaaaaatcatattgtggtacccataaggttttccatccatgctttttgcatattcccaagctgctgtctcattaaattttgcacgcaaatctggatgcaaaggtagtaatgcaatctgaggattggaatcatccttttttacttcaaagtcccaccattcttcccatggcaagatagcaataatatcttctccctgaaaaattaatgcatgttagcttactgttgctgaaataaatacgcctcacgccaagggaaacatcacattagctttcctacggtatataactagtaaaccagacagaagtatagaacaacatctgacatatcagtggtgtcccatgtttcatcttcaatggttgatgttaatacattctgttagagcaagaatataaaacattgagtgaattgcagtttgggccaccatttattaccaaagtttcactttgatcgccccccatcaatcttttcacttcagaccgggtaatcttgccctttttgcactatgaaccaccccagctctcatttctagcaaaatctagtgtctcctctggcaaagatgtggcccgtgtgtaagtgggggagattaccggcatgcaggtgccgatgtgcttaaggctattgatgcgcttgatatgagactggtggtctaaattgcaacaaagggtgaagggtggcccaaattgaaactttgtcgataaaagctagcccaagctgtaattcactctaaaatatccatgttacatttgaaagaatcattattgggttaaagaaattatcattgtacaaagccacaggtattaacaatgaaagcacgagagcacaattactcctatccaaccgcagaccaaaattacataagactattactatccaaaagtggtctatcatgcatcctgcgaaaaatagttaagatgctggaacttttcttttcttccattcttctatattcacagtctcatgcagtcaatctgtcatattcaaatgagtaaaaaaaattacacagttaatgaccactacctgttcattctcatgaccagattccccaacccaaagctttccttcagaatccctgaggcaaactgcggtatggccagcataagctccagtaacccacttctctagggtttcaaaaccaccccagcgcccacgaatttttgataaaaccaaaaaatctccagagtggatatcgtcaacatttaattctgacacccaaggtttcggacgttcctcgaaggttgcacccatatgcttctttagaaatgcaagatttgaattctcaccccattgagtatttgtaaacagggggaaaacatcccaaagtgctctaagtgttccaattgttccagatggcatcaggaatatggatactcctttgcgttttacctatgttaaggtaaaagatcatgcatatgtgtatcaatgatcagaaatgctgattacaaacaaaagcagctgcagcggggacttacatattcatattcagcctcgctttcccattctttgaaatcaagggtatgctcacgacctacaaagtagtaatcccatgtaacacgatatggtgttgcaaacacataaaggtctatgcaagtccagctatgagctttgtttgtctgcaacaaggaacagtgtcaggatcaatagtgaaataagaagaatattcatgtgtagagaaatgagaaccttcagaaagcaattaacttgtattaagaaatcacaaagctctgaaaaaaggttactgacttcaatccaatcacaaaccacatgcaagacagcagaaaccatactggagtgggcatgtccagttagatgccacatattgatctaactaagattaggcatgagccaagttttgtgaattgtgatatgcctaaatagggaaacgaacatatttgaatgaaccatctactagtaccatctagtacgctgtacaaacaactctggcaccgatcgatctacactaagctacatgactaaatttaaatgtttcactgaactgaacgcaatcgaggtgataatctcaaaattacgatcaagtccagggttgaaactagcagactgcaacaaacaagccacaaatccccaattgcctccctcccttggggaggaagaatggttctaccgcctccggctcagagtaacagagccaacactgggacgcggggcttgggaccggcactcacctcgagatggagcgtaccacctccaaggcccccatcagtcccgttgtggaactccatccacgcccggttatcgtagaagcaggcgccctttcactcggcggcgcgggcgccgccatcacctggctcccgcgcgacgccgacgaaagacgggaagaggtcggcggcgccgcgcagcgcgaggcggcggagcaacggctgggccaccggccacggcangatagggaggaggtctcgcgggaggaccgtggctccganggccnccttcatgaacccccggaggaaggggcgctaggcggccaagaggaggactagcgcggatagggctgccaagagcttgaggttgtaggctcctcccatgaccgccgccaccaccgccggttaggtctggtagccctccgcgagtttcgcgttgccccgcgctggttttcttcccgtgacggagttctttctagtcgatgactcgtttgggtttgttcactcaggggcggacactcgagtaaagataaaatatatctgcattttatttcccaaggttgcttctactaatcggttgtttcttctaataatcccttgttgcttgcaagtttccgactctgcacgattgcacgaattgactagaattggttgtattgtactgcgtatttcgatgggctacaaggagtatcgccaacatattgcttagccagaattaaaacaagatgttgcttagcaatagcaatgttatttttgaacaacgaaattatcttccgtttctatataaatttggtgtgcgctaatataagaatattcatgtactatgttcattatttttttttctgggaccggcgtaaagccagtcgaagtttagtaaagatttagaagagactttaggttacaaatactcctacaacattaaccccacaaaaaagcggccccagaaactccagggttacctgcctccccgtcccgccgtccgggacgagcctgactaccccaatagattactgacgaatggggagcttgggtggcggcagctctaatggcgccaatacagtaaatctatgttcattatttcactgctatagttttcccttttccttttttttccgaggagtgttataagtttagctgacaaatacgatactgttctctaagtgaaaatcttgctctcaagagtagttctcccttctctatgacggtatggccccctgtttcttttcttttagggcccctttaatcataggaatggaaaaacggaggaataggaaaaacataggattctgacaggaatgcaggtataaaacagaggattggaaaatataggaaaaacacatgaatgaccgtttgattggaccacaggaaaaacacagaaatcggatgagagagatagactcaaaggaattttttctaagaggttggacctcttgctaactttcctccaaaatctctataggattagccattccataggaattttaaagaatagtataggattcaattctttgttttaaaggcttttataggaattttttccataggattgaaatcttttaaatttcctacacttttcctatagattaaaggggccttgaaaggagaacggtggcatgtggtccataatttgatttggttgatatttctattccaagatataaatacgtgtcccagtcataagtcactgagttggacacggaagaaggttcggaagcggaagtagctgtggtcaggcgtgcgtgtccttctcttcctgcagcacagccgggatgtgcattgactacagtgacagagaatcgggaaaacaaaaaaagaggcaaattttcccgaagtctgatctcatcgtcttatctcatacacgatctctcttctcgcatcaatgcgacttcggaagaacagcgtatcgaactagccattggtcacttgattagttgttttagcttagcagcatgagccaaaattgcacacagttggtagtttatgccgaaactgaccgtaccttgatgtggagcgtgccgcctccgtacttggagccggagtcgttgtggaggaccagccacgcctcgttctcgtagaagcaggcgcccttccactccagccgcgagccgaccgcgcccggcctgtccgacgccgccccgacgaacaccgggaagatgtccgacacgccgcggagagcgcggagcgccgccatggccgcggtccgcggcaggaggggcaggacgtccatggggctgaacggcagggtggccgcggcagcgcgccgacgaggccgtcgacatcgcgtgggccggcggagtagagcagtgccgcggcgagcgaggctgccactagcagcagcagcgcagccgcgatgagcgtgttgttcttcgccatggtgtgtgggaatgtgggatgcgccgtccaggggactcggggggtttcttctcaggaccttagtttatccggttccgtgtgaaaaacgagcagcacggtgactggaggcgagggtggcggtgtttgggacgcaaatgtgttgcactctgttcttgaattgaggtgtgattatttcacttcaaaattaaaagtttggttaaaattgaaataatgtgatagaaaagttgga

SEQ ID NO: 21623 - DNA, 5590 bp, Oryza sativa
aaagtttggaactaaataaaaccttggtgtggttttggcccgaaggagtagtaggtcctggtttagttcctaactttttctttaaactttcaactttttcatcacatcaaaactttcctacacacataaactttcaactttttcgtcatatcgttccaattttaaccaaacttctaattttgatgtgaactaaacacaccctacaactgaagcttcacacgaatttatcacccaagaacagtaatgctgctgatgcgattaggaaaggtaatctgcaagatttaaagacttgtgtttcttgagaacggggtatataaaactacccaaccgattgaaaccgattgaaacgattttatgcttgtctgaggcacgctgatcatgttatttgcccaaagtttcaatcggtcgtaacataatttcagtttgggactacaaaagccgaacgccatgtacagtttggtcggtggatcggtgcgcacgaagaatagtcgggcaccgtcaatttttcccctcagtataactgtaacccaaaactgattatccaaattggtcatggaatgatggaatcatcgggcatcaaaaatccctcgactggtatatactctatacgacgtcacggctgacgccttaaaggcaataataataatacattgatccgatgatccccatctatcactcacctatacagcccaggcgcatcgtactatcatagtaccacaagtctacaggcagcccaaacagcccaactcccagcacgcgcgcgggagctgcaatgggctaaaggccacaagaccgcaaggcacaggcccatgccccgccccctcgacgccgcttgtccgcttcacgtgcttgtgaacacgagaaagcctgccgcaacaacgatcgtcaggccaggcgagcgcggcgccgaatctatcgaaggcggtgcaacgtacgcttccgcgtccgcagatcgcggggagggaatcatcacgggccccggccctacccagaacacgcacaccgcgcgggatgagccgctcccggccctagctagcgtgcacgccatgagtccaggacgcaggctcaaaaacctggacgtccaactgaacactcccgcagttccgtgcatgtagcacccggcgccaatcggcgatcacgcgatccagtggcgatggtttatgtagcaccttcctacctggaatgtctctgtcggatcaggactcagcgctcgctttttggtgaagccaagacatacggagtacaccctccatcctaaaataaaatataagaaactagaattgaatgcaacatttcctagtcctataaatctggatgatatcacattcaattctatgttcttatattttattttgggatgaagggagtacgttcttatctcaggccatgtttagttgcaatttttttcttcaaacttttaacttttccatcacatcgaaacattcctacacacataaacttctaacttttccgtcacatcgttccaatttcaaccaaacttctaattttgacataagctaaacacaccctcagcctgtttttctcttccttcttttggagtgtgggccacaggcaagtttttgggtgccggtcgcgttcagctgtatcctgtagaaaatgcggtgcatgcagatcatctcgtgaagaagatgagaaacgaatagctgccaaaaaaagaaagaaagcaaggaaagaacagtcttcaccgtctgtagatttctatttgatatatagatgcaggtcataactttcatatgtatcttgtgtttggtctcaaactcatcgtcaacaaacaaaaaaaagtgcaattcccacagtggagcgtattcctcaaattagccttctttatacaattgtaaaatatctttacaatgatttcccctacatttatttacatattcttcgacttctttttgagcgcgcggatttttgtacatgtcctgtctgaacaattgatgaattaacccaaatgtattctagctatgcacatcaataagcaccgaaattaaatctggtgcagagtaaagaaaatgtggtcatggaaaagaaacatggaggaaagcgacaaacttcttggaaaaataatcaagcggcgacttaaccaccaagcttaaggcgtagaatggaactcatgactccacggcctccggaatgctctgcagggcgggcttccagtgcgcctccctgtgctggtcgtggtggtgcacctcgccggagttcatgatgtccgccagcagctgctgcgtggaccgccggctgatcttcccgtggccattcccggcgcccttgcgctccatcagctcgtgcagctgcctcttggtgatcctgatggtcacctctgccacgtgctccatccgctcgcggtggccatcgtcctccgacgatgacgacgccgccgcctcgtcctcccactcgtcgccgtcggcccacgactccacggcacgctgcgacgccccgcagttccccatcggtttctggcttgttttttttttccttgtctatgaccaacaacgactagatttctccttccgatcttactgctagcttagcttgatctagctcgatcgtgagctcgtgccttttcgctgattccgtgtccttgtacgctgctctgagatgggatatgtaatgtaatccaaatgggttttggagtctatttatagctgggaggttggcaggggagggcaggaaagagatagcgcctaccggggccaggtcagcgatgattccgcacatgacacgaaccaccgctaatacaattcgtccgtgatgtcacgtggggaggcgaatttccttggctccgacgtggcgagacggtcgtaggatagaagctaatcctcttgtgttcctctccacccggtgccggcctcctagaaaagctggacgaactggcgcgccgcgcgcgtggtgccttgccagtgacagtgagttgcctcggcgcgacgcgctggcaaaagcaatctacgctggcgcgacgcgcgcgccgagcccgggtttccatagaagcaggtcggttgacggttggcagcgcgttctaactgggccggtcctggtgtgaatgggctctggaacgaatcttgagaggcccgttcgttcgcgcttccgtatggtcaggacatgttccctctctcggtggagactttgcggtggcgtggattaggagtactggtgaattttgtcagggtatctggccacgtgttcgttagggataggcacgtttttaaaatttaaataaactttataatttagaggctatacctttttatttgttatatggatcttgaaatggatgtattggtgtaagcactaatctactcacgttacttggatttgaatagttttagtatggtttcgagggaactagctcaaaccgtataactcaacttttagtatgatttttttttgtgtgtgttctctaaacaactgaacaacttactattagatcgcattttatttttggcttatggggattatgaattatagattaattatcctaaactactaaacggtgtaattaaaaaaaattattcatcagcatttttagaaaacttccttaaatcaactttttaatatttctatttaatttattcatctgtcccttgaataatcgtcataactcggtttcatccacatccatcggctacagataacgggtagttcatcccaggccccacctatcttgtagcgcccgttccgtcgtggcgtctagcgggaaaactctctcttaaaaaccctatttgcgaaatccgtttctttgcttgttgtctagtgtccgtgccatctcagatctcaaatccccgatctatcgtcaagttcaatcctgaatccaaatccttcccaaatcaatccctccgcaaaagtctgattcgcctccctcgggttcgatgggccgaatccctctcggcccatctccccctccctccccggctctctctctctctctctctctctccccgctctgcccgtgagccgcgccgagccctcctccctctccgctctcgctgtcgttcccgccgatgccgcccaaatcgccgcgccgcccgcgcgcgcgcgcgcgccgtggtggccgaccggccagtcgccgctgccatcagtgcctgtcgcacctgccccgcgtctgctgcccgtgtcgccgctccactccaaaccgccccgccgtcatcgccatcgtcatcgacttggccccgcctctccccgcgcgtgcctccaagggacggaggcagagctccccccctctgccgcgtcgccctctctccctcctccttttccgcaaagcagcaaggaggcaagccctctttctctcccccctttttcccttttcccctcccgccagcgtcatcctccccccctcctgtcgccgttttggccgcgagcgccgagcgccagctcgctcccttgaccgcccaaggtcggtttccaaaccgacatcgccgccctataaacccaagcgcctcccttcctctttcccctcccaatcttccccgtttctcgcccgcgccattgctgtctctctcgccggccgccgccgtcgcgtgtgccggaggagccggtgcgcgttaggacgcagaaggggacaccgggcgctcgccttcttcctcttccccggcccgaggccggagagatcactcccgtgccgtcggcctctcgtcacagtgccccgcctcatctcggtagtgcattcccccgttctccctcctcgatccatctcctccccttagttttcggtagtagcatgtgtagccttcccgtagctagctggcgccgccccgaccgttgccgccactcgctgtgtgctcgccgccgtcgccgcccgtgctccgtagcgcccgctcgtcgccggcctcgctcggcgtagctccgcccaatccgacgctagcaacggattcccgtagccgcgtagatgctctcaccgccgggaatcggcccctcgtgacctcatcgccgtttcccccttctcccgccgccggttgccgccgccgcaatccaccgccgtcgagctccctccggcaaatccgagccattggctcgtctcccctcgtcctgtgcaacatcccggtgtgctcgccttcgcctgtatcgccatggttcgctccgccgctcgccgctgtcgtccgccgtccgttccggccggcgtcgtcgtctacctcccgccggcccgcgtggcagccacgtaagcgccacgtcggcgccacctcagctgcgaccgggtcaagcagaccccggtccgccgcttccctccgccccctcgcgcgcgcggtccaccgcgagccgtgaggctgcgcgtgggcccgccgcaccacgtcctccgcgaaccgcgcgcatgcgccgcgcctcaatccccaaaccctagcatgccccgcgtgcacctcgctcacggtgagccaagtcgccgacaagcgggtcccacccgggaccacgcgggatggacccggcccaccggctctctctcccccctccccgcccgcgcgcgcgctttgggccgccttcttgggccggccggcccattaagctcggccgagccgccccattctctcgggccgcgccctagccgcccgagggaagtctaatttccctccctccttcttttctt

SEQ ID NO: 21624 - DNA, 11216 bp, Oryza sativa
  unsure (1)..(11216): unsure at all n locations
gactccgttcaacttccaaaattcctcaaatctcgagatctatctaatggcacgcttagaggtcaataatagggctttattttcgccgtttgctgagttgtcccgtttcgcgtgtagtttcgaagcccgaagacccgcagtgcgaggatttcgaggatcaagctcaagatctcgagcgaggcaagccacctttgaacatcttgagcttatatttgaacttaattatgttgcttgaaaaatattatgcattgataggatcgcacttaatctgcttgtcccgtctgcaaggcagattggcggacctacctaatttgttgcatttcacccctccattgtaattgttataccatgttcccttgtacccacctagttgcgcctcggtaatcgtgcactctgcacgggtatcgacggtcgccttcaaacttaaaatctgagaaacatcttgggtaaaacttgggttttacaaaagacttggaaaacccgacacctgggtcggtgcttgcgaactaaatgaatttccaaaaccgcggaccggggaacgtaccgggtgtacggtttcccgctcttgcacttaaggaccgtttccttggaatttcatccgaacataagacaagtacgaccacatgggtggaatgggacacccctggctgagtaactagcttatcgggggagccatgatgctaagagacatgtggattcgccagggtggtgtcggggaggacccctgggcttcctggcatagtatggtctgggacctaatctggtgttggtctgggacccctctcgttggcatatggtgaacctgtgtcggctttcgaaatgccttgtcatgaaagccttaaggtctctagtcgtggccgttctgcacgggctggatgatccgggttagtaatgtcgtgtgggtaaagtgtaccccctctgcagaggttattaaaactgttcgaacagccgtgcccacggtcatgggcagatgtgaggtgattcctagcgtagttttgtttgactactgccttgtgaaatttgctgttgtggaatgggtttgatgtttggaaaatctgcggctgatgggatcagccaggctcgggtggccgtttgaaagctgttggccgggtgccaaccttgatcgattcaaaagactgatacattgcacatactccgaccggacgagacgcactgtctcatccgtgtcgtttgagaagcactcccttagttgtttcagaaaagagtttaaataaaatcaatcacaaaaacaacaacctttccttgaagcctgcattaaacacttatttcccatggcttgctgagtactcccgtactcacccttgctctatataaataatcccccccagttgctgaagaagatgaagcggatcccgctgacgaggagttcttccaggagcaagccggctacgatgagttttagggtttcggcctagttcccaagtcgcgcctgtgatgtttggtccaagtcttggctttcggttccctttgtnatgcangtgtgagctcgggatctgtccgcagcctaacatgactgtactcctactctataataaagagacctctgttgctgtgatattctgtcttcctgtgataccagcactgtttcctgggactggtatcgattaacaggttaatttggagcgtcacgggctagttccggtcgggactagttcggggcgtgacatatctgctgtgagagcaagtataatagtaggctataagccggctaaatgctaaagtgaaggagagaagagaggagagagagaggagaagcgggctataaacttacatccggcttggacataagaaccaaaaaactttatgagagagacaagtgggctatgtattaattgtaaagagctaactattatatgggtaggctaaaaaaaagctacaaagaaccttgtagccaataggtcggctgtattattagcctttctctaactctcgaatgagtgcatcttctagttcccatgatttgttaagcaagtgtgttcgtatatgtttcccaaaaaaaaaaaacgtgttcgtatatatgctttgcaaacggccggatatatacacagacctgttcatagctgttgtgattatcttcctagcatataacgcggagcgctcggcgccgcatggaaatttctgtcatataaagagacgaaatcttcgatcggctacacgcctagacctgctcgacggtggccatggtcctctgcatatatgaacagctcgattttgagacccgccattattgatctggatttttttttcgaaaattattgatctggattagttcaacttcaacatgccgtgcgttcacttcacctcagcataactttgatgcaggcaggacaaagaatgcttccatccattcacaaactttctcgattatttaaaaatttcaggtgttataggtccatcatatatcaatatatcatatatgcaagcttctgacgctggcttaaaggtctaatatttcagtacaaaaatcctcactgtctccttcggggtaatcacgaacaccgactaagtcttcgttgcattggctttctgaaaattcacgaaattaatttccttacccaatccacggtggattcttcttcaacgccattgtgatggagtgcaattcagcagtaagaactaaggaccaatgtagcctcaagacagtgtgtctctttcaggatgtcgatagagttggtgaagacttgatctttttgttgcatagcgaagggcgcgaggtcataccatgcaagccttggttcttggaacaaatcattgtagatatatagaatggaccaattcagtgtggaagatacagtcattgagctaacaaattaaagggccaaagtggtagtaagtgtccatttctgcaacagtgtcactttgactgcaattgcaaagggatggaaattctagttgggcatatagagccttcacttgctggccttattatagctataggtagtggaaattactttgcgaaggctcggttctgacctccgacttaattctgataaacaaaattacaaaatcacggaggagacgagcaatttttggctcaaaattttcattactagctgtgaagttcatcgtctctctgcagttcatcagtgatcatcgagacatctgaggccatatgagtacaaagttcagggacagagctatatcagaaatctgctcaagtaaaaaaagttccagcaatctctctcaatcagtctcgtagcctgtacatctccgaaagaatgacgatcaaactacaatatcttcctagctagagcaactatacacatgtggagaatcaatcaaggaacataaaacagtcctatggaatcaaaagatccactgaataatctatgactcgtcggcctccggtatgctttgcagcgacggccgccagcccgctgcctcctgctcgtagcaaaccttgccggagctgatcatctctgccagcaccttctcgaccggccgccccttgccctcgccggcggccttctccagcagctcctggagctgcctcctcgtcaccctgatcttcacctccacccgctccatcttctcgaccgccgccatctcatgtagatgctgctgctgctgctgctcctcctcatcctcccactcgccgtcgtcggcccacgatgcggcggcgcgctgcgacttgaagcagttccccatacacgcagaaattcagaactgaagagatgcgagatgatcgatgcgtgtatctcagaatctgaagccgcagagctttgctttgtactaggcccttcgctagagttgcttgacggtgctcgggttggtttaatggttgctttggttgcctccgtttgtgagagcttatttatacgtggatgctgggagaagaggaggcgttcagcgcgacgtgccaacttggacctggctggagacgtggatgcgtaggcgtggagaccgagtcgcgcggggcaccaccgagcagcattccatcgggccacgtggacggccgggacatcgagcgtgcctcgcggggagggcactggacggccgggattgggcggggggcgagtcggtggtggggacggcgcgagtggcgggcgtacgtggtgggaaagtggcgggaaaggggaatcttttcagcgcggaggaaggcctgccggtatgaacacggcttttgcaggggatctcccagcgtcgtcgtggtcgtactgatctcgtatggaagaactctttgatgaagccatcgccgttgggatcgggattcctctctccagcgccaatggtatattggtatcgccaactaaaaaaaaccgtgcatatttcggaacggcacttgagaagttgagatcaaaatccgtgccgtgatgtctaccggctacccgccgccatcacgagcagttttaaattgcacctctcgcctgacgttttcgcaggaaagaacgaaagaacatcaagtttaaagtgggtgtgatttgagatccatgttgaaaacctcataaagtataataaaaagcagctggtgaaccatgtctaaactttaccaggcttatcaccaagctagtgtgcatatttttttttctcaacaacttaagattttggatgaaatgattgcacatggtggagcttctgttctatcgatctcagcttctattcttttctcaaccaaactttgtgcattggtggtcctctgtatcatgtagctaggcagctagctcaaaatttgatttgtgactgaatctaacaaagcaagaactataagtctaaaaatccaaatcaaacaaccgaccgggtaattagtactagcataggactaccatgcattttgcttgtctccaaaaaatatatgtggagatagattttctttcctgagaggacattcacgtttcttgaatgacacttaaatagtcatagaaagtttcataaaagaaattaaaaaaatagatttttatgagatatatcacttaaagaaatgcaatgtcaaatttcacttctacgagttgtgatggaagaccaaactaaactgaaactagtatattagtatataatacattcgtattaaatattttatttttttacaacttgtaaaagtcaaattaaacctacatgcctgtgaactcatattaattaacttgtcctttttaacttttcatgactatttaagtgagataaaaaatgagagggtgtctccttaagggaatattttttttctaatatatatgcatatatgatggcctttccaagcttccatgaacaatagaaaattaggccccctttaaaacaaatggaaaacatagaaactctagagaatttttattttatgggagataatctatggagtgctttaaaacaaaggattgattccaaccaatctatttaaaattcctatggagtgaactgttatagaaatttcggagagaaaaataagcataatgcccatatgtttttcttctcgtgtcttgagtttgtgtttttcatgtgtgctaatcaaacgataattttgagatgatctgttgaaacaaatttcacaagatttacggagtaattttgtaggattaaaatcccatagaaatttcatctatttgccttttcaaaataaaggattggagtttttcaaatcctatgaagtttcttagaaatggcacaatgcatatagattttagagaaaaaatagtaagagctcgtacctcttgaaaaattttctatgagtttatctctcatttggctactacatttttcctatggcctattcatataatcattcatttattttcctcatgttttctgattctctattttacacttgcatttaacatgtgtttgttcaattcttccgttttcttaacactacgtttaaaaaaaataaaaatttcgtgtgtcttaaaatcctattaaattctttgtgaatattacattgtattcatactggttttcccttcacgtcttttgataatgctatgtttcaaacaaatccttaacattgttacaagctagcaagtggcaagcttccacggaattaaacatttgtacgtagccatttatgtggagacttcctctttaagataatgcaagctttatgtgcaggctttagctaattccgcacaagaagtctgcagacgcagacgctgaagtaccattgcgatactattatgtcatttctgcgtcagcctagacccttttccatgaaactataattcgtatggcgaattccaccagtttttttattctcacctaataattgtttcatctgttaaccaccagctgcattgagctgatcggaattgacactttggtggacaaaacaatttccagagccttgttgttgggtagtggccgggagagcaacgtacaccatctatccgcggtcaaaacgacagcaacgccaccactaattcgaaattaaatcgattgattggcacatcgagcaaccctcgacgcagacttttgtcttgtcaacgtgttggtgagagcacctactagtgtgcgtcgactgatatctgccccccatttactttgatatatgtatagaatttatggaaaatattttttacttgcaagtgcttgcatccatggccagcagctcaaaatgtatggattaatttgtggtgaagatggcctttcaaacttaatgctcagatgtgctgagttgtttgggtcaagtctcacaaaaaaaacttataaatgtttagtaataatttcgtagtttactactactatgaaacattttcgttgcgtctgggtttgttttacaagctggaaaaacaatgactacctaactgctagtaggtaactgaacattttgcgcatgaaagtgttctcttgaaaaactaatcaagatcattatcttcaaaaaaaaactaatcaagatgtgtatactactgtttcataaaaaaaatcatccaaatgtaggataaaattagcttattctcgcctcatggagcaatcaagtgaacaaaactgctctagatttttttaataccgtgttgaaccaaaaggaagtatagtaaggtttctgtttagtccaagctctgctgtctgcatgggtaccacaactttaccagggagcagtagagcacccaatcattttgagcagatctcgttgaccattaagaaactactacctccgtctcaaaataagtatagccatgattttcagcgcccaactttaaccattcgtcttatttaatttttttttaaaaaaaattaaaaacataagtcatgttttatcatcttataacaataaaaatgctaattataaaaaaatttcaaataaaacggacgatcaaaattgggcgtgaaaacttatggctgtacttattttgggacggaggtagcaatgcacgaagggcacttaattgctcccatgatcatcatgcattttcacatgaattaattctccattttccatgtctcagtaatggattgtggacgacagatcatcttctttacaccgttgtatctgtcatcacttaatcatcctactaatttacatcgttcgtggaatctgagctaggagagaacaacaacacccataggtcacaaaaaagctgtgttccatcgaacgaagctgcaaggatgcagccagagaaaagcaaacgaagttggccacgccactgcaggacgtgtcatgactccatggcggcctccgggatgctctgcagcgcgggcttccagtgcgccaccctgtagtgctggtggtagacctcgccggcgttcatgatgtccgccagaagctccgcggccgaccgccggctcttccggtagacgtggtagccgtggccgccgccggcggcggccgccctcttgtccaccagctcctgcagctgccgcttggtgatcctgatggtcacctccgtcatgtgagccccgctcctcggcggcgcggtgccttcctcccccgactccggcagctcccactcgccgtcgtcggcccacgacacggcgtgctgcgtcacggcgcagttccccatgtatgcgcagagatgatcgagatgatcttctttcctctttctgggttgatttctttgctgttgctgcgctgctttacttccggtgtcggagtaggtgttcgagatgatctttgtgtgaccgattcggaagggaggcagccgttttatagtttcgaggtaacccgggtcggtcgcggctcccatcacctaaagttacgccgatgtggaggtccagtccaacgtggacgccgaggtggacggcggcgggtggtggcccccgcgcgggcggtggtctgaacgcggggacgtgggggcatctcgcataggtgggatcgcgacgcgcggggtgggaacgcggcttttcgagggggattcccctacgcagcacgggcgcggcacgagccacaggcccacagcgaccccaacgtgcggtttgctttgagttgcttagccgcggcgggttgggaggacatcgcgcttggtttggggctttgggccgtcgtgatcgccgcgtgctgttcccttggcgtctcgtcggtggcgcgcggccgccgaccggctatagtgcgtgagattgatcggcggcggtgaactggcaactcacgtttgacacatcctgtggcggtttgcccatgattggggtgtcgcctcaattagttcgtgtggttgatcgttggcatcggatctcgtcacacctcctcccgttaactaatcacgtcaattaaaaacctgatgcaactgtgaaccaccgcaagaattttcctctgtagttgagacttgatactcagggaagggatgagctaggagttccaactccaatggtacaggacatgcttccgtgtcggtggcgttcatgttcatcccgttcatttccaccgctagagcgctactgtaggaacgatgcttgcacttggccgggtggcatgaactggcagcactccggcacgccgagccactgtgggctaacacgcaagaagttcgtatcagaagagttgactcaaatgattgcacaaaggagtagccacgaagaaatttattgacaactcatgtctttggcaaaaactagatttatgaggctcatttctttcacagctgtaccacctccgtcacatgatatagaatattttaaaattaaacgtaaatattaaaaaagataaaattaagtaataaaatattatgattagttgagaagtggagacaagtgaactaaattaaatgataaaatattaggattgaaaatgttgatggataagttgttatattttaaaataatttttaaacactaaaagttattatattttagaacgagaggagcgatatttatgtagtgttttcatggacaaaaggaatttgcactgcaaattcgtacgcactttggtgagtcgatgtgaacggaatatctcttgtatctgatactctgatgcgtcagcgtattgtgttgtgtgggcttgtagcatccttccaccaatctggttcataaaccgtgtgcgcttcaattgtcccaactcccaaagcgtacaagtgcgcgtagaaggctgcactagccactggccgtctggttgtgccgtttaactttgacccactttgctctcggcttctcgctacttgctagtgcttgtaaacagcaaactctcgcttcaatcttatcgaagcttagccaacagactgtacacgtcgtgctcgcaacgtcatggctcttttgtgtctcttcttcatccatcaaatgggaggaaaatggtaaagtaaatgctacgagaactacagacgacagatgtttcaggattggacactgaaaatcagaacaaattaagccccctttacactgtacaaattacaaaaagatgcaatacgtacgtctcttgggaccgaaaatatagttggaatctgagtgatacgcaatatcacagaaagttgtttgttacaacaagatatgttttaactaagagaacaattggaaagttgttttgccgaaagatagcaattggaaaggcgaggataatgacactagagaacaattccgtttggtcgactaggtgcaacaacccaactttgtcttttaactaagagaactagtttaagaaaattctccaactttgggtaacgtttcattagactggtgcactggcatgggttaattaaaaggactggtgcactaactgcgccttgcaaatgacaaatggtgatgcttgccaaatgccaattatatatagaacttgttcttcagtaatattattgattctgatctactcatgtacacagtgcaatctatagcatcatttcctggcatcactattacaacattaactcgatctagagaaggaaaaaaaaactgagaatcatttttccgattggcggttggtttcatgtgtgttataatagcattattttgatcttttatcattgtttatgaccatagagggcataaagcttgtaaatttaagtagcaaatcatatcatgcatgttgtcgagttgaactctaaaacgtactttgcaattggagaactttagcccggaacttcattcagcttcagcactgccaatttatttgtctgtttcgggtgataaaatttcactggaataataattctcacccttcattcaattcatactttgtatagatgcatacgcaaaatctagccacatagtactctcttctctcggcccccgcgccgccctccctcacgggtgacacgggaggcgaaaacaatcggcatcgccgctcccccctcctccctctgccgcccgagcggccgccggcaaagccgcgcggctgcaaggacggcggcggcggggcttcgtcgcctttgtctgcctctcctgtcggcggtggggggccgcgcgagacagcaaaggccgcccagatccaggccgcctcggctggatctggcggggaggccgccggcggagggttggcctgaggtggcggcggcaattggtggtggtggcggcggggattgaagatagcgaggtggcagcgacagttggtggcggctggcggcagggaaggcgacgacggcggcgggggcgacggcggcgtcggggatggtgagggggcgccgccggcggggatgaagatggtggcggggatggaggtggcggcgaggttgacaacggcgggtggctctggcggcgagaccggcgacggcggccggatcaggtgctgcaggccattttggccccccggagggcggatctggcatgctgcaggccgatttgcccccctccccccgcatggcaacgacgtcggggcggctgcattggaggtggcgacggttttgcgacggcggctgctggcgtct

SEQ ID NO: 21625 - DNA, 2103 bp, Oryza sativa
cggcgcagcatcgtttggagaaggggtcggagaacgtcttgtcgcagagtggcgcagccgatggcagcggaggccggctcggcgcgaaaggcgcggccggcggagatgaaggccggcttggcacgagaggcgcagccaatggagggaggccgaattggcgcgagaggtgcgtacggtggaggaggccggcttggcgcgagaggcgcggctggcggtggaagaagcgacctcggtgcgtggtggagctgccggtgggtgtggcgcggtctttagcgcgagaaggttggccggcggggggcgtcagtgcagggggcccacatgttggtagagtttgagtggtggtggagcatcggtgtgtcagccgtggattcgcaggtggcgagcagcgggtgaaaacctagctcggccttggccggaccgacaacgatggttaattccccctcctaagggcgttgttgtgctgtctcacccctcaagggtggttgccaggcgaaagcccagtcttgcctcctttgagccctgacggatggcgacagcggtttttcgttgcttctcttcttgaagacgtcgttttggcaccccccttgctatggcgatctcgtctatgcacctttgttggtctagtggcgaccggtccggtgctaaccttctcctgtcatgtgtgttggcgctgccggtgtgtgggtggtggtatatttttttctttttcttggttatgacctttcagggttgtaatcttgtaattttttactgctctatcgatagaacaccgcaccgtctcgtgcgagtcgttccatgaaagttcaagtgccattgatttggttttgatgattaataacaaatccaattatgtgagactaatgtttttataagcatttctttgcctagtctcatgtggatatgaaagtggagtgttggtggacctaaatcacaaggatgaaatacatggagatcaagctatatgtatcactctttctcttcatgtacatattgatatgttcgtatataatatttccacgtgattggcatatgcatgtgagactaatgttttgtttgagtattatctcttatttagtctatttacattgagaacgtggagatgatgaaggtatgtttttattttattgtctatatttaataaatgccttctattcttatataggataagctctcaatgtttaatatcttgttatgcatactcttgcttcacacaaatattttgtacgcatacatttagggggagcaaatcctatactttagttatgcatgtaatcgatccaaattattcaccttcatttaattgggatctttacacttgaacatatatttgagtatatgacacttgtggtgttgattaatactcatcatttattcatatccttttatacatgcgatcggttggtcaacatgtgtaggttgacaaccggatcattgggactaataattttattgagttgaatgaaagaaataggtcccaaggattacaaaggtgttgatgctcaactgatatcattacatctaacaataccaagaatgacaaagtgaagatattgaagatgtgtgatacgaagtggctattatggcgagacggtgaagggcaagcgatgctcggtcgcgatggaccatgcggcggtgaagggcaagcaaggggcttggcaccgaagaaccaaatccggtggtgaagggcgagtgacggctttgtcatgatggaccgttcgagaccatttaaagctacaagtaaccgcatcaatcatttgaagaatatatggtgaaacggtatcggcattggcgtccctcaagacaatgaaagaaagatgaaaaaagggcatttctaatggtgtagttctcttcttatttacatttgaatttaggaatgccgtactattaagagggatgcaacgtcgaggtgtttgtgtatgtctcggtgctcaaagtgacctatcatagtgctaccttgagagaaacccaagctttaacctatcctttgagtgtttttagaccttggttttggttgagttgggtagtcctttgagtgagctttccatagagtccaagttattcaaaaacggactcccgagcgaaaagttatagtcgttttactct

SEQ ID NO: 21626 - DNA, 3375 bp, Oryza sativa
tgtggtgcctctttgtgagggggatttgagaaggggagagagttggattgagagagtgaggagttgagagctagtgagcttcactccatcctttgtggtgcctctttgtgagagggatttgagaagggaaaagagttggattgagtgattgagaagttgagagctagtgagcttcactccatactttgagcactcgagttcatagcaagcaaatcttcgattgtgtttgttactcttggggactaaggtctcctagacggctaggcgttgccggtgagcacccaaggttgtggtgtgccacggaaagtttgtaaaggctttgatttcgcctccgcaagggaagaaatcaagagtgaaaccgaggagtgcatttgtgcaccctcgtgaggaaagggttgaaataggcccggcccttgtggctcctcaacagagacgtaggatccgtggatccgaacttcgggaaacgaatcgcgcgtctcccctcttggtttgcctgttcttgcattctctcatattgtgcttgagcttgtttttacccgatctacttgcatgcttatttgatttagtttgtgaccttatatcttgcttagataccttatttgtcaccttttgattcatatacattttgtttgtttgagctacaagttcatagctagtgtttattccgttatccaccgaacttttcgattgagaccggaacttccaatcccataccggaagtttcgatttgaatcaaaagttatcatcactctaatatgctatgaagttgtgataatttttaggaacacctattcacccccctctaagcgatattaaggtcctttcattccaaaaaaaataattctctttttgcgcacacagtaatatactgactaggcctctatcctaaaatcaaactattttgttcaagatagacactttacttatttgaagtgtcgaggaagaacagatcggcccagcaatccatcaattggctcgctttcttcacgttcatcatgcttctctgtgacatctctactattataagtatatccagtatcccggtgtacgaaataggcctttagtccactttcaatcctcgtttcttcaagtttgatttttcaataggataaagttcttctagaggcgcacgtggtaaataattgtgtttgaaataatattatatgtcctttggtttttctttaaacaaaagtagcagttctgccgatcaaattagatagaagaaaaatcagaaatggtgcaaaatgacatataattgtgcagactggcagtcactcattctgggccctctggggcaacactgaatccgtcactttcttggataaaattgacttgagtaatatcactgcataattctacggaagagcattttaattcatccctcaagaaaacatcatctcattttcttgcatgttatctaaaaagtatttatttttttaaaataagatatatctaataaatatgcaagtttaaattcgacttctataagttataaaaaaatagcaaatatagttgtaaattacacatagtactagttttaatttaatttgttcattttattataacatgtagaaatcgaatttaacattgtatattcatggaggagtgatatatctcacgttaatctatctcaatcaattattttttaaaaaattctataatatatatttatgcgacatgcatgtaagaaaaaagctctcgagatccgaaaatcccatatgctatgtttggcagccatacaaactacaattacaaaatcgatgcaagttgactatgtaaaatatcagccgcacacgcccataatatacaacttcttccatgttccaacacacacatcatggaataagatggacatggcaagccccgaaagctaaacccacaagagcacgtaaaagaagaggttaaatgatatcttccaaaaaaagagctctatatatatttctttgttctgttttttctccatctctattaatatacgaggtaaagcttttgccctctttaaaaaaaaaaaggaagaagacggaacaggggcaaaagtaagcggtcattgcatgagagcaaagttttttttccccccggggaacaaagagtttcttccatcaaaaaaggagctcaaaggttcttggtaggcaaatcgttgtctaagacccaaagctgcagcggcaggtttgttgatgtgcatgcttgaccaaaccgcaatattggtgagtactcgtgtctaaacctgattaaatttattgggagccaatgtcacactagaacatcaatcttgaacacttctcaaacgtgcaaccatgggaaaaggtgataaggaaggaatactgaatcctgttttatgatgtgaacaaagtggcatcaaaggaatctccggtatccatatatagagccatagaggtacaaactgcgtacacttcgattgacctcataacaccagttgaaattgatggcgattatttcagtctaataatttttatttatgtctttgcggcctttgttatgatgagggaccaatagatagggcccaaggtggcaggagagctaaaaagacaaggccggtacagccgacgtactcatcggcctaacagctgcacaaacaaattaaaatagaataagttcactttaggtcccttaatttgccgccgagtctaagatttgtccctaaccaaaataccaaatacaacaggttcctcaatttacaaaaccggatcatctaagatcctagacaatattatacccgattttagctgacgtggcaagccgagtcagcatggacccacatgtcagtgtctagtattctcttctcctctctcttctctctcccctctcccctctctctcatctcttcccacctaggtcacaaggacgggcggcggccggcctagcgcgctcacacgcaacggtttcccgtcctccatggccacgcccggcgtcaccggtgccgttgtctaggacagcgccgtcgtcctcgccaagttccttgagcgtgccgtcaagtcggtacgccttgctctccgagacgcgcgggcgctcgagctgggagtaggttgcggccttgctggctgcgttgctaccctttttggagtccacgtcctgctcactgccctccctgaccgcctcaagctcctcaggaagaacttctacctcaacgttggggacgacgcgaggggctctgctctggtcgcccaactcgtcgtggggtgatgaacctcaaccggacttgctcaacccacctttagctagattacaggtatcctcttaccctcctccttctcctcttcttcttctccttcccggggatccccaccttcatcagcatgaaccttccctcctcccggaacaatcggaagcacacgcacggctccttggaatgatgta

SEQ ID NO: 21627 - DNA, 6418 bp, Oryza sativa
tcaccgtcttcgtcgtctttaactatgtcgtcgtgtcctcaaggaccttgctcttgtcgacggcggcgacgtcaatccacaacaccgtgtgtacaagagggcttgatgatggcgacggaagcaggcagggcgccgccccttctccccgccggccgccgccggtcccggtgcagattgggaggaaagggaagagaggagaggagaggagagagagaggagagtactatttactggcatgtgggggccgcgggagatgactcggcttgccacgttaagtaaaaccgggtataatactgtctaagaccttgggtgatccgattgatttgagagacccgttatatctggtattttgaattagggataaattttagactcgacgataaatttaaggaacctaaagtgaactattctaatcaaaaccagccccatgctttcacttctagcccatcacaactctcgcgtccttcccgatttaaccaggccgtcttctagctcagtgtgtcgtgtatgggcttcattgttggcaagtcctactggtgcggtattcgcaagtcctactgtcatacagcagtaacaacaccgagaaagctatttgggctgtgtttagttccacgttaaaattaaaagtttaaagaaattgaaatgatgtaacggaaaagttagaaatttgtgtgtaaaaaagtttaatgtaatagaaaagttaaaagtttgaagaaaaaaaagttggaatcggccttggcgtcgagatttcctcaaactgccacggctgactgccaatacccaatagagaatagactatgttctcccatgtatacttggacagttgatcatccgaagacgcaagcaacttttgcattattactcctttccgttctttccgcccatccccttaatcccatctgacctgaagtcctgaacgcctcacacctgtccccgccggaaaagataagcacaaattcacaatagtggctcgaagggccaaagaaccgaagaactcaacctctcaaaaaaaaaaaaaaaccgaagaactcaagaagcacgcgcgagtcgcgacgccatcacgagaaggtggaaagctcagtagctccttcgaggcggaaccgcggaaggggccctcctcctcggctcctctcctctcccctctcggtgccgcctgcgccggcctccttgcagtctcacgctgcgtgacgaaagggacaaacgcgcgctcgacttggccgtgtcgtatcgtacgtgtcgcggccccgtgtgcggaaggaaggatgggctgatgggcattcgctgaacccggcgtgacgcgagcagcgcgagcgcgacgccgcaccggtgacctggccgttcgttttgtactatcccccctagctttctccaccaggaccaaccaccacgtgccccttctggttgcggcggctgctggccaggtgggctggttgagcaccatcatttatcacgtccctccgcagtgatcgcctctgctacaggactacaggagttcactcctgtacatgcgtgacaggtgcggtcgccctatccgattcacgcgatgaccaagctagctgccgtgttcgtgtgggtacagtatcttggaagacaagggagaaaggttataatcatgctcctgttgtctgtctggagcaagcacggccttgagcatcattggcgcggtacgtatgtctctttcgatgttgaggcgataatggagcacatcttttcgtattttcatggatgtcgcatctacgatcgttccgcgttttcgagcgagttccttaggcgcgacgtgtcttaagacgttaggccgcctctggttaattctgtaacggctggcactagctagttaacgacgatgcatgattcaactttaacagacgttaatcatgcatccaccaatggctacggatcaccttttgcaaaatcctcccatcctcgaatgatgatgatcttctgcctcctttgtgttcccgtcaagacttttggctacgatcatgcatacagccgatgcaaccaccgtgacgccgccgcgcgcccactggaacacgttgcgttgcagctggccgatcggtctcggagtcggagcgcaccactgacccccgtgtggccgtgtcccggtgccttttccacgcccaccgttgctagctaccgagccccccacgtacccctgggccgcgcggcaaaaagacgtgctccgcgccgtcgcctccgcgcccctgccagctgctcgaacggcagaccgccacaccgcacgcgaaggctttgaaagcccccgccgcgtttggccattacccggcgccctacagcgacggacggacggacggcgtcacggcggccgaaatgacgtgaacgcccctgtggaaaaggaatgaagcgagcgcacagcgcactgcccatttatttctggagaaaatctgtggcgtgactcgactcgaggacgttgtctgcatagaccgttccactacttgaagtcttgcagggacctagttattagctagctagcggctgccgcctgccgcccagcaaaatcgagcacacagggaaagcgccgagaagaatagtggacatgggacgggagccggagatggaggaagcacgggagaatgggggcgtcggcggctctgtgctgcctctggcctcgctcatctctccaactgggaacgaggtgctcgtcccgttcatgctttgtttctgattctctactcgatcggttcttgtcggttaaacttgcttgctgttctccggttttaaagattgcttatccaggccttgtactgtggcaagcgaacaataagcacatccttgatttctggggtggatttgaacatgctaggctggatataaatcatgcgggtgaattgatctgatattacgaaaatcaatatatattgtgctatggatgtatcagttcagtcagacggcaaaatcaaagtgagtaactcctcaggaatggttgactatccttaatcatcagtttttcacgatgaagctgcaagccttatgatcccatcgactgttgagtattaacctctcaaacaagtggctaggaacggggtgccaaagaattgaattacgatcctaactcctttgccagctctaagaaatctcaagtcccaactctcaaggttatacttataaattacagtataagattattttttggttgcaaaagtaaaaacgcaaaccgaaagaaaggttctaatataatacgcagatgcttttttttttcttatagagaacatccaaactgtatgtggattttgtgaaatagaagaggaatcagatttcggcttttagaacagttcggtattctgtagtccagtccacactacaagaatcagaatactagcttcgtgcagaatgtgtttgcaactttgctgtctcagtgttgacatctgtacgccttcttttgtaccgggaagcattcctttgctgccttttttgccatatcttgttccccatttctgtcagccatacatggtccaatggtccatgaacaatctgatcaaaactcaaaggaaggtgtatttttcacaggtgcagatttctgagctagagggcaagatcatagggctgtacttcgctgcaaactggtaccccaagtgcgaggccttcacccccgcgctgaccgccgcctaccaccagctcaaggagcacggcgccggcttcgaggtcatcttcgtgtcgtgcgacgagaatcgaccgtccttcgagaggttccaccgcgccatgccgtggcccgccgtgcccttcggcgacatcgggtgcaagaagcgcctcagcgagaggttccaggtcgagggcatcccgcgcctggtggtgctcgccccgaacggcgaggtcgtgcagcctgatgccgtcgagctcgtgcaccgctacggcgatcgggcattccccttcacgtcggcgagggtggcggagctggaggccgacgagcagcgcaagttcgcgtctcagacgctggagaagatcttctccgtcagcgggaaagactacgtgaacggtagccaagaacaggtaagttttgttggcaatatagtcattaatcggcatattttaatccaagaaattgaaacaatgatcatggcataaatagcgtagggtgatcttaacataaccagtagcatactaggcgcatcatgaatgtcagaaacaggaacataccagtaacgcgataacatgctagaggcatcatgtagaacaggaacaagaacatagcgcacatagttcgctaacaatgggaacatgaatagcgctagcaacagtagcaggaggagaagattataccccgagaatggccctccgctggatggtgaggcagaattgcctccgttgttgttgttgtcgttcacggcacctcctcctggcgcaccagctccggatccggatccagctcctgtcggcggcgtaccacctccgctggcagtggcggcggcaactccagacatggcgacgagcagtcgtgtgggaggcactccccaaaaacctgatcacccgcctacccggtgcagatctcaggcgaaggtgtggtttcggaggcactgctctttccaatctctcgtgcgcgcaagagatcagaagcgaggaagcgagagcaactcaggcgcggagaaggagaaactaacaccgggaaagaagcgaagaagacggatcgaactcgcggcctccttatctatcaggagaaagaacgtggacgcgctgttgcggagggaatcgtgggaacgtgggttagtggctgcaaaaggatagcgacgtgacgtgacgcacgcccgccgccagccagccacgcccacggcacggcacggcccggcccggcccggcgcgcgcgcgcgcgcgtgtggcattccgacccccacctcaactggtcaacagggagcctccaataactccctatttaggttgagatatttctcgcttaaatcctaaggtggtattattatcctcaacatttattatgggcctttgagatttaatattataagttgggcctagcccaattattctaacaatccccaccaaattttaaggctcataagaaatgttctcaatgttgtgcctgtttgatataccagggttttggtggagactgttaagttgaacttccacctaggaaatgagctacatcagaccacaactgaacagtggactatgccttgaattgtaagttttgtgtgatcaggtttcactcagaaccttgactggtactgggctgccgttcgcatcccctctgtttggagcatataagtcaaactccaggcctttcatgagtatctagagatcgcccaaacctcatagactgtgactagcagtcgaactcatataggtgtgttccttctgagatgttctgcaggtcaacatctctgcttggaaaagccactcggatcacattaagacataagccatcctaccatgcagaaaagaagagaagcacatcatgaaaatgagcccttttcaagggtctcttctctcagtcacacaatagtttgtttcaccatccaaattcacgggatctccgatcacaatggacaggtttccactattatgcaaccttaggtgggtatcaagcccatttccctcgatgcactgtctatcacattacgtggtagccccttggtaaactgatctgccagatttctagccgtttggacatagtccaatgctatcactccggagtttttctgctttctgacagatttcagttttctcttgatgtgtctagatgacttcatgttgtcctttgaactgttcactttaataatcactgtttgattatcgcagttcattaggatagctggcactggtttttcaaccaccggcaaatccatcaggagttcacgaagccactcggtctcaactgtcgcagtatctagtgctgtaagttctgcttccattgttgacctcgttaagatggtctgcttgcaagacttccaggaaacagcgccacctccaagtgtgaacgcatatccacttgtggcttttatctcatcagcatcagatatccagtttgagtcactatacccttctagtacttttggatacccggtatagtgaattccatagctcaaagtgccctttagatagcgcattactctttccagagcctgccaatgatcgtctcccggatttgagacaaaccggctcagcttgcttacagcaaatgagatgtcaggcctcgttgcgctagccaagtacatcaatgaaccaatgatttgagagtatctcagttgatctcttactattcttcggtttttccttaatagcacgctgggatcgtaaggagtaggagctggcttgcagtcactatatccaaagcgactcaaaaccttgtccacatagtgggattgcacaagtgtaatcccaccctcatctcctctttgtagtttgatgttaagaacaacatcagcctctcccaaatccttcatttcaaaat

SEQ ID NO: 21628 - DNA, 1290 bp, Oryza sativa
gtgtcaatcttctcatgccattgcttaggtccttgcttgagcccatacaaggatttcaatagtttacacaccattccctcctgaccttctagtacatacccgtctggttgatccatatagatctcctcctccagctctccgtttaggaaagctgtcttaacgtccatctgatggacgagaagactatgagaggctgccacagcaagtagtactcgaatcgtggtcaagcgagcaactggtgagtatgtgtcgaagaagtcctcgccttctttttgggtataacccttggccacaagccttgccttgtacttttcgattgtaccatcaggcctaagctttttcttgaaaacccatttgcatcctacgggcttgcacccatatggacgctcaacgacttcccaagtaccattagacataatcgagtccatttcactgcgtactgcttccttccagtagtcagcgtcaggagatgaatatgcctcttctatggttcttggggtgtcatctacgaggtatacaatgtagtcatctccaaaggattttgcaaccctttgtctcttactcttgcgagtatctacaatgttgtcctcctcaggattttcctcaggcgtttgatcattgtgttctatcggtgcatagtgctcatggggcatgacagtttctttactagaagtgctaggtgtatatttcataggaaattcattctcaaagaatgtagcatctctggactcaagaattgtaccagcatgcatgtcgggtactccagagtttactattaagaatctataacccacactgtggatagcataaccaagaaacacacaatcaacagtttttggtccaagtttccgctttttggctataggtacatttaccttggccaaacagccccatattcgtaggtatgagagatttaatttcttcctttcccattcctcgaatggtgttacttccttttgcttcattggaattttattcaggacatgacacgcagtcaaaactgcttcaccccaccattccttggaaagccccgcagtgtctaacatggcattcaccatctcagttagagtatggttctttctttcggccaccccatttgattggggtgaatagggaggcgtcatctcatgaataattccaaactcttcgcaaaaggatgcaaactcattggaaaaatactccccacctctatcagacctcaactgtttgattttcctttcaagttggttttctatctcagctttatagattttaaagtaatgcaatgcctcatcctatgttttcaataga

SEQ ID NO: 21629 - DNA, 7819 bp, Oryza sativa
catatttagatacgacacatttattggactcaaacacaagtctaaaaccttctctacacaatagagagccgctaactagattcttctttattgaagggacatgctgcacgttcttcagctgcacggtctttcccgaagtaaactttagatcgaccgtaccaacaccgtgaacagccgcaagcgacccgtttcccatcaacaaggaggaacctctcccgacctgataagaagaaaacagagaaatatcagcacatacatgaatattagcaccagtatccacccaccaatcaggtgaatgaaaaacagagagaactgtaggtaatattttaccgtaccccgatgttcctccgccctcgctaatgatcatgttggcagacttcctgtctttgcgctcaggacagtccttggcccaatgcccagacttgccacacacaaagcagtctccctttgcctttcccttgcccttcttcttaaaattggttgcagccttgggtttgacatcaggcttgactttcttgttgttgtgggatgcatgagggttcttcttctgtaccatattggcactagaacctccctcaacctttttgccccggacgtcctttgccctcgccttctcctcaacacccaaagagccaatgagatcaggaacactgaactcttgtctcttgtgctttagagaagtggcaaagtccgaccaagaaggtggtagtttggcaataatgccacccgccacaaacttgtccggcaactcacagttgttgttctcaagttccttagccagcatctgaatctcatgagcttgttctactacagaacgatcatcgaccatcttgtagtcatagaactgctccatgacatacagctcactgccggcgtcagagactccgaacttggcctcaagtgcatcccacatgtccttcccagaaggcatgtgcatgtacacgtccactatgttgtcagcgagtacactgatcaatgctccacggaacaggcaatccgaagcctcgaacatggcctcttcctcaggaaaaagaggtggttcacttcgtttgccccgtgaaacataaaagcactgcatcgctgtcaaccacaatagtgcacgtgctttccatctcttatagtttgaaccatcaaaagcatgtggtttcagtgcagcagcaaagccaactaccgaaaatgacctatcaggtttttggattgttggcaatatagtcattaatcggcatattttaatccaagaaattgaaacaatgatcatggcataagcagcgtagggtgatcttaacataaccagtagcatactatgcgcatcatgaatgtcagaaacaggaacataccagtaacgcgataacatgctagaggcatcatgtagaacaggaacaagaacatagcgcacatagttcgctaacaatgggaacatggatagcgctaacaacagtagcaggaggagaagattataccccgagaatggccctccgctggatggtgaggcagaattgcctccgttgttgttgtcgttcacggcacctcctcctggcgcaccagctccggatccggatccagctcctgtcgcggcgtaccacctccgctggcagtggcggcggcaactccagacatggcgacgagcagtcgtgcgggaggcactccccaaaaacctgatcacccgcctacccggtgcagatctcaggcgaaggtgtggtttcggaggcactgctcacccgcctacccggtgcagatctcaggcgaaggtgtggtttcggaggcactgctctttccaatctctcgtgcgcgcaagagatcagaagcgaggaagcgagagcaactcaggcgcggagaaggagaaactaacaccgggaaagaagcgaagaagacggatcgaactcgcggcctccttatctatcaggagaaagaacgtggacgcgctgttgcggagggaatcgtgggaacgtgggttagtgttgcagagggaatcgtgggaacgtgggttagtggctgcaaaaggatagcgacgtgacgcacgccgccagccagccacgccctcgcccacggcccggcgcgcgcgcgcgcgtggcattccgaccctcacctcaactggtcaacagggagcctccaataactccctatttaggttgagatatttctcgcttaaattctaaggtggtattattatcctcaacatttattatgggcctttgagatttaatattataagttgggcctagcccaattattctaacaagtttaagagcgtcggtgcatggcacaagatcgagcttgcattaccattgccgttgatccaaagcatgaatgcatccagctgttggcctcaccatggctaagggctgcaggttcccatctcgagcctagtcgggaagacggtagggctctacttctcggcgcaccggtgtgcgccgtgcatcaagttcaccgcgaagctggccgccatatacagcaacctgaagggcaaggccgaggactttgagataatctacatccccatggacaaggaggaggacgggtacctgcggtcgtgcagcgacatgccgtggctggcgctgccgtacgacgacggcgcgtcgtcgggggcgctggccaggtacttcgacgtccgggagatcccgacgctggtggtggttgggcccgacggcaagacggtgacgagggaggggaggaacctggtgaacctctacttcgacatggcgttcccgttcaccgacgagcagatcaggctgctgcaggagatggaggacgaggatgccaaggggtacccgccgtcgctgcgccacaccggccaccgccacgagctaagcatcgtgtctgacaagtcgggaggagggccgtacatctgctgcgagtgcgacgagcaggggctcggttgggcgtaccagtgcatcgcctgcggctacgagatacacctccggtgcggtcgggacatggaaggcagggcggaataggagcatagggccctccaactcgtagtatattgaactgaacgtggtgtggtgtggtgtgtgtctattgatctgaacaaagcttgggttgctcttgccaagcctgatggcagaatagatgaggataacacaagtggtttctgtacttctgttatgtgttccttggctgcaaaagtgatgcagttcagggtgttgaataaacgtgataatgctggatacgaacgaagacttgggtcttgccttgcgtctccctaacagcaaattaatgagcccaagcttagtttcataacatattataacctccacagatcacatgatcacatcgaagtcttgtgcgctgtggctgattaatactagaatttatccagttcaaaagtgatagtaatcgatagtgtaagagctcataggagatgaatgccaaatccaaacaacaattgcatgagaagcgaaagcttagataaacacagtatacttttgtttagtagacaatataacagaaccgaattttcatataggtagcacgtacaaaccatattgaaacaagttgcatcaataaccaagagctcacaccgacacaaattcaaatgtcttagaagtagtaaaaactggtattatcacaacttcaggcttcagacacttcaatattttgtatcatataatagcacataggcattatgtgtagcctaaaacccgtgtattttgatgctctctttctttacaattccagcctagccaaaatagaagctcatcagataaaagcaatctgaacaaatatgaagataagcgttggtatcatatagattacctgaactaggaacgtcgcaacatttttacgctgatcaccttgaagttgaatgacctgaaaaaatagcagaacattcatcattatacacattcactatttcacaccagacaatgtgaatccaacacaacagaaatgctattttgtacctggcctaactctggatcttggactacagtaccattacaacagaattcctttttcagatccttgaggattttgttgtaactgtactctttcttcaagccctgaacagtagtcagactctttcttccgttgcgctgctgaatgcgcacgtgtacatagtcctttgatccagcaccaacgctggagtcctcagcattggcttccgcaaacggatctacagggaagatttcaaaattatcaaatgatgggttcaggcatgctcagaatagactaccagttactcctaatcaaaattaaatagaaacgaggtaaaccagataagatacaattctaaacaatatagctcgtaactggatatcaatatatcctgttgactgaaatatacaactaagagtaatctaaagtaatttagaaaagaaatataaatatttattctctaagaagtagaacctattgatcaaatcgttaaagcttgcacaggcgatgttatgataactaaatatccaaggaaatgtgtgcataccaaaagctgatggaagctggacgtcgagatcagacatgaaatttgctagttgagtttgattggtctcaaacagatgaaagctgatttctttgtctcaatgcaagctgcaaacattccaatcaaacgcatctaaaaaagataagtggccagcaagaagtgcatctccaaaacaaaattatttcttatcatgattgggtctgatggcatctatccaaaaaaaatgcacatgaaatcaaccagggaaacataagagatacaggctacagctcaagtacatccaacaaaaatcgaggtggatttaagcccggaaaaaatccaacaaaaatgcaccagtgccgttttacatattattatatgaccccatatatcctaccaggctaccacacatagttcctgttagggatggatttcttggtggtagaacagaacattcaacaatttatgtcaacgttgtattataaagcagatatggtcttgcaataagtcccactaattgggtaattcgcgcaggtacagaattatcaaaacgtatctgacgcaaatcaagcataaacatcaatacacctcccaacttgcaaaattaaattgtgttaactcatagacagaagccaattataaaatcgatcattctaagcagcaggaaatcgaaatgcctcttttacggacactaactaaaatagcgggatcatagcccatgatgtatgaacatattagatcaaaacaaaacaggtaacgtctattaacactaaaaattccccaaatctgacgcctgaattcgccctaaaaaaatccagcatcttcgcgtcgaggcaataacgaatgaacctaacctaccaccactttccactcccccagaccctggacaccaccacccaatcggacaaaacgatctccaaatcaacgacaggaccaccccccaatacctacgagatccacttcgctcgtggcgagatcacgaaacgcgtgaggaactcccaccacagaaggatctctcgtgcttcagacgcggaaaacggtcggaaacggtcggaaaaaccctctaccatttccattttcattttattttctcgaaaatggaatcggaacggtatacttggaaacggtaacgatatcggttatatcggtatcttggaaacggaaccgtcggaacgggaatataccgatatcggacggaagtcgaaaattcatgtcggaaacagcgaactgtggtatcatcccgcatttaactatgtatgaagatgaccttataatttcacccttgcatcattacgctgccacacaacaccgttatatgatgattaataagttgacaataagattgataaataatataaataaagttcaatgatacttcaacatcaatgtggctaaagcatacaatgtggcttacatgataggattacagcataactaatattgtccgactttttttaggatatagatttgaagtcttcgagaacaccaagctcacaagctggcatggcttcagctgatcagctccttgtcaaacatcattcattatttcatcatcaattgacatagctatatcgtcgtcctacagtggcacattgcataagaacttttatgttgacactgtataactactgttgtaattaagtttcatgctaaactagactttttggtatttccaggtcgatcacagagaggagtcaagatggtggggcccgccagtggatcccaccgtctttcttttcctctctttcttttattttttctctctctcttatccttcccttctctcggttccttttcctgctctctcaatttcttctctgttttctctctcgttctcttctctgcctttggctccttcacgcgcgcccgagaggagagaggcgccggagatggcggcctggcgcagggcggcggtgggggaaggagagaggagaaaggggcggcatcggtggggaggaggaggctggggcggtgcggcggcgctcggcgcttggctcggtggcacggaagccggcggtggagcatgggggagggaaggtggccggctgcgacggaggccgtcggggcgaaggaggttgcggccagcgtcggcgacctggtggcggcgcccaacatggcgcggcggtgccccagcgccgatgaagacgacgatgcggtcaggcctagttggcttctttattcagaatgggctgctccttaatgcctaatgggctcctcctcctgctagccaggcccagccgacttccttcttcggaattttgtcggaaatttgacggaaattaccgataaaaaacggttaccgacaaaacggtcggaaaaaaccccatatcatttccgctaccatttccgaaagagattaccgtttccatttccgataccgacaattaccgataccgattgaaacggtcggtgcaaaccggaaacggtagccggaattctcggaaatttccgtaccgttttcacccctactcatagacagaagccaattataaaatcgatcattctaagcagcaggaaatcgaaatgcctcttttacggacactaactaaaatagcgggatcatagcccatgatgtatgaacatattagatcaaaacaaaacaggtaacgtctattaacactaaaaattccccaaatctgacgcctgaattcgccctaaaaaaatccagcatcttcgcgtcgaggcaataacgaatgaacctaacctaccaccactttccactcccccagaccctcgacaccaccacccaatcggacaaaacgatctccaaatcaacgacaggaccaccccccaatacctacgagatccacttcgctcgtggcgagatcacgaaacgcgtgaggaactcccaccacagaaggatctctcgtgcttcagacgcggaaaagccagatcgatcggggtaagagaagggaaggggaaggtcaccttgatcggcgaagcggagcggaggggaaaggcgagggagacgacgacgcggcacggcttgaccacggggcagacctctcttctggttctgggcgcttccggccgcctccaccacgcgtcgcttataaacgggaggaaagcgaggaaagggacgcgttttggttaggcgaggcggcgaattagaacgtgccgagctgttctcccctcacggccgagctaaatttaggcattcggccttcttgggcttttcagccctcacatgattttgactaggaataagttcatcggaggtccctcaacttaacagtgagatttgattttgtaaagtcccttaaccacaaaaccagaaatcttcactcctaaactatacaaaaccgtctaatttaggtcccaagtcagtatagatacctggttttgctgacgtggcatcctactcagctaaaataataaaataaatatttggggcccatatgtcagtgagagaaaatgatt

SEQ ID NO: 21630 - DNA, 1697 bp, Oryza sativa
aatatatgtggggcccacatcattttctcgctctgacatgtgggcccccacatataaattttattaattttactgactaggatgtcacgtcagcaaaaccaggcagctatactgccttgggacctaaattagaggttttgtatagtttaggggtgaagatttctggttttgtggttaagggaccttaaaaaatttcgttgttaagttgagggacctccggtgaacttatttcttttgactaccttaattgggtcttttgggctcacctgattttcatggtgggctcagcaatattcttaggaataagatcactttgactccctcaactgaccacgaatctaaatcgtatccctcatatgcaataccagaaatcttgaccccccaaacttgtaaaaccggtgcaatttaactcccttggtggttttggatggtggtttcgctaacgtggcacacacgtggcagtgttgacctggtctttgttccacgtggcattgacgtggcgcttatgtggcattaaaataaaaatatatatgtgggcccatttatcattcacacaaaaaaaattgtgggacccactgacatgtgggtcccacatgtcatcttctctctcactacccttcttcctcctctctcccttatttctctctctctctctccccttgacatgagccggcggcaggggcttggtggcggcatcggcgagcgggtgccggagtggtggctgcggtgggcggtggacctcgggcgacaagcgcgggagcagctcctccttgaaatgggcggtggacctcgggcgacgtgcgacgaaatgcgtcgggggagatgggagcacgctcccagccgccgctcctcgtccccactctgtgtcgtgggcagtgaggtgggcggcggccgcggcgtcgacggcaaggtgtgcggtggccgcggtggaaagggagcaatagcttgcgcgccccaacgcatggcggcagactggcctcgagcgctccggcgtcgacctggccatgatgcggagcagcgactggaactcctcctcctcctccgacacgggccccctccccgaccacgtccgccgcgagaccgcccctttttcctcttggacttgccgtcggccgcgcccgcggcggcctcgcaaagactcgggaagttggcggcaggagcaggaggctcggtggccactgggcaccaccatccccatctcccgtggcactagcaccgctccagtcccggacccgctgaagccaaatccttgctactgcggcggcggcagcggaggcgacgcgaagaccgtcggctgctgctggatggcaaagtgcagccctagccccgccgccatcatcccccgcggcaagcgcaccaccgatgccacgaacgcctcggcctccacgacgatggacagcgacccctcctcctcctccggcgagtagactagcgcaccggcgaagcggtagaacgccgggagcaacgcctcgagggagtccctgagtgcacggacgacgtctccgaacagtggtggtggcggacgagcagcagcgcgcccagtacgcgtcgaatggggagagcggcacgcggcagcagccgccgccatctccatgcgtcgggagcgcgacggaggtgacgctcctcgtgcacaccgacggcggcggttgcggcatcttggcgacggcgaactcctccgccgtgttttgaatctcgcc

SEQ ID NO: 21631 - DNA, 604 bp, Oryza sativa
ggccattctcggggtatatcttctcctcctgctactgttgcttagcgctattcatgttcccattgttaccgaactatgtgcgctatgttcttgttcctgttctacatgatgcctctagcatgttatcgcgttactggtatgttcctgtttctgacattcatgatgcgcctagtatgctactggttatgttaagatcaccctacgctatttatgccatgatcattgtttcaatttcttggattaaaatatgccgattaatgactatattgccaacaaaacttacctgttcttggctaccgttcacgtagtctttcccgctgacggagaagatcttctccagcgtctgagacgcgaacttgcgctgctcgtcggcctccagctccgccaccctcgccgacgtgaaggggaatgcccgatcgccgtagcggtgcacgagctcgacggcatcaggctgcacgacctcgccgttcggggcgagcaccaccaggcgcgggatgccctcgacctggaacctctcgctgaggcgcttcttgcacccgatgtcgccgaagggcacggcgggccacggcatggcgcggtggaacctctcgaaggacggtcgatt

SEQ ID NO: 21632 - DNA, 1195 bp, Oryza sativa
ccttacttttattttaaacttaatttgatagacatgttctctaaacaaaataagtctaccatctttaaaataagtctaccatctttttttaagatgatgaagaagattataaataattgtttgtaaggattaattaaatatgatgtagtataaagctaactaataggttagaaaattataaaagcaatgctgacaaaaacaatttacggagaaattgtatgtggcagatattctccggttaatattgtactcttgtatgtgtctcaaacatagtctactatacatacccacaagaatgcgcaggtatctttctagttaattctaacacttaaaacattagagatggcattatatgccttagtggattggctgtgctacaaacttgtagtttttgcttttatctcttaaaacatcaattgcaacgcatgggcctttagccagctcgcgtggaaagtcttggacgacgcgagatctcactttcttgggaacatctcactagagaaaataaagttttaaatagattgtcattcaatttgaagatatttgaagaaaacttcaaccaaaaattaaaatattggggtggatcagaaattttttaaccagctgaaaaataatctcggaaggttcaagttagggagataccatgttgtaaaactgaattctggtcgtgtatccttgtgctcgttatgttctcctacgaaatttcaagcttcaaaggccaatatatgtcaggagccatgtgggctgcaatatgggttggatcagctactttccaagaagtccaagaaagcccaagagacaaccatatataagaagtagttcacattaggtccctctatttgttgcccagtccgattttcgtccctcggtcgcaaaaccgggtatgacgggtccctcaacttacaaaaccgtgcaaaagaggtccctcggcagtattgtgtccagttttggatgacgtggcgcctacatggctccctttgacttggtcctcgtcccacgtggcattggcgtggcgcttatgtggcaataggatctcaggaaaataataaaaaatgtgggacctacatgtcagctacacaaaaataataagaaaaggtggggcccctgtggtcccacatgtcagccccctctactctctatcccccctctctctcccttacagaatggggagaggcgacgcatcggggggcggtgg

SEQ ID NO: 21633 - DNA, 982 bp, Oryza sativa
aaaactgaattgacaatcttttggtacgtgatcagttccttcacaaaagaaacaagtgatcctgctcgttggacacctgtcgggtggatggccttcctcaccatgaacgcatgcagaggcacacgagctggcaacatgaccgatttctccacaacgagagcatgccttaagttctattttattctggttaaaaccttggggagacttcgcaccttcatcatctgaggagacttgatctgaatcttcactatcagacactctacctccattagctaaaagatgctctgtcaactgtggtgcacctcggaaggtatttcttctctgacgtcttgtcattcctggtgtaggccattctgtgctggtaatgatcatcttacggacttcatcttcggttcgcattggtgcttttcttttctgctgaggacagttccttgcatagtgcccttgctcatcacacataaaacagatgatacttgcttcttttgggtcaacatgtggtatggcatgaggggccttctgggatgttggcggtgcgctgacttgtggtgtgaatgcttggactgcctccaactgcacttgagggttgcatctgactcgggttcaaaatcggcatccgatgctgctgtagtatctctataagcaatttgttctggttaatcaggtgttggaccactgccgcacaactggtgtctggtgcttcattcactcgggagcttgaggtaccaatgtcctgacttctgaccttattgcctttctcattgtcagccatctttgcaaaggtttggagagggagagagggaaaacaaaggggagagacagattagaaactaaggataggaccttaacagatctaagtcttttgctgttatgatgtatgttaggcttattctgcaagttgattaagcaaacaacctagcatggttacatcacaccccactgatgcaaaccacgcgctacacacacaagcaaggaaacacacgac

SEQ ID NO: 21634 - DNA, 924 bp, Oryza sativa
accgccgagcgctagccctctccttggaccgccctaagtcggttcccaaaccgacattgccatcctataaacccgagcttccccctttcctttcctctcccattcgcctccggtgctctgttcgccgtcgccgttcgtcgttgcgcatgtcggaggagccggcacgagcaaggacgcggaaggggacttcgggcgcgccctctccttcctcttccccggcccgaggccggagagattactcccgcgccgtcggactctcgtcactgcgccccgttccgcacggtagtgcatctccccattctccctcctcgctccatctctcccccttagttttcggtagtaacacgagtagcctccccgtagctagccggcgccgccccgaccgttgccgccgctcgccgtgtgctcgccgccgtcgccgcccgagctcggaagcgccgctcatcgctggcctcactcggcgtagctccgcccaatccgacgctagcatcggattcccgtagccacgtagatgctctcgccgccgggaatcggccccacgtgacctcgtcgccgtttcccccttcttccgccgccggatgccgctgccgcaattcgccgccgtcgggcatcctccggcgaatccgagccgttggctcgtctcctctcgtcctgtgcaaccacccggtgtgctcgctttcgcctgtatcgccgtggttcgctctgccgctcgccgctgtcgtccgccgtccgttccggccggcgtcgtcgtctacctcccgccggcccgcgtggcagccacgtaggcgccacgtcggcgccagctcggccgagatcgggtcgagccgacccgatcagccctttcccgtgcacgcggtccactgcgagccgtgaggctgcacgtgggcccgccgcatccgcgttctccgcgaccgcgcgcgtgca

SEQ ID NO: 21635 - DNA, 677 bp, Oryza sativa
cagactcagctaatgaacatgatgatgcaacaacttcagaatcagcagaaccaaggaattagccatgcacctcctcagaccaagtaagcagagtttcttcgtgtgaggccgcctattttctctagtaccactaatcttgtagaagctggtgattggctgcatgccatagagaagaagttggatttgcttcagtgcactgatcaggagaaggtctcttttgcatcacaccagttgcatggtcctgcttctgaatggtgggatcacttccgcttgaataggactactgctgaacctatcacttggcttgaattcaccgctgctttccggaagacgcatataccatcaggagtagtgtctctcaagaagaaggagttcaggtcgcttacgcagggatctcgctctgttacagagtatttgcacgagttcaatcgtctagcccgttatgctccggaagatgtgcgcaatgatgaagagcgtcaggagaagtttttggaaggacttaatgatgagctttcttacccactcatgactggagattattctgatttccagaaattagtggataaggctattcgtcaggaggacaagtacaatcgcatggagcagaagaaacaccggattgctactttaaggcacaacaggggaataatcaaaggccacgtcttactttaggaccc

SEQ ID NO: 21636 - DNA, 821 bp, Oryza sativa
ttagccccctcccgcggtctcccgtggtctctagccacctccccaccgtcgccctctctctcccacgttgccggccgcctccagccgcctgtgccgcctcgaccgtgcgccggccggccgcgccgtcgcctcctccagcgtcgccgccacctcctccacgccggcctgccctccgtttcgcgaggtgacccccggagctgcgtttccgccgtcgcccatccatttcctccgcgccggccgcctccagtcgcctccatctccctgcctgcacgccggtcgacgtcgccaccacctccctcggctccacgacgccgctctcatccccggcatcacctcctcctcgcccgaacatcgccggaacaccgtcgcccgcgccggcctcacctttctcctcgtcgacatctcctccggctgcccctttcgccatgcccgtgcatcagccgacgctgccgtcctttccctcggcatggtgacgtagccctccacctcgtccactcctcggtttcgccggaacgccatcgccgcgagcccctccatccgcctcgccggagttgttcggccgcccgtccctccacgccgtgcaccggtcggccacacccccatcatcttcggcatcgcagctgcgacgtcgtcctcggcctcgcctcccctccgaccgaacaccgccggtgcccgtcgtcgtcttcaccgttccctctcgcccggctcgtcgtcttgcggcgccgcctccggcatcgtcatcgctgcggcgtgttccacgccgtcctcgcctccatgcagccgttgccggctgccctcgtcgtctcctcgccggctgccct

SEQ ID NO: 21637 - DNA, 1626 bp, Oryza sativa
catcttcacaggcgctcaactggggtataagccaggactccgcctaagacatcttctccaaagcttctcttactgaaggggggaaagattgagcaagaatgagtacaaccacagtactcagcaagtcacaccggcagatgcatggttaatgcaagggggtacaaggagataataatataggggttaagttttgcagaaaagcagcatttataagtcacttagttgcccaaagctattttataaagacgatcctagagctacacagtattattaaacaaggccgtgaaccctcacgaacctgccttaacccaaggcctacgatgattcagaccgaactggcaacccgaccctgggtcccagctcgtcccaagccaacccaggccaaccattccatattttagtcgttgagcaaattttaagaattaaaacactgacttgggtacattgctaggcttgcccatatccgagggctcggctattcgaatagatttactctgatcagaggtgtacatctttacccacaagacacatctttactccgcattccatggccttggaacccgtcgtaaagatgtgacataacccttcacccatcctagccgtgaacaaaagtaccgacccaatcctacctacggccgggatacccgggacaggcaggtagaactgagcccctagcattgggcaccaaccctccgccgtatgacatctcgactaccgggccgcagctcgtgtagccttcatttgccctggagaatgtccatcgacgcccgacttcatccatctccaatccgtgtccttttgttcaggactagactgagcaccgagttaagccttacccattagacatgtggttagtacggtagtgctttgcaacagaggcccgagcttaatccttatagtggccggggtgctacttcccataactggcatgcacccaaaccccaccgaaaacaggttttaggggttttgaaagaggaagagaggtgtatgtccaattccaacataagccaaccattccatggtgtccaaatgatatgagaatttcccaagtctaaagttatgaaatccaactaatgttgtcctattaaattgcgaagcatctacctaaatttaaactagggataccacgagtagagtgtccactagttgaggttttgtttactctagggtgaacaaggtaataatcataacaataacaataataaggtcataacaaaggtaaataggcatggctaaataaaacagtgataacgcgggaatttaaataaagcggtaatgcaataatttaaatcaacataattttacaaactgggattcaatatgttcaaggatgatgtgacttgccttgctcgctttcccaaacgacggcttcgacttccacgaagagcggatcttccgaaactgcagcgtctacacgaccaacggaaaagaaaaaggcttttactctaataaactccaaataacaagcaggaacaaagcacaaaaatgggttctttacttcttaaggaaaaattagagacttgaacggtccaattccgagttcaaatggccaagatatggccatttgaagtttatatgctctttaaatggatacttgcgaattcttcatttaaattttaattaaaa

SEQ ID NO: 21638 - DNA, 4007 bp, Oryza sativa
  unsure (1)..(4007): unsure at all n locations
ctttttataaaccttttcaactttgtttatttctttcaattattatttgtgctctgaaaattccattaaaatttgagggctccttttagaccaaggagaatttaacaaaaattctccgggtcacatttgaattttttttgtacgtattttagtgtttgccaatttcttttcgaattttaattaattctattattccttttagaagatgatttttattttcgggatgaatttatcaggacgtgacagcggcctgggccgagcaggccgggagggaagaggggggggaaaggcagcccgggagagagagggaggagggagtgggccgagggaaaggggagcccaagagaaggagggagagaaggagagggagagaaaaagagggaggaaagggagatttttgggctgggcttggcccaaaggaggaagagagattatttttaggttttctttttttaaataaactttgataattgtttttgttgcttaataattatttccggtgctctgaaaattcaagtaaaatttgagggctccttttagaccaaggagaatttaacaaaaattctccgggccacatttgaatttttcttgcacgtattttagtgtttgccaatttctttttcgaattttaattaattctattattccttttagcgaatgaattttaattttgggatgaatttatcaggacgtgacaaatccaccccccttacaagaatctcgtccccgagattcgaggaggctagcaagaagataggttgggcggtcttctcttcttgtctgacttcttccgctccgtcttctataacaaacttgcctaacaaaacttcttcactctggactgcttggctcgatctcctgttgcagatggaatcttctcttcacctgacttgtccctggttgaacctttagctgactttgactgggttgcggcacttgaagatggggcttcagttccagaactttgcatagttcatatctttggagtcaacctcatacaagttacccacttcatgtcatgcgtcgagatcagctcgtcattactaagataccatgcttgtcatcatttagcattcaaagtattcctttgcacattcagccctgacgtattctttttagatttctcttatcaatcacctttcgacctacttctttgttcgataataaacacctttgctggtatcttctatcaatcacctcttaaactttgtcaaccaagtactcttcactccgagagttgtggatgcttctggtgacgatgaggtcctttggcttgctgcctttccgtgaaaccttgaagtgtttcgccaaaagctatactaactgtcgttgcctttgatccgaaaaggacgcatctgtaactcttagtccaaacaaatgtctctttggttaatcacttgatttttcttttccatcctcaggttggttattagctcgaggttagaatatagttcctctggcacgagaccctaggtctcctttgtcagtaaacaattatacacatgatcacatatccgcatcttccaaaagaatcctcttagaacttgtttttattaccaatttctcccatattacatgaatacaaggcactgtcttaaacaaaaagggaaggtgcttaacatcggtacattgtttctactatgggttagaattaacatgaggcctcacaggtacggcgtttgctccagtgaccacaaggcgagtgacttgtcttcttcttgcataatggccggagtgatgacgcaggttacgcttcggctgtggacaatctctggagaaatgacctggttctttgctctgataccagcttgtcgcgaccgggaaaattgccttttcccgaacgctagtgtattaatccccgtcccaggaaaagccggggtacaccacacaaacatgatataaaagacacatctttattatatcgataatatttacattattacaaaggcgcttcaggcctgacaatcaaaaataaacagcagcggactagcgggcctacggctccatcttcacaggcgctcaactggggtataagccaggactccgcctaagacatcttctccaaagcttctcttactgaaggggggaaagattgagcaagaatgagtacaaccacagtactcagcaagtcacaccggcagatgcatggttaatgcaagggggtacaaggagtaataatataggggttaagttttgcagaaaagcagcatttataagtcacttagttgcccaaagctattttataaaggcgatcctagagctacacagtgttattaacagncccgtgaccctcacgaacctccttaaccaaggcntacgatattcagaccgaactggcaacccaccctgggtcccagctcgtcccaagccaacccatgccaaccattccatattttagttgttgagcaaattttaagaattaaaacactgacttgggtacattgctcggcttgcccataaccgagggcgcggctattcgaatagattatactctgatcagaggtgtacatctttacccacaagacacatcttcctcacgtgtaaccacgtgccacataccaccacggtatacgggcgaaagacgtgacatagtttccaacccatcctagccttagacaagagtaccgacccaatcccacctacggccgggatacccgggacaggcaggcagaactgagcccctagcagcagggcaccaaccctctgccatatgacatctcgactaccgggccgcagctcgtgtagccttcatttgccctggagaatgtccatcgacacccgacttcatccatctccaatccgtgtacttttgtttatgactagactgagccacaaactaagccttacccattagacatgtggaagtacggtagtgctttgcaacagaggcccgagcttaatccttatagtggccggggtgctacttcccacaactggcatgcacccaaaccccaccgaaaacaggttttaggggttttgaaagaggaagagaggtgtgtgtccaattccaacataagccaaccattccatagtgtccaaatgatatgagaatttcccaagtctaaagttataaaaaccacctaatgttgtcctattaatcagcgaagcatctacctaaattcatactagtggaaccaggaatagagtacccactagttggggttttgtttattctagggtgaacaaggtaataataacaatagcaataataatgtcataacaaaggtgaataggcatggctaaataaaacagtgataacgcgggaatttaaataaagcgataatgcaataatttaaatcaacataattttacaaactgggattcaatatgttcaaggatgatgtgacttgccttgctcagagataacggccttccgaaccttcggcgacgaccacgaaccacgcttcgggaacctccggaacgacagaagctacgcgaagcacacaagcaaagctaaaagcctataaagaagcaataacaacacataaaaagaaagcacagggttctttaggttataacaaacattaggagacttgaacgggtcgattcagagttcgtatgaccaagatatgatcatccgaagtttaatgctgttatatggagatttgcgaattattataattaagctttgcaattataaaacatgtgtaagcgctagcctggaaaagacaggaaggctgcgccgttgacatgcggaccccacatgtcaacctaaaggaccacggtagaccgggtacacagagacggtccacgggtcgacggaagcggaccccgtgtgtcaaccgaggcgagtggccgataaacggactccactagacaccacccgggttgcacacgtggaaaccacgcgggtaccgagcgggcacactaacgcggacactacacgggcaccacccggacgcgtgaacaactaccgacaccggaacacgggtaccggggtcgacgaccggacaacgggtacggggcgacaccgaaaggacaagggcggggaagcgagaagaggaaac

SEQ ID NO: 21639 - DNA, 4678 bp, Oryza sativa
cgcgggggggttccctcccttcgcccgtgccggcgaggccgccttcgggcgcgccctcgcggttgccatgtggggcccggctgtcagccgcccgcgcccgcgggtgcggctgacgcgtgggacccacggcgccgaccgccgccagccgcgtgcgcccggtccaccgtggaccgagcggctgacgcgtgggcccccacccccgtggacccggtccgcgcgtcccctccctcggctgacgcaataaataggttttttaattaaaatttaaatgaagaaattcgtaaatatccatttaaagagcatataaacttcaaatggccatatcttggccatttgaactcggaattggaccgttcaagtctctaatttttccttaagatgtaaagaacccatttttgtgctttgtttctgctgttatgtggagtttattagagtaaaagccttttcttttccgttggtcgtgtagacgctgcagcttcggaagatccgctcttcgtggaagtcgaagccgtcgattggggaaaacgagcaaggcaagacacatcatcttgatcatattgaatcccattttataaaattatgttgatttaaattattgcattatcgctttatttaaattcccgcgttatcactgttttacttagccatgcctatttacctttgttatgaccatattattattgtcattgttattactaccttgttcaccctagaataaacaaaaccccaactagtggacactctatttatggttccactagtatgaatttaggtagatgcttcgctgattaataggtaacattaggaggttttacaactttagactttgggaattctcatatcatttggacactatggaattgttggtttatggtggaattggacatacacctctcttcccctttcaaaacccctaaaacctgttttcggtggggtttgggtgcatgccagttgtgggaagtagcaccccggccactataaggattaagctcgggcctctgttgcaaagcactaccgtacttccacatgtctaatgggtaaggcttagtttgtggctcagtctagtcataaacaaaagtacacggattggagatggatgaagtcgggcgtcgatggacattctccagggcaaatgaaggctacacgagctgcggcccggtagtcgagatgtcatacggcagagggttggtgcccaatgctaggggctcagttctgcctgcctgtcccgggtatcccggccgtaggtaggattgggtcggtactcttgtctaaggctaggatgggttggaaactatgtcacgtcttccgtccgtataccgtggtggtatgtggcacgtggcaacacgtgaggaagatgtgtcttgtgggtaaagatgtacacctctgatcagagtaaatctattcgaatagccgagcccttggatatgggcaagcctagcaatgtacccaagtcagtgttttaattcttaaaatttgctcaacaactaaaatatggaatggttggcctgggttggcttgggacgagctgggacccaggtcgggttgccagttcggtccaaatcatcgtaggccttgggttaaggcaggttcgtgagggttcacggccttgattaataatattgtatagctctaggatcgtctttacaaaatagctttgggcaactaagtgacttttaaatgccgtttactgcaaaacttaacctctatgttattatccccttgtactcccttgcattaattgtgcatctccggtgtggcttgctgagtactgtggttgtactcattcttgctcaatccttcccctcttcagtaagagaagctttggagaagatgtcttaggtggagtcctggcttataccccagttgagcgcctgtgaagatggagccgtaggcccgctagtccgctgctgtttatttttgattgtcaggccttaagtgcctttgtaataatgtaaatattatcgatataataaagatgtgtcttttatatcatgtttgtgtggtgtaccccggcttttcctgggacggggattaatacactagcgttcgggaaaaggcaattttcccggtcgcgacaagctggtatcagagccatctcgactgtaggataagccaaatggataaaacctaaggacatattttataaataaaattatttgcgaaagttcctcttttttctccttcccctaatgctatttgcaaaaggtttactcttttctttcttcggatttcaactaagtactagatggtcagctttgcgaagaagaagatgtcgtcagttgtttgccgaagctccggaagactgcaggatccgctagcgaagcgaaggaagcagtgaagccagctgtgaagcaggagtgaagatcttggagaacccgtcgcagaacctaagccaccctctagtgtttcgtttgtcgtgtgtttccttgcttgtgtgtgtagcgcgtggtttgcatcggtgggttgtgatgtaaccatgctaggttgtttgcttaatcaacttgcagaataagcctaacatacatcataacagcaaaagacttagatctgttaaggtcctatccttagtttctaatctgtctctcccctttgttttccctctctccctctccaaacctttgcaacagatggctgacaatgagaaaggcaataaggtcagaagtcaggatattggtacctcaagctcccgagtgaatgaagcaccagacaccagtcgtgtgacactggtccaacacctgattaaccagaaccgattgcttatagagatactacagcagcatcagacgccaatgctgaacctgaatcaaatacaacctcaagtgcagttggaggcagtccaagcactcaccccacaagtcagcatgccgccagcatcccgaaggacccatgatgacgtgccacctgttgacccaaaagaagcaagtaacatttgctttacgtgtgatgagcaagtgcactatgcaagggagcgtcctcagcagaaaagaaaaacaccaatgcgaaccgaagatgaagtccgtaagatgatcattaccagcacagaatggcctccaccaggaatgacaagacgtcagagaagaaataccttccgaggtgcaccacagttgacagagcatcttttagctaatggaggtagagtatctgatagtgaagattcagatcaagtctcctcagatgatgaagatgaaatggaacgtaaggcatgctctcgttgtggagaaatcggtcatgtcgccagctcgtgtgccactatatgcgttcattgcgaggaagaccatccacccgacaggtgtccaacgagcaggatcacttgtttcttttgtgaaggaactgatcatgtaccaaaagattgtcaattcagttttctgctgacgaagaagatggctaaccaacccgccagttccaacggagagaagcatcaaggcaacaccaatcctcgccaagattacagtttcagcctaactccagtgccaggacagaggaatcgaaatgagaaaagaaaatgccgagtccgggaagacatctgttgcttcaattgtcaaggaatgggtcatttcgccgacaagtgcccaaaaccgagaaacatagctgccggcacgtcagtccacgcaactccctgcaatcagaagcttgctcctcaacgaattgtcatccatgcatccccgaagcagtcctatagcccgcgttgcaacagctccaattccaatgaatgcactaccacaaggtgtcaatgctcaatttcagccccagccaccagctgacaagacagaggccagtatctgcgttgtacctttggaaattccaatacagcagctgagaaatcaagtacaagatgaagaacccgagtgtaagaaagttattgtttgttacaactgcagtgaagaagggcattactccgaaaactgtccccaaccaaggcaaaatcgacctccacattaccgccaatttacacgaagcagacattccaatcgtattgtggtcactggagcaaacgccgtacccgtaaggcctcgtgataatcagaacccatagcagaaacaatgcaccaatgctcctccagctgcacctgactcggcaataaatcatagcaaccactctctgcatcgacagcctcagcaaagaattgtcgtagatggaagaagttgtgtctctccccgacctactccaggccgagccaagggcaatcaatatccggagggcgataccaagcagaagaccgtcatccgcttcaaccagcaatcagaaggaagcttctcctgtgaatgatagcattatgcagtcctatcacatcatcacagaaccaatcaaggatgcagtcactagaacaatgccagctatatctctccagaatcaaaatgagcagccatgtttgtggttttcagttcgctacttatcatggggtaatcgaaagtttgcagcaataatgcaatacataaatatattcatgtctataaacagtgagcttgctatgcttatggatgattcatgttgaggatacaatgtaccgatgttaagcaccgtccctttttgtttaaggcagtgcctcgtattcatgtaatgagggagaaatgtgtaatacagacaagttccatgaggattcttttggaagatgcggatatgtgattatgtgtataattgcttactgataaaggagacctagggtctcatttcaaaggaa

SEQ ID NO: 21640 - DNA, 8069 bp, Oryza sativa
tccgatgctgtttatttttgattgtcaggccttaagtgcctttgtaataatgtaaatattatcgatataataaagatgtgtcttttatatcatgtttgtgtggtgtaccccggcttttcctgggacggggattaatacactagcgttcgggaaaaggcaattttcccggtcgcgacacggaacggcgacgggaatggcggccggcggcaaaggaaggcggccggacttggcgcgtccgttcccggcgattgggggcgccattcaagggggaattaagggggaaagagagaggagggaaaggggattaattccccctaatcaatttgggaatcccatgcttgaatcgagcggatttagaggaggaagcgagctagggttcacgggagagggagagaggacggccgggcgggaggaaggggacgacgcccggcctggcgcgtgggacccaccggtcaggcggcggcgtcagcgcgcgcacgcgcgctgcacgggcgggggcgcggctagggttgggccgggtggccggcccaggaggagaggaggggaaggcggcctgggccgagcaggccgggagggaagaggggggggggaaaggcagcccgggagagagagggaggagggagtgggccgagggaaaggggagcccaagagaaggagggagagaaggagagggagagaaaaagagggaggaaagggagacttttgggctgggcttggcccaaaggaggaagagagattatttttaggttttctttttttaaataaactttgataattgtttttgttgcttaataattatttccggtgctctgaaaattcaagtaaaatttgagggctccttttagaccaaggagaatttaacaaaaattctccgggccacatttgaatttttcttgcacgtattttagtgtttgccaatttctttttcgaattttaattaattctattattccttttagcgaatgaattttaattttgggatgaatttatcaggacgtgacagacacagattctttcacccaaccatacagttccgtgctcatcttccaagaaaccaatagcttttcctcttctcatattcttcttgatctcttgaatatcaggatcattaatttgggcttctctaacttgatcaattagagtgggcttcgcttctaaagctgcaacgaaacctctaccgacaattcccaaatttaatctttcaaattccttgcataattccaatggcaactgtcgtccttctgtagcattgcaataaccttttctgctaagagcgtctgctacaacattagcctttcccggatgataatgaattcccatgtcataatccttaattaattccaaccatctccgttgtctcatattcagatccggctgagtaaagatatactttaaactcttgtgatcggtgtacacttctgtacgagtaccgaaaagataatgacgccaaatctttaatgcatgaacgactgcagctaactcaatatcatgagtagggtagttcttctcatgcggacgtaactgacgagatgcataggcaaccaccttcccatcttgcatcagaacacaacctaacccaagtttggatgcatcgcaatatacttggaaacccttctttggatcaggcaaaatcaaaataggagctgatattaagcgacttttcaactcttgaaaactccgctcacattcttccgaccatttgtacttcacatctttctgaagcagtcgtgtcatgggcttagcaatcttagaaaaattctctataaacctccgataatatcctgcaaggcctaggaaactgcgaatctctgaaactgtctttggttgcttccaattggttacggattccacgttactaggatcaacggcaactcctccggctgagatgacgtgaccaaggaatttcacttcggacaaccaaaattcacacttgctaaacttagcatacagttgatgttctcgtagcttctccaatgcaaggcgaagatgttcctcatgctcttctttggttcgagagtagataagaatatcatcaataaagaccaccacgaacttgtctaagtattccataaacaccttattcatcaagttcatgaagaaagcaggggcattggtaagtccaaaagacataacagtacattctaacaacccatacctagtggtaaaagctgtctaaggtatatcttcctctttgattctcaactgatgataccctgatcgaagatctatcttggagaaaacagtggcacctttaagctgatcaaacaaatcatcaatcctgggtagtggatacttattcttgatagtcacatcgtttagtgcacgatagtccacacacattctctgagtatggtctttcttttccacaaaaattaccggagctccccatggtgatgaactcggtctgatgtatcctttctgtagcaaatcatctacttgcctcttaacttctgccaactcattggctgccattcgataaggtctcttatggatcggagttgttccaggtaccaaatctattctgaactctatatcccttttaggcggcatacccggtaaatcatctgggaacacatcaggatactcccggactatatgaatctcttccaaagttatttgattcagtcttgaccttaaagactcagaagacaatgcatgaacggttacaactcgaccatcatagctgttgagagttacttttctgttggcacagtctatcacacctttatgtctggctaaccagtccatccctaggatgacatcaaggtctttggattctaacaagataagattggccagaaatggtactccttgaatttctattctgacagaggggctacgttgcaaagagagtgcttgattacttggggtactaaccatcaaaggacgtctaagatcttctacttccatcccatgatttcccgcaaaactcatagataagaatgaatgtgtagcaccagaatcgaaaagtactgttgcaggaactgagttaacaaggaacgtacccaaaatcacatctggagcaccttgagcttctgcagcagcaatatgattgacacgggcctttgatgctggtacagcagagttactctgggcagggacaaccttcacgcgttggggcttcggacacttgtcagcataatgtcctggatctccacagttgaaacacaccacgggcttgctgccttgctccctcttggcaggttgttgctgtgctggagctgcaacaggacgtggagcttgattacggatgttgttgccagcattgttgttgaagaactgacgttgcggacgaacaacagacgaagaacctccctgtggcatggactggggtcctaaagtaagacgcggcttctgattatttccctgttgtgtcttgaattgagcaatccgacgtttcttctgctccatgcgattgtacttgtcttcctgacgaatagccttatccactaatttctggaaatcagggtaatctccaaccataagtgggtaagaaagctcatcattaagtcctcccaaaaacttctcctggcgctcttcatcattgcgcacatcttccggagcataacgagcaagacgattgaactcgtgcagatactccgtaacagagcgagatccctgggtaagcgacctgaactccttcttcttgagagacactacccccgatggtatatgcgtcttccggaaagcagcggtgaattcaagccaagtgataggttcagcagtagtcctgttaagacggaagtgatcccaccattcagaggcagggccatgcaactgatgtgatgcaaatgagaccttctcctgatcagtacactgaagtaaatccaacttcttctctatggcatgtagccaatcactagcttcaacaggattagtggtactagagaaaacaggcggcctcacacgaagaaattctgctaacttgttctgtggaggtgcatgattattcccttggttttgctgattctgaaattgttgcatcatcatgttcataagctgtgtctgctgagcaagaacttgggccagagtgggattctctccattgatgttattattggggttgttgggaccattcccattgctacgagtgttcaccatctggtatggataggataagaagagaaaacgggggaaactacttaggacagagaattactttaacttttattgatcttaactgagtttcattattacaaactgaagactcccacaccactaaactctccaacttcctaacactcaaaagcaaacaaacacatgcaattacatcccaccactgatgtaaatcacatgcgagacccacacacacaaacaaacttaaaacaagcaaactaacacaacgatctaagacaacgacttaacaagtcactctagttcttccgagcataggaggtcgattgaaggctcatcttcatcatcttgagttgctacccactcaatcttggaattgatgcgcttggattcttcttcttcatcactacttatgatgatgaccggaggatccgcttgagctggggcaacttctttctccaccacacgaacctttggcgccagttgatagcgagggacaaataaagctctcttccttgcggtaagacgaatcctggccttctgcggcggtgcttctcccttcaatgcggctaattccttctccaaacgatccaccttgtcttctagcttgcaaatcttaccacgattccgatcttcacgatcttgagctgctaacacagtctccgcacgactttcatccatagcccacaacatctcaaccaaatgtcttgtggtaacatcattctcaattccttcagtctcaaggtaactgccacggtcacttccctggggttggcgaggatgatagcgatactcagtgtcgaccaactgatcactgtagcgatcacggagctctcctatggcgatccttgccacctcctgacatgcatggatgtagtttcttcctccagcttcaaacattactgaggggatatcttcactattgctgttcaaggtgactttgactcggcacttttcttcatgacgatcatgacgaatctgggcataaaaaggagcattcccaaatccaatgacaaaggacatcgtacgcaactcctggacaaaaccctcaacgccaaacaggtactcaggcttgtaacacggcatctaaagacaagtgaaaggagggagttaagacatctatccaattaatagcacaagtttttggattaatttgaataaaggtagaaaatcagaataaaaaggtaagtaaataaagtaaaccaagctttgcgaaataaattaaaacagttggaaacgaggtcacaatttttgtaattttgaataactggtttcaaaagaaatgaaagaaaattataaaatcaatatggtaaatttattttattgcagcaagattaaataaaacaatattgtaaaacttttgctgataaatgagccattagtacagtaatagatgtacagtactaataacactggaataaattttgaatgagaaccattaaaagagattatgaagtgcatgtgccattagtttggttaattaaaagagaaagggaggagaacagttctacttttccaatatttttagagggcttctatggataaccatttggcataacctagggtcaaaggggctctgataccaacttgtcacgcccggaatttctatccaaaattccaaacgcttagatgtgtgtgaaccctcgtccaggaatcagccgaggcacacaataacaaattgataatagagtacaaatattactctaattaataagcgaatagaatgtcattacagaggtagatagttcctctcaatcaataaagttctaagcagcggaaaataaataaacggcgcagacggctccactccacaggcagcttgaccaaggctacacctaatcctccacaccatcagcttcattgtagaactcttcctctgatgaatgattgcaaggtgagtatatgacatactcagcaagccacgcagcaaatatgcaagtgcacaggataacaaaggatggcataatagggtttcatttgcaaaagcagcatttagcaaacatttgagaatttaacaaaacagttaagtaataattaaacaatattaatccaacgctatacaacataccctgttgtataggcccaaccattctgaacaaccaccccggctgcacagttctatctccaaaccaggaatgtaccattccaaaccaggagctaatcaaattattaccagtatatagcatcatttactatgatgagaagtgtgaaactaatcacgaaagacattgttagacccgcccataaccgcgggcacggctattcgaatagttttactctgatcagaggtgtaccactgtacccacaagacacaaccccacatcatgtcaccatgtgcctcaataccaccacggtacatcggaaaggagttgtgacaataccccttatacaacacaatccactgcagcgcaccttcctggatcataatcacccccttataaacaaggcatggactccccagcgacccccgtgggcttatctccgccacttctcagtctggtgctccgcaatgaaccatgcgatacaaaagataaagccgttgcccatgctggcttgtggttggcacggttaatgtttcacaaccgaaactcgtgaaccggtccttaattgtcatgagcacgaccatcaaaaccatgtgctcacaacccaccattatcaggttttagttggcacattaattaattaactaatcacgattgaccatcgtgaactatcattaaaccatcattaaataataatgaatcattagttatcccaaaagtgagctaatgtttctaagcagggctaagcaattatatctaatatcttgttgaaccaatatataaagctcaactagtcaagttataataacccaaggtatcaaggaataaggtaaacaagaacaaaaggggctataacaatgaataggttaattccacccaatgacattcgaaaataaatgcaatagttgaatagaaacaatagctttaaataggatcaacatgctcaaagggttgtttgggatctgtgtgacttgccttgctggccttggaattcttcaaactattctccgacgaaaacggactctccggaaacgacggaatctaagcagaaaagaataaaatcaccaaaacagcacataaacaagcatgaacagtacatgtggatatttttaatgtgtagatctcaattttagaaaaatttagagacttgaaccaactaaattggagctaagatgaattagttatgaatttttaaagattaaaccggattaaaacacttaaatcggcttaaattgaattatgacgcaataatgaattatttttgaaaaggaaaaggggatttattgcgtcagcggctagggtttcggtggaccgggcgcacgggcggcggttcacgcgaacggacggccgagatctaaccgacccaagatggacggccgagatcgatcgggtccacggcggttcacggcggacggacccgatgacgccagcgatgacgtcaccgacggcggcggcggctcggcggagcgaacggctcgggcggcgcacgctcgccggcgaacggcggcgcgaggacacaaacggagggcaccgggacgaagcggacggcacggcgaactcaccggcgaccaaagcgacggcggagaagcaacggacggcgccggcgacgaggaggaaacggcggagaccttcgggtcgacgacggcgatgacactccggcggtcttcggcggcggcgaaagggcggacgaggacggcgacgcgacggcgatcacgacgacggtcttcccgagcggcggcgaagcacggctggagcggcggcgaagcacggctggagcggcggcggcgacagcggagctagggcgcacggcgctaggacgattccggcgacgagaggcaaaggcgagggtggcggcgggtagcggagagcacggggaagcttttaaaggggctcggagacgacggcggaggcccacggcgacggcaacggcgaaggaaacctcggcttggagag

SEQ ID NO: 21641 - DNA, 9752 bp, Oryza sativa
ccaacgctttccaaagggattaggccgaagattccaaaggagaaaaggtagagaagatcccgaagatcatttcccctctattaatcgggcgggagaagaaaagaggcggccggatttggaagaaaacagcggcggcggctcggcggcggcacgatagggtttcggcccgaggaagacgacgggcctgacaggtgggacccacctgtcagcggctgcaagggcgcgcgcgcgcgcggctggctgcggactgggccggctgggccgagaagagagagaaggcggttttgggccgactttcggcccaaagccaaaagaagactttttaaaactttttcaatttaaattatttcttaaatgcaattccatttattaaaaatacttccttagctcaaataaatcccagaaaaatctaggaattatagaattaagcaaagtatttaatgaaattttatctggcccaattttatattggaatttattaattagaattagattttcttttcaagacttttaaaataaattctagaaattccatttaaacaacaatttatatattttgaattttcagggtgtgacaaacatcgacgatatcatccacagcaccaatgctcctcttgctccacctaactcggcaataaatcatggcaataatacctttagcaccaaccactctctgcatcgacagcctcagcaaagaattgtcgtagatggaagaagttgtgtctctccccgacctactccaggccgagccaagggcaatcaacctccggagggcgataccaagcagaagaccgtcatccgcttcaaccagcaatcagaaggaagcttctcctgtgaatgatagcattatgcagtcctatcacatcatcacagaaccaatcaaggatgcagtcactagaacaatgccagctatatctctccagaatcaaaatgagcagccatgtttgtggttttcagtccgctacttatcatggggtaatcgaaagtttgcagcaataatgtaatacataaatatattcatgtctataaacagtgagcttgctatgcttatggatgattcatgttgaggatacaatgtaccgatgttaagcaccgtccctttttgtttaaggcagtgcctcgtattcatgtaatgagggagaaatgtgtaatacagacaagttccatgaggattcttttggaagatgcggatatgtgattatgtgtataattgcttactgataaaggagacctagggtctcatttcaaaggaactatgttctaacctcgagttaataaccaacctgttgatggaaaagaaaaccaattaaactgtgttgggttaaaaagccaatgagacagtagttggggaataggagtttggatacgccttttacagatcaagataaggattgttggatgaaacccataagggtacccgccatgcctctacattgataagttcggatatacctgcaaacagttaagaagatccaggagacatcaatatttgagaacataatagtcgatggttggtaattagtcgatcaggtatcagaaaagggtcaaaggtgatatggcagaagaacaatatggatgctccccatcccaaggaagcactaaaccctagtggcatagatacagatagcaagcaatgtatttccctgaaggtagtcagtgcagctttttgacgaaccacatcaaggtttcaccgaaaggcagcaagccaaaggacctcatcgtccccagaagcgtccgcaatccacattaaagaataccacctgttagagataagccgaaagatgattgataaaagagattggcaaagatgttctctagcatgaaagaagtaggccgaaaggtgattgataaacagaaacatgctctgcatcgctcaaggaagacccctgatagtaattgcctcccccacaacagtcaccttgtcattaagtaagcaagatgacctaggtaaaagtgtttctatgaaggcaaggagtgaaatcttcaactcggtatcagatgctacacggagtgaaaagtgcaagcccaggttaccaggcgacgccatgtcttgggagatgatccaatgggaaagaacacatcaaggctgaaggtgcacaggaatacgttgaatgctaaatgatgacaacatgaagagaatagcggaaagtaaactgaacataaagaaagtgaatctgagttgcttgttcgtgggagctattcccagttatgaaccaagtgatatgatcgaagatagtctacagaggtcagagtaaaatcacatctaacaacgaagcttcaaatttggccggataacgatcagacaataagaagtccagcagtaaaactatttgggaagacgtcaaagtatatcaagtgggataagttggttcccttgggaagcataattcaaaggcaaagttatcgacccttgcatcaaatagcagaagtagctatcacccggagaccaggaaagctaatatgaggcagttggtggcgagttagaagcaaatgacaagcatggtatcttagtaatgacgagctgatctcgacgcatgacatgaagtgggtaacttgtatgaggttgactccaaagatatgaactatgcaaagttctggaactgaatccccatcttcaagtgccgcaacccagtcgaagtcagctaaaggttcaaccagggataagtcaggtgcaaagaagattccatctgcaataggagatcgagccaagcagtccagagtggagaagctttgttaggcaagtttgttatagaaagcggagcggaagaagtcagacaagaagagaagaccgcccaacctatcttcttgctagcctcctcgaatctcggggacgagattcttgtaaggggggtggatttgtcacgtcctgataaattcatcccgaaataaaaatcatcttctaaaaggaataatagaattaattaaaattcgaaaagaaattggcaaacactaaaatacgtacaagaaaaattcaaatatggcccggagaatttttgttaaattctccttggtctaaaaagagccctcaaattttagtggaattttcagagcacaaataataattgaaaagaaataaacaaagttgaaaaggtttataaaaagaaaaaccctaaaagaagtcctcttttcccccccttccttcttgggccggctcggcccagtccctccctctctctctcttcccccgcggcccatcggctcccccgcgcgcgcgcgccgctgacaggcgggcccgcccgccactctcgctgacgggtgggacccacctgtcatcgccttcctcccgccgcgcccgccgcccgcccgtgccctagcgccgccgccgccgctgaatccgccgcatcccgccttccccgcgcgccttaatgaggggggaattactccccgcgtttccctctcccgtttccccctcttttccctctctctctccctcggattcgtccggattcatcccgcgaagttcgccggcgtcttcaatggcgcccgagatctccgcgcgcggtttcctctctccccggccgcgctctccccctcccgttgctatatattcgatccccgtgcttcgctcttccgtttccgccgctcgccgctcgctctcgccgtcggtttcgtgcccgcgccgtgctcctctctctccgccgtcgccgccgaccttcggttcgccgccgacgtcgctccggtcctccgcccgactcggtgccacctccttcggcttcgccgagtggttgccgaccccgtccgccgctccgcttcgcccgccgactgccggagcaccgtcgccctcggcatcccgaaccgcgccgtcgccttcctccgctccggttcgccgccgccgtcgctccggtcttcctcccggctcggcgccacctccctcggcatcgccgcatcgccgtcgacctcgtccgcgccttcgtttcgctcgccgaccgtcggagcgccgccgtcatcgttatcccgagccgcgccgccgccttcttccgctccgggcgccgttctcgtcgtcgtcgttgtcccggggtgagccgtggaccgtcccttcactttccccctcctctccgctctctcgggcgctgctccgccgcgccgatggtcgccggcggtgaccatcggggcgcgggcgcgttcccttccgtcggccgtgccggcgaggccgccttcgggcgcgccccgcggctgccatgtggggcccggctgtcagccgcccgcgcccgcgggtgcggctgacgcgtgggacccacggcgccggtcggcgtcagccgcgtgcacccggtccaccgtggaccgaggggctgacgcgtgggccccactcccgtggacccggtccgcgcgccctctctctcggctgacgcaataaacccgatttttaattaaaatttaaatgaagaaattcgcaaatatccatttaaagagcatataaatttcaaatggccatatcttggccatttgaactcggaattggaccgttcaagtctctaatttttccttaagaagtcaagaacccatttttgtgctttgtttctgcttgttatatggagtttagtagagtaaaagccttttcttttccgttggtcgtgtagacgctgcagcttcggaagattcgctcttcgtggaagtagaagccgacgtttgggaaagcaagcaaggcaagtcacatcatccttgaacatattgaatcccagtttatcaaattattttgatttaaattattgcattattgctttatttaaattcccgcgttatcactgttttatttagccatgcttatttacctttgttaagacattattattgccattgttattattaccttgttcaccctagaataaacaaaaccccaactagtgggtactctattcgtggttccactagtataaatttaggtagatgcttcgctgattaattaggcaacattaggtggttttataactttagactttgggaattctcatatcatttggacactatggaattgttggattatggtggaattggacatacacctctcttcctctttcaaaacccctaaaaccttttttcggtggggtttgggtgcatgccagttgtgggaagtagcaccccggccactataaggattaagctcgggcctctgttgcaaagcactaccgtactaaccacatgtctaatgggtaaggcttaactcggtgctcaggctagtcctgaacaaaaggacacggatagagatggatgaagtcgttgcgacgatggatatctctgaggcaaatgaaggctacgcgagctgcggctcggtaatcgagatgtctaggcaaatgaagactacacgggtcggtgcccgttagtcgagatgccatggcactggactagtacgcgggtggtctcacccttatgtgtgtggcgcacccggtctagatcttgttgcttggggctcaaccctggcctgcctgtcccgggataccggccgtaggcagggttgggtcggtacttttgttcacggctaggatgggtgaagggttatgtcacatgtttacgacgggttccaaggccatggaatgcggagtaaagatgtgtcttgtgggtaaagatgtacacctctgatcagagtaaatctattcgaatagccgagccctcggatatgggcaagcctagcaatgtacccaagttagtggtttaattcttaaaatttacttaacaactaaaatgtggaaaggttggcctgggttggcttgggacgagctgggacccaggtcgggttgccagttcggtctgaatcatcgtaggccttgggttaaggcaggttcgtgtgggtccacggccttgattaataatattgtgtagctctaggatcgtctttataaaatagctttgggcaactaagtgacttttaaatgctgtttactgcaaaacctaacccctattattatccccttgtaccccccttgcattaatcatgcatctgccggtgtggcttgctgagtactgtggttgtactcattcttgctcaatcttttcccccttcagtaagagaagctttggagaagatgtcttaggtggagtcctggcttataccccagttgagcgcctgtggagatggagctgtaggcccgctagtccgctgctgtttatttttgattgtcaggcctgaagcgcctttgtaataatgtaaatattatcgatataataaagatgtgccttttgtatcatgtttgtttggtgcaccccggcttttcctgggacggggattaatgcactagcgttcgggaaaaggcaattttctcggtcgcgacaactgctccatgatcccaacttagttcccaaacagtagatttatcaagaaccgaacttcctataccgatctaatacgatattataggcaaaattacccatctaacctttcaaccaatcaataagctaatacctgacccactttttttaagtacctttttataggtaccttgtattgtagaaggttggaattggatcaacggtcatcttcatttccaagcacaccggagaaacacttgtacaaccaatggatcttaatttgcttgcgatgcagagaatgcatcacacacattggaggttataaattcctgatcagcagtgagaggtttcactgaattaattcagcaaagcttcgcagcagcttagccaggataggatgtcgtcgtcgtcgtcaccgcaggacgggcaggcgagggcgcccgccggcgacgccgaggactggaacgcatggttcaaggagatgcgcgggtggctgatggtggtggcgacggtggcggcgtcggtgacgtaccaggcggggctgaacccgccgggagggttctggcaggacaacctgggagggcgcggcgggcaccgcgccggcaacccggtgctgcgcgacagcgtcgcggcgaggtaccaggcgttctactacctcaattcgacgtcgttcgtgacgtcgctggtgatcatcgtgctgctcatgagcaagcgcttctacgagacgaaggccaaggtggtggcgctgctgctcaccaccttcgccgacctcgccggcctcgtcggcgcctacatcgccggctccacgcgctacatgtcctcctgcatctacgtcatcgtcatcgccggtgtcgccttcctctgcgtcatctacgctggacagtgcgtattatatttatggctatcgacacatatgttatcatcgtcgtccatatatatctatatccatactactttcaataatattagtggtggtgttcagatcttccttcaatatgtcatctcataagttggttgatatgtgggggtcttaaggtctccccatttgaatatcctttcgttggatatggcattatatagctaatcaactaaggccattcccaacccaagatactagacatagattccataaactccacatcacaaagaaactagtactagacactattttttcaatgcaaacaccactatttcacacttaactttaatgctacttatatcacatgatgtcttggatgttgtgtagaaaccatgtctccttctcttttctcatttattgatttgccacatcatttttcttcctaggtggcagcttatttaatgctatggacaccatcctagttattgggttaggaatggcctaactgtgttataaccttttaatatttgtttttgtttttttctcttacaatatcagttgcaattaatacacgggcctatatgtatctctctataaacctatatatgttacatggtttcagtgtaatggaggacgtgatccccgacatgaagaagatcccctgccttgacagtggggggttgtttggggactacaaccgcgcaaaggctaaggcaggtgaagctgaaggacgtcagagcgtttgagaattttcatcgccaatttatgagcctatctggagttctattaaacatgggacttttccatgtttgagagagaggggcgataagcttctgtcgggaaaataatcgtatcggtatacttaatcctatcgtcaaatatttttacaggttgtactatagagatatcagtgcgaataagttgatcattcccaatataatcaggtgcggtccgctaatctgcagcagcaccgtgacagcccttaatatgtaatagagagatctactatatataaatatatgtcacacagtttctttcagttcaacgattttttattacattgcttatttctataacatatatacgagtttatcaattagtctataatatgtcgttaagctttttttaaaaaaataatcaaaatatccttataacatataagggtaaaaaataatttatcctgtcggcactactggagaactgatatttgctcggatgacaaaaatcaattttgtcctggttcgaataggaacgggactaagatcttaggccggattcaaaagcctaaagactttttatgatctttaatcccggttgataaatattatttttattcctggttcaaaaagtcgtcaggccgtgtcaaacccaactatctttactcctgtttgatgttaccaatcaggactaaagatcaacactttaatcccggttgtttatgccatctgggacaaagattgaaaaacaatctggaacaaacgcgttgagccgcacgcctccccgcctccttattgacggaaaacacggcggcctaggagatatgcttaactccagtgcggttccaaggcttgtctcccgggttaagggcgtgccaactcgtttgatcctgcaaccaacaaggaaatcaagaaaatagagttaaatgacgaacagtcgatcaaccaataatccgatgacgtatcgatagtagatctagccgatgtagttaccccagatcggctgtgagttgataatcaggtaaagcaaaccctaaatatgtcccatcgactgtaatatcatctattaggttttattaagcttttcgatgacacagtatttggagcaaaaaatatagaataaagataatatactagctattactctaatacagactcatacaaacaaataaatctaaagaaatatatcaaataacaaacaatcaccaagtttgacaacttagctgatattgatctatacttgatatatttacataaagtgatttatttgtataagtggcaaatatacataaaacagatcatgaaacatgctctataatgcatattaggtaagattggttgaaacgctgatattatcgttaattatgattaattgcatgttagtttataggttctaaacaagactagggatgatgcatcgcaaagtatgtaaagaaatctaaagtctaaacaatcaagaaattaaccacttttcaggatggataccttagctaatctaataactaatctaatctagtaaagctatttagccaatactggcaagaaccctaaagagagaactagccggtagggttcaatcgggatactatgattagcttaactaagatatatgatagcagatggttatgataaaagaattaatatatctaaagcgacatactagccccgataggacaagccatcgaggcaagttacctcttgtcaagagaactcgccgaaaagaagaacaaaaaggtggtgatgccccgaaagttgtatattggattgttgtcccttttttacaatgatctgaggtttatatttatacccagagtgcaaacttagtccattatgtacatggttcaaacttgcctaaagataaaatacaaacaagtccatacggcggactcttgccatatgtctaacttaaaccgacataaatatcctaattaataaat

SEQ ID NO: 21642 - DNA, 13341 bp, Oryza sativa
agggagaagtcgggagggagaaggaaaaagaaacgaaagaaagaggaaagtaaaagagaaggagaaggaagaaaataaaagagaaaagaaaaaaaaaagagagagaggggaaggagaagagagggtagagtgggccccacctgtcagtcactatagctcgtggataaggttgtagtataaataaatgaattaggaacagtagccttttacaaactttcggatttattccaatttgaatctttaaactagcgtaacttattcgtcttaactccgattcgagtgaaacttgaacctaaattcatctaaattcataagcttaccaatggtatacaattagctatttaataaaatatatttataattataaattaatatcaaatgattagataatagttaacctaaatagtgtgccaataaataaaaatggatattgtacagtagaataattatccttaatatgttttgtcactgtagcaaccacataaattaagtataatcaatgtttgaaattaatggatatataggaaaatattagtgccatttattaatctatgtccaaatataattaaaacccacgacttattagttatttaaatagagttagccttataattattaggtaagtaaaatatagatacacatagatcgatcctaagcttgtttatggcaaataataacagagctagtgtgattaaatcacctatatgagattaatcaacgacatatcccatataatagcatatattatgagatgtgagcaacccttagttaaccaagcagtaaatagaaactattcaaataaatgattcaatatattaagatattgcgcacacgtatattgtacatcccattatagatatatggtatcgtattaatttacttgttgcatatattaatttagagggagtataagacaaacatgaatattagataaatgctagctatacatcttgtcctcgtataattacagatcaactgtaaatttggattattcattgtaaaattatgtgatgggataatccgtaaccataatatgattaacctaaacaattctaacatacaaagcatgggtaattgttaaccttttataatttattttgagaagtgaaatatgtacataattaaaataaagcctccattaataaaataataatacaaatgattcacagtaattatttgaccgatccaaaatccatccggcaacagaacctctagtgtataaccgttctatttagatagatgcatgtgtaaccataacccttccttagccattagctagactgaaccaccatgacaacagaaagactaagaaaccttagctcttagcttgattagagtccattagcaagcgcgaataatataagcaaccttaggttcgacctcagcaaatatattttgtctgtgcatatttgattgttgcttgaatattggtttttctcgcgtattatagactttgtgtatcggttagtcgtgaggcaacgtctgcaacttccagaaggtgaaggttgatcaagattatatcgagaatagggattatcctgagcaggcaagtcatcactattctttgaacatgttgatcccaattgcgaaattgttttgtttacaaataaaattgcatgcaattatgaacatcctacttgtgattataccatgccttgactattgttcacctttaaatctttgtaaccatagatacgtacgagtccttagtcaactatgacacttgcttagaaatgctattttagattcatgcatactcatatttatcaaatgctatatgcttgggcaattacctttgggaaggtaattgagatgcggcatgtggagacatgagcgccacattgccatgatattgatgacatgatttgtgaaaggaaaataaagtaaaacaactgttttcgactggggcggctggaggacttgggtggtgtccgggaaaaggttagtgccgtccctggtcaattaaggaccgagccatgaagttaagcatgaaacgacccccgtacaaccgcacttctcgtatgggtatagacctagcggaatagatagctgagcggaggcagtatccatgcatagtggtttcttgatgtgtgcggtaggggctctacggtggggcagtcattggtagaaccgcgaggcgggtgtctacagtggtgtcgccatcagtaggactaccatgtgagaatttgaacataattacaacttaatgcatgtgtgagtctttcctccccgggtgcgccagaactcctctcactgctagaaaccgtgtacgcctagagtgcatgaggatttaagttcatggagcgggtactgccaatgcgaggttatcgaaaagctttgccgtgacgcgtctcatgtgttgggacgaggctcatgtgttgggcagtcacggagtgcgggtaaagtgtacatccactgcagtgtgagtaaaccaaatctattcgaatagccgtgctcgcggttactgagcaccgggacatgtattacacttggctagactctaaattcttaacttgtgtgggatgggttattgcatgatgaattttatgctgttggagccacttcctgagaggcgggaaggtggacgtcctcagaaaaccatgacgaatcaatggcgggaagctatccttgggatcacaatggatggtggacagaaccgtcgttgtttaaatataaactctggtactaaaatttgatcagtctatggtaggttttaggcttgtgaaaagaattgtaaaaattagctttatgcaaaagaacctgaaaccattccttgaataccctctatcatatgcattgttgttgtggtggcttgctgagtacggttggtactcacccttgctatttatatatcttttaggagagtgttgaagagaagcccttgtcggtacgcttgcgtatcccacaagatgatcggagtgcggtcttgttctaggtctcgttccccagtcgactgcctgtggcatgttaaccgggcccttatattattttgccttccgctgttgttctctgatagttgttggcctacctggccctaatgtaagtgtttaactcttttagcctaaattcattcgtgatatgttgtgatccaactatgtatgtgtgtaccaactactgatccagggattggtacggataaacacagaagatttccgattttcaaaatcgggggccgacactatcacgaattataattaattccaaaaactattttagggttctaaacaagactagggataatgcatctcaaagtaagtattgagctatatattatgccatcctttgtgtattttgtgcacttgcatatttgttgtgtggcttgcggagtattccatgtactcactttgcaataatcaattaaaccccagttgaagaaaagattcgaagcagaagacgtttggcttataccccaattaagctgcctgtgggagtggatatgatgccatcgctagaccgtttatctgctgctattttcttttcttttgtaaatatgtaacattattattatgatggatttgtatattaaattgtcagtttataaacctcggatgattcctggacgagggttttaatgcacaaattcgaaaattacttgtgaatttttgggcgtgacaatcaattccttaatgggccaattaaaaaaatagcatatatatgacttttagcaaataaattttacattctcaagggaaaaaacaacttccaaatatttacactcaataaagatagaaattacagtcaaagttacaatgtaaattcaactaaaacaagttgtaaataatattttaaataatgtatagcactttaaatattacattaaaattaaaccatagtaaattaaacaatagaaattatgtaatcacaaaaaaataataacttacaattatattgataaaaaaatacataccatttacactgtaaatttagtaattacacaatgtaagtttagtatttgcacactgtaagtttagtatttactccctctgtcccttaatataagagattttgacatttcatttgcaccgtttaaccactcgtcttattcaaaaaatttgtacaagtataaaaaatggaaagttgtgattaaagtactttggaataaagtaagtcacaaataaaactaataataattccaaaattttttgaataagacgaataatcaaacagtgcaagcaaaatatcaaaatcccttatattatgggacagagggaatacatccgttttcgctgcattgagcagagtactacatcatgtcaggctcagaataaaatcaaactcctacatgacaggacgggaaccaaacacccgatctgaccctaaatcacagcctcagcacagatatggaatccaacggatgaaaattcgacaaattttgactgagaaatctgtcgacagatgcgtaataaattcgattttatctaatacaaccctctatattttaagaaaataatcaatgtatttaagcatagaattacattttagcttgcacaacgaaagagttagcaactagctagttttgattaacggacgtatgcaatgcaaccatgagaaataaaaatgtactttcaaaacaaatatttgtttaattaataagaaaagaaataataacaatatcgcacaagattcggtagactacaatctagcagatccatacaatctgcacaagaaatttcttatagtttgtaactatgtaaacatgctaaaaaaattatctaaaaaaaaacatgttagaaaaaatgttgggtgtaaactccatatagacatatccttcgtgaatacgccctagatcagagaaagttaaagttggcatgattgtctcttttttccaatcacaaacgaggttgccagatatgttcttttctcattcgtgttagttagccctcctgttgatcctcatgtcgccatggcagccttatgatgtacttgtatcaatatatcatccgttgatccgtacactgacagcattttatatttactggacagcaacacaatcaagaaaagttgcaattcttcagcctgaacagcctgatgaacgaaaatcccttccttgtccatgctgaattaacctaaagctacataacatatttatatatatcggattgaaacctttcgtcctcttcactaaagtgaaattttcgttactataaccaatacagcttgcttgcaatccaaacaatgcacatacatggcggttataaatgtacggcacttacagtaaccagagtgaacaattaatggactgcagcgagaggatgtcatcagagacgacgaggcataatcagcatgacgagcggtccgagcggaacgcatggttgaaggagatgcgcgggtggctgatggtgctcgcgacggtggcggcgtcggtgacgtaccaggccggcctgaaccctcccggagggttttggcaggaggacgacagggtcgccggccacagggccggcgatccggtgcttcgtgacagcgttgccgctaggtacaacagggttttaaatctcctactatagctgccactatctctagttataactgtatgagaagggttctagttatttgctctcatgtacaatttagccgctaaaactctatttagcatgctatagctaccgctatagctgtttgagaagttaaccgctaaatgtcttagccctctatttaaaacatgaggtacaagacgttctactacttcaactcgacggcgttcgtgacgtcgctggtgatcatggtgctgctcatgagcgagcgcttctaccgcacggagaccaaggtggcggcgctcgtggtcaccaccttcatcgacctcgccagcctcgtcggcgcctacatcgccggctcgacgcggttcatgtcctcctgcgcctacgtcattgccatcaccggcgtcgccttcgtctccgtcatcgccatgggagagtgcgtgctacgtacattaattacattacattgcatatattaattgataattagacaagctacaagcaatgttaatatatatagttagtgctgacgcatggtataatttgcttcagggtgatggggatagtctgcgatttcttcagggggaggtcgccgtgcatgagcagctgctacccgctccatggtagagctgagggtgacggactcccgatccacaaggccgaggatgaagagcaaggtagaggcgcggcgtttcacatcagtagtgttgacgcttgagaattttccccgattttagctaggctggaattgatctaggctacatatatgtaaaaatttcttcaagaattactggaaagttgagagagagagagagagagagagagagagagagttgtgttaagcttctgcaaaaatgcttcagagttcagtattccttttcatggactgttctagtctataggttgccagtgttctgcgcgcggttttcttcatgtgacatgcttgggcttttcatgaacatggagctgtctgtttagttatctgtgagtgtttttaatgatatagtaactttctatacaaatactagtatatgtaaaaacatcctatttttatggatggctatcataagcggtttctgatcatgaagcggtttaaaccaccatcacattcggttttccttttcggctgcttatgaaatggaaagtctaggacctataaaaatataatttttataggggatgtcgatctgttagtaattgaatggtatatggattttggaactgatggtgtgctccatagaaaatacaatctacagtcgaacacatttattccatcgcaaacggtcgaggatgacatatagtccctccttttctttttatcagcacaagtctttgaccaataattactctaccaatattttatttatgtgatataaaattatagcctgaagaaagcatttttgaatacaattataataacaacagttttgtggaagataatatgtacaataatcgtgggttagatcttgttctaataaaactaggtgggcgacccgcgcatttgcactgctagcatcaatttaaaattatctatttttatacatgattttattttaaattatcattcccgtggttctaataattttatagtttttaaaagccacgccagtcgctatcccttactcctttgtcatctttttatttgcttactcgatctaccactacttctattcatcctctttagaacttaaaaaattaggccttatagtttttagagttcattgtctttgttgggtttcgttttcatatataattctttgaagtatcgtcaaacattaccaatttactactctacagcccgtccgctatcatctctctttattatcattgggattttaataatcgaacataattattgtttgtgttctttttaaatttctataagtctccataatcgttagtggcttcgccactatacttctctgcagtccacccgctgcctcctctccttattgtcattgagatttcaaaaattgaacatgattattattggggtttatttttactctccataagtcccgtcaaccgtcgtgatcatgctacttaacggcatgcccattgtcactcctcttaatcgtcattgggattctatttgaagttttgtttatagtttttagatatcccatcgatcgccagcactctactaatttacaggcctattgctcctctcctctttattgccatttataatcattgtgttctagatggactttttttttgaaaatttgcatatttttcattccgataatttttattcgtaaattatattcctacttgaacttttataactatttttctattttttaaatttaatttatttgtcatttcgaactttaattaatctcgtcatgtgttctagattgtctcttatttcaatagtctttattttttattacaaattttagttatttataaattgtattatagttgagctcttatttttctttttctattttctgaatttattttattttttatttctaattttaattaatctcgtattgtgttttatatagactattcttttaatatttcttatttttttatttctaatttcaattgtttcaaaattgtattcctacttaaactctcttttttatttttctaattttttattttatttgatttttttattttgaattttaattaacatcatattggtttcttatatggactcttattttaatattgtttattttcaaattgtattcctacgtgaactctccttttatttttctaattttggattttattttatttttatttcgaattttaattaatctcgtattgggttattatatggactgttctttcaatatcccttatttttaattccgaatttcagttattttaaaattgtattcctacttggactcttcttcttttttttttctttttttttgctaattttggattttattttatttttattctgaatttggattaatctcgtattaggttcttatatggactcttctttcaatattacttaattttaattccgaatttcaggtatttttagattgtatttctacttggactcttcttttttttttctccgattaatgtggaaatttctaaccttcacagcgaacgtggtgtctgctttcaaagctattttaataatataatagatagatagatagatagatagatataatacgtccctatataaaaagagaaggaagggaatatatctttcccacattgtaggtagcccatctcacgggtacttttttgttttggcattctttattttaaggctcctttccagctaggctgatatcatgacatgacatagtaatgatgtaatcaagagtctaatatgtgtcattagtacacaataacaagttggagcaagaacatgtatatgttaattactcccttcagtcagaaatatttgacgccgcccaagaaggccgacaggctagtagaaactagaaagcagaagtgaaatatcacatagtaatacattagcacgctgcagtgggcatatatttttatttcttcatctcgaataattggacaattcctttcttgtccacttaaaaattcgcatatgtgcaccctttcttcgtcttcaccaaagatgggaaaaggaaagctgccttgcttgcaaagcagacaatgcacatgtaatatggacgtcattcggaaaagcgtaatcacaactcacaatccacgcgagtatttaaaccaacaattgaaacatgcaaattaaagcgcactgaaatcaatcagcgtcaccaggatgtcgtgctcgtgccagcgtcagtcgccgtcgtcgggaggccgcggccgcgccgtccccgtcgccgacgcggccccgggcgagctggcggcgccggaggccatcaacctagtccccaacgggaagcgcggcatgccggtgctgatcacgccgtcgctaccgcagcagcagggcggcgcgtcggcggcggcgttccatggcatcatcgtgctcaaggaggagagcgaggacccggtggcgctgcggaacaagtggttcagggagatgcgcgggtggctgatggtggtggcgacggtggcggcgtcggcgtcgtaccaggccgggctgaacccgccgggggggttctggcaggacgacgcgccggggcccggcgggcacagcgccggcaacccggtgctccggcacacgtcgccggcgaggtacaagacgttctactacttcaacgcgacgacgttcgtgacgtcgctggtgatcacggtgctgctgatgagcgagcggttctaccggtcggagacgaaggtggtggcgctcatgatcgccaccttcctcgacctcgccagcctcgtcggcgcctacatcgccggctccacccgcttcacctcctcctgcatctacgtcatcgtcatcaccggcttcgccttcgcctgcgtcatcgccatgggagagtacgtagacaccaatccaatcatctaactatctagcttcggccgtgtttagatccaaactttttgttcaaactttcaacttttccatcacatcaaaactttcctacacacacaaacttctaacttttccatcacatcattccaatttcaaccaaactttcaattttggcgtgaactaaacacaaccttcatgctagtagtgataccagggattgaaatgttggttctttttctttttcctacatggcaaacgcgcacacgcatactctgctatatgcatggtcgcacgtaacaccacattcacccccctaacacacgttctaagaaacggaaaccagtgacccatccctaattaatctaactgaaatcccgttgaaagccctccctcaaacacgtaatattcactttcacgcacccacgactccatgccaccacatcaccagtgtttttccttattttggttcgaaattttgaatggatggatgatgaatatatattgtttattcacctctgctccgcatgcagggtgatggagcaatgctgcgggttcgtgctgaggacgtcgccgtgcatgctgagcctggcgcagcggcactggtgcccggtgccgaggagcgtggtggacagggcggcgcggcaggccaaggacgacctgcacatgatggaccgcgtcaacaacaaagcgaaagcggcggcgccggggagcagtagtagcagcaagcagcggcgaccttgttgctgcctgtgttgcgccggcccgcctcccaccgatgtctgatcgatcgagagggaggggaggcggcagcagcagcagcagcagccggcagaggccatacgcccgtaccaatacaccatggcccttaattagcttgttcttgcatcgggcagtttgtgatctcctttaaactgctttttgcacgcacgcatccatttatgtttttttttttttgctacacatgttattcggctcttgtcagaaaaaaacatttttttctctgtagtatggatatgtatcatgctcggttgattttaccaatttgtcatgaataaaacaagggaacaatgggactacccatatgtatggatccatagttttttttttttaaagaaaaagtcaagtgtaaatttttctaacgagaagaattttagtggaaatactctacaggtaccgtgagatgtttccagctagtaaaaagggattaaatctccttgagaattcgaagcagcatggtggcagaaaaaattcaccaagttcatattggttatttgttcggtgtagtatactatgctgcatgaatttttataggccccattttaaattataaccagctgaggaaacaaggagagaatgctcaaggcttaaggaaaaaagagataaaatggcattggagatggctattgatagaaaggaagcaaaaaatgcttaacatcataccctctttcattaatgactaaaatttatctctttgcaatatggcttctttaataggacttgatttaggatgcacaatagaaatgatgggacacaacttggatacttttagggctttggaaagtgctagattggatttgttccaacaaaacttgaaaaaaaccaatgaaaagtgtcagacagaggacatatctgaattcaaaacatctgatttgggtgtgattgaagatttggcctctgacaatgactctgaacttgatatattagaagatatcctggagaaaatccagtcaaagtcagaaaaaaaaaagaaaactaggaatgctaagagaaactttatgatttgtaaggtcactccaaaagctaagaaaaacagaagacccaaaaataatagaagtacaaaatgaaagtaagggtggacccaaaagggttctaggtatgcaccggcatacccaaaaattacgaaaactttttaatacgtagttggtcgcgatagggtttagagaatcagcgttggcggtggcgcaagcacgtggcgctgcggcagttggcagtggacagcctcgattggaggtggacagcctcgattggaggtccacgccggctggactagccgctagcggaggctacctgcgatcggctatgcacaagcatgcagcagcacgccgtcgcggttgccagcaagtcggcgacaagcagcggttgctcaaggatgccgaccaagttgagccgtttgaggtgtcgtcctcgactcctcgtccacttgtccgtccatgtttagcccgagtatactctctctattgttattctctctccgatttttctcttagcagagagccatagattgattgaaaagtagaaaactgaaattagtaaaatcattgggagttaaaaaattgaaggcatatgcttttgtgatttaatttgtctgagatcaatttaatcaatcaaattcaaatgggaagaggaacatgtcgcgattctttcttaagctagaacataaagaatcttagtgagctttccatcaagctctttaaatcaattaaactcagtatattcacatcaagttgaatcaatcatattctgtcacgccccgaactagtaccgaccggaactagcccgtgacgttccaaattaacctgttaatcgataccagtcccaggaaacagtgccggtatcacaggaagacagaatatcacagcaacaaagatctctttattatagagtagaggtacagtcatgttgggctgcggacagatcccgagctcacaactgcattacaaaagggaagcggaagccaagacttgggccaaacaacacaggcgcgacttgggaactaggccgaaaccctaaaactcatcgaagccggcttgctcctggaagaactcctcgtcagcaggatccgcttcatcttcttcagcaactgggggggggattatttatatagagcaagggtgagtacgggagtactcagcaagccatgggaaataagtgtttaatgcaggcttcaaagaaaggctgttgtttttgcaattgattttatttgaactcttttctgaaaacaactaagtgagtgcttctcaaacgacacggatgagacagtgcgtctcgtccggtcggagtatgtgcaatgtatcagtctttagaattgaaacagggttggcacccggccaacagcttttcaaacggccacccgggccaaccactttcaaatggccacccgggccaacaatccttcaaacggccacccgggcctagctgatcccatcagctgcagatttttcaaacatcgaaaccctttccacaacagcaatttcacaagcagtagtcaaacaaaactacgctaggaatcacctcacatccgcccatgaccgtgggcacggctgttcgaacagtttgttaacctctgtagagggggtacactttacccacacaacattactaacccggatcacccagcccgtggggatcagccacgtcgggagacctccaagctttcatgacaaggcatttcgaaag

SEQ ID NO: 21643 - DNA, 938 bp, Oryza sativa
gaacagtttgttaacctctgtagagggggtacactttacccacacaacattactaaccgggatcacccagcccgtggggatcagccacgtcgggagacctccaagctttcatgacaaggcatttcgaaagccgacacaggtttaccatatgctgacgagaggggtcccagaccaacaacaggttaggtcccagaccatactgtgccaggaagcccaggggtcctccccgacaccaccccggtgaatccacatgtctctcggcatcaaggctcccctgataagctagttactcagccaggggtgtcccattccacccatgtggtcgtacttgtcttatgtttggatgaaattccaaggaaacggtccttaagtgcaagagcggggaaaccgtacacccgatatgttccccggttcgcggttttggaaattcatttagttcacaagcaccgacccaggtgtcgggttttccaagtcttttgtaaaacccaagttttacccaagatgtttttcagattttaagtttgaaggcggccgtcgatactcgtgcagagtgcacgatttccgaggcgcaactgggtggttacaagggaacatggtataacaattaacaaaggaaggatcaaatgcaacaaactaggtaggtccaccaatctgccttgcagacgggacaacagattaagtgcgatcctatcaatgcataatatttttcaagcaacataattaaattcaaatacaggctcaagatgttcaaaggtggcttgccttgctcgagatctagagcttgatcctcgaaatcctcgcactgcgggtcttcgggctccgaaactacacgcgaaacgggacaacttaacaaacggcgaaaataaagtcctattaatgacctctaagcgtgccattagatagatctcgagatttgaggaattttggaagttgaacgg

SEQ ID NO: 21644 - DNA, 1136 bp, Oryza sativa
agcgacggcgaagcacggctggaacggcggcggcgacagcggagttagggcgcacggcgctagaacgattccgccaccaaaagccaaagccaagggtgccgccgggtagcgaaaagcacgggaaagcttttaaaggggctcggagacgacgcggaggcccacggcgacggcaccggcgaaggaaacctcggcttggagagagggaacccgatccgaatcgaactcgattccaacgctttccaaagcgatttagccgatgattccaaagggaaaaagatagaggagatcccggagatggtttcccctcaatcaattcggccggagaaggaaagaggcggccggattggaaggaaacagcggcggcggcgcgagctagggtttcggcggcgatggcgcgaggaggacgaaggtcctgacaggcgggacccacctgtcagcggcagcgggcgcgcgcgcgcggcagcggactgggccggctgggccgagaagagagagaaggcggttttgggccgactttcggcccaaagccaaaagaagactttttttaaaactttttcaatttaaattatttcttaaatgcaattccatttattaaaaatacttccttagctcaaataaatcccagaaaaatctaggaattatagaattaagcaaagtatttaatgaaattttatctggccactttttagattggaatttattaattaaacttagattttcttttcaaacctttttaaaataaattctagaaattccatttaaacaacaatttatataatttgaatttttagggtgtgacatcctacctgtcggagagagagggagggagaggccgactggggaggcagaacggacttgagggagagagagagccgagcgggccgagggaggaggccggcccgagagggagagaaagggggcgcgcgggccgcgggagagaaaggagggattgggccgaaaggggcccaaagagaggaaggaggattttatttgttttctttttattttaattgatgcaatgatctttgtgctattaaaattatttctcgagctccgaaaattcacggaaaatttcggagagtacattagggcccaaagaatattacaaaatattcccggccaataatttttaaagg

SEQ ID NO: 21645 - DNA, 734 bp, Oryza sativa
cgagctcggtacccctcatattcttcttgatttcttgaatatcagaatcattaatttgggcttttctaacttgatcaattagagtgggcttcacttctagggctgcaacgaaacctctactgacaattcccaaatttaatctttcaaattccttgcataattccaatggcaactgtcgtccttccgtaacattgcaatagcctttcctgctaagagcgtctgctacaacattagcctttcctgggtggtaatgaattcccatgtcataatccttaattaattaatgtgccaactaaaacctgataatggtgggttgtgagcacatggttttgatggtcgtgctcatgacaattaaggaccggttcacgagtttcggttgtgaaacattaaccgtgccaaccacaagccagcatgggcaacggctttatcttttgtatcgcatggttcattgcggagcaccagactgagaagtggcggtgataagcccacgggggtcgctggggaggtcatgccttgtttataagggggtgattatgatccaggaaggtgcgctgcagtggattgtgttgtataaggggtattgtcacaacttctttccgatgtaccgtggtggtattgaggcacatggtgacatgatgtggggttgtgtcttgtgggtacagtggtacacctctgatcaaaataaaactattcgaatagccgtgcccccggttatgggcgggtctaacaatgtc

SEQ ID NO: 21646 - DNA, 20909 bp, Oryza sativa
ttttcatacaggggaactggatattgaacgtttaaatcgtggagtgataacgttagtgccaaaatgcaaagaagcaattcaaatccaaaaatttcgactaatctgcttgctcaatgttagttttaaaattatcaccgaaatcctaatgaacaggctaacagaggttatataaaacattatatctaggaaccaggctgctttcataaaacacagatatataaaggaaggggtggtagccattcatgaaattttgaactcattgcacactacaaatggaaaaggagtgctattcaaagtggatttcgagaaagcttataataagattaagtgaccctttgtatatcaaatgctacaagttaatgaattccctgatagatggaatgactggataatgaaaacagtgaggggggggggggtcgagtatgtgtgaaagttaatatgtggaggggccatattttgaaacaaataaggggttaagacagcgtgaccccttctcacctcttttgtttaatattgcagttgaagctcttattgccctaaccaataatgcacaaaaacatggttttatctctggtttaaaggtggggagattaggggaggaaatctctatattacattatgttgatgacacaatattcttgttggataattctttgggaagcactaagaatttgaaatttatcttgtgcctatttgagaacatgtctggactgaaaataaatttccacaaaaatgaggtttttagtgtgggtttatccatgaaagaggaagaggatttatgtgcaatactaacatgtaaaaaaggggaccttcctatgagctatttggggatccccgtggataagataagaatacacaacagagtggaaacctactgaaaacaaaatagataagaggttgagctgttggcaggggaaactactagctacaggagggagattaacccttataaactccagtctcagcagtactatacctctatatatgatgtccttcaatgactacctaaaggagtgaaaaaataagaatggattactttagaactcatttcatatggcaagagatcaaggcattagaaagtatcacttggtccaatggccagagatatgcaaaccaaaagaccaagggtgattggggatccttgatctagatataatgaacattgctctactaggaaaaaggctttggaagttagaaaatgaaccagtactgtgcaggaaaatcctgagaaccaagtatttaaaaaaacaagcctctagctttgatcaaacacaaacaaggagactctcatatttttgtctggccttttagagattaaagacattttcctagctttttgtaggaaacaagttgggaatggaatgaggactcatttttggcaagatgagtgggtggggaacagtacaattgctgaacaatttatattacatttacaaaaaaaaaaattatagtagcaaaggcctttgagaaaggttgggatttctttaaatttaggagaattttgattgaggatatatatagctaagaaatgggaaacagttaaaaaaaatgtgtgcaatgatcactttgaaggcagaaaatgataaactgatctggactttaactaaaaatggacttttcactgtaaaatctttctaccatgctctaaaattatagacaagtgggtttccttttaaagagatgtggaagttcaaaattactttaaaagtcaaaggttttatctggttagccctcagaaatagcattctcaccaaggacaatctgatcaaaaggggtggaaaaaagggacaaacaaatgtcagttctgtaacaatacaaaaagtattgcacaagcttctttggttgtagtatggcaagatttgtttggagcacagttagatgtgtgtttgattgtgagatacctgatgggattcaaaatctaatgggaccttggttgaaagaattcgctaagaaaaccagaaagatggtagctgttggaatttctgctatcatatagataatatggaagatcagaaataaatcttgttttgacaatatactacctaatgatcctatagaaataatcaggcaggtggctaactgtatgtctgactgggcaattttacagaccaaggaggaagaaacaagaatactactggaaggggacaactgctaagacgggtggcaaatgagatctacaacgctaagtatggatggagcttcaaggcaggaagactgatgggatgaacgctgcagctccctcttgtgaattgattctggaagacctgtttctcttttgatgtggataaacaaaacctctgtctcgctttggtagtctgaagcctgttggttaaccttctggaagcgttgcaactatgtttttgtttttgtgtgtgaaaactctacccacttagtggatgtctctatgtaatattggagccagagtaactgttgggatacacgtaggctacgatagtataaatcaaaattttctatcacgtaaaccaggaaccatgcaagtattagatcatagatcgttaccactcgacgcgctgcgcagcggaagaagacgctgagaagtcgaaggaactctcgcgaagtagcgcgcgtcgatgtagaggaagtagtcgatcgcaccggctcgaccttctcctcctcgtgcgttttcctcgccgtactcccacgccgatcagcaccgcaaaccagcgacgcctctaccggtatccacacgtacagggacggaacgccacgcgcagatgtgctagcacccgcgtgcggctagggttttgctcggggagggaagtgacggctagggtttctcacgtgatgcaatacctccgctggtcacacccctcacgaatatataggatccatcactcgggcctccaaggcccctaggactcctatttggatccctatccgaattaagctcatattggatctccatccaatccccttattccggcccattaagcatgcgaccctgtaggttcatgtatactcggctatagcccgaaaactccttttcggtccacgcatcaacagcggcccctagcagaacgtattaacccaccggacatacataaagatcatatcggctgaacctctagtgtatacttgtatgaacccctttgcctcacgatatcgattaagctaaaggctagatatgtgccatcctctaatagctcaatcattcactcgaacctgttgatagattatataatttgtgattgactcctcaatcacctttggcatggccatgcacttccataatctacaacatcgaggggcccagagatatctctccataggaggggcaaatcccatcttgattattcatatcccactacatgtttcatagcatacccaaaaactacttttataactacccaattacggagtagcgtttagcagttactaagtaagctactacacatgttgggaaccataataatctcaggtctaaggattcaacacttacaataaatgagatcactgatgacacaacacatatggctcttgtagtgtctcatgttgggtctatccaacaacatgttcaccaacatgtgtccacattattaatttggtatctctataccatgatccatgagatatgatcatcaattaatacatgtgctgatcatataaacatatttattccacatatgatatttgatcagggatcctttagaaatagtaacaaacaacataaagagtctcatgaaagaatcacatattcattaaccaataataagttatctatttcaaggaacaatgtcggataaatatgtaaatatagtatgtgatacaatcatctctatgattgcctctagggcatatcactaacagtaacctcctcttccagatcgttatatattcatatcgagatatgatatgaatgatgtgtccgcatatggaagatcatcattttgaagaagggaaagtgagccgattatatgatcattctttccaaggattgatatataggaaagcaacaacgtaatcttgcaatcaattcttcattggaaatctgaaaaaaggatttgtttttcttcaccaagttaattccgagacgctgcacacacgaatttaacttggtgagggggtggggcaattttgttggatgagaatttgtgcatattttctaaaatgattttaaatgtagtgtgtatacacaaacgtatatgtaggatggggctgatgtaaatctctaaaccggcttagctagcttgtagcctcatcttttcgtttatatttatacttatcaactaaagttggaattttcaaccttaaatttagagttgattttggggttttttcatcaaagtttatttttcactctttacttttagattactaagaacacatatataaaaattttattcacaaattatttttcgtttgtaaatatgtcgtttggtttattcctcgatggagccattgttttgttattttctaaacttttcttgtttaggaacttttataaattaaggtggttagcaatttcgttccaccataaatctttcgggtagtacgtgtgttgatagaaaaaagcgccaaaagatgtaaacatgcttgtttttttacggttaaaacagcataaataatatatgtacaaggaggaacatgatacagaggggaggaaaaaagaaattccaaaaccaaaaccaaattatctaatcgattgaatccatgattgccagctaggtttgcttgcatcctttactctatgcatatgctcaataaaatcctccctgaaatctgagatccattaattcctgaagttgatggggattccattaaagatgagatcatttcttctaacccaaatattccagcacccaatgccaaggacttccatgaagaaagaatgagggaaaagtcctcttgcagccatgatcatgttcatgaattctgtattcagattccatgatatatataccaatgtgattccaatattgctgagcaaaagagcatgaaaaaaaaatagatgaatgttgtcctctgtgatgtaaacatgcttgtggttgtgtacactgtcaaaaagttttccttgaaatctttaggcttcaaattctatactatacatcatgcttatatatgctcctgtattaattgcatgcatgtcaatttttttcttgcaatatgtgttataaaaccgatccgaaaccaccgtcgaaaatcaaatatggaagaaacaccatagaagatccaaacacgatgataacactgagacactatatttattattgaggttcaaacatctcgggatcactgattacaggcactcctctccgatccaacataattacagcgcatcatatttacattgaccctcggccgactaatgctggcagccgcttcctcccgtctatatatgctaagtcatcatgtggttacaacatgattgtgtctctatttaagagagagtttagaaatagttcgattttaactctatcctgcatctgttataatttcaagttctaaactgtgaccgactacgtacatatatttaacacaaattctaatgataaacacagttgagcctcccaaaattcttggagtacagagaagacgtctgcagccatgttccacacacttgaaactcgcagattcctgccttgattagcatgtcacacatcgatgtcagcagctaatgcggcagctgcaaaactcacaaaacaacgctatttggagaacctagtacttgtctaaaccactacgccacaagaatgcaccataaaacctgccaaaactagcttcaaacataaagtatattgttcgatcgtcgcatgcacaagcatatggcgccaaaccatccaccggccatggaggcggcgccggagcacggtggacgttcgtcgtcgtcgtcgacggatccagagctggatcagcataacaagggcatactggagaagatgcacaagagcctccttctcctcgccatcctcgccgccaccgtcacctacaacgccggcctcgccccgcccggcggcgtctgggccgacgacgccgacggccacgtcgccggcgactccgttctccaggtgtgcgcgcccaaacatcaactaatttgtgtgcacatgatcaactgtcgttggactgaatttaatctagctcatgctcatctgacacacacaggcgcactacccggtgcggtacagcgtgttcttctactgcaacgcgacggcgttcgtggcgtctctggtgatcaccatgctgctgctgagcagcaccttcagcttccacgggtacagggtgcgggcgctgcaggcggccatggcgctcgacctgatcggcctcctgggcgccttcgcggcggggggatgccggagcgtgaggacgtcggcgttcgtgctggccctcgtggccgtcatcgccgcctacctcgtcgcccacctgctgctccacttctggatccggagcagccggtgcccctcccaccgccgggagctcgtcgagcttctgaatcttcaccggtgccattcttgctgcgtcggcgccgccgccgccaaggacgacgcgacgacggtggcgcaagcgggcactgaagcacctgctgctcctaagcgcgcgtccagcgtgtaactgcttgcgcctttgcctcccgcgggcaaagaattaccttccgtcgtcgtaaaggcagtaaacgcagacgtccaacaggaaattgctcagttttctttaaaaaaatctggatgcatatgagtagcatcgagcgagagattactcagtatccacatcaattattgggtgcattatcaattattgggtggatatatgagtcttgtttgtgttttctggttttatataggttgagaaaatatctgtatcctacttggccatatattcttattcttggaatctatatataattcctaggttgtaattactgagccatgtaattgtatctcactctatttaggcttcaatccttccccgtgcgcttcaaaaagactgatgattggaaaacagtggcaggaaaaaatcgggcccaccaaaaaacagcgacagaaaaaatcgccacccactgagaaaaaaatcggacggacaaaaaaaggacaggtggagatgggaaaaatttgggcaaaaaaccgcagcaaaaataacggcgacaaaatctgcttgcggaaaaaaatgatgacgaaaaaaaactatcggaaggattacttatttttttaattaagtataaattagaatagaaaaaaatacccgtgcgttacaacggataaatgttattttaattttattattgctataagatttagattaggtgaaattcactataagaactcacttagatatttttttataaaatcgagctataattaggagtccaacttttgtctcacgttcacattcgattctccaactgggcttgttagatattaatggcatgctttttaaactgctaaatgatgcgtttcgtgcgaaaattttctatatgaaagttgttctaaaatatcagattaatcattttccaagtttgtaataattgaaacttaattaattatacttttttaccaccttattttacgtgaaacacttaatcttcatctttaagagattcaaacatcacctaaagagatttcttatcctactccttttgtatttttaaagcaaatgaagttaaaaactaactcaaacacgcggatacgtagaacttaaacattaacttaaacaaggatgacgtaccaaaacaccgataaaaaatattcaatttttataatagtagtagagatatactgtatacctaataaaaaattaattccttagattccgtatttgtttcgtcgtctttttttttccgctttttttttccgcctttttttctttttccgttattttcgctgctttttccttttttccgttcctttcgcttgttttcttggtttccacacgagaatgacagggctcgggcccccgacggtggtggagccgatcgggcgctcccccgtgcgcccctccacccacgcgcgtgtatgcaggccctgagccccaccgcgttctctgctcctacctgccattgtaacaaatcacccacatattttaaaaaccctctattaaaggaatttggtttatttttttttccaccgaaaatgtttcactcagtgtactcacaatgtttcactatgtatagatttagtgttacagtgaactgaaatattccattacaacaaaaaaaatccacatattttagaaaccccctattaagggaattcgttttattttttttccaccgaacgatgtttcactgtgtatggatcaaatattgcagtgaactgaaacattctttcgctatttgctgaaacattgtttttatataaggtgaaacaacatccgatttaaacgagtgaaacatttttgatctacttggtgaaacaattccgatatacctgatggaacatcgtgcaacatttaaaaataatttaataataaactaattttttttgtcggaatacatccatgtgtgatcttgttttgaagatttaattgcaacgaatttaacggtgtaatcggatcatgatttggataagtaatttaagagaaagatcagtttaaaatagttttgcacgtaaattgggcgctgatgtccgatttttctctaaaccgatcgggcgcccgacccgtagactcgtccgccttttattcctcttttttccgttcttttttgtatttttttcgtcgtatctttttcgcctttctttctttttctcgccttttttttctccgttccgtccacttctctttttttctttttttattgccctgttttctttttctccgttcggtgggtttttttctttgtttttttgttttttccggtctattttttcgccgttttttctcgtcacctttttccttttttttttcatccgctcgtttttcgttgcaattttttaaatttgctcttttacacactttggtatggattcggttttattttttgtcgctggccggacccgcaccgtcgccacgttgatctgcctcttcatgcgttaccttctccaattgattgtaaaaatcgattcctcactacccgttatcatttttcccatgatttttccaatcaattctgctttaatttaccagatctaatctccttttaaatgtagtcgtttttatctcgagctttatggattcactcagattttgataaaaacagaaatagtagatcaagtgtatcaaaaagtcatcaaccaattttaggatcgagaatgattcgatctgatttaatgaggaggatccgattttctgaggtttgaaaacgcagtcggctatgtgagctgggcctacactcccacttgggactaacgatgctgatggcatttttaggacaaaattgcttgtacaatggcatttcatggaactcacacctgtcaatgctatttcttggaattgggcgcttatcaatggcatttcatggaattgggcgcttatcaacggtatttcttggtttttttctcatgataatgatacacttgttggactgttctaatgtttgatattttgtaccaaataatttgagttgttagatcttcatctatggctaaaaaactgacagtggcatttttttttctatcaattgtatatagataatcccaattatttattggtacctaagaaagaatacccgcgaataaaaaattgctatggattgttgaggaaagttttaccctggcatgtttggcaagagtagggaaggggaatgggagtttagagaaatgagtttacgtggcattagtcatgggagttggatttttagtccccatccccttgtttggattaatatgaagattattgtcagggtcatggataccacatacccaatagtaatcgactaagctcggtggggcctaccatataccaagtcttataaggaatcatacctcgtttatagaaggagtagcagataaggaaggacaattagagttcgatatggaaactagaaggactactcgaatcgtatcaatacttgtctccctagctctacttggacaagggatatctaatgggtattggtataaatacaagaccccctaggaggagaggggacacaaaacaacgagacataaagatcgacacacaagccaacacactctactagacatcgatatcagatattagcctagacgaacccaatatagtacctacggaggccgacaagagggatctaacgccatctctgatctcgacaagttcatattcgaggaggaagactaccatgtcgtcgactacgtgttggttatccatgccgccaagtcgacgacagctagataggttatcccaattattgtacttgtgtgagattcagatgaataaagagcaacactggcttcggccaacaggagtagggctattacttgtcagataaggggcctgaacctgtataaaaacccttgtctccatctcttttacttcaatctggcatataccctggtaccaacgatccacataccatgcaaataccatagtcgagacctcaaacatcgacattggtgtgccaagtagggagcttttggtgcatcaagatttcgacgagatgggttcaagagatggattctccaacaataaactactcgacgacttcggctgtggggtgatatgacctgaacgaagtgcgttctctgatggctcgggaccctcgtcatctcaagtcatcgtcaagtcaaagatttattgttcctatcatttgtatggtcaagtatattacgagattaactatgcttattaattaagttgtccccttaccatggaaaccttaaaaccatttggtcttgataaataatcatgtactacccttccatctactgcagacccttcccaacccagtaatacataactgaattgcatgtcgggtgcacatacaccaagaacattggttgcaacaacattttttcttgaacagtatcttggtttgtcaattgcgggcacatgaacttgtatgtatgtcccatctaaggcacctagacaggtataaaaaacagtaaatatgtgttgaaatatgaacaacttcaatctaaaatgtttgtggttagagttagaatattggtttgtactttaaaccacttccacctttcatctttatgatttccactaattggtttaggcttatttagcaacaccttccaaagctttaggactacacttagcactttgaaaattccaacttactgtcccaggtgatcgttgaaaatcaaaatgtattgcccagtccttcggatcatgtccaagattgtgcaaaaacatggctaccatttcttccaacttcatattgctagtatgtcccacaaaattctctaaccaaagaacacaccattctaaaataatgtctatccatccatagatatctaatgaattctttatcacttacacatatgatgttattcaaattttgtgatcgagtaatcgggtcataccaagaaggttccgaacttcgacaatgttgcattgacaccttctaatttaatatgccaatatatggatcaacagatacaatgtcatcacttttttcactctatgtgttgtagccacgatcatggtcttcatcttgttaagggttggcgtcacatgagccggtgccttaggaagaagggtatcgagaagagtgattgatctaatgacgttatgctatggtgtgagaaacatgatggtatcgttgaagtcaccaaagtcgacaatgtcggtgatggcgtagaagttgtcttcagaggaattaaggtagtcggcaatctcggtagatgaacatgaaccaagtggttgaagcattacgccaaccttcctgaagctagatccaatctcggccgacgctagatcaaatcgggtcctatgggggaaggcaaccttgagccgaacattgcagtgacgtcggccgggagtcgcatggtgatcggtggatacgttggcacgtcttgagcagaacttggtgaagaaagagaggtctttgcgatttcacccgaatggtttgaggccacctcgtgggatagaactttggagtagatcacagacgcgttcggtaaactgaacggggcagagtggttgtcccttcctgactggttcgaatcgagtcgagaagagagatcttaccgaagctgtcggtgataaagttgaggctgctaaaacagtacgcctgccctaggggtaaggtgaagtcatcgatgcctgatgtagatcccatcgcactagtcggcgagaaacatgacgcaagcccctacctagcgcgccaactgtcgaactagttttcagcaatactagaagggggtagcgaacaagcaggaaagtggatgagttgtgagacaagggatttatataggtttaggccttttcaatgagaagtaataccctactcatgtccggggaattaatccgctgattgtgatattgatatgatgatctcaagtatggttatgccccctaagaggcgccctgccctccaaaactgaacagattggttctgcttgaactgacccagactaggactgcggatgctcgtgaaactttcttatcttgggatgaactgttgatgctagcaacttgataacctgacagttcaccaagttggctagagaaggatggagttgttcctgaatcttgcatctggcatttgtaactcattgatcctacgtccgcttgaactggtcctggctcgaatgacaagtaattccaggaaacctgcttgacctgtcttttgtctgaactgcaaccatctgcttgacctgtctaagctaagcggttgaactggcctcatgggtgtaccttagaattcaatcggttgcccggggatcggcttaattcttctgataccttgcaacatgcttcttcaagtgctaccctgattgcggcactggttgagccttcaactaaaacagcgacgaagtgaggcaaaactcttctccgagacctaccccccttacagggagtagtcttactttcgcgtggctgggatcggttgaactgttgtccttcaaatataaccaacacttctctgttttgcgaagagccctgactttgaaaactaaaaacttcgccgatcgatcaaaatagagtaacaacgatgcactttcatcccattaagatttggaacttaaccctcagttgctgataggaaattccacataaagaaattctcatttagcatatgatcttactaactcttgactacttccccatcagttctacggctggcataactagcatgcttctggactgacgtcggtgtcgtatgcttggacatattgcatagtcgacattctttgaagcacacattgaccacttaacggatcaaaatcaagagtccttctcatgacataaccccacacgtcaattttttttttgactcttcctggattgatgaactgtaaagcctgcaactgctttcgcaaaaatactgtagtctgcacgactgccggaaattgactttgatgctgccgagagttcctgttctttgatcataacaacttcgccttcatatgttcggtaaagatgttccgttgaaaagtgtcataccctgattttcgtcttaggatttataaattatttaataaattattaatagaatttatattaaatgttcattaatttacaagtgaagttaaatgtgggaaataaaatttcctaaatataaagcatggatggatttaatttttattaaattctccatggttaattatactctctggaattttctcggatttttcggagctcaattattaatttttaatcatacaaagagcatttcagtaattatccacatattaaattaatcattaaatggtctaattataattttgttaagtacttttagtgtccaagtattttcaagatttttcttggaattatttgagcattggaagtatttttaacaattgaaagatcatttaagtgattattttaattggaaaaagtttttaaatccttccctaagtcgttgggccgatttcggcccaactctttctctctccgcgcagccaaaccggcccaatcggcccagctgcagccgcccgccccctcctctctctctgtcaaagtctagtttgcctccctgctacagtgtcgtccctaacctccagccggctgcctagctgagcccgagccgcgcgccgcgtcgcctttccgcctccaaatccgctccaatccgaccccgtttcttccggatttttgaggggttttgatcctctcgttctcctctatcttttcccccaagaatcggagcaaatcgttgggtattttatccgaatcaaactcgttttcgagtttatctccaaaaccgagtttttgatttctcgaagcgattcctctcgtttggagtccaatctcttcaatccaagcctatataaagcaccccctagtcctcctctttcgtttgccccctctcccgtggtctctcgtgcctcgtagctcgccgtcgacgccgcttagtccgccgccgccgccggccgaactccggtcgcgccgccgcgccgtctccgccgtcgccgccgcttgccgtcgccgcccgtgggtgcgccaaggggtggagaagcccggccgccgcttccccttcgccgccggccaccggagagccgccgccgccggtgaaccgagccgccgccaccgttcctctcgtcgccggtcgtcgtcgtttgtcgttgtggtgagtaccgttgggttcgtctcgtcgtcctctacgtgtacatgtcctccaaagtcgcagccgaccatccaatctccggcgtggtcgtcatcttggttcggccgccattgatgacgtcatcatgacgtcaccagttttcctttttcccgtttttctaatagattaaatcttcggaaaatcataactaaataaccatagatccgtttcgagtggttcaagttgctaaatttttctaaaataaagatctacatattaaaattgtccataaattgaattaaatttatttaattctttttaaatgggctttaattagatttaatcttgtaaaattcataataaattcatttgaagtcagaatgaggccgttcaagtctcataattcaactaaaattatgatctacgtgtttgtttactttatatgtattgtttatttggtttttattagtctttttcttcgttttgcgtgttagcttgtcgtttccgtcgttgcgaaggttcgtgagtgcgtcggaagtgatcaagaagattaattgaagaccgattattgcaaggcaagtcacacagatcctaaacactatcctttgagtatgttgatcctatatttaaattctctatttatttcaactgtgcatttattttcaaatgtcatcgggtggtgtgaacctatttctttgttatggccaatttgcattaaatgccctattccttgataccttgggtaataaattgattagcttgaaccttatgtattggtttggttcagctaaatgttatatatataattgcttagcaatgcttagaaacattagctcactaatgggatgaatcatatatactacattattatttatggttacatttaatggtagctcacgatggtaaatcgtgtgattttaattaattgataattaaaacctggttaaggtgggttgtgagcatatggttttgatggttgtgctcatgacaattaaggaccggttcgcgagctactgttgtgaaacattaactgtaccaaccacaagccagcatgggcaacggctttatcttttgtatagcgtgattcattatagtgcgccagactgagaagtggcgagaagtccacgggggtcgctggggagtccatgccttgtttataagggggtgactatgatccgggaacggtgcactgttttgagttgtgttgtgcaaagggtattgtcacgatttccccctttgcaatgccgtggtggtatttcggggcatggcaacatgtgtggaatcgtgtcttgtgggtacagtggtacacctctggccagagtaaaactattcgaatagccgtgcccgcggttatgggcgagttgagcaatgtttttcgtgattagtctcacgcctctcacaataattatagatgttataactggtaataatttgcttagctcctggtttggagttagatctgtacagccgggtgtggttgttcaggatggttgggcctgagcagcatgggtgtgctgttcagtgttgattaaaattgatgattaattacttcactgttttacttctcttaaatgttttgctaaatgctgcttttgcaaatgagcctatattatgccatcctttggaatccctgtgcacttgcatatttgctgtgtggcttgttgagtatgtcatatgctcattcttgcaataatcaatcaacctcagttgaagaaaaaggatccagaaggagaagacgtttggcttataccccagttgagctgcctgtgggagtggagccagagcttcgctagattttattttccgctgcagttttcttcttggtgaggactaagtgcctcttaagtaagtacttatcgttttagttaatgtgatggatttgtatattaaattgtcagtttgtgtacctcggctgattcctggacgaggattttatgcacaaatcagttcggaaattactagtgaatttccgggcgtgacaaaaagggattctctaccatataccctactgactacacacttctggactcgactctatatacttctgacccatgtattggaacaatttctctttcaacttctgggaaacctcatgagaattttttttttctggaacttatagcggttgccttgaactatggaaaccattcttgtttcataatcacaccactagggtgtaattgccgcttaccattctctaacagtttccaaggctatagattccttgtatgatgttacttctgaatatttttttttcgttactccttacacttgaatacccttggtactgcctttagagagatttcatagtgtcgagcgccatggatccaaccattgtcactttcaaatattccatccctcttttcatttgagtaccactgatgctgcctttagagagacctcatcatgtcgagtgttgagggtctaaccattttcactccgttggttaaccattcctctattggctcgcaaacaggttttggagctcaacaaaattgcgatgagttagaagagaaactcttggtttcttgtggcactggcagatacacatgttaaattgcttctacatgctcaagatgaatcataaaaggagaggaactggctgactcatattttattcaatatttccttttcattacatggctgccataaacatatatgtacaatgagaagtactacaaaatcaaaccattgtagactgctgctgattagaactgccttttagacctgaaaagtagaggtcttgactggaactgttgttgcttccatcattcaaacctgactgacttgtccctttagttcctactagctgaagtctcaccgggaacgttgctctgcttgttggtcttcgatggtggagtaacaactctcttgactgccgtagcaggtgggacttcttactcgcgggattgccgagcggtggtttgtcgatgggcctccggattggagcaatacgaggtgcattgctagaactgacaacagtcgagcgacctggtgctgacgacacttgctgcgggtgctgatgaaggagcatactgcctctttgtaactgtagcgagctgttgttctccttgcattgcttaccctgctggcgctggtgctgtaggcttgaaacgatggccggtggaacaatgcggcctcttacggtgcccttgacgatgatccgttgaggcggaggttgcacattcaggtgtcgattggggtcgtgggcagtgctgataacttgtgaatcacgacgaactgcctttgctgctcttggaagaggacaatcactgaaacaatgtcctggcttacgacagttgcgacagaatcgacttgcttggtcctggggtgcaggcttctgattatgcactttggcagctgaaactggaacaagcagcgatttatgaacatccctagcgacgttgcttcttccatggttggcgtccaccggggctagaattggaggaagagcagaaggattgtgactgatgtcgtcgactgccattggttgatgaaagggttgcacggttgtcccttgttctttcttggtcataactaggaccgagttccgctgataatccttaggcacatgatcagttccctcacacaggaaacatttgaccttcctcaaaggtcatgcatctgagtaatgggtgtattcaccacagcgacatgtggggaggcataaactagcagtttgtccgactatcccacatctagtacatgctttgaactccaatcctctttccatgaaactgttaagggttgtatcatcatcgtcatcagtatcatcatcatcgtcatcagcagaaaaccgctctcctgattcatcatcttcgggtctgggcggaccgtactttatgagatgtcgggttagctggcgtgctccacggaaggtatttcttcctctctgacgcttgggtatcttgctgcatcatcaggagtaaattctgaactagtgatgatcatggtcctgccattatccatcttccatatcaccttcctattcgctccagagctgtgctgcagagtaccatctttcttgttagtagactgacttggagcttggttacttcctgggcactgcttctcgtccttttcaggtgacctggtgaacaccttccatggacagttccttatataatgaccttgctcaccacaatcataacaggtagcacttacttccctttggtctgacggtaacttggctgcagttatcttcagggatctagacaatattttggcaggggtcttcggtgccgatattgggaactcctgactttgattctgattccggtttcgggctggcatctagacttgcgcttgtggctggtgaccttgacgcggctcttgacattgctgttgcatctgctgcatcagatagatctagtaccgatgtcgcatctgccgtaacaactcttccactgtctgagtctgattagccatgacttgggattgtggctgatctttgagaggttgacgtgggaagcttatagaattgagctgagttgatccatgaaactgacgggatcctgatccgttgaaattgtccctcatgctgaccaattgctgtgggcacaagagagggagggggagatgagaggggttactaaagataaggtcttaaaccgattgcctactgatctgttgtgagtagacttttattcttcaagttgcttaagcaaacaacctagtatggtcgcatccccaccaatgatgcaaaacatacccctacacacaagcaaacaatacacgatcttgctaacgaagctacccttcagggaaggattgggtttaggtgaacttcgggaaaactcttcttgatcttcgcggaacgacgactctgaactgaccttctcactctttgctgcacgaagcttgagactcgacttgacttctggacaggcatgaagctggcggtttctcctccatgtttgacaactaaaagagttggagggacagggaggaaaaattttaataaaccgtttcgcaaagaaatgccgaagggcaagaggagacacttcgcaaatagggttttcagaaaacttgtccttacggtttgaccatttggctcaacctacagtcgagttggctctgataccactttgtcacgcccagaaatttaacccaaatttccagactattttgcgtattaaatccctgtccaggaccagccagggtacacaaaacgacaagtaatatacagttccaaacgtaaataaagcataaaatacttacggaagaggcacttagtcctcacaccgaaacagaacgacagcagcggaaaaaggcaatcctagcggggcttcagctccactccacaggcaaaactcaactggggtctgagccttggtcttctaactccatcttcagctcagaagcactacacttctgaaaagggggaataatagcaagactgagtacaaccaccgtactcagcaagccacgccaacgatccagacgtgcaaggggatacaaggaggggtttgtggctatttgcataaaggcagttgtaaaacattttattgagcaaaacagtaaaactgttgagtaattaaagtaatattgaatctccactgatcaacgctacaccaaattgaacaggcccaaccaacccacctgaactacagtgtattgggtcgatttattaagatgggactaatcacggtgaatctggtcgaccgcccataaccgcgggcacggctattcgaatagttttactctgatcagaggtgtacaactttacccacaagacacagccccacgacacgttaccgtgcgccgacatgtcaccacgacataccggaaagaggccgtgacaggacccttcgcataaccccctctaaccaagcacaccacacctcaggtttcacccccgtccccagcgggcaacgggcagtcccctctcgtgcctaggtgaatccggaagcgacagaggccgtcgcagggcccgccccgatccatcacgcccacccttgcctggatgcgtcggccagaggaaagctacactacaagcccagccgttgcccacgctggcttgtggtaagtacgataagttcttccaaggcatcccgcgaaccggtccttaattgccatgggtgcgactagcaaaaccatgcacccacagcccaccattcagtcgcattttagttggataattacgaccatgaagcatggccagatgtctcgagcacgcagctcactctgatactaaaaaggtctaatactgtaattatctcatcaactgagctagtggtaattaagcatggctaagcatatagttctagctaggtcacacaagtaacatgagctagtcgattcattacccaaggttgacaaa

SEQ ID NO: 21647 - DNA, 1383 bp, Oryza sativa
cgggcacgggccagtcccctctcgtgcttaggtgatccgggaagcgcaagggcccgtcgaagggcccgccccgatccatcacgccccccctggcctgaatgcgtcggccagagaaaagctacactacaagcccagccgttgccaacgctggcttgtggtaagtacgataagttcttccaaggcatcccgcgaaccggtccttaattgccatgggtgcgactagcaaaaccatgcacccacagcccaccattcagtcgcattttagttggataattacgaccatgaagcatggccagatgtctcgagcacgcagctcactctgatactaaaaaggtctaatactgtaattatctcatcaactgagctagtggtaattaagcatggctaagcatatagttctagctaggtcacacaagtaacatgagctagtcgattcattacccaaggttgacaaagaacagatatcaagtaaacatggcacaagcgagcagataggtaatacccggatcccatgtaattagcaaaacatgcatatttatttgtaaacggtaaaacatttataaattgggatcaacatgctcaaggggaatgtgtgacttgccttgcttcttcacttggatcttctgaactcttatccttgcgaacgcgatcttccgaaacgacgggaactacacgctggcacgcaaaacgaggaaaaactctaataaaaaccaaggaaacagtacataaaaagtaaacaaacatgtagagctcaattttagatgaattttgcaagctgaacggctcaattcggagttcgaatgaattagatatgaattttagaagttttgagccatttaaatgaatttctagaattattaacgaattatgacgcaattattatttatttttccaaaggaaaagagggttgctgacgtcatcaaaggggaggggcggcgccggcaagcgggccccaccggtcagcggcacaagggctccggtccaccgtggaccgggaccaccgaggcggtccaccaccggtccacgggaaccgacggtccgaatcggcccaagccgatcgggcggccaggggcggcgcggctggggcacagcacggcacaaagccggcctagttgagccatggcgcggcggtagcgcggtctccggcgatggcgaccgacgggcggcgcgggagaggcggcacgcatgggcggcggcggcgcacgagatcgacgcggcgcgacaaggggggtccgggcggcccaagcgagcggggcggcggcgcacggccaggtggtcaccggcggcggcaccggcgcagcagcgcgcacgggagacagaggagggaggcaaggagggagaggaggagctcaccaaggacgcggcgacgaggggcggggaaag

SEQ ID NO: 21648 - DNA, 9282 bp, Oryza sativa
  unsure (1)..(9282): unsure at all n locations
cggactgggccggctgggccgagaagaaagaaaaggcggttttgggccgactttcggcccaaagccaaaaaaagactttttttaaaactttttcaatttaaattatttcttaaatgcaattccatttattaaaaatacttccttagctcaaataaatcccagaaaaatctaggaattatagaattaagcaaagtatttaatgaaattttatctggccactttttagattggaatttattaattaaacttagattttcttttcaaacctttttaaaataaattctagaaattccatttaaacaacaatttatataatttgaatttttagggtgtgacaaacctaccccccttaaacagaatctcgtcctcgagattcggaagaactggcaaacagatacggatgagctgacttcaattcatcttctcgttcccaagttgactcttcttccgagtgattactccactggactttgcaaaagcggataactcgattcctggtccttctctcacttgtttccaagatacggattggtttctccacataggtcagatcctcttggacttctatctgttcaagattagcttcttcagtaggtacccttaaacatttcttcaattgcgacacatggaacacattatggactcctgccaaagattgaggtaactccaactgataagcaacttctcctcttctactgacaatcttataaggtcccacaaaacgcggtgccaatttgcctttggtctgaaaacgatgaactcctcgtagaggcgtgacacgaagatacacataatctccttcttcaaaactcaaatctctgcggcgattgtcggcataactcttatgacgagactgagccactcgcaatctttcttgaatgattttcaccttttcttctgcttcccttaggatatccgtcccgaaaacctgacgttctcccgtttgatcccacaaaagcggagtgcggcacttccgaccatacagtgcttcgtacggagccatctgaagactagcttgataactgttgttgtacgaaaattctgcataaggtagattcttatcccaacttccaccgaaatctaaagcacaagctctcaacatgtcttccaaaatctgattcaccctttcagtttgtccgtctgtctgcggatgataagcagtactaaagttcagcttagaacccatctcttcctgaagtttcttccaaaaatttgaagtaaactgactgcctcgatcagacactatcttcttaggaacgccatgcaaacacacgatccttgccatatacaattccgccaagcgacttccggaataagttgtctttaccggaatgaaatgagccactttggtaagtctatcgactatcacccaaatagagtcatgacttgatgatgttctgggtaaaccagtgataaagtccatatcgatttcttcccatttccattcaggaatcttcaaaggctgcaacaaaccggcgggtttctgatgttctgccttgactcgctgacaaacatcacatactgctacatattctgcaatttcacgcttcatacttgcccaccaaaatctttccttgagatcctggtacatcttagtactaccggggtgaatggagtataaagtatcatgagcttctttcagaattgcatctttcaaatctttattgtccgggacacaaattctttcacccaactatacagttccttgctcatcctccaagaaaccgatagcttttcctcttctcatattcttcttgatttcttgaatatcagaatcattaatttgggcttttctaacttgatcaattagagtgggcttcacttctagggctgcaacgaaacctctactgacaattcccaaatttaatctttcaaattccttgcataattccaatggcaactgtcgtccttccgtaacattgcaatagcctttcctgctaagagcgtctgctacaacattagcctttcctgggtggtaatgaattcccatgtcataatccttaattaattccaaccatctcctttgtctcatgttcagatccggctgagtaaagatatactttaaactcttgtgatcggtatacatctctgtacgagttccgaaaagataatgacgccaaatcttcaacgcatgaactactgcagctaactcaagatcatgagtagggtagttcttctcatgcggacgtaactgacgagatgcataggcaaccaccttcccatcttgcatcagaacacaacctaacccaagtttggatgcatcgcaatacacttggaaacccttctttggatcaggtagaatcaaaataggagctgatactaagcgattcttcaactcttgaaaactctgctcacaatcttctgaccacttgtacttcacatctttctgaagcagtcgtgtcatgggcttaacaatcttggaaaaattctctataaaactccgataatatcctgcgaggcctaagaaactgcgaatctctgaaactgtctttggttgtttccagttggttacggattccacattgctaggatcgacggcaactcctcctgctgagatgacgtgaccaaggaacttcacttcagacaaccaaaattcacacttgctaaacttagcatacagttgatgttctcgtagcttctctaatgcaaggcgaagatgttcttcatgctcttctttggttcgagagtagataagaatgtcatcaataaagaccaccacgaacttgtctaggtattccataaacaccttattcatcaagttcatgaagaaagcgggggcattcgtaagtccaaaagacataacagtacattcgaacaacccatacctagtggtaaaagctgtcttaggtatatcttcttctttgattctcaactgatgataccctgatcgaagatctatcttggagaaaacagtggcacctttaagctgatcaaacaaatcatcaattctgggtagcggatacttattcttgatagtcacatcgtttagagcacgatagtccacacacatcctttgggtatgatctttcttttccacaaaaataactggagctccccatggtgacgaactcggtctgatgtatcctttctgaagtaaatcgtcgacttgcctcttaacttctgccaactcatttgctgccattctatatggtctcttatggatcggagttgttccaggtaccaaatctattctgaactctatatcccttttaggcggcataccaggtaaatcatctgggaacacatcaggatactcccggactataggaatctctcccaaagttatctggttcagtcttgaccttaaagactcagtagacaatgcatgaacggttacaacttgaccatcatggctggtgagagttacttttctgttggcacagtctatcacaccattatgtctggctaaccagtccatccctaggatgacatcaaggtctttggattctaacaagataagattggccagaaatggtactccttgaatttctattctgacagaggggctacgatgcaaagaaagtgcttgattacttggggtactaaccatcaaaggacgtctaagatcttctacttccatcccatgatttcccgcaaaactcatagataagaatgaatgtgtagcaccagaatcgaaaagtactgttgcaggaactgagttaacagggaacgtacccaaaatcacatctggagcatcttgagcttctgcagctgcaacatgattgacacgggccttcgatgctggtacagtagagttgctctgagcaggaacaaccttcacgcgacggggcttcggacacttgtcagcataatgtcctggatctccacagttgaaacataccacaggcttgctgccttgctccctcttagcaggctgttgttgtgttggagctgcaacagggcgtggaacttgattgcggatgttgttgccaacattgttgttgaagatctgacgctgcggacgaacaacagacgaagaacctccatgtggcatagactggggtcctaaagtaagacgtggcctttgattattcccctgttgtgccttaaagtgagcaatccggtgtttcttctgctccatgcgattgtacttgtcctcctgacgaatagccttatccactaatttctggaaatcagaataatctccagtcatgagtgggtaagaaagctcatcattaagtccttccaaaaacttctcctgacgctcttcatcattgcgcacatcttccggagcataacgggctagacgattgaactcgtgcaaatactctgtaacagagcgagatccctgcgtaagcgacctgaactccttcttcttgagagacactactcctgatggtatatgcgtcttccggaaagcagcggtgaattcaagccaagtgataggttcagcagtagtcctattcaagcggaagtgatcccaccattcagaagcaggaccatgcaactggtgtgatgcaaaagagaccttctcctgatcagtgcactgaagcaaatccaacttcttctctatggcatgcagccaatcaccagcttctacaggattagtggtactagagaaaataggcggcctcacacgaagaaactctgctaacttgttctgaggaggtgcatggttatttccttggttctgctgattctgaagttgttgcatcatcatgttcattagctgagtctgttgagtaagaacttgagcaagggttggattctctccattgttgttgttattgaggttgttgaggttgggaccattcccgttgctgcgagtattcaccatctggcaaggacaggataagaaaagaaaccggagaaaaactacttaggacagagaattactttactttcattgatcttaactgggtttcattattacaaactgaaaactctcacaccactaaactcaccaacttcctaacactcaaaagcaaacaaacgcatgcacttacatcccaccactgatgtaaatcacatgcaagaccaacacacacacaagcaaacctaaaacaagcaaactaacacaacgatctaagacaacgacctaacaagtcactctagttcttccgagcataggaggtcgattgaaggctcgttcggctcatcttcctcatctttgatagctgcccactcaatcttggaattgttgcgcttggattcttcttcttcatcactacttatgatgatgaccggaggatctgcttgagctggggcaacttctttctccaccacgcggatctttggcgccaattgataacgaggaacaaataaagctctcttccttgcggtaagacgaatcctggccttctgcggcggtgcttctcccttcaacgcggctagctccttctccaaacgatccaccttgtcttctagcttgcatatcttaccacgattccaatcttcccgatcttgagccgctaacacagtctccgcacaactttcatccatagcccatagcatctcaaccaaatgccttgtagtagcatcattctcaattccttcagtctcaaggtagctgccacggtcacttccctgtggttggcgaggatggtaacgatactcagtgtcggccaactgatcactgtaacgatcacggagctctcctatggcgatccttgccacctcctgacacgcatggatgtagtttcttcctccagcttcgaacatcaccgatgggatatcttcactattactgttcaaggtgactttgactcggcacttctcttcatgacgatcatgacgaatctgtgcataaaaaggagcagtcccaaatccaatgacaaaggacatagtacgcaactcctggacaaatccttcaacaccaaacaggtactcaggcttgaagcgcggcatctaaagacaagtgaaaggagggagttaaggcatctatccaattaatagcacaagtttttggattaatttttaataaagtttagaaatcaaagtaaaaggtaaataaataaagtaaaccaagtttgctagatgagttgaaacagttggaaacaaggttacaaattttgtacttttgaataacaggtttcaaaagaaataaaagaaagagggttataaaatcatcttgctaaatttattttattgcagcaggattaaataaaacaataaaaacttctactggtaaatgagccatcagtacagtaatagatgtacagtactaataacattggaataaaatttgaatgagaaccattaaaaaagattatgaaatgcatgtgccattagtttggtttaattaaaagagaaagagaggagaacagttctacttttccaatatttttagaaggcttctatgggtaaccatttggcatatcctagggtcaaggggctctgataccaacttgtcacgcccggaatttctatccaaaattccaaacgcttacatgtgtgtaaaccctcgtccaggaatcagccgaggcacacaataacaaattgataatagagtacaattattactctaattattaagcgtataaaatgtcattacagaggtagatagttcctctcaaacaataaagatctaagcagcggaaaaagataaacggcgcagacggctccactccacaggcagcttgaccaaggctacacctaatcctccacaccatcagcttcactgtagaacccttcttctgatgaatgattgcaaggtgagtatatgacatactcagcaagccacgcagcaaatatgcaagtgcacaggataacaaaggatggcatagtagggctccatttgcaaaagcagcatttagcaaacatttgagaatttaataaaacagttaagtattaaacattattaaatcaacgctatacaacataccctgttgtataggcccaaccattctgaacaaccatcccggctgcacagttctatctccaaaccaggaatataccattccaaaccaggagctagtcaaattattaccaaatataacatcatttactatggtgagaagtgtgaaactaatcacgaaagacattgttagacccgcccataaccgcgggcacggctattcgaatagttttactctgatcagaggtgtaccactgtacccacaagacacaaccccacatcatgtcaccatgtgcctcaataccaccacggtacatcggaaaggagttgtgacaataccccttatataacacaatccactgcagcgcaccttcctggatcataatcacccccttataaacaaggcatggactccccagcgacccccgtgggcttatctccgccacttctcagtctggtgccccgcaatgaaccatgctatacaaaagataaagccgttgcccatgctggcttgtggttggcacgataaatgtttcacaaccgaaactcgtgaaccggtccttaattgtcatgagcacgaccatcaaaaccatgtgcccacaacccaccattatcaggttttagttggcacattaattaattaactaatcacgattgaccatcgtgaactatcaataagccatcatgaaataatagtgaatcattagttatcccataagtgtactaatgtttctaagcagggctaagcaattatatctaatatctagttgaaccaatataaataaagctcaactagtcaaattaatataacccaaggtatcaaggaataaggtaatcaatgtacaaaagggccataacaaagaataggtcaattccacccaatgacattcgaaaatagatgcaatagttgaatagaaacaatagctttaaataggatcaacatgctcaaagggttgtttgggatctgtgtgacttgccttgctggccttggaactcttcaaactcttcttccgcgaaaacggactctccggaaacgacggaatctaagcagaaaagagcaaaatcaccaaaacagcacaaaaacaagcatgaacagtacatgtggatatttttaatgtgtagatctcaattttagaaaaatttagagacttgaaccaactaaatcggagctaagatgaattagttatgaatttttaaagattaaatcggattaaaacacttaaatcggtttaaattgaattatgacgcaataatgaattatttttgaaaaggaaaaggggatttattgcgtcagcaactagggtttgggtggaccggcgcacgggcggcggttcacacgaacggacggccgagattgatccgatccaaatcggacggccaagatcgatcggtctacgaccggctcacgggataggatcccgatgacgtcagcgatgacgtcaccgacgacggcggcgactcggcgaagaagacggctcgggcggcggacactcgccggcgaacggcggcaccacggcaccaacggagggcaccagcacgtagaggacaacgcggcgaacacaccggtgaccaaaacggcggcggaaaaggaacggacggcgacggcgacgagaaggaagcggcggctaccttcgggttgacgacggcgacgatgctccggcgggttccgacggctgcgaaggggcggacgaggacggcggcgacttggcgagcacgacgacggtcttcccgagcggcgccgacagctggagcgacggcggagcacggctgaagcggcggcggcgacggcgaagctagggcacacggcgctagagctcttccgacgacgagaggcgaaggcgagggtggcggcggaaagagaagggcatggggatccttttaaaggggctcggaggcgacggcgaaggcccacggcgacggcaacggcgaaggaaactcgcggcttggaaagagggaaaaccgatccgaatcgaactcgattccaacgctttccaaagcgatttagccgaagattccaaaggagaaaaggtagaggagatcccggagatcatttcccctctattgattcggccggagaaggaaagaggcggccggatttggaaggaaacagcggcggcggctcggcggcggcacgctagggtttcggcccgaggaagacgacgggcctgacaggtgggacccacctgtcagcggctgcaagggcgcgcgcgcgcgcggccgncttcggactgggccggctgggccgagaagagagagaaggcggttttgggccgactttcggcccaaagccaaaagaagactttttaaaactttttcaatttaaattatttcttaaatgcaattccatttattaaaaatacttccttagctcaaataaatcccagaaaaatctaggaattatagaattaagcaaagtatttaatgaaattttatctggcccaattttatattgaaatttattaattagaattagattttcttttcaa

SEQ ID NO: 21649 - DNA, 4689 bp, Oryza sativa
cctccaatattgcaatagaatcaattgctccttgttttggattggtactattatttttgaaactgctattgtttcaagtgagtgaagtgggtctctaacaatctggtatcagagccaccaatccctactgagttcaccaagcaagttgccatggcaagtgaacataagttggatatgattttgaggcgaatggaggagttcgaacggaggcgggtggaggcagagcagacaaggagagctgatttccaatctctcaaggtagcgttagcatcatggattccccatttagaatagcactgaagactcacattttttagttgggaacaagcagtacaagatgacgcccaccatgtgttcgacaaaatgcttcagccccgatgtcgagcccaatctcactgttgatgtggttgttacatgtgccaccactgctatgacctttgttgatctggtagctgctgaggacgcaatcggtgcaacctacatctacaatcctatacagcccatggtaacgcccgccaagtgtttgacaaattgctccaaccccaatgacatcccagacctcatcgtggtagcagtggttacgtgcacctccacttctctggcctccatggacctagaagttggtgaggacgtcgcctgcaccactgaaattgatggccctgactgtcacaaggagacgcacaccaaatgttcgatgttaggccttgatgtcaagggtggcgcagaccacgtcggggacgtgttcctgacaatgacgggtgtggccaaggctgttccaatatctatcgagtcaattgacatcttctcggcaaggttagtcagcgacctcaagtaggacataccaatgcccaccgggtgtttgttgagaatccctcgatatgacagcaagacacagttcagtaaaaagctaaggctggaggggattgaattgaagccatggccacctccaacctacagtggagtgattagtggactgagttccggccaacgccttggccagcattcatctattgttggcttgaagaacatctacttgatccttggccaccatcaactgaatgggctaagttgaaaccgtggcccccaccacatgagaatgacatcctgcccttattgatcaatggcttcacccatatcctggtggatcgaaaagcaatttcaaaattctggaaagcgatttggagtgagtcaggtgaagaaggatcattgtttgttcctaagctatatgagctgcacttgagtggtctccttcagcattcagtaagcatgatatgacaacagcttatgtcaaggagaatatggtccactaaggctaaaatgaagatgttgaatggttgggattctaaacagtacctgagcattatgcggcctattccaggattgtttgttaaacttatccaagatatatctccaaagagccatcatcaagcttatgtagaagctcaagttgttaaaaattcttggaaaactttggtgaaaataaggtacactttttggctcaatcaattgctgtacctgagactcaccttggacaaagctgtattggctgctgttggttgtatggcccaaatgcaattagcacattccatttactaatagccatgctgcatattgtgagaccacttcccatgtagcaaagaaatgggctacagacttgaaaggccaaaccaagttggaagatgccaagtttgattggaatacactgggtacattggttcaagaggtcaattacatttaattgatctgtgacagggtttcttatggttgtagtgttcagaagtgctatcctcagtctattctattcatgcacaatggttggtgttttggtggattgcttgattggaactctaaacaatacaggaacagtatgctaactgtgaacccattggaactcatgcaagttatgttagtgccattagtgtgggatccagatgcgttgaaatgggtcagattggcagctatgctttacaaccagaaaattgtcaattaactacctgcatgagagcacattgcattaagccaagtgattatgagatcatcactgcctattgatgtaatggaggatgaaggcaatacagtttggacttcagaattttcagtcagtggagtggtacagaagaagcgattgaaacgtgatctttggtcgtgtgcatttgctgttaacaaggacatgaaggttgttatgttgctgcagcaatatggttctgcaaacttagtaattgtcaatttattgagtgttccatgggatccaggcggctctcatttggcattagctattaaacaaggaactaggctttcactgtgggctattacaagcattggctggttgtgtttcctatgatcatattggctacattacaagagaaatagtaacaggggagatcaagtgggtgaagcttgcacagcttcgagtcatcggcttggggacaaaccgaatttcaagcgaaggaggatgttaggagccatatgggctgcaatatgggctggatgaactactttccaagaagtccaagcaagcccaagagacaaccatatataaatagcagcagcacttctaggagggggcgaacagatcattggccaagacggcgaacggcggcggcggcggcctggaggccggttggctccttggcgatcttttctctacctcccttctcatctactaatctagaagcttctagaatcttttagcctttgtatccttccatcttccacctcaaaagcctccaatattgcaatagaatcaattgctccttgtactggattggtattacttttgaaactgctattgtttcaagtaagtgaagtgggtctctaacaatatatttcacacaagatgtctgaacaacgtgctgaaacacaccttggtagtggtagatgtataagtatttcaaaactcgtacaacagcggggattattacttatattccccttaggagcacatcacaaatacaatccatcaatcgtgtataagaatcacactagtattagtaattcatactcagtattatcctttactctgcttcagtgatcagtgtcagcagctagcgttcaatgtcgccgccctcagacctcggcgacgtggccgccgccggaaggccgccgcggacgtcgtcgccgcaggcaaaggcgatctcctgcagcttgatcgacgcgctggagctgaacacgagcagcggcttcttccgcggcacgggcaccggctctgcctcgcggttcaggatctgcaccacgcgacgcatcgccgggcgctcgtcgcagttggggttcgcgcagctcagcccgacgagcagcagccggagcatctcgtcgcggtagaacccgccggcgaggcgcgggtcggcggcgtcgatgaggcggtcttcgccgtgcaggcgccacacccagtcgacgaggttgacgttctttcccccgccgtcgtccttgtcgatggggcggcgaccgcagcacacctcgagcaccacgacgccgtagctgaacacgtcggtctgctcggtggccttgcccgactggaggtactccggcgcgaggtagcccatggtgccggcggtgagggtggagacggggctcttgttgtggtccatgaggcgggcgaggccgaagtcgccgaggcgcgggctgaggttgccgtcgagcaggatgttgctggtcttgatgtcccggtggatcacccgctgctcgcactcctggtggaggtaggacagcaccgacgcgatgccggacgccaccgtgtaccgctccggccacgacagcgtgcagggctcgccgtagagcgccttgtccaggctgccgttgggcatgtactcgtacaccagcagcagctcgcccttgtcgtcgcaccatccctcgagctggaccaggttcttgtggcggaggcaggcgataacggagagctcggcgacgaactcgttccggctctggtgcgcctgcgtggatcgcttgacggcgtaggagacggcggatgcggtggccgtccccggcatagccgccttgtacaccgtcccgaacgcgcctttgccgatgaccctgctcgcgtggaatcccctggtggcggcgctgagctccttgtagctgaacttcctcggccccttcaccagctcgggcaagaagccggcgttcttccgggaggtgagctctatcagcttcctgatggacacccaggcgaagaagacgaaggagacggcaagcgcgacggggccgaggatgccgagggcgagcccgaacctcttcttgcgagaggcggcgccgcccgcggccgcctcgccggggacagtctgcgccgacgcgttgccggtggtgttcgaaaaggaagaggagttggtcgccgacgggaagccgaacgtctggaaggtccattccttgatggtgtgctgctgcgtgctcccctccgtggaggccgagaagccgacgtacatggcgtccctgagatacggcgagaggtcgacggccacggagaggacgggcttcgccggcttggcggcggagtagctgagggacacctggaggaggtggtcggcgccgtggtagtcgatccacgccgtggtgaggttgccgctgttgaggacgacaccgaacgcggcgaggtcgacggcgttgaccgacaccggcaagccgaggtcaagcccgacgtggttgtcgctcgggtcgccgaactcgtcgttcaacatcgtatcaaactcaacggcgaca

SEQ ID NO: 21650 - DNA, 2497 bp, Oryza sativa
cggcgttgacagacacggcaagccgaggtcaagcccgacgtggttgtcgctcgggtccccgaactcgtcgttcaacatcgtatcaaactcaccggcgacaatagaggcgttggtcttggcggccgaggaggaggagttgaagagaccgaggtagcccccggtggccccgagcgtggcgtggtcggggaagatgaagaaggcgatgccgtcgccgccggtggatccggcgttctgctcggcgatgacgaaggagaacctcgccgcgaacgacgccgccgatcctccgccaccgccgaacgcgacggcgcggctgcagagcacgctgccggcggaggacgacggcacggcggtgtcgcgcgtcaggccgacggagccattccgcaggaacgagtcccccagcagcgtcaggtcggagaaggccagcgccgccgaatcaaagctaacattgaaaccaccaccaccaccgctcgccgccgccgccgacgcagaaaccgttagaaggagcgacaagaaggcgacggcgaggcggaggcggaggggaggagcgtccatgggtggcggggagggatccgggtcatggggttatgtggggcgcgcggtgtccgtgggattccgaggtggtataatggagatcagaacggcggacacgaggagcacagtggaggctggaggggaatcggatgtgcttgttggtgtcgaagcgtgtccattttttttaatgtgggtaacggtcggattggcgcgtttgaatgtaacggtcggggagggggagcaggtgagtgtggccggcaggtggggccgcatcgagtcggcggatgaggctgacaggtggggatgggagggtggctcgtgggcggttcgcacggttggctggtggggtccacagccgtgtgtccgtgtccgatcagatcggacaccgacacgggtttgcatcctctgcctttgtggcaaaaggcaaagtttgccgttgctttcatccacgccatccctcattcaatcaaccgcttccatcaatcgtgattaactagtagccatttaattagagaaattgaagaaaacaatctcaagcggtaaaccaggaaaaaaaaaacaaagacagccaacacatccttcgctatttgaatgagcagctaaaatatatactccctctgacgccgttgacttttaaacgacgtttgaccatttgttttattcaattttttatgtaagtataaaaatacttatgtcatgcttaaagaatatttgatgataaataaatttacaataaaataaatgataattacataaatttttttgaataagacgaaaggtcaaacgtttattaaaaagtcaacggcgtcatacattaaaatacggagggagtatttgatatctattcattcagaaacataaagaaaataattatcccacctccatactaaacaactcacaactgtctcgctaatgtttactactccgtctcaaaaagaatccaatcctatcaacgaatctagacacatacgtgttcaggtctgttgctaggattgtgtttttttttgggacgggggtatttagaaaaaattgtttaagttatactcccttcatccgaaaatgtttgacgccgttgactttttaaaaaatgtttaaccgttcgtattattaaaaaaattaagtaattattaattcttttcctatcatttgattttttttatgtatacatatagttttacacatttcataaaagtttttgaataagacaaacggtcaaacatgtttaaaaaaatcaacggcgtatgagaatataagagtatattttttctataattcttatagtcaagtcaaatggttgagaactttgttcgtataagtattgtaaagattttttttataaatatgtttagcaatgctaagaattatttgtcttttaaatcagatcaattaattgaatgttaattgtccatgaagtggggacaaagacatacatccattgattaaaagatggatgggcaggatagaagcaacagcaaactgtgccgtcagcttcaaagtcagaggatgcgaacccgatgtagtgatgtccggacatcgatcggagcatacacgtcagtggttgctgaagtgattcctgccttcactgtttcaccacgaacgccagtgtaatacagtaaagtgttgtgcggcacgtgctttgatactgaacacttttggctgagtttgagtgagagaggagaagagaagataagattgagaaaatacgtaggacgaggtgagttattagcgtatgactaattgagtattaaatatttgaaactataaaaatagattaatatgattttttaaaagtaaattttatataggaaatttctgcaaaaaaaacacaccgtttaatactacctccgccccaaaatataacaacttttggctataaatctggacacacggttggccagattcatagctaaaaatgcttatattttgggatgaagggagtagttcggaaagcgtgcgcccggaaaag

SEQ ID NO: 21651 - DNA, 763 bp, Oryza sativa
ctgcaccattcaagaaggcagcaactgtccatgcctggtgcaagcaggccaacatgctcaccggtgacaaatttgaaatgactaacgaaatgtgctgaaatgcatatcagctacagcttcaatcaacacgattcccatctcgttggcaaacggcaatcatcaagcaggcccaaataactcagggatgctatgtgcgggctcttctgatttcagaaatttacaagcaccaattgccagccaaattaaaatccaaatcagcctgaattgcagctcacaacgaccatggcatgatagttctcacttctcagatcctttcgtgatgcagccttgaagccatgacagttgagcagcgaaaatatctatgttgatgaggcctcaatttagagaaaaaaggaaggcatagaaaggattcagaggagaagcatgctgtatcaagaggagaagagagcgcaatggaaagggcggccatcacggaggctggcactgtagtttcggcgcatggaagacaaagccaaacgaaaatccaaatcagcctgaattgcagcacacaacgaccatggcatgatagttctcgcttctcagatcctttcgtgatgcagccttgaagccatgacagttgagcagcgaaaatatctatgttgatgagacctcaatttagagaaaaaaggaaggcatagaaaggattcagaggagaagcatgctgtatcaagaggagaagagagcgcaatggaaaaggcggccatcacgggggctggcactggag

SEQ ID NO: 21652 - DNA, 28222 bp, Oryza sativa
gcacctccaaactaagcaaatcacatacttttatgtagaggaatcaccacagcaggttggtataaatagacaatatacatggaacacattttttctcgaaaacatctacatggaacatatagcaatcatgattcacaaatacaagtcaagaatgaaaggactaacatcacaacaatttccaggttcacaaatcactagttatgaatacacaccatcgctattgacaagtatagcaaagaataactaaggagggaagagaactacgcattcgacaaaggaattgacgaaacactatgctgaatgatgatacatccaaaccataaattgcttggtacataccacatactactcatttctatctgataactttcacagtggtcgaaatcagatcaaattagtgctaatcatcgaatatatctttctcataaatcccgcacaccacacctgctggcttaaacgaaaaacaactcgaaacaccatcgcatcgcatcgcatccacagagtattgaagcactctccagattacaatagccgctggacgttgcggccggagtaacgagttctaaccaagcaccaatccaacgaacaagcgcaaaggaaaaaggaagaagaaaaaaaaaagaaaactcaaattggatcggtggactggaggaagggaagcgggcggcgtgtcaaaggttttagggttggggctcgctcgggaaccaaccgtaccttcacccggaggagcttccggccgccggcgagcgtggaggagggagtccgcgtcgacgtcgaagtcggcgccgcccgtacgcgcgttgttctcacgcagcagtccgaatggacttctcactttctcagagcatccgcaggcaggcagcggccaactggttttgaacactgcggaaatggaacaagcagatcggcctcagttctttttttcccctcaaaagctttacatatatataaaaaaaaacttacaaatatttccgcacacccatacacatcattacacacgcaacagcacacttaccacctgacgaatatgttccctagcataagttcaaaacaacacaaccataatctcacaaaaattctattgaaagaccacttatttatggatactaggatttaaaccctgatgagttgtgcatgtgcttttaaaaataacttacaaaaactcactgtcaaacttctttttaacttttagcagccgttagctgcttactactccctccgtctcataatataagagattttgactttttacttgtactgtttgacgatttatcttattaaaaaaattagaattattatttattttatttgtgacttactttattatctaaagtactttgagcacaacttttcgttttttatatttgcacaaattttttgaataaatcgagtggtcaaacagtgcaagcaaaaagtcaaaatcccttatattatgggatggagggagtatgtctttaggacaattttgaatttcacagcttaattttaggaataatttaggtttgtttttcttccattgctcatctttagcttcaagagagtttcggctaaaactagtaccgattaaacattcatcaaatgacaaacggatattccatgatagaatacaacggatggagaaatggcttggaagcacatggaactgattgttgctttattgcaactcaacaaagttcatcaaaaatacattgcacatctcccacaacaggcagccattacgaaattttgatacaactcaagatttgaaactctaggcacaagccaagcatgaacataacaattcagtcagctaattattacagttacaggcagagcaaatatgcttctacagagcaacctgttaaaaaaaacaaaagaaaaggagaatgtagggatacagatacaacacaacagcatctacaaatcagggaacatgtctagaaaaaaaacattggttttctaatgactacaagttaatagggcataaatagcaaacaacaggatagagcccccagctaaatttggagggggcccaatttgttacaataatcgataaccatgctttcgcaccgatgatttcattcgcaggccagcttggtgtcgaaactactcaagcagattgcaaaggcctggaaggccgaaagggggtaacgatagtccattgtgaacatatccttcgcaaccttaccaaattgtagtatgaccttgtcatgatcaggtggaggcggcggggcaggttgcgatggcgtcggggctccagcagcaggctgtgttgcagcaacaagctggaagttcttcacagacgcgacggttaccctgcccttgaagttgaggcaccagcactgcaactgctcgtgccatcttggggccttgttacggagaatcaatggcctctccttggactcatcactgtcacccaatgcctggcctccgaccatggggccacctactgagatgtcagaatatctgctactgctgaaacggatagagcggtccataatggatgacttggaaaaggagatgctgccaaatgactcatcaagagagcgtgcaagcacactgtctggctggcatgggacagtgccaccagcctcaagcgatgaggcagggattgagtgcatcacacagttcatccgcctaggaccccgagtccccaagacattcagttcatatgaaacttgagctatgctgtaggtgctggaagggttctttggcgacaccttcctggagtagaacctacggcttgttttccctgactgtgaaacattggctgtgttgcatggaggttgggtatcatatattacaaactttgttccgagaagatttgacctaaaagtccaacacagtaaatatatcagattataccattaaaacacttagacgatgtaccttctctaaacaaagttgccattattttgggttattacctcaattttccaatgtacatgttgcttgacctagatgtattgtcagcactcataaatattgtatattctgtacaggttgcacgggagtatcttttcgccgataaaaggaacttgccactttcaacgagcacagctacatgagatgtgttacaacatgtgaagtcagcaaatataacagaaactaaaaaagtatgctggtgggagggatatatgcagtaagaaattagctcacaacaggacgaaatagctgcaaaaggggggggggggtaacaaaggaggtggtatggtatgaatatccatatgcacaaatgattagcacgcgtgggaattgcaataattaagcaagatcagtatgcaataattaaactaataccaaacaagctgtacggtcatacataacttatatgcctcaataactcatacatactggctaacagtgcaaatcatacattaacttttggttgatatttatgcaaggagaaatactgtcatgtataatatattgttgcttatataaagaatagataccacatacaagtccctcacagggaatgctagcggtgatggagcgtaaatgattatgccacatatgcaagctatacattaatctctggttgttgtttatgcaaggtatcatgcattcttgcttatataaacaatagatactcatacaagcccctcacaggaagtgctagctgtgatgcagtctaaataataagggaaaattggtcctatgacatccaaagatcccattcatagaaatttaccattgaaagatcttggtacactttaatattatcgaaagattacgtcgttcagtttttaaccattgcatccccttccattagtgtttaccggattattcccccttttttgcacttaaaacttacacttatgcccattagacatacgtcttgagcttcttgaaccagattgtcaccagcaccgctgcagcgcgccttgctgtgccacccatattctcaagctctagtgtgtatcttgttgatttggatttgcaaggttttggaatgcatgtcacagccattcacgttgctgtcagggccacagtggtgggtggcatggaggacctggtgaaactgatgaggaagcacctcaagacgttgcacagctgcagcgtcgggttgcaggatgtgcatcagcacgagctcctatcaggctgtcacgaccctagttattggaaccggaccggaccagcagttggaccggaaaaaaccggaaccggagcctccgccggtctggtccaactaaaagaccggctgtgcaatcggcccagtataaaccggttgggccgcccggttttgtagaaaaaccgccaagaaaaccggatttcaaccgcccggtctgcattgcgcgcggtcacctcggcagctggagagggaaaaatgtgagaaaaaggggcacaggtgggattcgatcccagtacctcatgcatggaactgaaccaaccaaccaccgggctatgatacaccttgtgttttgaaggaataaactatatatttacattagattgaaccgcttcaaaccagtggttcaaccggttgaaccaacaaaccattgaaccgagggcatcgccggtttaatgaccggtccggtctcaataactatggtcacgactgctctgccacgatgctagcgctgcaccattcaagaaggcagcaactgtccatgcctggtgcaagcaggccaacatgctcaccggtgacaaatttgaaatgactaacgaaatgtgctgaaatgcatatcagctacagcttcaatcaacacgattcccatctcgttggcaaacggcaatcatcaagcaggcccaaataactcagggatgctatgtgcgggctcttctgatttcagaaatttacaagcaccaattgccagccaaattaaaatccaaatcagcctgaattgcagctcacaacgaccatggcatgatagttctcacttctcagatcctttcgtgatgcagccttgaagccatgacagttgagcagcgaaaatatctatgttgatgaggcctcaatttagagaaaaaaggaaggcatagaaaggattcagaggagaagcatgctgtatcaagaggagaagagagcgcaatggaaagggcggccatcacggaggctggcactgtagtttcggcgcatggaagacaaagccaaacgaaaatccaaatcagcctgaattgcagcacacaacgaccatggcatgatagttctcacttctcagatcctttcgtgatgcagccttgaagccatgacagttgagcagcaaaaatgtctaagttgatgaggcctcgatttagagaaaaaaaggaggcatagaaaggattcagaggagaagcgcgctgtatcaagaggagaagagagcgcaatggaaagggcggccatcacgggggctggcgctgtagtttcggcgcaaggaagacaaagccaaatgaaagggtttagtgcgagtgtgtcatgtggcacttatgtcgttgctagaggacaaatgagtccgttttaatggcaacctattaaattcagatggaatggtataaaagtgaacggcctaactcgatgatattaaagtgtatagagatcattagatagcaaattactcacaacaggatctttcagtgtcgtagaaccaatttcccccaaataatcatgccatgtagcgagtacaaaaacaaacacaatactaggataaaggcttacctgagctaagacatagatataggttgtaagtttgggtagatttatcccttttaatgaagcactggatggctccattccggggcccaggctgaaaaacaaaacatggtcaagaaaagcatattaatgaacatatcaaatatttctatatcagaatttcatttcgcatactataaatgagcatattaagccgtgtatacgacaaccatcaaagatgtatgttagttaaacaaatctgaaatcgaagcgcggaaatacaagactaagcaagagagcatcatcatcacctgcttgagggaaacaggaaaagtgatcttcccgcaaaactcggggttcttgacgatctctctacacatgtccctccatgtccggcatacggcggcgcacgcgacgacgttcttcctggacggccacgccgcctcgctggcctccagccgctcgatcacgtcccggagcaactccggcggcaggttagcccagcagctgctctggaccacgtcggcggcggcggcggccgcgtggccgtcacgcagctcgtgcaccgcgctgtgagacctccccctccggtgccccaccagcctcacctcgaaccctcgcctggacaggctcccgaacccgtcgcgcacgtcgcggacaatgctgcggaacgacatctccgcctcgcctcgctccgaagctcaaaatcaagaaccctaggcgcaaccgctgtaaagaaaatcaggtgggtgaaatggggcggggagattcggagggggaggaggagcacggatccgggggagacgaacctcgggggtggcgccggcggcagctagcggtggccggcgggggagggaggcggaggcggaggaggcatggggatcggaggaggaggaggaagaggaggggaaggaaagaacaagtggtggtggctggacaagtgttggggggacgcgacttcacgtgggagcagaacaaaaaaaattgaatttgttttttatgaagaatagacttatcagttattattattactagtggtaattcattttggtttgttctgttctgttttatgttgtgttttggtagtagatttgtgtgctttttcaagtgatctttgtttaattgttcggcgaattctatccatttgtgtgcttatcgactcgactcgggcttccatatttagctagataatactacattcgtcttaaaacataaggaatttgatggataagacacatcttagaattacaaatctagatagataagatgtgtcttatttattcaaaatccgttatattttaggatggagggaatagcatatacatgtgattataaagtcaatgtcttaaatttgtatggttttcaagtgattttgattctagttaattgtccggcaaatttgggttttaacccatgtgtttactcaggcgatcgatcgacctcttggaatttgtccatatctccttgtcaaattaagttgtttttttgggttggactagctgattgcgtatgaatatatgatactagagttagaggcctcaaatttaaatcctaacgaatatacgtaaacacatagttggagaaaaagacacaaagtagggtaattaggtataagtgaattatccgtagttttttgaattacggcgtgatagccaccacgtgagcagtgcggataataaagtatacttcgaaggtaaatttagggtattgccttaagcccaggcacgcgatactgtggttctacgcagtaagaaccataatacccgggttaatttacataaaatttaccaaaaaattattttacggtaatacttttatgttttcaattactggtgctgaagccaaaagcttcacagctcaaataaacagaccctcctccactaatgtccaacaaaattattccaatcgacaatggaattaaaagattcgaacctttatatgtattttctcgtacttctatatatctactacacacctgattttgattttcttttttcccttctgagaacaaaaaacctgcttgcagaggactggtacaatgccatgaagcagatagaaaaggtccctagcttaaagaagacaatcaacttcaaatttcaagcagcaactgttcttcagaaacaatgtaaataaccacactgagcagtgaactttgcaagctttacctcctttaaagaatcctccactttgaaaaagaatcgggtcaggaaaagctggagagaacgctgaagaaaatgtcacctcagattatggatgcaatcagacattgtcattatacataaacagtaggtcgacaatgatgacaattgacaacattaacagcatataacatgatcttctgagtatgtgtggttagcaagctcactgaagaataagagttatggtacaaatcaagctcactagcacaaataatgtagggaaaaaaagcagaacaaaaaaagtatgctgaaccttaaccttcttgcgtcagtctactcgaacaacagaagccatcagcgacctgaaataaccaaaagaagaagcaaattcatgagacacaacttgacagaatccataatcagtcaagaatacaactttatcgtaattaacaagtgagccaaccctgcatgggaaggcaccatagcatagaaagtatccgtatatagcatttttgttttcacttactctgattgtggaagtaagtcatttgataaaaccactaaaaatataaggacgtaaagctacaacaatgcattttgagaacataactcataaccaaggtaaaccaatggtaataacaatttatttatgtctccaaccccaatatgactgtgtatatagaacaaatctacataatttttgcaattgcttcagaagctagaaagctcttgttttgcttttgcacaaaccaccatgtagtccagtagttatgtactccgtactacggaactagtaacttcatcaggatgaatgttcactccctataacttctgaatgccactgcgttataagcctataaagatgacattcctacacgaattttggtctgcaattgtttttcctacctcataactcacaagccatagtgaaggatggataaaacagacaagataaggtgctctatcatatgttttatctatgacacattctccagctttagaggcactaaagtgttccaataaatgattgcggaatgacaaaaaagaaataagttgtttgttgggttgctcttgatcaatcttatatgcactattctcatagtgtttccatattttgtaacaacatatttgatctactgagaaagttatcccagaacaacatatttcgtaacatgtaataaggttttccatataagaatatgcgcatgctcagcaactcaatgcgcactccacttacacagacggacagatatatgcttgcctaatcagtcccctctccctgtcggctgttgcctcacactccagcattggcccactgctgacatgtgagcgagacaccaataggatgaggtgaacttttcagtggcatatagacaaccaggatgcaccctttccaaatttattaaacaaaaacaagactctataaaggttggtaaatatgcctagaacaaaaggcatgttaaagtaagttctgctgaaagtccgatataaattgaacagatgcaaatgtgcactttagcgcatttaacaacttggactattatgagttaactagtgacataagataataggcataaaatttacaagtagaaactggtagaattttattatggaaaaggaattaatgtgaaactaaatgaatgatgtcggcactatgtgaaacaaccatatcaatagtcacagtgatccagtaaaaaaacataaatataccatgtacattaattggaatggtcacccctcatacaatgtcattaattgatgatacaggcaacttatattcttttttagctcaagtatctcaagaattcatggctcccaaaatatttattgatgttatcacatatagaacattaagctgtaaagatgaaatacagtgctaagatggtactagcgcctttctgcacagtaataccaaaaacttgataggcaaaaagggttcctcaaaatgaaaatttaggtttttaagggtaatgatgctggggagttggcttaccatcttacaagtcagccttgattggttaaaaatatgtcatgcatgattgccactgcctttttgcttgagttcaagctctaactctttgtgccttacctccagctccaagcgcttattctcaagcctcattttttcattctctaacctcatctgttccagttctctatccttatttttactgaagcgctcccatttgagccgttgttttgcaagatagactgcctggacttcaatctgcaacctttgttcctcaagatctgcagattgtgtagccaaatccttttgcgccaaagccaagttggttccatcaggaaatgctttgttgatatccagtgatatgccatgggaatcagacctcctgctacatccatgtgagctggaagagttgccaaaacccacatcctcctgatctgtcataagcctcaatcttttatgcatgggcagggcactcttatcaccttgtaatgtgtaattttcctcatcattctcctcctcggaatcagagtctacactttgatcatcttcatcggcatctccgcttgttcccctcctcagatcatgctcatctttacatctaagggcaagctgcagtgaacgctgaagggcaggatcttcaggcaaactcactcgattgttattatggtaggagcacatctcctcgtagaacaagtgctttgaactcagtatcttcctcgcatcatctttcatcttgtcagacagattactcatgcaatccagcagagcatgattctccacaatcttgcaagctgtaccccggccaaggatatctgtaagtcttttgtatctcttattgagatcattgaatttatcttcacattgctgcggtgatacactgcagcctcgctcacccatgacctttgatattgccttccacttgccctttttctgcattattgcagagtttctcttcccagctcctgaatcagctcctggatcctccccagtgtaagatactgcagtaattaaaagcttgaccattgaatcagtccacttcatccgctgccatgcagcgcccttctttcccttgccgctctggctatcagtggcatcctcgttgacaccatgttcctcatcatcactcatgccgttcttggcgtgttgacgatggtgatggtggtggtggtggtcaacctttccaagctctccgaattgaaattctgacaagtgatcagaatctgtagactggtttacatgcatcgataaattgccaggcatctgagtatggtcaaagccctgctttccaggatttggagcatgcatttgcccagagttagaacgcatcaagcttccagagggtaggttgttgccttccattcaccccaaggatcagccaggcactgaagctgcttattaataccatatacaaacagacgagattttgcgcaggcactggtgaccacttttgttacatcacctgcgaaagcaattcaggagaattgttgaacacctaaagcaaaatacatgattgagaaatctataataatatcaaaaattaatgagatgtaataactaaaactgctgatataatgagtaccatgcttcaaagatttattcaaagtgaaaattaggaaaaaaaaatatccatgtattccacagaaaaggaatcaacagggccggatccaacttgggacatggggttcagttgaaccccccccccccccaaaaaaaaaaaaaaaacttttgggagaacaaacaaactgttactacttgtattaaaagaggtttaaggctctcaaattaaggagaagagcttcttccagatctagaagagaagttaacgaacgcaagcaaattccacgtcccggtgggatgggagatagagatgaatcagaaagaggatgtggatgctcaccaggattccctcccctgctctgctcgatcgccgcccctcccctgttcagccgcgactcctcttggcggcggcgcaaggagcggaggagacaacgagacgggagatttctgtttcttttacgcgatactcgactactcctccacctttatggctgtatcacagtatttttactattttaaaactactcgctaatagtacgagtaaattccataaaactgcatgtacttacacgatatatcgtgaaatgatagatttaagaacttgttttataaaagtacagatttaatattttcgtttatcacaaactacagatttaagacacatttaatatctttatttatcacaaaactataggttttgaatacactaaacctatagttttgaaataaatgaagatactaaatagttctgtgataaacaaatacactaaatctatagttttcttaaatctgtaattttgtgataaacggagacactaaatctgtagttttgtgaaacaagcttttaaatctgtagttttgtgataaattgtgtaaaatacctgtggttctgtgaaatttactctaatagtatttctttatagtaactgatggcccatatatctatcatcaaatacttagagaaaaattaacaaactcagttagcaattgtgtcgataaaaaattcctcagaccaccagcaaccactatatgccactccgcgcaccgccatcacccctctttctccatgagccaccatcgttcatcctctttgcctttacatgcgcagttgtaccctctagtaactgacatgtctttttctcctctcctatcatcatgcacactactgttatggacttatgattgcctttgaggttggagatgtatggcttgcagggcctctgggaggcaggagctaactcgacaaagaacgaagatgctagttctggactccttcttgctagatctagcggttatccaactgtcggagggaaaaagaaacggagagagagagagagatagtgtgcggagactttggagatggatagaataaggtggtccaaattgaaatgtaaagttagctattgtgtaagtgaaaaaatggttaaaggatgacataataatatgaaaacttttaagaatttttaagaatactgtaatttactccctctaaaaaacgaatttagaactggatgtgacacatactagtaaaacgaatctagacatgcatatctagatttgttgtactagaatgtgtcacatccagtactaggttggttttttatgggacgaagggagtacttttttttctctagcacaattaaagatgagttgtctattaccagataatctcgtgatatgctaagtatggttaggccagtgtacttagctataattaataatatcatgatatgttgatgcatggcgatacatacttctattaacacaagctgattaattatagttagatagatttagctaaaagataataaaaataataccatcatttttgctcaataataaaacattcgactatggtcttcttttctcattgcatgatatatgatgactacattagtagatatttacgtaattctttgatattgttttttattttctacatatatgttaattgggactaatatttttctcataattaaatagataacaaatcatttttccatatttcttctataaaatatgaatagggcttgttggtgctaaagccccagctccatcccggcagaacccctgccctgcatgcagagtagcagctgcacagcttcgggagaggagcagcatgtagcagaagcagggtttatgattccgagatgcttctgtttcgggctctagcggaatgacggttttcgcgaaatctagtggaaagctgatagattccgaacaaatttcataaagcaaaatttgaatacaaataccttgagtttaccgataagcttgcgaaaaccagtcagctttgacgaaattctgagcgaaatcatcgaaatttcaatcggtaactagaaaaggtaactgaaagtgttttcctttttttaatacgttattcttttatttcctactataaatttcattaaatatacagaatacattttttttcaaaaatttatatccaataggttctacgaatattatactatttataagattttgtttgattttttccttttttatcaatttaaatttgaatttggatgaaactcatcaaaatctcagatggcttctattttctagcctcgtcgaaacctcaaaattttatggaattcgaccggttttcgtcggaattgtgaaccttgagcagaagtgcagaacaaccaggtcgcaaggaagaaggagcaatcaaagacaacatgtcgtggtccatgggtgattaagtggactaattggctgttagggcttccttattaagttattagtttttgcggttttttttcctacttcaattgatggaacaatcacgggattagggaagcgagtggtttttactcacaaagtaatccaacaattatcaacaattgtgttattgaatttgtggctgcgcctttgtagtattatggcttacatcgtgagaaattgaaaaaaaattgataggatatattaatatgaaatataacactctacaaacatgcaagttaaaattcaacttttaaaaattgtaaaaaaaataacaaatatagctgcgaatatacgatatctattttttcaatttaatttgttattttttagcaacttgtataagtcaaatttggcattgtatgtttgtggagtgatatatttcatatcaatccatattgttattttttaaaaattatttagaactatttaagatgatatgcaagctttcatcataattcgtaaagcacgtttgaaagaagcacccctgtattttcgttcagattcgtcgctgcactcgcggctatagcatgcgccatactggcagattcgcccgcgaagaggaagacgaggacgccaagacggtggaaaatgattttttttctgcgaaaagagattaaaaataacaagtgggacgatgagcgtgtggttcgttttcatcgtggtgtcggtattcacggtggctgacaggtggggccgttctgtgtgggccatgggtgaccgtcagtcttggcaagggttttgggctgcccgcgcaaatgtgttcttgtctgcccactagccaagttgcccactagccagtcccattttgttggctggctgggcccactttgaatgagctcatgaaagctccatatctattttattcttctcaaagaaaagtatttactgaaaatactaagagcctgtttagttcacgaaaagaaaatttttgggtttcacatcggatgtttgaccggatgtcggaaggggttttcggacacaaataaaaaaactaattttataacccgcctggaaaccgcgagatgaatctcttgagcctaattaatccgtcattagcacatacgggttactgtagcacttataactaatcatggactaattaggctcaaaagattcgtcttgcgattttccccttatctgtgcaattagttttttaatttatctatatttaatacttcatatatgtgtccaaagattcgatgtgatgtttttttgggaaaaagttcttggaaactaaacagggccactccagtgccatctcccccatctactactaggtcataaatatttgacgcttaggattcaattagttattttaaccttttaccatcaattttgtattaaaataaatggataaaatctaaataagtttatgatatttatgatagtactctatgtacatgttattaaaaactatcacttgagaaattattgataatcaaaatttaagagtttgatcaaactttatcataaatatcaaatatttattactagagcacaaagacatatcataaaacaaacccagtttcaacaaagttggggccaactccaaccccaggccatgttcgtttgtgtctatattttcaagcaatgctgtggacctttggtacctacctacaggctcgcaacgaaagaagtcacttcagttctgcatctacacaaagaaattctgtcaaggctgtcttccttttatgtcaaaaagatcacaactaccaaccgatttagcctttgattgcatcaccagtagtcattgcaagaacatgacctggtttcttcctactactccatccgtcccaaaatagaagaacctagaattgaatgagacattttttagtgcctcttaagattcattatactaggaaatgtcacatccggttttaggttcttatattttaggactgtgggagtaactgattctagcctttgattgaatcaccagtaatcattgcaagatgggagtaactgattctagcctttgattgaatcaccagtagtcattgcaagaacatgaccccatcctgaagtggtggaacctgttgagatccctgacaacgaactccctctccacaatggcactgatgaccttaaacgcttcatggcagtcacggcacatcctcaggttcttcatcaccctaatggccatccccttggggatcaccagcaatccaagccccaatgccagcaactcactgtgcactccaaccatcacacctctgccttcctgatgatgatgatttccatcctcttcttcatcagcatcaaggactctggcactgccaattctccccttgtaacccttctccctcatcttgccctccaattcatctaacagcagcatcacctcaccggcccttgagccggcaggcgataccatgccagcgtagaacacgtaggagatgtcctttatctcgatccagctgcacccgggatccttccgaatgccgcgccgcctcatgttcgaccacaccgcagcagcgtcgtcggcttgaccggctgaagcgtatgcgttcgacatgaccaccagtgcgccggccacatcttgggtgaactctgataccttctgcccagccatggttgctaggtccaggcgcttgtggttccggcaagctgacagcaatgagctccacagcatgagggcgtcattgccattgacctgtgcttcgtcggccagctcgaatgccgcctcgagctgacctgcacgaccgagcatgtcgacagcacaagtgtagtggctggcacatggatcaatgccgtactcgcttcgcattgaacggaggagctggaggccggtgtcgaccagacctgagtggctgcaagcgtgcaggacgccgagcagtgtgacactgtttggctgcacgcctcggccaaccatgtcactgaacaaagcgagtgcgcacctgccgaggccgtacttcgccgtcgccacgatgatggaggtgtaggggatgaccgacggctggttgatcctgtcgaacaccttctttgagtactcgtagatgccacatttggagtacatgtcaaccagagccactgcaaccacgtcattgtcttcgtgcccatggtggaggaccatgccgtgaatgcacttgccgatgccaagccgcccgacgcccgcgcacgcgttcaccacgctgacagcatgaagtggttgggcgccatgtcttcgccattggttctgagctcggcgaagagctggatagcgtcatgcccgagcgcgttctgcgcatacaccgacagcatcgaggcccaggaaaccgcgtttctcgccgtcacgggcattgcgtcgaacacagcgcgggcgtccccgaccctgccggccttgccgtacatgtcgacgagcgcagtggaaacgacgctgtcgcacgcgtaccccgcgacctcagcgcgggcatgcacctgccgcccaaggccggcgtcagccaggcgcgcgcacgagctggcagctgtagagaaggtgaaggcgttgggtggcacgccgctgcgtgccatggcgcggaggagggcgacggccgcccggggccggccggcgctggcgtacccggacatgagggccgtccaggagacgacgttccggtcgcgcattccgtcgaacaggtggcgcgcgagggcggtgcagccgcagcggccgtacgccgcgaggaggtggttggaggaggcgaccgaggaggccgccccgagcttgaggagcttggcgtgggtggcggacacggaggcgaggtcggaggcgccgcgaaggaggtggatcagcagcggcatcagcgtggccgcgccggcggcggcgttggatgtcgccgtcatggagaccggttggtgccagtgtcatgtcgaggatcggaagcgcttgggaggtaccacgccggaggagccgctgccggggacggggcgcgccggggaaaagcagcgccgccgccgccgccgccgcggcgcaggccctagtccgtgtttgcttggggagaaccggagaaggcaaccagatcgtttcatttcatttgaaaatgacatatactatagaggaatactacacaaatactccctccatttccacactatgactttttttttaagttaaacttcttaaagttttatcaagtttataaaaaatatagtaatatttgtgataccaaattagttttattaaatctaacactaaatatattctgatagttttttatgttgtatatttttctataaacttagaaagaattgactttaaaaaatattaaaacgatttataatatgaaacgaaggtattagtagatttgatggtacaaagaaagtatttttctcaggcaacaatactagaggagggtatattatcaaaattttcatgcgaaaaattgtaatagatgtgaggagataaagtatttttttaccattaaaatgctaagctaattagaaaaaaatcactgttgacgtgattattaaggtttaaatcccgatgcctaaaaatattacacatgcgcatgtgtacttattataccaaggctaaagatttgttgtttgttttttcttcttttgggcgtgtgtagtgtgtgtaaatatgtcttttgtgtaatcaaaaaataataattctcaagtatgttagtgtggtgtactagtgtagttgtgtatgtatatctttcatgtaactggaataaaaacaagtcgattaagataaaaaatggagtcactttaattcctttctattttccaccttctgcctattttcagagtccagactaaggccgtgtttagttcccaagtttgaacccaaaaacatcacattgaatttttctacacacataaacttctaacttttccatcacatcgttctaattttaatcaaatttccaattttggcgtggaactaaatacaccctaaggaaacgaaaatggcatgacaaggatagaggcataggacagcttacaaaaacggtgcctttgtttcgggtaaatagctaatatggtccctgaagtttcacttcgggctcagtttagtctttgaggtttcaaattatccaaataattccttcaaattaattatttgggttaatatagtccttggacccacaaaaaagaccacgtgagcatgccaagtcatcatcgcatgcagcggtataaatgaaatgaccattctacccttatatatcatatagaaaagaaacaaaagatgcaaacaaaaaaacaacaggccaacctagacccaacattgttgcagagggtggccaacaaaggaatttatacgatcagtgttgggctgcagcaatcgtaagtgacaattctaaaacgatcatacatgtgtgaaacatttgttttcttttttatatggtatataagggtagaatggtcatttcattcgtactgctgcatgcggtgatgacttgacatgctcacgtggcactttttttggtccaagaactatattaacccaaatgattaatttggaagacttgtttggacgatttgaaacctcaaggactaaactgagcccgaagcgaaacttcagggaccatattagctattcacccctttgtttcttaataaaaagtcggttccttcaaacaacaaaaccatcaacttcctatattaaccctatatactaatgggcaaggtagcagggtgccagaccaatcttgagatcaaaacatggacagccaaattgttccctatatattcaataacagttttcaacttgtttttgtgttgttcagttgcaagcaaataagcaccacaatcatgaaaaacaatgctccagtgtcacttgaatttaccatccatagttccacacacacacaaaaaggagaaaataaagggtctggaataggactcaaagtgaatcatctagctaattctcaaaaaaaaaaaagtaaatcatctagctacattaaacaataaactgttacagtaactggaaaagaaaaggaaagcaaaataaggagatgatgtccataactgcatgcacatctcaaacttttaaagttgcaacacaaactcacaaaggccaaagatcattcagacacatggagcaatcaatggttgtacatgaaaaactacagccaggaatggcccctgctcataactcaagctttctccaagttcaggagcacacaggaccatcattatcctgggctggaaggcttgatgcattctgcaatcaatcagtagcatcaacatgccatgtttgttttcagttaccacatgaaccagagcagcaggatattttcaacatttcttgcattgatcacatgacagcaattgaacaaaaggacagagcagataataattgaatattttccaaccaaagaacatggttttccggcaaaaacagcaatcagtactatagaaacatcaatttgggaggctcagtaatgaacttaaaaacatccgaaatcatgaaacaaatgttctatatatatgcagtaaattacaactcacgcagatgaattatgaatatacagaagaatgataatgtggctcaggtgacgcaattactattacaaaagatagtggtggatagttcaaattcctcaatactagcaacaaacctggcatcaacaggaactctaatatggccatgtatgattcagcactgctcaaacagacaaactcaacaatatatctcattggaaacccggcaagaacttgagaataaataagaccaagaacttagaagcacttccggtggacaatcgctgggcctgattcgtcatattcagccttggagatccacatctgttgcacaataaacatcatagtgcgctgttaattagtaccaagaacacggaaacattttaattcatttttttaaaaaaaatagtaccaagaacatgaaaaaaaaatcatatttgtgcaaccaaaacatgtagcctttcatttctcttcttcctgaatgaattggcaagtttcaaaaagagagaaaaattcatattataagtcgatttgatatttttcctagtcaaactttttaaagtttgaccagtttatagaaaaatataacaatattttcaacacaaaacaaacatattgtgaaaatatatccaatgttatatttaattaaactaatttgacctagtagatgttactaaatttttctataaacttagtcaaacttaaataaatttgattagaaaaaaagtcaaagcgactcatagtatgaaacggagggagtagtaatcaaaattttacctgttggaaggtgctaagggaggcaaggatggatccaccaatccagacactgtacttcctctccggaggcgccaccaccttgatcttcatgctgctcggcgccagcgcggtgatctccttgctcatccggtccgcgatcccggggaacatggtcgatccaccactcagcacgacattgccgtacagatccttcctgatatccacatcgcacttcatgatcgagttgtaggtcgtctcgtggatcccggccgcctccatgccgacgagcgacggttggaacagcacctcggggcacctgaacctctcggccccgatggtgatcacctggccatcgggcagttcgtagctcttctcgaccgagctgctgttcttggcggcggcggcggcgttgagctcctgttcgtagtcgagggcgacgtaggcgagcttctccttgatgtccctgacgatctcccgctcggcggtggtggtgaaggagtagcctcgctcggtgaggatcttcatcagggcgtcggtgaggtcgcggccggcgaggtcgaggcggaggatggcgtgcgggagggcgtagccttcgtagatcggcacggtgtggctcacaccgtcgccggagtccagcacgatgcctaattaaaacaagatgaacaattttattttctttttcaaatctcactaatatgaaggacaaaattttgaaatttatgaacggcaacaggatggttaccacttactactatcttttactctttgtaactaaatatttgtaatagctactaagaaagaatataactaaacgaaagtgcttttaataataaatttagtaatatttttcatacattaataatttaaaattttgaggtttgactgtacgtattttaggacgtcatctactccctccgttctaaaatataataatatagaaccggatggaatatttcatactccctatactagaaaatatcaatatccaatccatcctagattcttatatttttagacgaagatagtatttaaggacaacccccctcaaaaaaaaaaaaagaaataaatcaaatttcgaaaatgaaattttaaatttgcgttacctgtggtgcggccactggcgtagagggagagcacggcctggatggcgacatacatggcggggacattgaagctctcgaacatgatctgggtcatcttctcccggttggccttggggttgagcggcgcctcggtgagcagcgccgggtgctcctcgggcgccacccggagctcgttgtagaaggtgtggtgccagatcttctccatgtcgtcccagttgctcacgatcccgtgctcgatcgggtacttgagcgtcaggatcccccgcttcgactgcgcctcgtccccgacgtatgcgtccttctgccccatccccaccatcacccccgtgtgccgggggcgacccacgatgctcgggaacaccgcccgcggcgcgtcgtcgcccgcgaacccggcctgaattttggattattattatcaatggtttatcgttgctgttgttgttgtttactgaattttttgaacgcaagaacataaggtatggtttgttgttgttgttgtgatttgtgagaggtggttaattggattgagttgatgatgatgatgaccttgaccatgccggtgccattgtcgcagacaaggggctggatgtcctcgccgtcagccatttgattcttcagagattatatatctgttgattcaggacaaaatggaccatgatctattagttccaatgcagtaagactatatcgattgattaagaacaatatggacaatctatttatttagtagtaacaaggcaatgcagtcatgatcactgaagaattaaaatggatgtttttgtcatcacaaatgttaaacttgatcctatacatctagggtataaatcaagtcctaacatattctagtttttttatgtaatcaagtcctaacaaactgtatgaacacaccacagcatgtaagcttcagcttaattgattagccttggaaagatggcagtgcaagaagattataatttggccttatgaactggattcgaactgcagtcaaatattacatttacatggccaaaatatagcacaaagaatctgagaaagaaaggcacaaacagattcaagaatatttttggttgttcttaccgggagattgcctgcctgaaacctccaccgagatggagatggaggaggtgcagaagaactaggcaggagagcttagggctctgcttggatttgtctcctttttatatgcacatattttcttttcaactttcttgattctgttttgaaataaaaaaagggtagaaatagagcaatatatttggctgcattacagtgtgctctaatccgttctctctattttttttggtatagaaacttgtttgggatttttctttttaaaaaaagacctatatttttacgtagaatttttcccaaaatgataataagtttaccactctttatttctaaaatgaaaatgtacattgtgtgtttttttagtttaccagctatttacgccacatctaaaaatataatggatccatcatggtggccaactgttttgctggattctttaaattgaaacactattcttttgagaggaaaattaaagggtgttgatcctaccaaaataattgaaaaagggaacctttgctatgccatctcatggccagcaaagaatctcctacttggcaaataatttgatcaacttccattgtcatagtggaggccatgaatggccagaatgggcaactgttttcaaattggcctggcacacacagcaatggttatgatagattcaaccaatgttgaccaatatacgggtcgaattaaaatgctaacaaatacggtttgcaaagattctcagctttcttttaataaaaggaaggagaccccaatcaagcaaaagatcaaaagattgtttctccagcaaggaattattagtggtcctagatgaagggaaaaggagcagcaaacacagaagagagtctcttttgagcagatcaacagaggaggctggaatgagctggtgatgaataggaaacgtgggccgcacgatggatgacatggagcgcacagagtcgtcagatttgatataaacatgcagaggggcgtcctctgatttcttggctggatcctgcttggaactgggccttccagttggcctagctcatttaattaccactattcatttttagataataataataattaccactgctcattttctatgtagatgcaccgtgcacgcaattaacgcacgttactcacaattggctacccttttattgccttgaggtcatactttcatgctagtactttgctaatatcagagggttcacattattcaatatcaaggtgaaaaccggtcctatcggtcgaaaaccgaacgaaactagtagaatcgaaaaacaaagacgactttcagtccgtaagaaatttatgatatcagaaatcaaggtccatgttcccatcttggatgtagtttgaaccaagcatgccagcattactaagcttgagatttgatgaactattgtgttctttcatttgattactgtgttcctgttgttcctgaaattactatgagcacacaagcagtacttcgttcagcttgtgcagagatcgcagaaggcaatctcagcagtttatgcatgattgcacaggacgctttcttgccaatggcaggtgaacacaggaggggcagtgtggcagccaaaggtacccaaaacatccaatcttcattataatagacgggcacggcggtaaattctgagtagcaggtcgttgatatatcaagctaggccgatccaatttcctctatgtaagaacaatgagaactgagaccgaaaaaattaggccccaagatgattgctcaaaatgcatataaaaatgcaaaaccaagccaaaaatgattacgctctactcctctcaacattagtgaggcacacatcctaaacaagcacatcggtgaacgaacgagacaaacgtcaggtaatatatgcaggggatcaatctttggctcctgagtcatcttgtcgttggctggcctctcctgaagttccctgcaaaacagcaaaagggtaaatcttgtcagtctttggaacaggagaatatttacaggatttttacatgggttagtcttcccacaaaaaatctttgaaactccattccaatttccaaaggaggacttaggacatgggactagctaaactttctctgttcatggttgttcgggccaagggaaatacctgaacacgtgcaagaagatcctctagttcggctaatatatctgagaaaggaggtcggttggatggaatgccttcccaacatctccgcatcaagtctaatagctggggatgagcattttctgggagccctgggcgcaatcccttgtataacagtaaaatgtcatgcttagtgcatttcacaatgggcgtattatggtaaactgtaacaagtaataactgacagcatattatttgaatagaagaaacctgcatatgctacacacctgtctcacacctacagctgcttggagaggggtcatggtattataagggatctaaaaataccagaaacgaaaatttgacaagccttagcaaacactaataaatgcacaatgtagataattgtgtctcttcacagaaaatcgtgtaccttggacgttatgagctcccaaagcacaatagcaaaactgaacacatcagctttgttatcatagggttgatgatttatgacctagcaacgccgcatcgaagatatattagcaaggaatataatattcttgtacctttagtagacaatataaactaggtaactatagaatgtccatgcaaactacagaacattcagattattgaaacaaagaaaaagtcttgtctagcaccttgaaccttaagacaaagcatctaaaaccctgagctttacaatacgttcatataacctcccaaagtgatttttgcctaagtggaatacacattggatgggttttgcccatgtcgcgtaaatgctgaacatacgtatcaaaatctccacttactatctcctctttatcccaattcattctctcaccaagggaacaaggactgaaaaaatgcttgtatgaccaaaaaaaaagatcaaactttaggaccaatgattgagaaagcaccaacatgtcatcctacttggacaaaaccgcttgttcaagtttccgtataggcaaaaccaccatacaaaacaacttaaggggaggggcagttgtttatagatggtattgcaaagtttggggggttacaaactaacctttaaaattcgaggtgctcggtggacttccattaaaagcttaaggggtggtatgcctatagggaaatttccatgaaacaacaaactattctgaactattcactttagcagtacaatatattatattgtgataagcatccaagttttgttttcgagacttcaaaaacagtaacaatattaggcacacttgaaactgaattactttgctccagcaacagagttgtacctctggtgccatccatctgtatgttccagtttcagctgtcatgttacctccttgatcctgaaaacgagctacaccaaaatctgccactttcacaacctagaaaaataataatgaagttatttatcagttcatagatattttctctcaagtgcaaagcagatggctcctgcacatacaaaaacacaaatgaagcatgattatattgcatcagtaccatttgcccacttgcataaactatactatcttgtcttattttttcccctcatatgttcatcaataaaatgttaaagattataggctacgtacatgatctttgtccattagaaggtttgcactctttaaatctctatggataatacccctctgatgcaagtaacacatccctctgcatacatcaactgcaaacttcagcagagttggaaggtccaagacattatgctgcttgtgcacaaagtcatacaggcttcctccagacatgtattctgaaagatataaaagtagatgatgagcattagtaggaatcttccagtcaccaagatataaattaagcaagaacccgctctttgtcacataataacaagcataattatatggaattaaaaattacatctcaccaatattgtgaaattaattagcattgtgtaataattattcagcacatgctttatttttaggaacaaactattctttgcaaattccccggtgagaaccaattgatgtcataaatcttaccagtaattatgcaaaattgtggtggttttgtgcatgcaccaatgaatcgcacaacattagtatgctgaacttccctgaaaacaagtatgggagatcaaggcaaggcataaatatttagttattggtacttgcatgaactgggtaatttcagacattcttaatctaagagcagtaatatgctcatggctaagaattggatatgcttaaactattcattcacaatggtaaatgctaaaaaagaattatataaacaaaacaccttattataatgttaaataccttagaatatatacttcctgtgtgaactcattccaaacattcttattcaaatgctcagatcttagaattttaacagcaacatcctcaccgagataagtcccatgataccttgacataaggataacacaccataaaaacaaagtgcaataaatacagtgataaaacaactcagcagtatacaattgacttacaaatccccacaagatccagaagcaatcatccctcccatcttcagcagtcgtttgtcaatttcccattcaccaccttttacttggaatggcagtgttctttctgcagctgatgagtgagatgaacctgaccatgatccctgcattttcagagagcaccagcaaatatgctgttagatttgtcaaatggaacaagacattgtatcatgcatcaactccttgcaaaaatacaaaataggattatatccgcatggaaaatgcttattgcttagacgatcataatatatatcacaagttacctcattccttaaaatggacgcttccagtgcctagagcaaaccatcagtgt

SEQ ID NO: 21653 - DNA, 17112 bp, Oryza sativa
aaatacgaggcgagacgaggggcaaaagcgtcgtttcgtaggcggtgagcgtgtcccacgtggccacctcctcgggtgcgcgtagcgaggcgtggtgcccacctgccgggacggccgcgtgcgcctcgtccacgtggtgtgacctgcatggggcccacgtgtcggtgacggtggtccagtggacgcggtgcgggtaggcagggtttgcgagacgtggatagggttttccgtgcacggggtgctgctagtagtacacgacgcatgttccctgcaggtttggtgacgctcactggcatgtgggcccgtgttaatgctggacagtaggagtggttagacagcgctcgagagaacgacgatggttcaaaaaatacttaagtattttcacgcgcacgctttttaaatgattaagggcctgtttagatcccttttaaatgattaagggcctgtttagatccctgtcacatcgaatgtttagacacaaaaatattaaatatagaaaaaaaaactaattacacagattgcgtgtaaattgcgagacaaatcttttaagcctaattacttcatgatttgacaatgtggtgctacagtaaatatctgctaatgatagattaattaggtttaataaattggtctcgcagtttacaggaggaatttgtaatttgttttgttattatattacgtttaatagtgtccgtatatacgatgtgacacggcaaaaattttcacccttggatctaaacacagcctaaatagtatgttcattttctaaaataaaatctatagaacagttatttcaaatattatattaatcgatttttcaaagtttaaaataattaatactttctctaatgacttagtaccttgtaagctcaaattagatatagtgtaagttcaattttttttcttaaagaaaggtagtgcaccaatacgagaatagcacttacgagatagatcaagcgaaattaatctttaatcatgatatttcatatgggcgtagttcgcaaatggtatttttatatgatttatatattccgccaaccaactataacaaacaaagagggtattacaatcacttcaattagtgtgacaaacaactttgatgaatcagaacaaccacagctagaccaaagggatatccatcaaaatgtgcccccataaactcgtcaacatgactagtaggtcatgatagataaacactccaatcggttgaagtatgaagtaagcacttatgccataactattattaaaagaagtagtgaggctccaagagggtccaacttgttttagaataacacgtgaaaagaataggacacagtaccttgaaatttcaaaaactttagcctattaggtgattcttgtttttttttctctacaagtattatgcacagtcttgtactgactgttgatgtatttccaacattttattggatggaagtctaactcatcaaacatacaatcaaacaaagcaataataaaaatgattgtttctcattcaaggtttattctaagaatcaccctgatccaacatatatataatgatataacatgtgtaaaaaaacaagtatcaacaacatatatagaggcaccaaccaattcctaactttagctggtttagtttggttctattatcatgtcctcctagtatattcctttctttttagcatgttcatcccccatcactccataacactattaaacaaagacaactaaactaaaactataagatgaagtccttaactggtctatgtgtatgtcataatgagggaatgacaaaggtgcccttgatgtggactgctgtaaccttgctgcttgctttatccaaaatgtggattagaaccaaggcatagtagtgcgggctggaatctgcttaaagtagaaggaaggggagaacctaagatgatgaatccttcccatggggtccatgcatgtttattccccatgtaagcatgtcacatcctaatccccttcctagcattgacatcccaaatgagtgcacatactcactccattcttaaatattcattttttttaaaaaaaatgtgcgtaggaaaacctagaaatcttatcgttaatatataaaaagtattcagatttcatatatgaaaattatatcaatagattttaaatactttcatgtagttatagttatgataacattacaaacttattattaaaagaaacaattatcaaatatgtgcatcaaaagttgtatcgatatcctaaatgacaagtgaagaagaaaaaatagagggagtaataaatatctagaaatattctccaaaccatgcatgaataaatctttacatatgtacaaatgctccattttgtttttaagccatagaaggactactggatttagcatatttatttcctttgaactgttataccttttttaagaaagtagaactatactaacaaaaatgttgtaattttgacacatcaatgaagtttttaaaatgtaattttgaccactcatctctattgtaaaaatattcataaattctgctaaattgtattattataaaattttaaaaaacgtgaatattaggtaataacctaatatcaaataattataagggatgagacttcgaactcagatcgtctagcccaccaccttgtggagctagccggaagactcctgagcgtttctctcattataaaattacttttgacgcaaaaaaatatcgatttctcatagttttgaaagtttgaatggatgtttgtccagaaaggagtaataaaattcatgaaagtgttagtggaaatcgttactacacaaataggaggtttgattcccaccaaagtagagttagttatagggtatattaattataactggtttattattcttgcagttccatgcgatttgatctgatctcttggtcctaattaagtcatgtttagtattcttagaaattagtattttgtgacatcatgaaaagcatatatactccttattggcactacaacaagatcgatctccttttgacatatcgcataaaagcaaggatactttaatttcggaacattcttagcccattactgaaaatgactgttagtgttcgacgtgtaacagtgtgttaattaaactacatgactacccgcatgttgctgcaaaagaaatatatgataaaataatatacatatgagttgtaaaaaaatcttatttactatacgattttttttcatgtacttatattttgtaccttgatcaattatccaaatgttatatatggttgggttttatggtgtgactttttttttggggggatgcaatttgcatccttaatgaatcatccaaaggctaaaacaattgagatgatgtgattttatgagagaggagagaattatcattaactacacttagtgggaatgaactttatagatatgtatatatagattaaacgtatccatgtgttacacaagagtagtggaggcgggcatctagcgtaaacacataatggtatactaattaatagtattagctagaatctctatatataggatgttaaaataaattcctccatcttccttggcaatattttagcgaagatccggaccaattccatacaagttgaatactgatgataaataagatcgaaattatagtaaatcattataattgaagataattttagatcgtattttttgacgtacgtatgtccaggcatagctccatgagcaccaatcgagaagatcggatctagagctctatcagtcgacaatccaattttggatgtgtgaatgtaacgctgcacgtcaaatagctagcttcatctcatggctgatgggcaggcaacgtaagcttggagctgaaagagcactagtgtcggccattacactgtctctgtttcttttttttttcaactccaaacttcaactttttcattttttggttagcacatttttcaaactgttaaatgatgcggattttttttaaaaaaatttctatataaaagtagttaaaaaatcaaataaatccatttttcaagtttatatataataattagtacttaattaattatgtgctaatagattttctcgtttcgcgtgaactggaaatatttcttcctaaccacaaaacgaacgaagccggatccatttggcaacaaaagggatgccactttgtgtacgttggcgtcacacttgcattggaggtcctgatgagtcattttcttggaaaagattttctagagagaggaagtgaagaaagtcgcacagttccatccacttctttctccaaggattgggtagtacatatgttatgctatgcttctcattatttgcaacggtactatgtcatacgacacgcgtgtataccaaaagatattaaaggagaaatggttgtgcatctgtggcctctatttttagcgagttttttcaaataaaaaaaaacttactttggtgttccaagtataaggcattttaggcctacatatactcaagaaataagaaaatacctcaaatgtgttggttacccttcatttgtacgacgttggaagagataagttttgtgagaagagttcaacttatttgacaaacatatcaaacatggaaatgaaaaaaaagggtgaaaaacacctacaagttctaaaacaatatagatttaggaaagactagataacacgatatgtttataatcgatgtgataagtcatgagcacaaataagagttgaacaagcaaaacctacaagaaggttggccaataatttctttacaagcaatatatttaaaaaaacttaactggcaaggaaaatatatggttatataaagcttatccacatagtttgtgcaatgcctactttggtctttgagtaatcatcaaagaacaccccaaaagtctgaattctggcttagacactagcagtggccatggtgccgtgggtaccaggcacacttgagatccagaggcagaagcaatgaaagctgcttgctgaaaatgctagtagaaaatttaaaagtgtcctgatctttcccttctattgctaaggtgaaaaaaaaagttggagcatatgcatgtgattggttaggcactggttattggaagaagcaacaaacacattgtagtggtggatggcaggccctacctaagtcagattgaacagagaaatgtgcagtagtttatccatttcttcttcaggagaggaagaagaggaggttgcattgcattgcagcaatggattgaggaagtagctttcagagttgaggtgtaaggcctgtcaacttgctcaatcatatatggttgggcagccttttgatcatccatccccatgctggtcttatcttggccccaattaattaattaatcaatttcctttttagtgcaaagttaattgtgatggtacacttttgccactcaactttgtcgtctctccctctactcttgtttcaggctagtttgcacgtgtgaattaggatcgagttttcatgattcataaaccgttggttttagaggtttgagtgagtaaacgtttggcttactgatgaaaatactctattagcatatgattaactaagtaataacttaaaaataaatttgtttaaattttaaagaaactattttattgaatttgtttttcaaaaaccatacatttgttaggatatataggaagcatgcccgtaatgatctacgaagtagtagctagtactaactgaagaacatgatttacatgtatggaactttatgtatgcttcttctagaacgtgccggttatcgagttctacacaattataagaactcatgtaaaaatcttgagttccaagttccaacctttcacataggcttaaaagttcaacacaaactggattacaagtgcagtgacaacttcaaatttcctaattttctttgccatgagtcatggtcactgctgagagttgctgattcatcaagctactagacaaagctttgccctggatggctccgaccagtgacgtttgatggatacacaaaagtaatgcatgattaggtgacctaataggctaataagaggggtcaaacttaaatattgggcacaaaatttccccaggagaaaggatgccacattgggtggacagtgattggcaaaccaaccgaccgagaaacctaattggctatggtctacatggtgggctatgatatgttccaaagtgaactagtatgccattgccgaggataatcaaaaatttttctcttaatcaacttgatcaaactcttgttagatacctcggcttgcccattggcttgcgcataatatggtgaagaattcaacaacttgatgcccatgctatcggcaaactgaacaaactcatcagacacaaagattgatccctggtcagttgtaatagtctggggaataccaaatcggtagattatatgctccttgacaaattgaattgcatctcctggatcaaccttcttcaaaggaatagcctctacccacttggtgaaataatcagttgcaactaatataaatttatgccccttgctgaaaggtggattaatctggccgatcatgtccataccccatcctctgaatggccacagtttgataataggattcatagctgatgctggtgctctttgaatcgctccaaacttctgacagtcttgacatcctttgtagtatctgaagcaatcttccaacattgttggccaaaaatacccagcacgttgaagcaaccatttcatcttatgagccgattaatgagtaccacaaattccttcatgtacctcacctatcgcaaccttggcttgatcggcacttaaacatttaagcaacaccccatcaatcgtccgttaatatagctcatcatccaacaaggtgtactttaaagccttataatgtaatttcctcgaagccgattgagatggattttgcaaatattgaaatacatcatacctctaattatcggctgtgatcgcagcaacttctatttcaacatctctcaacatcggcttatatcctgatgcaccctgagccaagtcgttagcttctacattctgctctcgagacacatgctttaaagtgactagccgaaattcattcatcaattctcggcactttttattgtaaaccatcaatgtatcattcttgcattcatactttccaacccttcctttcaaaatcggagccgatagcatgtacttaaccacattggctttacataccacagtgcattcattggacaatagataataccttaacttggtgcaagagaaatacaaatacaagcacaacttttccacaggagaataccttgtttctgcatccaagagccgacgacttaaataaaacacaaccctttcttttccttcaagctcctgaatcaacaccgaaccaatcgacttgtcaccagccgatagatataatctgaaaggtatcccttttttggaggaattaaaactggtgggggaactaagatattccttgatattttccaaagctttctgctgttctgccccccaagtaaacttttgatcggctttcaacctcaacaaaggtataaaaggttctaatcttcctgataaattagagataaacctccgaacaaaatttatcttgctgatcaactcttgcaactttgccttgtcctccggaggttgaatcttttgaattgcattaatactcctttgagtcacctcaatccccttctcgtgaacaagaaatcccaaaaattggccagccaatacgccaaaagcacactttatcgggttcatcttcaagccatactttctagtcctctcgaaaaccttcctcaaatcggctatgtggttctctatttcctttggcttgacaaccacgtcatcaatataaacttcaaccaaccagccgatcagatcatggaatatgtaattcatggctctctgatatgtagctccaatgctcttcaagccaaaaggcatcacaacccactcaaacaagctgattgcacccgtacatctgaaagctgtcttatgaatatcttcttctgccataaagatttgattataacccgcattaccatccataaaactcaatattttgtgtcctgaagcagcatctaccaactgatcggctaccggcattgggtacttatcctttggggtagctttgtttaagtcccaaaaatcaatgcacaccctgactttgccatttttcttgatgactggaactatattagaaacccactcagcatatcggcacgggcggataaaaccaacatcatataaacgtgtaacctcagccttgacagcctcaagcatatcggctttacatctccttggtggctgctgatatggtctaaccccatgtttgataggaagccgatgttcgactatcgatcggctaagtcctggcatctcataatactcccaagcaaagcaatctctgtattcctttaagagctctatcaacttggttctaaattctggagacaaattcttactgatgaatgtcggccatggtctatctcctggacctatgtcaatttcttccaaatcattagccgacatgaaaccttgtccttgcttgtcatcgagatcatctaccgtgtccttggtgtagacatttgaaccctccacgatgccctcaaaacaataatttgggttctccatcttcaattggctgtatatcacaatcggacacttttagaaaatctccatcccaaacctttccagacaggcaatcaataccatccatctcccaaagagctaaatcggcactagcaacattaactgacctgtcagctggcatgatctcaatcttgtcaccttgccattgaattaagcactgatgcatggtcgaaggaatatagcaatttgcatgaatccaatctcttccaagtaacagactataggaacccttcccatcgatgacaaaaaatgtcgtaggaacagttttactaccaactgttagctccacattcaaaactcctttggtttctcaagggttgccaccgaaatctttgagaaccatgttagtcttgataagatcatctgaatttctgcctaactttttgaatgtagcatatggcattaaattcacagcagctcctccatcaaccatcatcttggacatcaacttcccattgacaaatccattgatatacaacggcttgagatgccgattctctgtcccttctggcttctcaaagactgcctgctccggtgacaaaactaatctagccgaggcctcttcaacatcatcaacatcggcttgcctagcttcaaattcggctggtagcgtgaaaaccatatttaccgatgcagatgcagtaccttgcctttaagcaacctttttgccttgtcggcttcaacttcatcggctgttgtaaccgtgctcttaacacgccactcttgcttggtctttattttcctcagccgatggctaatttcctgttgcacctcctgaaaacgttccctgttcctcaatctttgaacccttctcttctggttcttggtgaaaataactgtagagcaccattgtgctttcctactttcatcctcatcatggtaataatcttgatttactgggcccaatctctgatggacaggtactctcttctgagtcagccgattgcctctattataggatcggcttgaactccctgtatcttcactgcatccagggtaatcctcaatcgatggcagcctcatacccttattccaacaaaatctgaaaaagtcacagttccaatgaggatcaaaaccaccatcattttcttcttcataatacctctcctgctgcttctcatatcttctctggtatttattaataattctagccgagttcatctgaaaatttcgattctttcccccatcggctgtcctcccagatgtatgcgtcatattaacagggaaaggattaccatcaaccatcatcggcttctttgaatcatcaaacttgatctttcccccctcaatggccacttggatttgttgcctaaaaactttgcaatcattagtagaatgagaaccagaattgtgccacttgcaatacctccttttgcctagctcttcagccgatgggattacatgaccagcaggaagttgaatctatttttcccgaagtaacaaatcaaaaatcttgtcagccttggtgatgtcaaagtcaaacttctcttcttttccagaacttctcacccattgacatggtatgacttttttgcttctgacccactcggctgctgctacttcagaatcatcatattcttcagaatcatacatataaggatatacatgattgattttcttgaaattctttttagcttcagcaaatctttgctcatgtaaaatcaccttctgcgcaagatgggatagactctcaaagtctgggatgaaaatttctccttaattggtgctatcaacccttaaaaagccaggtcagctagctgggaatctgttaaagacaagctatagcacctattcctcatctccctgaacctctggatgtaatcctgcacagactcatcatgcctttgtttgattgctgttaaatcggacagtttcatctcatgaattccactgtaaaaatagctatgaaactgcttctccagatcagcccaactattgacagaattatatggcaaagatgaaaaccatgtgaataccgatcctgacaaagataaaggaaacaacctaaccctcaaggcgtcaacagccgatgccttgccacattgagccaagaatcggctgacatattcataagttgaaacattgtcctaccctgagaattttgagaaatctggtaccttgtattggctagggtaaggatgccgatacatgtttccagtgtcctttggcttaagcccaaactgctccctcatcatatctgcaatcatatcagcccatggcctttgctaagataccccttgtgtctgctgctgtaccggctcgaactgattaaattgaggagcaaattgaggctaacgcgatcctgtctgctgatattgaacatgaggtgacggaggctggtattgatagttcaaattacctccttgataattctggaaattcggctgaatattacgcaccaaatgttcaagaataatttggggtacaactgattgatcggcctgtacacctggccgattgttaggtgttctcaacctagccgatgcgtgttgcacgttttgctgttgaattggctgaatcgtctgttgtctttgcggtgtctgctaggtcagcaatggctgtgctgagtcggctgtcatcggttttgttagaaacattgtagcaacctgttcctgagtcagccgattgtcatttttcccagcatgttgtggttgttttctggtcaataacctaggattaaccacctgtcttggtgccgatgatgacgcagctggtgcagtagttgaaactggtgccatcggctgaaccggcagtgtagcattctgctggtttgctgtcaccaaaggcctgtagtttggaaaaacaccacctggtagatatactggccctgaggtttggtgctcggctattgaaccatcgacaacagtctacactatgtttgttaaggtattaaccaacactccagattggttgatcagagcatgctgcacagcgtagtcgatccgatcttgaaagttattgaactgtaatggctcctggttgtcatctgcgccaaggtcttcgactgtaccatcttgagggacatcacctttatcgcctgagccagctgcagcacccttgtcaccttgagatgaacttgagccaacttcatcggctgcaactaccttcagcttgtacttctagacgatggtttctatgcgggtttcttgaaaagaattcatgaactgatccttcacgttgctcatcatctgttcaagttcgcccctttgttcagccgtcagtctatctagtgtgattggaacaatgttggaggggtccacttcagctgatggatttttggctctcgttttatttatgggaggtttgactcctgtccccggagacggtggtaatttttcggccatcgtgaagaagtcgttgaaaactcgtgtcccactgggcgtgccaaaagcgtgttgattcgaaaaacacgaggcctaggagatctgcttaactccagtgcaggtccaaaatcttgccttttaggttcatgagcgtgccagctgatttgatcctgcaatcaacaagaaataaagacaaaaagattgtagtttaatccacaaatgatagccgatcggctagttgccgatgacatatcatttacctttgagccgatgtcatatgtgaatcgatcggcaattgtgaataagtaaattaaaactaaatctactcgatcagctgtagatgttaatagtagataatctttatgtcgatatatacttaaatcaagtgattgggatagatcggtcgccatgccgagacagtataaatcacttagatcgaaatatatattaacaagaagattatagatgtttacagcatagccgatcagatagatctagcttgtatcggctaatactttgatactgctctacatcaagatattaaggcaagtaaaatatatcaaacagaaagcttaatacatctaaatgcaataggatcttaacataaagggcagatttagcataacaattaagcatataaatcataaggctaaatcaggtaagatcggctgaaaccccgatactacctgttgtcgaaatgacaactgcatacgtcgaaggacgtgttactcaacagtggttggaaagcagtaaaaatgtattaaattgagagtttttcttcgaaaaatcctccctttacgtggccctaggggtctatttataaccctattacaggccccctatttgggtttaggttttacaggggaatttacatggttgcccttatgaaagggacatttacttgggcatacagtgtaattgaggtgcatgggcctctaatgggccaaattggcgatcgctggcccaatggccaacgggccgaagcggctgggatgtccccttgggccttcccggagctggcctcgatatggcgaagtcatcctccttcggcgtatacccttcgcccttcgaccttcgcctaggatgcacggtattcgccatgaggcttcatcctttgccgtcttcgccgcatagtcttcgccatggagcttcgccctgataagcttgacgccttgagcctgaaccctagctggttgcatggtttcgacaggtctggtcgaagggtctcgtgacatactgccaacaagcccctcacgggcaagggtgagataggagcttcggccgagaccgtgcaaaccatgtggtatggtatgaggcgccctctttcgaccgatgctcctgccgaaactaacattggaatcctgcaaagaacgcgtgcagtgcatgtatctgtatttctgttgttagtaatgttttgcagctttcgccttctgtgaacggcggagctgttcttattctttcactgggccgaaatgagcagtgatgggcttttcttcgtgggctcgtcactgtgcggctcggtcaatgggaatttaccgtttcgcctacccttatgatacgtggcgggttgtgattgggtgggaaggcgaactgtcgcctaggtgggctatatatccccctcttcccctttttcaccaccgcacccccatcattttcaccgcgagcgctccctcctccgtccttttcttccgcggcgccctttgagttgctagatctttcgctgttctccctcttcgccacagcgcacgcttttcgccatggctcctcgtaagccaaacccagcctcagcgacgggccctgatcccggccggatcaatgatgacaccaccacctttttaggggcttcgctcgtggatgacaacgagctggcgaagttggtcagctccggcgtggtggtggaggggcaggccttcaccccggggaaggccgtggtgccgaagcccagtgacaattggacggtggtattcgccgtcttctttgaggcgggtcttcgatttccatgcaacgtgttgttgccggagatccttcgcctcttccaggtggagctcccccagctgagtccgtcagcgctcgtccggatcgccatcttcgactgggcatgctggaccgccgggttcgaaccgagcgccgagctcttcggtgccgtattctttgccaccatgaactcgaagacggtggtcactccggctaggacgaagaagatggcgttcgggagtgtgaacttcaatgttcgccccgaacgctccgatctctggccggtgaaccccgccatgtcgaagtgggatcgccattggatggtgaagtggttctaccactccatccccttcgaggctgggtccgaagtggcgaaagccctacgatgtcggtgcagggtgattgcaccgaacaggaagcccaagttcgctgttgacggcgccatggaagcccagttcgccctgctgcgcaagatctgttcccgccttagttgtcgcgacttggtagaggagttctgcatgcttcgcattaccccctctcccagtcgtggcaagttgcagtcgatcaagacgaggaggtcgacggcttgccgaagctggttctgcctgcaggggcgaatagtgagtccatgcttttcttatgtgcatctgtgcttcgccctttttccccggttcgacgcttgatatggttacaccttttgttttcgtagtgttgactcttgatcaggcgacgtgtcggtcactgagttcagccagctgctcacacggcaggcggccggtcgggtgaaccgggtttatgacggtgaactgcctcctcggacgaaccccctcaaggccgatgacgccgcgggtccttcgcgaaagcggatgcgtgggcaagtgaagtcggcccctcgaaagcgaagggcccctgcctccactgactccgacgctgatgacgaagacaccgttgaagacaacgacgacggagaggagggggaggatgtgggggagacggaggttgcggccgaaaaggccgcggaagaggctgtcgacaaccgcgccgggacgcccggctacactccaacttcaagccccgagcacgtcaagaccggggtggagtcgaactgctccccccttcgccgaaaggatgtggagggggcgaaggcactggtcgctatcgcgtcagccaaggtggcaaaggggggtccggtcaagaagacctccaagaagatagggctcgtcaaggtcggtcgcgcttttagcgatgactagtcctccgacgaaacccctacttcgcctactagccgaagcttagggctttcaaccgttcctagcgccacgatcgatgcgggcggagcgggagggagtgttgccgggacctcggcttcgtccgatcaggttgtcaagaccgcgactagggtttttcagtagcccagttcgccagccggtcgtttcgccgctcggccttgggaaggggaggaagacggcggtcgaaacatccgtttcggattactcccttgcggcgccccatttcgcccctgccaatttcgagactcgggcggagcttatcccttttgttgagggggtgagcaacctcgtcttcccggctggtagctcgagcctgttcatggagctaaacgagttcgatgagggctgctctgccattaagagcttggcggttcgggtacgtagcttgactgtgttgtgttttttttaatcgtcgtttttcgacagcttgtcttaacattcgtcctatctctcttatcttcgaaccagatcctcgcggcccactgttcgaccgaatgaaccatgcgggctcgtcttgacagtttgaagaatcgtcttcgagccaaggacgacgaacttggctacaagagcttggaaatggaaggcctcgcccacacccttaaagagacaaaggccgagaacaagcggctccaggctgaactggaaaaagggagtgaggcgaaggcggagattgagcgcctcaaggccgagctcaaaaaagagcaaactcattccgccgctctgaccgactactacaacctcaccgagccgaagatggaggctcttcggcaagaggttagccaagcggaggcaaacgccgagaaggaggcggaacggttcgcgcgggagatggcgaaggccaccgagtctgcgaagaccgcgtgccaaacgctctgccttgccctttccgacatgggggcgagggtgcgtggagtccctggcgaatatgcttccgcctttgacttctcggagtggactcagcaggccggcggtgcggtctcggactgcgccagtgcatacggtgattgctgtgcacgcgtgtcggcggccttcactatgggccttctgcagcagttcggctgcgagaacgttgccgagttccctaactttgcgaagggggactgggaagttagtgcgcaggacgtttcgtgcctggcggaaacagttctggcagagggatggccgatccactgccaaggcgcgtctccttgagcaactagcgaaggtagaggcggcggaccagggcgaaggggaagatgctacggccggagagggtagaggcgatgccgaagatcacccagaggtgtaaggccccctgccctctctttagattttgtagttttcttttggcgtttgccgtggagggcgaacgatgtaaatttggccgatggccttctccccttcttattgtagccggaaacagcctttttgatatatgatgaatggatgactccagtttagtcaactattgcgttatcttcgccttattttcgcgtgcgaaagggagtctactcttttcgcccatttgttcgtgtcttaaccttgcgcttttccatttacctttctagtgctgattttagcagggtattcgctatcatgcctagaaattcacaaaccagaatttctaagctgaatgtgcattaaacccctgtccaggaccagccagggtacacaaatgacaattgttgtcatacagacccacgtcttacaaaaatataaaagattacaaatgcagcggaaaaaggtaaaagcgaactaagcctgaagacttgactcctgcagcgggcgactctattccacaggcaatccttgacggcagcaacaaaaccaacctcaatgagacagctcccactaggaagatcttcaactctagtgtggggaaaagagagcaagattgagtactacccactgtactcagcaagtcataccggaagaggaggtatgatgcaagatataa

SEQ ID NO: 21654 - DNA, 2101 bp, Oryza sativa
catggctatacgaatagttaaactctgatcagaggtgtacaaccgtacccacaagacacaggcccacgacacgtttctgtgcaccgacataccaacacgacataccggaaagaggccgtgacaggacccttcacataaccccctctaaccaatcgcaccacacctcaggtttcacccccactcctcgcaagggagcggacagtcccctctcatgccacggtgaatccggaagccgatgaaccagacaccccggccgacccaactccatcacgcccacccttgcctgggtactttggctagaggaaagctacactacaaacccagccgttgcccacgctggcttgtggtaagtacgataagttcttcgactagcaaaaccatgcacccacaacccaccatgtagtgtattttaattagctaacaccattgcggtggcactattccaaagctatgccaataatcaaagtctatgtattaatgtgattccccctttgtgtacaagttgaactaagcatggctaagtattccctaaaccaacatctaatcattttaatacccaagttatcaatggcgtaagggaaacaatatatagccgagtaataggacccatcccacatgatattgtaaaacaatgcaacatttaatagaaatgcgggacatttgtaagttgggtacaatatgataaattgtaaagcatgacttgccttgctctcgcactgatgagaccacagtaacgtcttcgagaaaccgcggatcgacgaaacggccgaaatctacgcgacaaacaaagcacacaagcaaaacatgctataagtctactgaaacaggaaacaaaactatttttaatggattctaagcatttttatgaatttactgagacttgaatggacttaaacggagctcggatgaattagttatgaattttagaagattcactgtgtttttactataaaaagaaaatccttaattgaattattgcgcattaaaggccctggtgacatcatcaaacgaggaggatggcgccaacagatgggccccacttgtcatcggctcaaggacatcggtccacggtggaccaagtctacgggacaggagaggaggggcgcaccacgtggccggccacgcgggccacgggatggacggccacgatctgctgggaggcagatcgggcggctggggatgggcggggccaaagccggcccggcatggcgcacggcggcggtggctggctaccggcgaccggccggtggcagcggctggcgacgtgggcggcggcgcatcgcggcgacgcgcatgcggggagcggcggcgcgcgcgagaggaaggaaaggggagagagttctcaccgaggggttcggccggccggggaaaggcgacggcgaacggcggcgacgagcgaccgggagatggcgacgagtggcgaacgaactccggatgggcctaaggagcacaatgagggggattagagagagagagagaaggcctgctgtgagcggaaaccatggccgaaggcggcggcaatggtggtactcaccggcacgaggtggacggcgatctccggcgacagattgcgacggacgaggggtggacgaggtggccctcaggcttgcgaacctgacggcggcgacggcttggttcggtggcggccctagcagcggctagaggcggccggagcagtagaagaggcggcggcgggtgggtgcgcggtgcgagggcgatagggagctcgagagcgggcggcgaaagagggaaaaaggtggagagaggtgtggtggtcgattatatagaggtggggaggccggacgtggccgggagcggcggttccgcggcgacgacgtggagaggtggaggaggagagagaggcgggattcaaaaattgaatcccggccatctcgcgggcgctggcgtgtgcgggagtggggcgtgggtgcgggaaaagcgggggcgcgcaggggagtgggtgacatggcccgggacggcgggagggcgtggcggcggttgaggagggaggccgcccctccggctggagggtaggggcgaacccgacaggtgggccccacctatcggcgctcgggaggggagggggagctggatggacttc

SEQ ID NO: 21655 - DNA, 11449 bp, Oryza sativa
ggaaggaaaaagggaaaaaggaaaggaaaaggatttccagggaattctttaatgattgtgctgaattttaattggttaaaattatttcttgggctctgaaaattccactaaaaatcatgttagcatattttgatatgtagaacccaagaaaaattccacatgccattccgattattatttgcatttattaatttagggaataagctcaaggttaaataaacaatttcttcggtcgatttaattagacaaaatttttaaagcaagaaaggggaacttcagggcgtgacattcgccggaaattgtgtgttcggcctccctttgggaatcggcgaagtaagaacgagaagttcgtggcggtgaagggtttgccgaaggtgcgatgtccgtttcggccagtttaccgcgagatgataataaacggcaaaagctacaaggttttgaaggttgtcggctggatgcgggcgcaccccgggcgaaccctggaggactacgatcgtgtccatatagaacgccgggaggacatggctcgcttttggcgaaaccatcagaggaccgatcgtcaggaagcgatcgcccagcgtcgttatagtctagtttgtgttccacccccctccctccttaggatagtgtatgacattagtagtgatgacgaaccatgttcgtcgaatcgttccttagggagtggggattgctttgggggcggagacgtaatttatttgtaagctaggctgtaaagccggtgctatttgtacttgtatcatgttgtgtgactgcatcctccgattattttttgaaattaataaagatgtgttttatttccttttcgctgtttttcgcattgtcacctttcgtgcttttgttaggtcgaaccgtgtcaaccccattgcgtatactagcgaaataggtatgctgaattttcagctttcgtcttccgtttttggtctgtggtattccaagctgaaggaagcgcttatgttttcacatggatcgagtgtaatggcgttcggttagttatttcccgaaacaagctgtcgtggtttcaacgctcggcgagcgttgcttcggccgattcgtttcgtccccctggcgttttcgctgatcaggcgtttgccttggggtttttccacgaattatcattcagacaagtgcgaaagacacaaggattttttactggttcgggccgccaaggtggataatagccctacatccagttttttttccttttttcattttcctctttttttttgtatttttgtgctgaaaggcttacataatgagagatgccgaaaggcctatacaaaaatatgtacatttttacaagttggcgatttgggtgccacccattctagacatagaaacgcttaagggaagtggcgttccaggaatggtcgaactcttcgccttccagcgttgctaggcgaaaggagcctgtcctggacccgtgtttgatgaggtatggcccttcccacttcgattcaagcttcccggccgccaccgggttcgtcttcttccttaggacgagatggccaagcaatagctctatcagtcgaacctttttgttgtaagttgccgaagtgcttgtggcatatttgcgcatgtgttacagtgcttcgactctcacccactctaggagttcgagcgacacctcgcgcccatcttcgcctccagagaacatcacccttggtgaattagcccctagctcagttggggtcattgcttcatcaccatagagaaggatgaacgggctgaacttggttggccttgtgggggtcgttcgaatggcccagagaacagatagcatttcgtctggccatttacccttcgctaccccctcaagccttttctttagcgcctcaaggatcttaccatttgttcgttcggccgccctatttgactgtgggtgcgcgaccgaagtgaacctgatttccaggtttaacccttcacacatctctctgaacttgtcagaatcgaattgcttgccgttgtcggtgatgaattcttttggcactccgaaacggcaaacaatgttttttccatacaaacttctgtactgctgccgaagtgatcgcgccaagtggttcggcctcgatccaacgggagaagtattcaacggctgcaattgcaaacttgtacctatttcgtgccataggaaaagggccaataatgtctagcccccacctggcgaaaggccagactggtgcgataggttgcagctcgtattggggtgcagtttggcttcggccatgccgctgacaactttcgcacctcttggtttgctcgacacaaactttcagcatggttggccaatacaccccctggtgaaacactttagaggcaaccgtccttgcggcctggtgtgcaccacacagctcctggtgtatttctatcaccatttcttctccttcggcaaagaagatgcagcgaagcaagggttggagcaccccggagcgatacaactgccctgagaccagcttgtattttgtggctctgagctgtaagcgcttcgcttctgcttcatcttctgggagccagtcattcttgaggtacttgacgaatggagttcgccaatcttctgggtcttcgcccagctctgcctagtcgattgccatgatgtccaggctttctgtgggcacacttggtgcatacaagacttcaaaaaagatgcctgatgaatgcgggcctccacaggtagcagattttgcaagggtatctgcttcctcattctggcctctaggtaagtgttcgaccgttatgccggcgaagcacttttccatagatcgaactgcctccagatatctcttcattccttcttcttttgcctcaaaggacttgtcaacatgacttgccaccagcttggagtccgttcgaatgagcaagtgccgaacccccaatgcttttgcctttcttaggcctaatagtacagcttcgtattctgccatgttgttggtcgtgtcgaactacagccttgcggcataccgaatcggcacacctcctggcgaagtgagtactgtcgcggcgcctgcccccttgtgcgaccacgagccgtcggagtacattacccatggctgttcgacgggctcgggttcaggggcgaatgctggtgtccattcggccacgaagtcagctaggacttgggacttgatggcggtgcaggcgacaaaacgcaggtcgaagggggataattctgccgcccacttgcagagtcggccagtgatttctttgccccgtagcacttcgcctaaaggatactgcgatggcacagtgactttgtgggcctgaaagtagtgcttaagctttcacaaagccatcactagggcgtaggcaatcttctccatttcaatgtatcttgtcttcgccccttgtaacgctttggagatgaaatacactggtttctggcctgactccgtctcttgaacgagagctgcactgatcgccaccggcgaagctgctagataaagtcgtagttcgcttctcggcgctggactaactagggtaggtgggctttgcagattctactttagctcgttgaacgctacttggcattcgggtgtccagctaaattttcccgtgccccggagggtcttgaagaagggaaaacctttttcggctgccttcgagagaaatcgactgactgccgcaattcggcctgcgagcttttgtacttcgcgtacgctcgacgaaggcttcatttgctgaattgcgtcgattttctcgggattcgcctcgatacccctttcagaaacaagaaagcccaacagcttgcctgcacgaacaccaaaaacacacttctcagggtttagtttcataccagccgcacgcaagttgtcgaaggtctcctgtaagtcagacgcatggtcgaaagccttgcggctttttacgatgatatcatcgacataggcctccacatttcgccccaactgtttgtaaaggaccttatacaccagcctggggaatgttgctccaacattcctcaggccgaaaggcattctgaggtggcaaaacgtgccgaacggcgtgatgaaggctgtcttggggatgtcagccggattcatgtggatatggtgatagctggagtacgcatccaaaaagctcatgagttcgcagccagctgacgagtcgacaagttggtcgatccgcggcagggggaagtcatctttcgggcacaccttgttgaggtctgtgaagtcgacgcacatgcgccacttgccgttcgacttcttcaccaaaaccgggttcgccaaccactctgggtggtcgatctcttcgatcaccccagccttgagcagcttctgcacttcggcctttgctgcctcttggcgatcggcggacattttgcgcagcttctatttccttggcttggcatccggtttgaccgctagatgatgcatgatgaggtctgtcgaaacacctcccacttcgtcggggctccatgcgaagatgtcagtgttcttcttgagcacctccaggatattcttggcttcctcttcgcctagatcgccctctagcaggacaaacttcgtgggatcggcgtcatcgacttgcatcttgatcaccttgccatgaggggcgggcttcggcatgcgtttagcatggtcatgtggttcggcctcgatattgtgcactgccctgttgattgcggccaaatcgccctttgatgcggtcaaaggttgaagcctcttgatgacgatcacgcctgttgggcccggcatcttgagcttgaggtagttgtggtgggagatggcttcgaacttgttcaaggttgcacggccgaagatggcgttgtagttgtatgggatgtcgatgacatcgaacagtatttgctcttcgcgcctgttttcacttgtgccgaaagctaccaccagttgtacttggcccaaaacttgaactgcttcgccaccaaaaccacgaagtgaggctggtgcttgggtgagggctagggttggcaaccccatcttgacgtatgcttcggcaaagatgacatcggccgagcttcccccgtcaaccaggattcgccggacttcgaagccaactacctcggccgagatcaccaaggggtcttgatgtgggaatagcaccccttcagcgtcttctggcccgaaagagatttgctggttcaagtacctcggagccccttcgcctgccgcggtgatgttgtgcaccgttcgcagctgcatcttcttctaccgcttcgactgttggactggcggatcgtcccttgtaatcatttgaattactctgcgctggacatcctggcgctgttcggatgggggagcttgttcttgagcggcttcgcgaggtgcttcgacagcagccccttgctgcggccttgggtcttgagcgttgccacgccgccgaatgtttcggcattgctcggtagtgtgcgaggatcacccgtggaatgcgcaatagacgttcttcctgaccttcttgcgaataggctactgatggctgcctgcttgctgagcatcgaactctttgcggagggcttggacctctttgacagccatcacagccttgcccgtgcggtcatttctgaattttctccacgtcatgggagcttgacttggccttggcggctgtccctgattcgccagctgaggttggcgaacggtgagaggagtcggttcggcgacctgtgcttgtacttgggcttgggcagtggcgatggaggctttatcgtactcggcttggattgcttgccatcgcttggaatcctcttcgcctcttgcgtacccgtcgatgatgcgaagcaggtgctcgagtgtctgcggctccttgttggcgattttccttgtgagttcgccttcgagcagcccggccgaagcggcgttgatgatagacgcttcggttatatcttgaacttggcatcgggcttgcgagaaacgacgcatgtattctcgtattgattcccccgggctctggcgaatgccgagtagatgctgctgcgtcttcggctcctcataggtgcctcgaaagttaaggacaaagacgtcgcgcaattgctcccatgagtaaatgctattagctggtaaattgaaataccaagaacgggcgatgccatctaaagcgagatggattacctttgccttggtgttttcgtcgctgtgagcgacttcaatcgcggactcgtagatggacagaaactattttggttccgtttcgcccgagtaccgcgggacaggtgggaacttgaactgggttggtattggatggatcttgattcccccactcagcggcagccccttttcgccccccgatttgccatgacaccttgctgcgaaggcctgtttgtctgtggatatggcgtggcgaagggcgaagtcatggcttgcgtgtgtggttgcaccacagtgttcggctgtccggccccaaacagcgatgcctggggtgccgccatggatggatcgaacgaaggctgggtccaagccatagcggcctggttcggcgcctgatttgtttcgaagcctagtgtcagtgcctgtggttgaatggttggtgcttgagcagcgttgctggagtcgaactgcggtcttgactccaaggcgaagcccccggaccaggctggttcgacgtctgccaactgggtgcaccttgacttgtgttcccctccggtcgggccgaagggcttgtacttgagatgttgtggggttagttgagttgctgaaggaaagcttgaagctgtgcctgcaaagccgaggcccctttcgccattgcttgtgacatttggcctaggtgtacttgggcaacgaccggccgaacctgcggttgtacatgaggggtcgggtgtacattgcggccgaaggctgcccaacgaagtacactggcgcttgtatggcttgtggtggaaaggcctgagttgatgcttacgggtagacttagggtggaatgtagcctgctgaatactggaggattggggccgaagcgaccttagcttgccgtgctacctcctacgcctgctgctattcttgcatctggcgaagcatgtcttggagtcgggtcatgttttggcgcatggcctccatgtcggcttcggcttgtgtttcgaggttggggttgacttgcgtagcggcgagcgcagtcgaagccgttgccgactgtgacgaagcagcttggggcaccagcagctggcttgtcgaaaggatctccgccctggtctggagcgcccttgctgccacagctgccttcgccgtgtcgaccgtgttcggcaccagccccgacgaagcggcaggagccgaaggtggcggttgcggtgcaggtgccgaagccgacggtgcccccccggcttcgatgatgggcgccgaaggatcggctccctcttcggcggccatctcctctcctgcttcgctcccctttcgcttcgcaaccttctccttcacgaccctcttgggtggcattcgccctcagtggtttcgctcggaggtccccacggtcggtgcaagctgttgtcgaaatgataactgcatacatcgaaggacgtggttactcaacagtggttggaaagcagtaaaaatgtattaaattgagagtttttcttcgaaaaatccccctttacatggccctagggatctatttataaccctattacaggcccccccccctatttgggtttaggttttacaggggaatttacatggttccccttataaaagggacatttacatgggcatacagtgcaattgaggtgcatgggcctctaatgggccaaattggcgatcgctggcccaatggccaacgggccgaagcggctgggatggccccttgggccttcccggagctggcctcgatatggcgaagtcatcctccttcggcgttcgcccttcgaccttcgcccaggatgcacggtcttcgccatgaggcttcatcctttgtcgtcttcgctgcatagtcttcgccatggagcttcgccctgataagcttgacgccttgagcctgaaccctagttggttgcatggtttcggcaagtctggtcgaagagtctcgtgacataccgccaagactaccctaatcgacaaccaagaagcaggctaaagattatagttctaagcacgacttatgagatcaaacttaactgatgcagccataagtatgaaaagaaagacaatatctagacaatcaagccattggcagcttcatagagtggtagatatcctatataatctaagttaacgttggtacttaacctaatcggctgccttctagcgatagatgttagccgactggagattagataacaatattaccagagattatatagaatatataataactcgacaacttacataaacaagattagagtatcataaagatggaagcactaatcccgagaacgcaagccgccataacaagttttacctctagttgaagatcaaaaccgatgcagctcaacccgaaagcaagaactcgtcgaaacaaaacgaaagtaaagggtggcgatgcgccgagattgtatttgagcgtgtgttgtttattacatggggctcggggtctatttatacctgagattacaaaatatgtccttgtcggacacgactcctatctctaacaaactctaagataccataagtctttgcgacagacttttgcccaaacttatctctaagtaaattacataaaatatcgtaattaatagatacaattgccttcttaggactcaatccgtgtgtggcaatccatatgaagcacttcaacctaacccgatgacgtataccgagtcgtattgtcggaatcggctcaatcggctaaccttatccgactcgaactctgccgatcacggtcgcagccgattcggacttagccgtttcacgctctgtttccggaacgatcttcgtcctcgattccgcttcgatttgatcttcatctccgatgcttagattaccaaatttggtcattaacatttatatatccgattcaaatttgaatttgaattcaaatattttttatatatagtatttctatacatctaaagtttatatacctaaagtttgtagacccaaagtttataagtcaaaagtttacatacccgtttcaaatttgaatttgaattaaaatgttagtttatagacccaaagtttataagtcaaaagtttacatacccgtttaaatttgaatttgaattcaaatatcagtttatagacccaaagtttataagtcaaaagtttacatacccgtttaaatttgaatttgaattcaaatattagtttatagacccaaagtttataagtcaaaagtttacatacccatttcaaatttgaatttgaattcaatttttttatatatatagtatttgtatttctatacatattttttccaactttgtttttttattttttaaaattgtattgtgtactgtagtataggggagggatgggagcgtatagggggagggatgggccggtgatcgctaagagcgatcacccgcccattagccgtccccgttttggattgctaccaaaacttagccctaccaatattttggtagtttaaataggacatgtgcttggtttggattgaaaccaatttattggtgatgcccatgctagattcggcatcaatctacactagaattcatatgttggctttattttggtagcaaaccaaatacatctttgccctacccaaaaaattgatattgccaacattagcctaagtttcagcactaccaaaaacttggcatggtagcactccaaatagacctgctaatgtctgcaacgactcctgccgtcccctgatacaagtaattttgggtggatctgacgcttccggacatgtctccctcccacccaaaatcccttatattatgggacggagggagtataaaatataagcccatgtacaatcctaatgttgaagttgctgaatcatacaagaatcgatgagcctttgatgttataaaatttgattattaaaaatattgttggtcaaaactagcaccttaaagtaaagaaaaaagtattttatgaaggtcaggaatatttttttatggtatattatatttacatgtgttttatgatagtttaaaatatcaatttttaatatcttttttaaaaaaataattttaattcattttttttttgtcctcgaataattatcactatctcagtttcatttatcatccatcagctagacatgtgttcatagttttctttttctttttcatgatagaaataaatccggcctcttctttgagacatataatgcgtgaccttaattattacaatcacagcatacagttattttcatgccccccaacattgaaaacaataaatattatcatatatataatttttattcgatgttcttcaagaggtgtacatataaattaaattttcaatgtatagctaatcgtgttgctctcatgtcctattcccaattcaatgcatgactggaacttgtgcggaatgtggataaaattcacaattcaatgcacgaccaaaaccaaacatattgttagcaggtaaaataaaagatagcaaacaaaatatattgaggtgcaatccttttgcgcacttgcgaaagaaagatagcaaacaaatcagaatactgaaaaaaatccttattgtcggagggtgaactcctcaagcgggggatggagaggccccccctttgttagttcggttgggggcagcaggtgaaattcgagaactcggtggaaagcgtgatgtagagggggtcgggcccctcaagaacagtaagacaaaatgggtttatataggttcgggtcactaggaagcgtaataccctactcctgtgtttggttgagcgattaagaattgcaggtgcttgagtcatcgagaaacaagcgtgagcttgccaaaggatcgatccctccttctctcactaggcttggacttccttttatatctcaaggggctgccacatggacctagagctctctctaggggacagggaggataatcgcattaaaaacatgtcttgttccttgactcggaagccacccacgagcgccttgatcgtggggcctatcaaatcgtgccacctgacacgagggacgctcgtgtcattcgtcatttaatgggtgaagacttctgtgtccccattcgcgcaacggagatcttgttctaaccgtagcgggcgaatcgactccagctatgatgatgaggggacagggcgggccgcacgccgcctatcacacgcgctagtgcacctgacacccctggtcccatcggtcattcaaccggtcactggcccgtcatacaccggtcaggcgcgctccacgcagcattaaatgcggcgtggcgtgcctgctcaagccgccataaatgcgggtaggtgggcgttttggagacagccacccagcccatcgtacgtggcgacccacggagggggtcgggggagttacaaagggggcatccgccgccctacctcgggtccgacccccgtcgggggagggccacgtggcattggggggcagcctcctcccttttgtctt

SEQ ID NO: 21656 - DNA, 18359 bp, Oryza sativa
  unsure (1)..(18359): unsure at all n locations
aatgtgtgtgtgtgtatatatatatgtatatatatatatatatatatacatatatgtatatatatatatatatatatatatatatatgagttggattttttaccacgcgagttcacatgtacccacgatctacaccctatatgtagcttgcacgaatcttagggcaagtgtgtgtctatatatatatatatatatatatatatatatgtatgtatgtatatgaaaaatccagatttgcactcgggttcacatgtacctacaatctacatcgttgatgtgttccaagattcgtactgcaaaatgtacctaatcttaaccaaatgaatgcttactatagggagaaaagattagcattaggttggttcacaatatgtataacatgtgtgttgcattttttaccaaatatttttttcaataataatcatatatgacatttatatatctagtgcattgtatttctctaacccttattttgtttataacatgatatttagtcaaaatgagaaaaacaatatctactatatcaccaaattatcatctcgcaaaaatgatacttccaaaatggtatatatcctaccataaaaactatataaacaaggtaatttatataaaaaaggtaaactacataaacaagttttgcatacaagaaatataaaaattacataaacaaggtattttacacttgtaaaaaatatagtataacgtaaacataatgcatgttacattttgttagcaccatatatatatacatatatacatatatgtatatataatatacatatatgtatatatgtatatatacatatatatatatgtatgtatatatacatatatatgtatgtatgtatatatatacatatatatgtatatatgtatatatatacatatatatgtatatatacatgtatatacatatacatgtatatatacatgtatatatacatgtatatatacatatatacatgtatatatacatatatacgtatatatacacatacatatatacgtatatatacacatacatatatacatatatatacacatacatatatacatatatacatatatatatatatatacatatatatatatatatatatatatatatatatatatatatatatatatatatatatatatatatatatatatatataacacaacacttaaacgcttatactgaacataaccaaataattaaattccaaattgaattgatttggtgtgggggctgaaaaaagcagctaggggggacaacagtatcatacatatatacagaccagtccttgcgtgaggtgagaacaggaagaacagattgtactgtgaaatatatttcgatacttatacatcttgagaatgactcgccaacctaaagtgggtgaaaataattgacaatctacctgaactaatatttggtgaatgtatccccatcgtatgggtgtgatctatgaaacataaggtttaagacaagagagaatctattctataccacttagtgtgttcgagttcaatgatttactatagacattgtctctttttataatatatcaacgacttttattaattgttctacagtacaccattggctgaaacttctattcaaaaatacccaaaatacccttagagacatacaagattaacaattgatttatctcatcagaagttttaaaaaaatatgaaaatttttatgtggcctctttacacaatttggaagtttgtatacaagtttcaagctttttcaagtatatttagtttttagaaaaaaaacatttttaagtggtatatgagggagaatttgcttatacaagaggtaatagcataaaaatatcttatatagtgaatgaaagatgatttatattgaaaacaacaataaaaaagtattttatatagcatataacaaacaagttatattttgttaaaaaaataaaaatttagtaaaaaacttgaaacttctatataaatttccacgttgtgtaagaaagccacataaaaattttcatatttttttaaacttataatgagataaatcaattgttaaccttgtatgtccataagggtattttgagtatttttgaaaagaagacccaacataatggcgtattgtagaataattgataaagtcaccggtatattatagaaagcaacaatgtcgatggtaaattattgaactcgaagaaactcaatggtataaaatagattctttaagagacaatccatacacttatatagtcagttaaacattatttatggcagtgttatggtaaccaaacgtacgaagagtaatatctttactattataaaaaataaatatgtttttgtcagtactttgttacgtcatccgtatataagtcgattttgaagttcgttcgtttttggaaatatatatctgtatttgagtttgttcgcttttgaaaataaagagggagtcatataaggaatattttaaaaaaacctgcatgctaacttggaatgatcggactcctaattatagctcatgatttttttacaaaaatatatatatccaagcgaattctcacaataaaactattataaaaactgaggatgtttttactgctactttggtacgtcatccatatatgagtcggtttttaaattcgttcgcttttgaaaatacagatctgtattttggtcgggttctaaattcgttcacttttgaaaatacaggagcaattgtataagaaatctctttaaaaaaaacttacatgctgatgattagactcctaattgtagctcatgattttctagaaaaaaaatatatctaagcaaattctcacagtgaatctcaccttcactaaaccatataacaatagtcttcccccgttgcaatatatgagtattttttctagtaatatagaatattacgattattgcaccaggctcttaagatgaatcgggaagaaaccttttctgctgcagtggaatccttaatcatgtccagaggtaaatcaattcacagttgcatttataatttattttagaattgttcatgctcattcaaagtgcaaatgaaatattggcataaatagagctcctgtcattgtgtactcactttattttccaatcaatatgtgaagtagctttttctacgggtatcatgattttgctacaaaatcaaccatgttggcatatttactaagcataattttgatgaacacctacctgtgaaaaggaacatcatagtgtattatctatactaatactaatataaaaagggatagctgttaccagtgaattttagtaagccccgaagttatcatcggtctagagtcgctttagagtctatggaatcggtcgatgggaattatcaagtcaccaatagttagattcttgatatatttactaaaggaagtttatcaagaagagaccgagttcaaaaaggatacggcataacagtttatctattaattaggaataatctgttagtttccttttatctttaagaatgtttctttcttgcctaacaagaactagtatctatccatggatataaatatgtacacccggggtcattgtaaactatctcatagatcaatacaactactctcggcgtatcaccaccctcttttccgaggtttttacttatcatcggcggaacttggcacctgacgtggggctgcatcggctttcaatctccggcgaaggggtaagtcatacattctgtcggtcctaacaatcgtatcagttacgttgttgttgtttaaggttgcatcgttctcgacctcttggatctctctagtttggttggtatgtttctctacctactcccttcgtcccattttaagtgtaaccatgagttttcacgacccattttaatcattcatcttatttgaaaactttttataattagtatttttgttgttatgagatgataaacataaatagtacttttctcgtgacttatggtttgaaatttttttaaaaaaaattcaaataaaacggacgattaaagttggacgcggaaaatcatggttgcacttaaaataggacggagggagtacttatcatatatcttagttaatctagtcttagaatctcaatttagttatatcggccatttttcgctttggggtttatgctggtattggctaaatcgttttactagattagattagctaaggtattcaccaccctcaaaggcttgattgtttaaactttatgcttctttgcatactttgtgatgtatcatccctagtcgtgtttcggcacggccacggccacccgtgggttcctgtgagttcaccgtaggaatgctagtagggaaaaaatgaaatggagggagcagcatatagggcctatatagctggccaaaaattttgtcctacatatcacatcagatatacagacacatatttgaagtattaaatgtagtctaataacaaaaacaaattacagatttcaatagaaaactgcgagttgaatttattaagcctaattaatccgtcattagcaaatgtttactgcagtataacattgttaaattatggcgcaattaggcttaaaaattcgtcaggtaattttctgaattacctggcgaactgtgtactttatttatttttttctatattaatactctatatatatatctatatatatgtctaaatatttgaggtgacagagtgaaaaatttcgtttgtgaactaaacaagacccatagatgaaacgccttgcgattttccgtaaaagattccgatgttttgggcttgcgtcagtttgggggctcaatattttcggtagctctctccgaaacagacaccgcccagcccaagccaaaccgactaggaaaacacgggatcggttttataagggaagcctatccgtatcgtcgtcgctagtcgcaaactcgcaatcccactcccacagcaggacaggccacaggtcctcccaaatcagagaaatcttgaatctcgctattcacgcggctaggcaagcgagtccggtctttcctcccgtcgccggcgagcggctgaggcggccatccctttctggataggatacgacggctcgcgatcccctcccgcaggcaccgagcgcagtcggtgcccggtgaggtgagttgtctgataccagtgaaaagttttttattattattattttcggtagctttctcattgataattttgggtaaatttcatcgctgcctcaacaagattcgattcaccccttcctcgaaagaaagaaagaaagaaacgttattcccctttgatagagttttagcaatccgtctgtaaattgtttgctctgcatcttttgctaacccaacggatataagaaatcatggtttgatttctattgaaaccaccgctgcctgataagtccgaacccgatttaataaaatgtctagtccgaaactaaataggatcgaagtcgagtttcccgattagtacagacaccgaatactccattattatattatgatgtgcaaagccataactgattatgcttaattattttctgcagtttgatattgttggcatgatggcgaaacgatgcacggacatcttgctagctccccggccacgaaagacgaagcggattgatatcaattcttgcagatcgaggttcttgctcccttacatcccggatgaggtgatgttcgacgttctgttacgactgccatccaagtctctcatgcggtttaagtccgtgtgcaaggcttggcacgccatgatatcaagcccaattttcatcaacgctcacctcgagtggtcaaagctaaagccatcatcactgctcatggctcctggcttttaccagaagcagaagaacggtcagaatattgcctttctgatgggcctctataagtaccagggtggtaataataatgtagtgcatctgcatgattttccacgtgattttccgcaggtattggatacatggactcgccctgtgcactgcgatggtttgctccttgtttccaacatgagcaaaaaaatgattatctacaacccatcaacaagagagattgtttccctgccaaaagggagccgtaaccttcataagggcacagggattggatttgggtttgaccctcgcagcagcaagtataaagtggcgagagttttttatcaaagggatgacaaaacatcaatgttggtctgtaagtttgaagtgcttaccctgggcactattaatgtatggaggcaaactgaagacccaccttatccaattggtaagtcgactccagttcatgtgaaaggcgctatctactggatggtttctcgaacatcactttgcccagatccacccaacacacttgttcgattctgtttgactgatgagaagtttagtctgtttccatgcccatgcaatgtaaagccttcctgtttgaccggattgggggatgaattgtactgtggctattttttcagtcaaccactccaactggagatttggggttgtagtgttgttgggcagaaacctgaatggactcgacgctgcgctttacagattccacctgatgttattaagcggcctgtagcaagtcctttggttgtctttcatggaaaaatgttgctgttggcgttgaaaaaggtctacaagtatgacatccaagcctgtaaattggagaaaatacctttagtggttgaagacttcatgtgctatgaccgcgaaaataatatgtaccagacatattcaaagaaggaagtaatggatttccatctatttaattatgttgagagtctagtttcgattagagaattttgagaaatcattcttctcgtgttgtgttgaggagtgatctaaggttacagtagatgcctttctttctgagtagtgtcaaccatagacaattcttaatgagttggatgtatgctttctttttcgaagctaagtggtttaacagtaacaatgtattgttcattctagtattatgaattttcctttactctcatagtcctgttcattttgctgctgacatttgtgacattcttctcttatttttgccaacgttttattaggtacttacaagttggaagacttacatctgtcatgcaaatactcttggccatgtttttcttcttgtcaattgaggtatatattaacatgttaacatatcctgtcagttgagatatatactgcaacgaaataactatctgcttctgctactactaaaactgcggaaggtgctgacaaagaaatgtgctaccgtcctcctactctttcagacgatgatttttcagaggatgagaaccctgcagaccagcagcctagaagagagactgaaccaagctcgctcctccaaattattgattcttggcacaatagtaaggatgtctctagcaaaaaaaactcgagacattgatgggcttgttgattgttcaaggagtgagacttgctgcttccatccccaaattgcagcagttagcctggtaactttctgaaagcacaagtgctcgttgtttttgatcaatcatacatgaaacaaaatggcactcctatggttatctgtctactcaaaatgtatgttcggctatatatactggcaggagtcgtctaacaaagtagcattcttttgtttttctcagttgaagagggcacgtttatgatgtcatatggttaacaaagtctagagttctagagttataatgaggaggaattctggaacctgaaagcttggtagtttttagccaagatgttattatcatttgctctggtgagggtacatatcaataaggtggatcagtctgattctttttttgaaactttcctcgcatttgatgccatctattgttctccttttatgtttgtctatcgttattcataaattgttgttttccacacttaaccacccccaatggaagctataaaattattcaagctccagaaggggtagtagttggactccaatctgtaggcaacatcaaaatttgcctggcacgtacgaatagtggattaatgttttatcactttatttctttcctttcttcttnnnnnnnnnnnnnnnnnnnnnntggtttatcactttgggtgttgaacataggagcaccaggaggggcagtagttagaatccaaactgctgctgtgctctaagattcctgcgactctcagagtagtttataatccatcttggatttgttgcattactacacgcacacgcatactggatcaatggtctattactgtttttcttttctttttttcctcaaagaatggtttatcagtttgggtgtttaacatttgatgagctagtaaacttgatttggttaatgaaatctgcagtatctatgtactgcaggagccacacagagtgtttatttggcttgctctgccaccaatcggatttggatagtctcacatttatttgaagctaagtaacaagatgtcgattgatgtattgaaacatttatgtcgatgaggatataaatccaaaacaataaatgctagattgaaaaaaaaaatgatctaataattatagagagcagatcatctgaattatgtagtgctacaatcatttgaaaaatctatgccaaacattaattgatgggaagacaaatccatatcaagaaatatcatactgaataaaaatccaatggatagagtatataaaataacacaagatcgccgatttggatgtcgacgtcatttctatctcaatccaatccgcaagatatcaaaacatcaatggacacaaatctaaatgccaggattaatgcaggattaatgcaggagagaacatatataaattcagaaacagattgattattcattaccttttttttagaacagattattcattactaggattgcttaacgtctatgcctgaatacaaacaccagcaaagaaccatatatataatgccaatgagcaagacgaaggagaaaaggtaaagagaaattcagaaatactcgattgatctgcaacttcttgccatggcacccatcaagatcaataagattatcgctgctactttcttcatggttcttgtgatcatgtcctgcgccctcacatccacacttgcttgccgtaagttgctagtctatccgttccaaaacataaccatctttctaatttaaactgcaaatgtagctaatttaaactaaaaagttaactatattttgaaagatggagcattcattactcttctgtgtttttaattgttttcacgattacataaaagacaaaacacaccaccaccacatacgcacatataatatcatttctttagcagcgagagataatccataaactctcatagaatactaactctctccgtttaatattataagtcgtttgacttttttctttgtcaaaattatttaggttcgatcaagtttatagagaaaattacaacatctacgacacaaaattagttttaataaatttaatattgaatatattttaataatgtgtttgttttgtattgaaaatatcagtatatttttctacaaacttgatcaaacttaaaaaaaaattgactaagaaaaaaatcaaatgatttataatataaacggagggaatattaattaatggattggtattgttatgtgcagggggtgggacggagtgcaccgttgaaacgccacactgcacaatggattcatgcaatgcaaaatgcaaggcagaggccagcagccgcaagtgcaacaggatgactgctagttgccacaaatatgctagacttgagaagtgctgctgcacttttcacgcaaagtaatatcgacagtgacatcaaaataataataataataataataataataataataataataataataataataataataataataataatagtatcgacggttgatgacaggattattgcatatggttagattaatctcatggaacctcttatcgctttccgcgtataaattgatccaataaacatggttggctttatgaatcattatcatgtgtcctgcctggagttctctttctgttttctcatgtttcaaatataggtacgtgtgtgcgtagtgtgtttgtattgatatcggagtatatgttttggcaaaatgtgctgccagagaagtgggaaccaaagtcccccgtcctcggttatttgggcacatgagggcccgccaccgctatgatgaggcccgccacgaagcgaccaccgattgcctcaaggtctgaaggaaggtcgtccacgtgtgctggctcagaggttgccccgatgtaggaagggtgcctcaagaacagtgccaactcgagcgtgctttgactgccagtcaatgggccagggccttgaggtcggccttggggctagaagcctttctcagccacgccaccacaattaaggggatatgacccggccgcatgtgctctattaggccagtcacaatgggggtttcactggtgtgtcatgcacatttaataggggtaagactgaataaaaaatgattatttgcatgaaatggggatgagagagaaggaaagagtttcatcctggtgaaactcgtcagcgtcgtttccaagtcctcggtaacagagtgaaacccccgttgaggccgattcgtttcattcaccggatctcttgcgtccgcctccgccgtgcgacctccgcattctcccgcgccgcgccggattttgggtacaaatgatcccagcaacttgtatcaattaaatgctttgcttagtcttggaaacgtcaaagtgaaacccctccactgtggggattgtttcataaaagatttcatttgagagaagatggtataatattttgggtagccgtgcaatgacactagccattgtgactggccttatcatgtcatccgacattaatggtggaatgacgtggttcctgtggagaatcgtgggccatcgtgtacaacggaatagggcgtatgatcttccacttgcccatgtcgcccctaaaaaagggtgatgaacgggttgccaggtggcacggctttataccatgctgcctgtcctggtccgctagtttatggtcttctacctagtctcagtgcttgacagttgggccctatgacacccaggacaccctcctccatcacgtgccatgcgtcagaagggagtaggtgttcacatcaaacagggccctccagaagggccaatgcaagaccaaggttaccggctcctgtacgtaggtgtgtgtccaggcactatggtatccccttaccttaataaaaggaggactaatgcctccaaaaagtggttcaaaacctaagataaagagagactcccctctagtggtcacaaaaaagcttgaagaacattatgtaaactaagtaactaagcaagaacataaaagcagggtgttacgctcccaagcgacctaaacctgtcaatatcacttgtccattgcttgtacatgcgattcacatccaacctcgaacacttgcaccctaaccaaatctcaagagggggggtatctttccttcctgctagaggagctcgtgcttcaacaactagtgcgccaggttgggatgaacatgtttgagcttgcgttctcacatcctccattatcgccaaagggccaaagggatgccatggttggagggcatcgtcatgtcgattatgagggtgaagccagggataaggaagcggctagcgagcctttcagtgtcgcccaaactccgtcttgcctgtcgcattcttcgtcgagacgcgttgtgtgccctcgacagaccaaccatcatcatcacctcattgcacgagcggtgacggtcctctcgctcgccaaggggctagggagtgcccaactagctcggcgacgaccgcttccatcgtcccaagtgaaaggacacaacgcatttcggtgtagtgctacctcaactttgattctaccacactggggtgtgctccttgcagcgaaggcactccttcgtcatccgccacatcgggccggcagtggcactcctggggggccaatggatcaaggatgtggccaacctagtgggtgtcactcactgccaaattgctgtgcggaacccctgctccggctccatgtcgacgtcccatgtggcgccgagagttgcacagtcgcccattctatcaaaattaatttatgagaagacataaatccaaatcaagaaattcatgctgaataaaaatccaatggatagagtataaaaatacacaatatcaccgatttggatggcgacgtcatttctatctaaatccaatctgcaagatatcaaaacatcaatgagtacaaatccaaatgccaagactaatgtaggatagaacatatataaattagaataaatttagaaacataccgattattcattactaggatagcatggcgtctatgcctctatataaacaccagcaaagaaccatatatataatgccaatgagcaagacgaaggagagaaaaggtaaagagaaattcagaaatactcgatcgatttgcagcctcctgtcatggcacctgtcaagatcaacaagtttatcactgctactttcttcatggttcttgtgatcatgtcttgcgccctcacatccacacttgcttgtcgtaagttgctagtctatccgttccaaaacataactatcttgctaatttaaactgaaaatgtagctaatttaaactagaaagttaactatattttgagagatggggtactctttactcttctatgtttttaattgttttctcgatcacataaaagatgcaaaacacaccaccactagatgtgcacacatataatatcatctctttactagcgagagataaatctgcaaacccttatagaatacttatttaattaatggggttgctattgttatgtgcagagggtgggacggagtgcaccgttgaaacgccacactgcacgatggattcgtgcaatgcaaaatgcaaggcagaggccaccagccgcaagtgcaacagtctgactgttagttgccacaaatatgctacacttgagaagtgttgctgcacttttcatgcaaattaatatcaacaatgacatcaacatagtaaaatagtactagtggttgatgataggattattgccgatgtttagattaatctcatgtaaccccttatctatctttattgcttccctctataaattgatccaataaacatggctagttttatcaatcgtatcatgtattcatgtgtaagtgttcgcatcaagcagggccctccagatgggccaatgcaagaccaaggttaccagctcctatacgttgggtcctacttgtgtatatccaggcactattgtatccccttaactttataaaaagaggatcaatgcctccaaaaagcagttcaaaacgtaagacaaagagagactccctctggtagtcacaaaaaagcttcaagaacattatgtaaacactaagcaagaacacataaataaggtgttacgctcccaagtagtccaagcctatcaatatcacttgtccattgcttgtacatacgattcacatccaagctcgaacaccgcaccctagccgaatctcaaaggggggtatcttaccatcccgctagagaagctcgtgctccgacagctagtgcgccaggtagaggtgcacctgtttgagcttgttttcccgcatcctccattatcgccaaagggaggccatggctggagggcatcgtcatgtcgattccaaggggaaggctggtgctgaggaggtgactggcaagtctttcagtgccattctatcttgcctgccgcgttctccgttgaggcacgttgtgcgccctcgacgagctaaccatcatcatcactaggccgcgcgagcggcggcgaccctctcgcttgccaagggcactgggaagtgcccaggtggctcgatggttgttcccaccatttggagggagcaggcacaacgcgttccagtgtagtgctgcctcaacttcaattttgccacaccgggggtgcgctctttgtagtggaggcactccttcgtcatcactcacttcgggccggcggtggcactcctaggggttgatggatcaaggatgtggccgatctggtgaggtgttgctcaccgccaggttgccgttgggaaccctgctccggctccatgttgacatcccatgtggtgcccgagctccgcacagtcatctattctatctaaattaatttataagaaaatataaattcaaatcaaggaatatcatacttaataaaaatccaatggatagagtataaaatacacaagatcgccgatttggatagcgacgtcatttctatctgaatccaatccacaagatatcaaaacatcaatgaatacaaatccaaatgccagaattaatgtaggagaacacatacaaatttgaataaattcagaaacagatcaattattcattactaggattgcttgacgtctatgcctctatataaacaccagcaaagaaccatatattccagtgagcaagaggaaggagaaaaggtaaagagaaattcaggaatactcgatcaatttgcagcttcttatcatggcacccttcaagatcaacaagactatcgctgctactttcttcatggttcttattatgtcctgcgccctcacatccacatctgcttgccgtatgttgctactcttgctctttgttttttttgggagccgttttggattaaatctcaaaatatatcctatcaattctaacgcatgtactcaatttggcacaattataaatccttctttatcataatataaatttagcttccaattatcatcaatccggacacactcatctataatgctaccctatcaaaacattgataagtcctagtactatgagtgtctttaggtattaaaccaaacaaaccattaattattttctcaattatataaaaggcacgtaacataacatgcgcataccacatacacatgtattatcactgatttagcaactagagataaatccgcaaaccctcataaaatacttactaattaatggagttgttgttgtcatgtgcagagggtggtacggagtgcaccgttgaagaaccacactgcacaatggattcgtgcagagaaaaatgcaaagacataggccaccaaccgcaagtgcaaccgaatgacagctagttgccacaagtatgctagacctgagaagtgttgctgctatttttatccaaagtaatattgaccgtgatatcaaaataataataatctgcggttgatgacaggattattaccgattgttagattaatctcatgtaaccccttatctatctttgttgcttcccccatataaattcatccaataaacatggttagttttatcaaactatatcatatgcgctgcttggagttctctttctcccgtttcgaatagtacatgtggatttacttgtgtgcctgtataactatattgatgtcgatctttttaaaagatctatttatatcttagacttaaaaatataccatagattcgtatcacttactagatttgtattacacgactgcaacataatttgttttcttgttttgcctagtcaaaaggctccttgattcatgttcgataaagcgaataacattgtgtttcatctccaaacttccacgtttggacttatcttataatacaaattcgatgcaaaaaatcgcaatgagaatggtgccacgtggcaacaccggtttcgtggaagaggctcgacgaaaagatcttgcgtgtgcgcgtgcaacgatctgctcttgcgtgcgtgcgtgcaccggccaccagatggagtttcttccagaagcttcttcacgaatgtatcaaggagcaattaggtccatggaccatggctcagcaggcagtgcaatggcacacaagaagatgctggatgaaacgagatattaaccatacatgtaggatgtaggagtaacatataaatatccggtgctgcggtgcatgctgatcaatgcaaacatccagtgcatgttgatcgatgcatgaattggtgcatgctgatcaatgcaaacatccagtgcatgttgatcgatgcatgaattggcacattcagtagtccgtactccctattttgtacgcacagctttgattaattttcactttctttgtactctcttcgtctcagaatatagcaatctagtacttaatgggacatatcgtagtataatgaatatggacataaactacacaaggatatttttaagctcttcaatctcccgtctagattcactaatgttcatataaatttcgacatatatatgaaacacatatattgatccatgtataaatttattcaaaacccaaaacatcttatactatgaaatataaatttattcaaaacctcaaacattttatacacatacattgatccatctatgaatttattcaaaatccaatcattttataatgtgaaatagaaatttatttaaaacccaaaacatcagagaaaataagcccataattaagtggaagtatatactcatttgttgtataccgcgttttttctagtatactaccaaagtatacgaaataggcagcatctcttccatgagagaaaagaaatgcttccggaaaggaagcagcaaaaacgggacggaaacgttagaatacgacttctccgtgacagctcagcagctcattctccctcttctggtaggattccccgtcagcatgtgggccccaccgcacgccggtgcgccacgtcagcggatgacagttgcaactgacataactgcccccacctgccgtcttctcctccccccccggcccgtcctctccacggtgggccccacgtcgggacagggtcaaagtcccgctctccctcgtgtgtgatctgacggaaatgccccctggtgtttctcgaaggagtaggggtagtaccgtaattttccgtggacgctgtcttggtctggggaacgtgggctgctcgccgtcgcagactcgcgccggggtcagccagggtgggacccacctgtcagagtcccgcgttcccagcgcgtcgcggccgcgtggggtccctctcttccccccgttagccatttgttcccattcggttttgggcttttggctaatgcgtgattagtcagactaattcgtgattagtgtgtgtattatgtagctgatgttaccattagtgtttttggatctaagcgtgcaattaatctctgtgccttgctttgtagagcaaaaatgcaactctttgagaagccttacacattaatgttctttgtctaattattgactagaggaatatggttttttttccctcaacgattgcaagacttactacttcaaaaagaataaaacagttgcgggtttaggattttctattccaatctgttagagaattggatagcaaaagtggtatttggagtaatcagatgatcagctacaaagcaccacacttgtaccttacatggctcatgtgtaattgatctgtttgatgggctactataattagtagcagaaaatgcaatgtacttttatatgaaagatttcttcaatcctttcctcaattggtccattgggaatcctcatggccctttagcagttgggacaaacccacaaacccataataatggaaacatgtcaattgtcaaagctcacaactactaatcacatcccccacaaaaagcaaaagcatcattaatcataacaaagaaaaaacctccaataagttgagagcaactaactagtgacaagtactaattaattacccacatctcccaaggacccaaatgcaaaacaactcaacccctccacacacacacacagaaaaacgtgtaccaaaaaaacattccaaaaccaaaaataattatcagcctataaatttattattatttatgtcctccacacacacacaccacccaaaatcatccgattaattaatttgatttaatgtaatgtaattagggtggtaatctaaaattaatcacccctccccctcctaatctcacgccctcatataaaactccccacccgctgttgcttccgcatcacccattccctttttcctttcttgcgccatttcccaccgccgccgccgccgcccgcgcgcgcgcgagatctcgccggcgatctcgccggaggcgatgccggtgacggaacaccagggctcgtcgtcgtccccgtcgaccttctccttcggccgctccctcctctctctgcgccgcgaccacgtggccatgccgtcgggcgaggaggccgacctggaggcgttccagcgccatttcgcggcgagcctcggcgagctcctgcctggggaggtggaggggggaggcggcggtggtggtggtggtggtggtggtggaggggaggagatcttgtccgtggcgtggatccggcggcttcttgaggcgtttattctgtgccaggaggagttccgggtgttcgtggcgcaggcgcgacgccgcggcgcgctcccggcggccggggagaagctggtggtggagttccatgagagggcggtcaaggcgctcgatgtgtgcaacgcggcgaggg

SEQ ID NO: 21657 - DNA, 24168 bp, Oryza sativa
gtggtcgcgtcgcggcagctgcaggcgatcggggccggcctggccgcgccgcgcgcgcacgaggcgggcctcgcggcgcccgtctacgccatgggctgcgtgctccacctcgtcgcgtgggcgctcgtcgccgccgtcccgtgccccgaccgctccaccgcgctccaggcgcaccacctccccgcggcgccggcccgcgccgcgttcccgtgggcgccgccgctcctcaccctgcaagaacgcctcgccgaggagggaaagcgcaaggacaggcgcaactcctgcggcctcctcaaggaaatccatgtcctcgagaagtccacgcagaagcttaccgacgccatcgacgcggcgccgatcccgctcttcggcgacagggaggccgacgtgcgggaggccgcggcggagctcgccgccgtgtgcgccgccatgagagacgggctcgagccgctcgagaggcaggtgcgcgaggtgttccaccgcatcgtgcgcagccgcgtcgagggcctcgactcctccatgcgcaatgccgattgatccatccatcgatcgatcgatcgatcagaatttctcgttttgattgggcaacgtgttggtcctaggtagatttcttgttcttgatctgctttgtttgagttccaatcgtaatcgagtataaatgtgtactttcgtgtaaagaaaaggggattagagagggccatcataatgtaaagatggctgctttgttcctgtgctcttttttgttctcctgcatttggtatatatatctcatcaattttttgttcgtcattgcgtcttcggctaaactttgatgattcaatttatgttctagagctcatcaaagtaattttttttggaaatttagtccttgtcatggtttcctgactgttgctggatggtggtgttgtatgttcatatgattttgctttcagaagattgcatgccgacattagcctgaggtgtcattctgaaagggaggtgttgatggaaatgctgtcaaatatgaatatgtttttattgttcttgacagatttagtactggtgttgaggtacatgtcatgtgatccatgttcaatcttggaaagggtacatgtcatgtgatctatgttcaatcttgtaaaaatctgtcttttcatgaataggaagaaacctgaacaagaaagagatgacaattttttttttcagttttgtgaattcaattgagtcttttatgttgtggagcatgaaaatttgtggagtattggagattatcatccagttctgtcaccaaggtgtaggtggctagcattagtttgattgtttctacagccatgtgatcctgtcctgtttttttaagacaaacctgttcaattagttagttagctgtccatttctccacttttatactcttacctgtttcgaagcatgtcttgccataccggtaatagtcctctagatagtcaatgccatgaaaatcacagcggcaaaactgttcctgctttgaaggcatcactaaactgggaggaatgtcttcatcttcaagcaaaaggttgtggatttcagctgaattagtactgcagcaaaacggtatcaattgggttgcgcaattcttcgttccagttatatcttctgaaaatctattttctgcaatgtttagactacttgatggtctccgtctctttgagcgtgtgttaaagactcgcacctacaagtgcgtgcgtatgttgtgcttttgtggtggtgcattttgtgtggggtcttccatgtgattaattttttttagaaaaatgaatggtattttcagaagcttctgttttgtttgagcatgcatgacaattcagcagccacagatccctgtggtcacacagcattgtgggtgctgttatacctgtgacacagagttgttgataactgatacctactgcttatgctgagaacctgtctgtctccaatgtggtggtaggctcctcctccagttgttgctgcaataacagcaacagatcacactgaaactcccctatcagcaacaggaggaagaagaagaagatgcttcaaggaggtctcccccctgtcttcgtcggcggcgatggtcccggctcaccggcggtgtcacgtcgctggaggtcggcacggcgactcggctcatccatggtgtgaccttgaaaggccttgacccagtagtggtagtggtggtgatggagatggaaatggcagctgagctgagctgatgattcaacggtccaactgaattgttccacacgttggtcatcaggacagggttcagacgtgcagccaacacggcagcatgtcttgcccacaagggacattgcccatgagagggacaggataggatcatacagctttcaagtttgtgcataataagtgcatccagcaattgacctggtaccaggaaaaaaaaaagagtgatttcactcgttcactcatcaacttgatgtttggaacttggaagggagaaaaataaggaattccattttcaccaaccaaacagtatcatctaccatggatatttgtcagtttcaccatgggatgatgagtgaaaaaaaaacaaacacatatcatgcttattttgacataagctctggctggctggctggctggccatcctaaactgcagtgttacatacaccaagaaggattataactgacggcaaaaatctacaggaactatatggttgaaatgaaatgaagaaatcaggactatttatacaatcaaatctaacaggctggaaaaatcgttactgctaggaactttacagtgctaccaatcttggtgtcgaattgcggtgaaaactttccgctagggtaatctttcttgcttggtcagtagtgcactattggtttgataagggccaaaagtgcaaagaggaaaacccagtcatcgaaaaagttcagggaaggaccacatgataaacttggcgtagatgtcagtctccaggaactctatgtgcgctgctctgccaatcatggtgtttaggttccgtccttgcgcggactgatcaaagttcacatcacagcgcatgaagatccgggtttcagatgtgggtgcgcgcatctgatctaagcaattgttgagcatttctgtaaagacttggcccttccttgagttatctgatgatgcagccgggcagagctcgattcttgctgaatgatatggtacataaccatcctggtatggcaagaaaatgttacaaactcatgatttcgaaataaagatcattagaaatgctgaaagattcagagcagccacaactctgattcacatgtaaattaaagctgttaatcacgtggaaaggggataacctgtggtgaagatagaagtataatatttttgaagttctccagtgtcttcaactgaaaaggattataaaagggaacagcttatggccaattctaagatctgatataaattcgcaacagataggattactgaatgcactacagaacgaagcagagggtgataccataccttacaaagtttataaaagaatgtattctgggggtcttgatcatcactgaaagtgagttgatggatgcactgtgctcccttgagcttttttagaagccagaggccagagttgaataaagagtttgagctgtaccagtagcccaagtgtgggcctgatattgacatgtacgtgtacaggttcttcaagtatggttgtaatgcgggttctattcaacatgcaaagattgagttagcaccatcgagatgaacttgcctggaaggaatttattgagtaagttggataatacctgcaagtgcagttctgatgataacgttcccaatggaatggccaacaaaactaagcttcaattctttgcagcctccgtactttgcaagcttatcaactttctttttcaggaatgcaacaacttccccagcaagcctaccacccatttctttaaaatccccagatgttttatcttcgttagcctcagacattaagcactcagctccaggatccaacagaagccattgatttcgtacaagacgtaaatccagatggtgtccctgctttttgtacaccataataagtttcacccgaactgcattgtgactctagtgaagctttaatgaaataaagagtacttgcctgaaacccatgcacaaaaatgacagctcgcaatatccgtccttttttaccagcactgcttttcagtgccaaagaatctccttgtagtttaggtagtacaatcgtatccttttgttctgaagaatttgttgccaaatccttgctagagccatgttgcggaacaaccatgacatgttgttctataagaacaacaggaacacgtgaaggatctgcatatatttgcatatcttgaacggacagcgtgttgatctgcaggatgctttaaatcagtaaacgattctaaattaacaagtttttcactcataaagttattccaaaaaaataacaagccgaaccttcatttgtgctatacttttcctgtgcagttcagcccgtgaggcagaattttgtacaggctgcacgcaaatgcaaaatatcaagtatatagaaaaggagggaacaccgttttcctattgaaaatggttgttatttaattttaagaattcaagagaagaaaattacatcatcatggaacttccttgagccagaaactctcagaagggaatgacggtgagatgactcatcgtccgtactacgtaaatagcggtgtgggatctcaatttttgagtgaacagtccatattgaccattctgatttccggtcaagagcccaaatatcacgcaagtagtccaatatcttggttttatttatcctgtagatgcaataaatacattgttggacaaatagtagataaaactcataagtcaacatggacaaaccaagcggacagtccctaggcccactgaagatatgtatgaagtgaaaataagagaaacagtgaacttaacctatgaaatttcaagaaagcattccatagaagtgaaagttggctgctcacagttagaaacaattctaacaactcttccttaggaagtgtatatagcatagcatcgttggcaccatcaaccgcactgttgggtttctgtagaagttgtacaaaaaaatatcaacaatcagcaagtctcgtacaataaacacattcatagatcacttaagacggataaagatagcatacctccagaaagtcatgtaaaatgccagccaagtgcccaacacccttggtagttgccgggaaaactttatttgaattaggtagacctgattttgcaggctgaactgcctcatatttaccaagacttaagtcagcaacatctaaatcttctactgttttaccaatagcatcactgattttctttagttcttcgagtagcatttccctagaggttaataatgccttcacaatgtgatgcgatgttggtcctaaaccttggtctggtatctgcatattaaatgccattattactttgcagtcaccaaatggagaaagaaatcaccatgataaagcatactacattatccttcatgctgcaagaaccaattgattgaggagtaaatgttggctatttcgtgatagtaaaaaaaaaacctctatatgatcattgatgcagcttaaataaatttacagacaagaatccattagtatgctttgtgagtgatgaacccttagaaccctatagttaatctaccctgccgaaatctcaagaaaatattattttccaaagcaatgctaggggttgtgccaggaattggagtaaaaacattcttattttctgaagttaaatttcaggtgctggttcaggaattcaccatcaatgaacaccgccacatataaaacttcaccagatatgaatacagtctgcagttacctagttctatgcttgcgtccaaaggtgtttaaaaacattcagttataaacttagacatgcttccatagaagcaccgattttttttcccaaatgccaattaagctaaagttccacaaacctgtgtaccttcaatgatgatttagttgcaccagctttgaggtacacgatatgtaaagtcagatcaacaagcacggagtggaatgcgtcaaagtgaactggacaatatgagtgtgaaccaaggagtgctcgacgtgggactctaaattcatgaacagcagccgaagaagtggcactagaagcttgaatatcagacctacagaagatagcagcattagtattgatgacttaaaatccaaatttcataatatgaaattatgaatgcgaactcgacaatgtgcactgtatcgaaagcactatatatagggttacaaagtatctgctcacccatctccagcgttggggcatatatcagctcaaatttcaatataacagatgaagctgctgggcccttaaataaataaagcagatccgctgattaggcaacagcaaaattgattgagaaaggaaagggggtattaaagtgcccaacctcttcttcactgttgaatatgttaaaagacaccataactgatagataaatgtcttgtctagcatatttgattcgaaatggctgcgtgtagaagctgttatcggcatcatctattttccaaatgcccaatgcatcgtccgcaccaacatcagaagctgcacaatccacctagcatgtcattacctatcagctaatgattggaaattttacactttaaaatatgtatgtactttttttggactaaaaatttcttcagcttttgagtgtgttttattccctttgtaatctgtaaatatttctttaattctataaaatcacactgttgggcaaatgcctgacagtaatttacttcaaaaaaaaaagcatagacaatttttgttgagtgagaacacatattttacagtattataccgtgttaaacactgtagcacacagtttgtcatggtcaggggctaacgatcatcctttagttgtaccctcattgcccatcattgttttgcaccaaaaagggcaattatcataaagctaggtgccaaacacaatttgaccaatgagctcatccataaggactatatgtatttctctacagacattctgcatgacatcgtaattaatagaaacaagaaaaatgatgtatgacaagtctgtatggtaactttccgtatacagctcaacaacctctttgatgttatattaagcatgattcaatggtaacaaaacaggcttggtaatttaataccaacgagatagcactgaaaattgtaacaaataccctcccccgttttaccagttagaattattctcttttcaccatcatatggtatatgatacacacagtcaattattggcagtgatcaagcggttcacttttatcaatatggcagtggctgttactactcatcaagcacatcggttgtaaaggtccaagtttcaccatacatttccatcacaaagcatcttgaaatcatgaaagtagtagaagtagatgatgaagccttcatattcaacatcagaaatgatggacgcaccttcatattgcacgacccttgcaggtgaagctggcgtcttggaaccaccttcctcccacgttgcactaatcttcatttggtaccacctgaacataacacaaaactacccgttagagaatgaagcgacaaaacaccttggcataatcaacaattccatacaattacacacaaacattcaacagaagccaacatttgcagtaaactgtaaaaaaaaatgtgggcgatgtcaaaattcagcagctcgggcacaatgtccacagttcaaaggagtgaaggagtacaagaaagaactccaaaacagcgagctgaactgaaagaagactgcaaatcagcaagaaatgttcgaacaagcggagcccaaacatttagttaaaaatgcagtgtgatataatgaaaaacagaaggaagaattcacctaaaactgcatgcattttctcgattcgtcactctaaaaatgtgaccctttagcacaagccgctcgaactttccattctcaaccaaaaaggaacagaacccaagaacacattcacggaaaagagaaacccaaagaaaggccaaaaagcgaaaaaaaggatttcacgcggccgtacccttgctggaacagatcgaggttgtggaagcggtggatgtaaatggccacctcgtgcaccgtctccatcacgtccggcgaacggaaggggagcccgctctttccctccgctccggcggcggcggcggcggaggcgttggcgttgtgcacccgcctcaaagccggcgagaccctcctgaccgccccgcgcgggctgtcctcgacgccgccgccgacgaggcacctcatgcggccgaacatggcgcgacgtccccgcgccgcctcgcccgccccgatccgcgcatccctgcctcgatcccctctcgcctctcgcctcttcctccaactctagtctctagaatctccaaaccccctactccagacgacggcggcgacggcggcggcggcggctagatgccaacgcgtagacccttcgcttcagcggcggaggagtggcccccactcctcagtggggttggcaaaattcgcagatcgggaggcgacggctgcggctgcggctgcggcggcggccagtggaagcccaagccagaggcggcaggagcaggccacgcggaggctgtcacgtggggcccagctcaccggcggcggcggcggcggcggtcgggatcggaggcggcggagttgggagggaagcgcgcggtggccggcggtgggggggagctggtgagaaagcaaggagacgtcacgggggtggattttaatagcccgccgcactcactgacatgtgggccccggtggaatcccgccacagtggagcccacgtgtcagtgggccatggaccagtatctgacacgtggagcctagcgagtggacaggcgattatggccgtagctggacggggtacagcaggtgggtgtattagggcgcgcgctcctcggccccactcgtcagtggctcccctggcgccatcaagcgcgttcccggaaagcgccgtcgtaacgagcacgcgcgcgcgaaacccgtttcctccgcgtggaagcgggttttacaaatacgccttcgctttatttttagtacgggtgggccccaggggacgaggtgacagcatgattggcatgtgcgtatttttgcagcctgacagcgacacatctctcgtcgtccagacaagagaagatgagaagatgagatgagaacgaagacggacacggaataaacaaaagaaaagaattttcgcgctggtacttggagcttacagtacggtaccaatctttcgagtttcgatcaaaaagaaaagaaaacgatgaaaaatcctgccacccaatagatgagaatagtgcgtgtacgccgtacctttttttttccctggtgtagtgtcactgtcactagggactttgaacgggaaaattcagcgtccgattgatgacaggatgaatctttccaaattttgataatattaactttttggtaaattgacaacattatcaagtttaataggatttgctcaatataatattgtcaaaatttcatagacattaccaaaatttggtaacaaactaaatataactatataattaacaattttactaaataatggtatgatttgaaataacatcaatctgaacaagtcctgcgctactcgaatcatgtggagaacacggagaaaggattctcgcgtaccaaacatgggcgccgaaaaacgaaccacaaaatgtgccgtttcagaaaagtaaaataaaaagcacacggagccacctgtcatccatagcggtcccgcatgtcagaccgtggccattaccgcaggatagacggacggaaggattggatgcttcggcagcctacttggaaaaagcgaagcaagctcgttttaccacagtaagacaggctataagtaaactacaaacatattttaataagataaaagagtaaagagaacgggctacagatctgtaaccagctacagcacgaactccgagatgtaatgtgtgtataccaggtgagaccatatattaatagtatagtaaacattattgtatgaattggctagaaccgataatgggttataatattaaacttgctctaacagcacaagtacgggaaagcatggtcgagtgaagtggatactattgctgcgtactccactggactgaggagtgcagggagatcgatccacaagggaagggggaatctagggaaaagcagtaggcatagccgtggggatcatccatgatcgcgtcgcgcgcgtccggttggttgctgtcggctgcttttctcttcacggcatcgcatcgcatcgcatcgatcggggcctcacctcacatgcgaagcggcgcttgcacaactggacatcacgtagtactagtactacctccgtcgcttacttgtctttttaagtttttatttgttaatgtttgatcattcgtcttattaaaaaaaattagaattattatttattttgtttgtcatttgctttattatcaaaagtactttacatatgacttatctttttctatatttgcactaatttttcaaataaaacgaatggtcaaacgttgcaaatataaagtaaaaaacgtcacctattatagtaccagggagtaatacacatggttacttctgcgccatactatgttccaagagagaacacaaccgcaatttctgctccaacgcagcatcagtcgatcacattcacagaccagccaaacatgacacaacaaaggtcaccgctcacggctcacgggctacgttgtgcgtgtacaacaaatcgctgcagggaagtgacacataatgataagggaacatgtcaacattacagttataaaaatactactacactagtggtagcacattctgatccaaatcttttgtcaccttgcgctctcaacagaaacagagagctcttctctttttaaaacagaatccacagcaccaaaacccgccacttcttgcgggcaaatcaaaataaactacacgcataacaacagcccgatggcgaacataccggttccccaaatcctcaaatttgggaccatgcacactacaacacaggcaagcaagtaatcattctagaaccattcctttattttaagctttcacttcttgcaaggcatgggtcaataaggatttaggggactcccaaaacaatgcaaaacagcaagtaacagtccaagatcaggatcaaacagcaaatcgctgcacggtttgataccttccttacaaatcttatatgtgtaaacacaaaaaaagagaaggggaaattatatcccatttaaagtttatttaagcaccccaaatccctaaatttacaagcttggtagccagaagagatcattacacctgtgctatgggacacctcactagagggcctggtggtagttcaacattcacagagaactttacagaggtagaatttttgcggtttcgctaaggaggcacacaagggcgaaacgcttctgtctctagcgtgatgatagttttctctctaggtcgtatggttatcttcaacaagacctgctccgcactgatttcctcagctcctagggtgaacattcgtttcaagttgcaatcatcttgactggaccactttgtagttaagaatcaaatcctctggcttcttccagacataagcccgcactgtggccaagctcatttcgggtgccaaaacctgcttcatattagtaatatttatcacagaggtataagaacctaatgcaagaaaagcataatgatctccaaattgaaataaacaggattcagcatttgaccttttactgactgctataaggaaaactcaatcatacttgctaacaatttatagcaaatttatcttgaaacatcattattacttgttagtcagataatgtgaaaaagaaaatatccatgaatcaagcagaacaggttaaaaaaggtaaatttaccgcacatagtcacaacaaaaacttattgaagactataataacaattaagcatggctagttaatgttgtataatttccccttcagtacacatgttgtaaactgcatataaatattacaatttattgatatagcacagtaggaacctctcctgatattttaaatcagaaaaaaaaagccataataacaattgatcagaggctaaaactctgttgagaatgtgagaaaaatacatggtgtccataggtgcactagacttcaaaacattcggagcaacaacaaatatatgcagggttatagaattaaatgcatggttatagaattaaatctgaattcaaatccattattgaggattattggggatcacaatggacaaaacaggaaaacagtgggtattagtgatgccttttttgttagtggtaacattggccctcagcaaaggggaacagtacatagaaagaaagaaacaacagttgaatttagaaatacttgcctggctgttacacaatatctctacagaaggtttcaatttttgccatggttttagtccaagccgtgaagaactatctagcgctgaaaattgtgattggccagaagtcaatcccattccaaatgtgctgtcagcattgccatccagtggtctatcaagtttctcgaccacatagttagctacctgtacaaagaaatatagcttcaatagacataacacgatagtctagcaataacaaaacaaaattgctataaaaaatggtaacatttttcctactcaatctcagttgacttcttgtaccaatgtggcccttctctgttctttcggtttttgtattgattaactctctgcttgtttgttggtttgcatttgcactagaatctccttactaggaatcaagaatcatgttatgacctgtccagagcttagcatgtttttgctagtagatttttttcattcatgatagtagccttctgtgatttcacttctactccctgtaccaaaatttagctaccttagtacttcaaatttgaattacaaaggtagctatattttgggaaggagggaagtaatttgtgaaatttgcgaatcagatttgctaaagagggcggcgtcatatcaatctgcatggtattttttggggggaattgagtaggtaatcaatcttgttaagtcttgtatattgagtgctagacaaactaaaatccaggttcctgaagcataactacctaatattatctaggtagtaagttcgcaacaatgaatcaggaagctagctaccagcacaaaaaaaaaaagcatggttaggtagctattttcactcttctgtccatgcatgcaagatgcaacagactaatgtccatttagctattttcactcaattgttatgcatggatcgccagcaaacggctaaataaattcttttcgtagaagaaattcagcgtttgttaaggcccaggttacggagcagagatcatggataacatattctcagtttcccaaaaacctttcttttccgttttgagagaggggggggtttctatttatggatttcctaaactagtttcagggcttatacgtttcaaaggaattgtaaaggactgtcatttgtttcaaaggaatgcaccaaaggaaaatttcctatccctccactttttagggggaaacgaaggaaaaacataatccactccaacacaatgttttcaatactttggattatttgctacacaaccataggaaagtttcctatgtttttcaatccttaggtttgcacatgtattccaatactattcctacgttttgaaaatcctacaaaccgaacgagccctcatattacacgagttttcttttctttccccaaacaaacaatcagtgcagtcaaaataaacagaataacctaaaacctaatttattagaaaaactcctaaaaccaattatcctaaaacatatcaataattcttcgcatccaagcacctactaccttatactccctccgtcccaatatgtagcaacctaggatgggattaatcctaggactacgaatctggacataaggtatggtcagattcgtagtcctaggatgggttcttatgtccagattcgttgtcctaggaatcccatcctaggttgctacatattgggagtgtgtatcaagaaatttcaaagcaatcttactttgtgaatccgcaatatccgtggagcactaagtttcccttgtgttatgttcggtgcaggtgacccttcagcaggatgcaagtagaatccacacctacattaaagaaaagaaaataacatcagtgactagtttgttccatgacagttatgtctatgcaaaggcaccctgtgtataacatcaacttttgcagaaaacatcaatccaaatctcacttgctcgtactttcattattttcagtaaataccctaataagatccactattaacatgaaaatgggtcaaatccaaaaaggatatgcagaatctattgttttacaccctcaggaatttagcactgtgcagaccttaataaatagcagataatttgatgccttgcagagatcttaatcaaaccttgtggaaaaaaattactggtggttcaaatataggaaattgaatatatttaaatcctttaaaaagaaagaatagattatgccagtatctaatcatcattgtatagaactattagcactggaactttcaaagagggatatcagctaaccaagctatgccacaaaatcgtggcagaaaccaaatactcccccagtcccaaaatagaacaacttgtagcattcaaaatttgtcccaaaatataacttctcaacctacattctcttctcaaccaaccacaatcttccgctattcaaactcttcacctattgccttttctcaaccaatcgcaaccctccctcatttaattccacctactttcttaattcccatgtccaaccctaaaattccttatactttggaacggaggtagtatatatataatcacaatatgttcaacgaaagaggcaaaatagatgttataaacaggctttgagtaaattagtatcacagaggggacatttcatatcaagtccaaattgctagagagcacaaattttgaatttctgcaaagcgaatctccaaattaaggtataatgcatcacgatatatgttcaccaaaattcgaggaggaatattgaataatccactcaaacagccatccctgtgtgccctctagcaaacaacatacctaacgctcatatgttatacagttcacaaacaacagcatcaacgaaatttgggcttactattgcaactaaaatgccttgaccttctaaaagcccgagattccacgaaatactaccttccaagatagtgcagcatctcgaaagaactcaagcaatggtccaaagatataaagaaaaataccatcttaggagaataggaagtagaaatgagcaattactttgtattctcttttggaaatcgattatgctcaacacagtccacaatccaccatgggatatcgctctcggttccatctaaatctgtaattctctttctccaaggccctccacttgaaccttctgtgatgattgatggaggcgaaactgtggaaaactcaaatgagggaagcatctgacttgcatgattttcagccccatcatcaacctcagatcttggatggggcaaatttttcaaggatacatcttttcctgttgaagtgtcaccatttgacaagccgtgtgagccagatctctgcttttttttactccaatgaactaacaaaccacggagagtctcctgagccaaattaatctgcatttttttaagagggaattgttaagaagttgaatcaggtatgaatcagatctcacttgcaagtggcaatcatatcaggtgaatttcatcattaggtgtcatggatggtttgaaccaagaatacaaactaaaatatatcaacaaaagaaagaactttctgtcttagtaacagaatgattgaactactggtgcatcaaaagtttgaagaatgataagcaaaacaaccagttgacaacatatgattctgtgcaaaccttaagatcttcctgtgctcctgcaacgtttaagtcaactgcatatatttctgcagaaaagcattgaggtgtatccaggtggacagacaggcatcccaatcgagcatccatggtaaaccaggcaggtatgctaacctaaaagtaaagacacaaattacatactagtaagcagcagatttttactacacagagatcatgagtttatcagtaataccatctcaaacaactcttttttcttatcctcaaaagaaacctgcacgaacaaagtggagtggcttaacattctatcaaatatcaaattcattcaaaaaaaaatcaaaagacacacagtatgaactacagagtgcccgaaattgggactgaaactagaattgctgctgactctcaacatacttaaggatcttttcagggaaagagctattcgctaaattgagcaaaaataagaaccttgccaaagtcttcaataacagctcctcgagtaatctcccacaatttgacagaaccagcagtatcctatgaaataggagcaaggcatataagtgaactctttgtaatctgctaatggtagagcacatgatggaaataacacttgtaatcaccttcgtcaatacatgtcttctattattcaggatctcatgctgagttattgctggaactccaggaataattgaagatggttctttgtgtatagggacctaaagtggtataatcatgatataagcactcattaagcaccaataaaaatgttgcccatagttaaacaaactttctatgtttactcaggcaacagataatctgtcaaagaaattgcctgcttcagtgtggcaaagcatggaatgaatttgtgtctatgacatgctgggtcactatactaagacttgtatcacgccaaatatgtagcagcaaaccaaacaacagcctccatgttgtggcttgtgtgttacttttaaagatcagtcaatctcaaagttaagttcacaaggtttatactgcagaatcccttataccctattttatcttcaatgtgcgcaagtatgacaatcgctatggcatgtgaaactgttattactgacttaaaagtgtgtctgcgaagaaatacaaaattattgttcatgatacaattaatgaaagatggcaaatgtcatgcttacaggtgctgatccttctaaagaagcccttgccctggagaatgacaaattgccagctaagaatgaagaacctttttggaaaagctttaggggttcatgcgcttcagctttccatccattcacagaagaatcagttgttgcaacccaaatcatatcatcctgcaaggacaattgtagaatcgggtgctcgtttgtgcagagcaagacactctctcgattgcttaaatctgtcaagtacacctgccatccaagaaaacaggaaggttcagaattcagaaaagaagcaattatgcaacatttgaaacttgactcaccgactgatctcttccaccactataaacatgactaaacgaaggagtgcttgcaagcgcccagactgaatcagtatgcacagcataagaatgaatacatcgctgctgtcccagatcccataatctgcaaaatccagaaacatgtgcagacaagatgttacatgacttcatgatcagtgtgaaagtacagatattttagtgtgcatacacacatacacaagatctggagtgggcaagactagaactgtgaattaccttatcattgaatcagatgagcctgaaagacaatacctgtaaacattttacagaccaaattaaattactagctcaacaaattaaataaccccaaataataatattaataataataaaataaaaggaaaaaacattttgtgttaaccatttgcaaccaaatattgctgtcaaacatgacatgtaagctaccacaaccacaccacaccatcttagtcaccagtcagctgacctcacacgatgaaatgaacccctctaaaatcatcaagctgctagtaaattatacatgaaaatgggttgcatggcacataatatgactacgatggtaactaggacaatcaccagcagttaatgtcaaatccaacaggaatccattcacgtaaatactgctgaaatttaatgggggctaattgataaaaaaaaatgttccacagggcaagcttatcaaataatacatggtccattgctaagatcaaccatctcaaatttaaaaagagtcagagggtaaggggtaaaatctgatggtcaaaaaaagtacttttaagaagcatgcagatgcaactatatcaggaatatatttcacattccagaagatctaacaccatgacaatcactccttagcactcaatggattgtatacaatacaacgaaaatcttcaatataagccctaaaactaatactctgtgcaatcaaacccaaaattccaattattgatttgaacccctgaaatattgaatttgatgtaattaaaccattcaggtttaggcctgttaatttgaatcccactgtgcacctttactactaaaactgtaaactatatcattcctactaatctacaagcaagatgagcaactgaagttcgataactaaacaattgtgtagccttattcaagttatctacacaaaagcccaacagcaaattgttgaacatgagttgcagaaaattgatctctaaggtcctgttcttttcagcttattcaccggattgctgaaacatattgtttgttctatgcttcgaaaaatacttttttttctagaaaaaaagtttctgctactgtgttgcttcgaccacttattttaagctatttattaagtttatttcttcaaatatttaatttatcactataacctggtagataatctgtggcaataatccacaataatctaaatcaaatcgggaagcacgctagacagtttcagtaatagtttgtgactgtgtccctattcaggttgcccatgttgacacatatctgtagttacatcaccagtctgttaatcatgtgagaaaagggtactaactaaatatatccagataacaaagagctaaaatgaacaaacagaatagttgagagctcaaaccaacagaatagagcttaaagaacttgattgcacagatttgaatagttggggacttcaaatcaacaaaactggagttggactttagggtcttgatcatacacttgtagtgctattttcccataatatatcaacaatattgtgtgctgaactaattctgagtttcaaaaaaaaatagcactgctgacctagagctctttcatggatgatgaatgcgatagaagaccaaaatacttgacaaacactaaatttagcgagcgaagtaataccatatccaactaccaatgcgaaagccatcaatttgggcatgaacaatggtgtgatgtcagtctgggagaagatgctacataggatggtgtggaagagaaagaaagcggagagagaaggatgttgtatcttgattagcagagaggatagcttaataaaatacaatcgctatgtataccatctatagagtcaaatcattaattatgcaaatctattacagataactactaagtagacaacctattgtagaagttgtctacatataatctattatgacgtagaacgataatatagacagcggctgtctaaactacagttcatgctccgaagaacatttggatatctcagaattatgacagatttagaattacagatactaaaaacaaatgcagagcacaagtaactgcaggagattgaaagaaagaacacccataacttattatcgtggaataagaggctaggatagatttagatgacagtattgaagtggggcagcaatacgggaacagaagtcaattttaagggatattgtcaaggaaaagaaacatcattgtctagatgaatctacaagaacatttcacacaaacctgccagtaggatcaagaagtaaagccctgatattgtcagtgtgccctctcaatttcattttctttgaaccagtcctgggatcccaaacgcgaacaacctacactaaacaggtacatataaggaaatatcacaggagaggtctctcaaaagcagtccaaagaaattcgcacattatggtgcctcctaaccccaaggaaacttgcatactcattctcaaagatgaagaacataataccttttcagtaccaccagagacaagtgtgtttcctgtgtcactcatggccaatgcataaactgaatctttgtgacctttggcagtgattggactgtacccatgtgattgcccattggtggaagcaaggttgctgctagaatttacattgcacaaggttgtcaaagcaggcccagagtttccattaggagcttcatcctcttttgcatctacagatttggccacaggagcaagagaagaatcaaggtcccatataaagacctcaccgccaaggccaccagaggcaacaatattgctctacattgcagagaataaaaaaaaacatgtaaaacaaaagggataaaatgagtagttccacagaaaagcatagtgctggataatatacatttttttcagatgcagcaagacaaatcacataatcggaatgctggcggagagtcctggtacaagcaccatctgataaacaattccacacctgtgaaacaattaggaattaaaaaacatgtggatccaaaatgaatatataaaaactgctgaaacaacagacctttagagtggtgtctgaggaacaggaaacaagattttggccaacaataatggcatcattaacctgcatgataaatatatcagcttaaatcatagaaagtacttcagagataatgaaagcgtccatgttacaaaattaagctcaaatctcctcaaggatgagtttctccatcaatgatagaattccatccgaaactataatacttggatattgaaaactatgtagtcttctttccatctgatcctcttttgttttggggcaagatgcttatacatctttattcaaataaaagtggcaatggatcatcaaaaaacacgataatggataaatgttgctatggtatgcgtcatcatgtaactttgggctagtaaaatttcaaaacgtaatggtcaaataacaatattaaatcgactggagtaaaaacagagaaacgcatacccaatcaacatgtgactcaaaagttgctgagaagcttgcgactccattttttggttcccacctcttcaaggtaccatcccgactcccggtaaaaagataatcactcgtaccagaagtagaggcatttaggtatgacaagcagttgatcccagcacaatgctgaaaaatagacacaatggaatgcatgatgagacatttgcactgaaaatgaattcttttgaatcaactggatgcatccgcgattctgaggatagctagttctggaagtggaactgacctttttgttatcagcgtcattcagcacatatgtaaagcgcttctcctttctcggtcgacttgaacctgccgtgttaccagcacttccaacacgatgcattgaaagatgcctaatttatctaaaaccggagcagcttatagcctacaaatcagtggcatagaacttcaattttactatagatgaatatatatcaagccaagctgcaaatattcagctattgaaaaattcagcctgtatagttcacatgctgataaaattcaaaatattaaggtagaaataatcctgccatcattttacacaaggtacccccaatcagggccgaacctaacgtggggcatgggggttcagccaaactttttttggaaacaaacctaacctgcagctagtagtactactaaggttaataaggcaaagagaaaagcctccggatccaaaaaagaagctaggattaagtctacgagaaaaaggatgcgggtagtggacgagtaaagaggacgtgtcgtcccaccggcgaggatgcgacagacgaacggacgccggcgacgctgctcgccggacgagatcggagttggtgggcgcaggcggaggggccgaactcgtcgcaaagggggagatcgactagggcgcagtgccagttacgcttgccgctatacggagatggaggcttggattcgattccccgatatcaaatcaaacccccccgaaaaaaaatcctcgcaatccgagcagcaaagtcaagagcaatcggcagcagtccccggctcgagatggatctcaactccacggcgaggtcggcagcacgaggaaggggaaggatgggggaggagaggagagtaccgtaccttcgattcgacggcgaggtggcgcgcggcggcgaggcagggaggcggagggatcaagcaatcgccggcagccgcgcctggtaggggaaggggttgaggcttgaggggaggaagacgaactgacgagacgagagagagggctgaggggtgtggttatatgcgcacgataaatttacagtgaacgtgctatcaacgggtgacatggcaaatagcaatgttatactcatatctattgctattgatctctttgttgtccacgaaatttattgatctctctttttctaataatttaattagataatataaactactatgtgttaggcttggtaattgctgacatcatataatggatggataatatagccgtccatgatgtcaaagctaattgaatatctttttttttcttagtctatttggcttgagctctttgattgttcttgggagtttcatacaattttagctccaatataaaagtcaaaaatcttttttccaagaaatgtcaaaagtctatttaaactacaaatttgtctcatcaaaaaacgttaataagctagagtggcctttataactaaagcgagtgaaaaccacaatgtttgttttatttgttcaaggaaaaaacccagctttataatataaccaatgtaatatacggacttgtaattcttcttttagttagactcttaatgggtaagttttcaactaaaatgatccaaatggtattattaattcataatatataaatgatttctaagccaaaaacatacataagtccactgaccacctcctccttcctctttcctctgttctgaataggtcggctagagtgtttcatttcactagctaccgtatttcttaactttttcaagtttctaaataggtcggttacagtgtttcgtttcactagtttactatatttcttaacctttttctagcttgtaattttgtatcaggactcacttctatattggtgtagaccaagtatgcatcccttcctctgtatataaaagacgcagtgtgaatatattgagtatattcatatcactagcactcggatatgcacactgtaaacactgcttctagttactatagcttctaccagaatcagaacctcccataaacagtacagcttttgatccagattctgataagctaatccagaaaaataaactataaaccaaaagattctcaccagctgtttcttggaatcttaatctcccctaagcagggccgcagtctaggactccaggtacaccgaacagcccaataggggcacatgcatatacttgtgttgctcaggctgaaatactatcaatcacacgaaaaatccgttttacacagcacaacaatacgccaccaagaaacgaacgcgtaaagcacacaaaagacgcctaacacgtcacacaattacgtcatgttcgcgtcgccgaactccggcgaccgagcggagcaacaccggcgtcagtcacttcactgcccgcccgccccgcgctgctgccgccgcctcctggccgccgccgcggcgagcgcgagcaggatcaccgcgggccccaccaccatccccagcgggaacccgccgcgcctcctgcgccgccgccgccgcggcccctgccccctgggccggcgacggccaccgccccggttcgcgccgtctccttcttcccccgacgtgctgtaatcctcgctgtcactggaccgtggttttggctgctcctccggttcgccggcggctggtgtctcgtccgccgccggtggctcttgcaccggcgcctgttcttccgccggcgtctctgattctactggcggcgtctccggttgaggctcttgctccggctcggcggcgggtggttcctccgccgccggtggctctggctctggctctgtcgccgtcggcgtctcttcagctggtggttcttgcaccggtggttctacggcggccggtggcttcggctgctcgggctcgtcc

SEQ ID NO: 21658 - DNA, 894 bp, Oryza sativa
cctatagaaattcaggggattccttttccctcggacctgattcttctagacacaaagaacttggatgtgatccttgggatgaattggctggcacaattccaaggagtagtggattgcgcgagacgcactgttactatgtaccgaggaccagaacaaccggttgttttctttgcacctccaacctctgtcagaagttcagaactgcatcagataggtctgtcagaaatccccatcgtcagagagttcggagacgtgtttccggaagaactacctggtatgccgcccaagcgagagattgagttccggatagatcttgctccaggaaccactcctctgcacaagcgaccctaccgtatggcagcaaatgaactggccgaagtaaagaaacagttggaagagttgaaagaaaaggggtacatacgtccgagtacttccccatggggtgctcctgtgatttttgtagagaagaaagacaagacgaagaggatgtgcgtcgactacagagctctcaatgaagtcaccatcaaaaacaagtaccctcttccccggatcgatgatctgttcgatcagcttaaaggtgccactgtattctccaagattgatcttcgttccggatatcaccaattacgtattcgggaagaagatattccgaagaccgcattcaccacgcgatacgggctgtatgaattcacggtgatgtcgttcggcttgaccaatgctcctgccttcttcatgaacttgatgaacaaagtgttcatggaatacttggataagttcgttgtggttttcatcgatgacattctgatatactcacaatcagaggaagaccatcagcaccatctccgtctggtgttgggaaagttgcgggaacatcaattgtatgccaagcttgca

SEQ ID NO: 21659 - DNA, 850 bp, Oryza sativa
gtagccttggtcaagctgcctgtggagtggagccgtctgcgccgtttattttttttttccgctgcttagatttttattgattgagaggaactatctacctctgtaatgacattttattcgcttattaattagagtaatatttgtactctattatcaatttgttattgtgtgcctcggctgattcctggacaagggttcacacacatgtaagcgtttggaattttggatagaaattccgggcgtgacaggggcccacctgtcgggcccgtctccctcctcccgccgatcccggcgcgccgccgcgcccgcaaccatcgccgcgcccacgtctccgcctcccccgggccacgtcgaccacgcccgcgcgtgcgccgaatctcccgcgcccattcccctctctctcccgctcgcgcccgcgcccgagatggccgggattcgaaaatcgaatcccgcctctctctcctccccactcccccgcgtcggccggcgattcccgcctctcccggccacgtccggttccctctccccctatttaagcatcgccgtcgtcctctctcactttttccccatttcgccgacccctcccgagctccccattgctcccgcgccgtgcaaccacccgccgccgccgcttccgctactccggtcgccgctagccgccgctaggctcgccgccgcaccgcgccgtcgccgccgtcgggttcgcgtggccgagatccatcccgtccacccctctttcgtcgaggtccgtcgccggagagccgttcccgtcgtgcgacggtgagggtcgccatgtccgccgccttcggccggcatccccgcctcctatggcccctctcttcctctctaa

SEQ ID NO: 21660 - DNA, 6605 bp, Oryza sativa
attaatactgcttaatttttacaactgtttaaatccttcaatctctatttataaatgctcgctttatgcaaatgaaccactttagctcttctttgatgattccctgcatcatacctctattccggtatgacttgctgagtacagtgggtagtactcatttttgctctacttttcccaaccccagagttcgagttcgggtcagatgaaggtttctctgaggagtaggcttcgtccgtgccgtcgaggatgcctgtggagtggtgttcccgctgcagtttagtcaaggattagctccagtttcttctgttttccgctgcatttatgtaagactttacgatgtttgtaagacgtggatctgtatgtcaacattgtcgtttgtgtaccccggctggtcctggacggggattttaatgcacattctgcttggaattctattcgggaatttctgggcgtgacaagttggtatcagagccgaccttgaccgtaggacaagccaaatggaaaaacctaagagccctctgaatccttttcattgcatatgttctttgcaattggatttgttccgggaaaattgggatctgttcttgtggttcaagggaaaaaatcttggtcgctcgtttaagcggggttttttcaaaacaagtcagtctagggttttagtaaaattattgggatttattcgtcagtcagttggggtttgatgggtgaaatgcattaggtcctagctcaggaatatgagttgcaaggtgtttatgctcttatcgttattattagtatgtatctaatttctcattattttatcgttatgtgggtctgtcttgtttattcgctctcatgcaaaatgatctatgcataaaaatttcgctcttgttcgtttcccttatttgggtcttttattgctttatttaaatttggatttgagcatgcattgatcctactcctttgtcttctctagatggccggtcacccacccaaccaccgcggagaaggcatgatcgatttcgtggcagagttggcacgtatgacactggtggtgggctaccccaatgcgccggagtacacgacgattccgctgcttagtggcgagcttcctcaccgtgtccgcttggaggtccatggctacgtggggacttgcctcgctaacatggcggtcgaggcatctggaggcacagcagatcacgcctgtcaggaggcagcctacttgatgatggccagactacgggagcgccacaactacatcttccacgacacggcgtaccgctaccacccccgtcgagccaacggtgatggcgtcagctccttccgtccgacagctggcgagaacgacaccacctttggtcacatgtgtgctgtgatgaggggattggacaggatgcactcggacttgcacaaggcgaccaaggctttgaacgatgggaagctcatgaggatcgtcgctctgaaggacgagatagcgcgcctgaagaaggagaacgctcagctaaagggtcttccagcgccagaaggagtccggatccgcaccacgccccgcaagacgacgactgcacctgtgcgcatccagcttgcgcccaggaacccacctccagcagcagctcccgcagcacctccagttccgcccgcagttcctgcagctccagttccagctcccgcgttcactctctccttcgctccagcatcagccgccaggggtccagccagtggcaccggaggttggttgtctgctactcccagtggcagcggcgagactgatctgtcaggctccaggagtcgctcagagggaccgggtgacgagcaggaggacgccttcgactccaccgaccgcaggagccgttccgagcattaggctcgttttcccattagtttatcgatggtctagcttctggttgttagtttgcgtgtttaggttgcttgtttggggtcagttgacggtcgatatcatgtgcctatgatatggctgtcttaataaggatttttgcttgctttttaagtgttttaattcagatcagaacaattgcagttttaattcctttgtaataaagcttagttcttgagcatctgtttttcttcttttcccccgtctgcttttccctccagatggtctacaccaggactggcagtcgcgcgacaggcgagggcagcaacggcgaagagcgcactgatggtgtgcaccccaacagcgattctggcaatggtccgccaccacttcccgagaatccgacgcttgcccaagttatggcacatcagactcagatgatggcagccatgatgcagcagatgcagcagcagcaccagcagatgcaccagaggatgatgcagcacgccgaacagcagcatcaacagtttggtccccctccccctcagtccaagttgccagagtttctacgcgtcaggccacccaccttctccagcaccaccaaccctatggaggcgaacgactggctccatgcaatagagaagaagctgaatctcctgcagtgtaatgatcaggagaaggtcgcttttgccacacaccagcttcagggtcccgcgtcagcttggtgggacaaccacatggccacccgcccaccgggtactgaagtcacatgggcagagttctgccgtagcttcaggaaggcacaggtgccagatggggtcgtggcacaaaagaagagggaatttcgtgcactccatcagggcaataggactgtgacagagtacctccatgagttcaatcgcctcgcgcgatatgcaccagaggatgtccgcaccgacgccgagaagcaggagaagttcatggcgggtctggatgacgagctgaccaaccaactgatatctggggactacgccgactttgagaggctggttgacaaggcaatccgtcaggaggaccaacgcaacaagatggacaggaagaggaaggccgctcagttcagggcacatcagggaagtcaccagaggccgcgcttcactcccggacagcagggtggacctaccaccatgatcgtccgccagcaccgcccgttcaaccctagcaacttccaccagggcaccagtggcagtcagaaccaccatggaggtcagcccaaccgcggtgcagctccacgcccatcagtggcaccggcacagtcaggccagcccgcgcaagccaagaaggagactggagcaaaaccagggtcctgcttcaactgtggcgagcttggccacttcgctgacaaatgcccgaagcccaggcgtgccgggccaaggtttatccaggctcgtgtcaaccacgcatctgcgcaggaggcacaaacagcaccggaggtcgtactgggtacgttccctgttaactcaatccctgcaacagtactttttgattctggtgcaacacattctttcatctcaaagaaatttgtcgggatgcatgggttaataagagaggaacttagcacaccgatgcgggttcataccccagggaatagctccacttcggttcaattcagcccttctataacaatagaaattcaaaggtcaccatttctagccaacctcattcttctcgaatccaaagacctagatgtcattcttgggatggattggctgaccaagtttaagggagtcatcgattgtgcgagtcgcacagtcaccttgaccaacgagaagggagaaaccgtggtgtacaaatctctagtctcgccaaagaaaggggtctcgttgaatcagattgagacggaaatcccagtggacaccgtagagaagaacttgagaaaattggaagatatacccatagtctgcgagtatccagaagtgttccccgaagacctcactaccatgccacccaagagagagattgaattccggattgacttggcaccgggaactgctccaatctataagagaccgtacagaatggcggccaacgaattagcagaggtcaagaagcaagttgatgagcagctgcagaaagggtacatacgaccaagcacttcaccttggggcgctccggtcatttttgtggagaaaaaggataagacgaagaggatgtgcgtcgattatcgcgcacttaacgaggtcacaatcaagaataaatatcctttaccgcgaatcgacgatttatttgatcaactgaaaggaactaaagtgttttctaagatagacctgcgatcaggctaccaccagttgagaatccgggaagaggatattccgaagacggccttcaccactcggtacgggctatatgagtgcacggttatgtctttcggacttaccaacgcacccgcattcttcatgaatctgatgaacaaagtgttcatggaatttctggacaagtttgttgtggtgttcatcgacgacatacttatctactcaaaatccgaggaagaacatgagcaacatctccgtctggtactcgaaaagttgaaggagcaccagctatacgccaagttcagcaagtgtgacttctggttgacggaagtcaaatttctgggccatgtcattacagctcagggtgtggcagttgatccatcgaacgtggagtcagttaccaaatggaccccacctaagaccgtgtcgcagattcgaagtttccttggacttgcgggttattaccgccgattcatcgaaaatttctccaggatcgcccgacccatgactcagttgcttaagaaggatgagaagtttaaatggacagctgagtgcgataagagctttgaggagctcaagaagaaattagtatccgcaccggttttgatcctgcccgaccagatgaaagacttccaggtctattgcgatgcatcccgtcacggacttggatgtgtcctaatgcaagagggcagagtggttgcatatgcctcgcggcagttgcgtccacacgaaggaaattatccaactcatgacttggaattggcagcagtggttcatgctttgaagatctggaggcactatctgattggcaaccgctgcgaagtatatacggaccataagagtctgaaatacatcttcacccaaccggatctaaaccttcgacaacgaagatggttggaactaatcaaagactatgacatgagtattcactaccacccgggtaaagccaatgtggtggcagacgctttaagccggaaaagttactgcactgccctatgcatcgagggcatgtgtgaggaattgcggcaggagtttgaacatctcaacatgggaattgttgaacacgggttcgtagccgctctggaggcacggcctacgctcgtggatcaagttagagccgctcaagtaaatgatccggaaatagcagagctgaaaaagaacatgagagtcggaaaggctcgggatttctttgaggatgagcatggcacaatctggatgggagaaagattgtgtgtacctgacgacaaggaactgaaggatctgatactcaccgaggctcatcagacccagtactccattcatccaggcagcactaaaatgtatcaagacctcaaagaaaggttttggtgggtcagcatgaggagagaaatagctgaattcgtcgcactctgcgatgtttgccaacgagtgaaagcagagcaccaaagaccagcaggtttactccaacctcttcaaatcccggaatggaaatggaaggagattggaatggactttataacaggactgccccggacatcatcgggtcacgattcaatctgggtagtcgtggatcgactcactaaggttgctcactttatactagtacataccacctatacgggaaagagattggcagaattgtacctcgcaaggatcatgtgtttgcatggggtacccaggaagatagtatccgaccgaggtagtcagttcacctcaaagttttggcagaaactgcaggaagaattggggacccgtttaaacttcagcacggcctatcacccgcaaactgatggtcagaccgagcgagtcaatcaaatcttggaggatatgttgagagcttgcgctcttgattttggtggagcttgggacaaaagcttgccatatgcggaattctcgtacaacaacagctaccaggccagtctgcagatggcaccgtgtcgcgtcccaaatcgactctaaaatctatcctcgaaattgtgcaaagaataattaaaattcatgtgaaagcctccaacaattaaaatgtgcaaagataaaagtcaaatgaggcttggaggatttttgtatatttcctaaaagcctaaaatgcttaaacaaattttagtggaattttcagagcacaaataataattgaaaagaaataaacaaagttaaaaaggttttataaaaagaaaaccctaaaagaagttctttttttccccctccttccctcttgggccggctcggcccacttccctctccctctctctctcctctcccgcggcccatcggcctccccgcgcgcgcgcaccgctgacaggcgggcccgcccgccactctcgctgacgggtggggcccacctgtcatctccctcctcgcgccgcgcccgccgccgcgcccgtgccctagcgccgccgccgccgcggattgcgccgcatcccgccgtccccgcacgcattaaagagaggggaatcactccccgtgattccctctcccgtttcccccgtttcccctctctctctccctcggattcgccaggatttaat

SEQ ID NO: 21661 - DNA, 24178 bp, Oryza sativa
aatagcccacctaaacctacatatagtacctcgtggacagataaacaccctagacattcaacctcttttgagaacccaaatagaagaagcccagaaggacaacgaagaaatccaagaggtgaaggaacgcctagctgcagggtttgcaaaggaattttcgaccgatgagaaagatgtcttatggtataaaaagaggatctatgtacccgaaaagggcggactgagaggattaatcctaaaggaagctcacgaatcagcatattcattgcaccccggaagtatgaaaatgtaccaggatctgaaggaaggatactggtggcccaacatgaagagagatgtagcagaatacgtagcactctgtgacatatgccagaaggtgaaggctgagcaccagcgtccagcaggtttgctgcaaccccttaggattcccgagtggaaatgggatgagataggtatggattttattgttggattgcccaagaccgcaacagggtataattccatttgggtgatcgtggatcgacttaccaagacggcaagattcattcccgtcaagaccaattattgcggtgccaagctcgccgagttgtacatgaccaggatagtatgtcttcatggtgtgcctaagagaattatatccgattgaggcacgcagtttacttcgcatttctgggagaaagtacatgaagccctaggaagttaccttgcttttagcacagcttatcatccacagacagatggccagacagagagaacaaaccaggtcttggaggacatgttgagagcttgtgccttgcattttagcaaagattgggagaaatgtttgccctacgccgaattctcctacaacaacagttttcaagcaagcctaaagatgtcgcccaatgaggcattgtttggtcgacgatgtcgtactccactgatgtggtccgagactggagaacgggcggtatttggatgtcacgcccagaaatttagcccaaatttccagactattttgtgtattaaatccctgtccaggaccagccagggtacacaaaacgacaagtaatatacagttccaaatgtaaataaagcgtaaaatacttacagaagaggcacttagtcctcacaccgaaacaaaaacagcagcagtagaaaaaggcgatcctagcgggcttcagctccactccacaggcaaaactcaactggggtctgagccttggtcctctaacttcgtcttcagctcagaagcactacacttctgaaaagggggaataatagcaagactgagtacaaccaccgtactcagcaagccacaccaacgatgcagacgtgcaaggggatacaaggaggggtttgtggctatttgcataaagacagttgtaaaacattttattgagcaaaacagtaaaactgttgagtaattaagaaaaattagatctccactgatcaacgctacaccacgttgaacaggcccaaccaacccacctgaactacagtgcattgagtcgatttattaggggtgagactaatcacggtgaatctggtcaatcgcccataaccgcgggcacggctattcgaatagttttactctggccagaggtgcacaactgtacccacaagacacaacgcaccggcatgtcaccgcgtcatcatgtgcccatgatgcacacgtcaccatgtcgagtaattgtgacgagacccttcgcataaccctcccctaaccatccacaccacgctaaggtttcacccccacccctcaaaaggcagtgggcggtcccctcttgcgccgcggtgaatccggcagctggacaaccggacaccccggccgacccaactccatcacgcccaccctcgccaccggtgcctaggaaagggtcgagctatacttcagatcaagcagttacccactcccgcttgtggcaagcgctgtaagtcttccagggtttcccgtgaaccggtccttaattgccatgggtgcgactcacaaaaccatgcacccacagcccaccattcagtcgcattttagttggataattacgaccatgaaacatggccagatgtctcgagcacgcagctcactctgatactaaaaaggtctaatactgtaattatcccatcaactgagctagtggtaattaagcatggctaagcatacagttctagctaggtcacataagtaacatgagctagtcgattcattacccaaggttgacaaagaacagatatcaagtaaacatggcacaagcgagcagataggtaatgcccggatcccatgtaattagcaaaacatgcatatttatttgtaaacggtaaaacatttataaattgggatcaacatgctcaaggggaatgtgtgacttgccttgcttcttcaaaacgatcttccgaactcttttcctcgcgaccgcgaacttccgaaacgacggattctacacgctggcacgcaaaacgaggaaaaaacctaataaaaaccaagaaaatagtacataaaaactaaacaaacatgtagagctcaattttagatgaattttgcaagttgaatggctcaattcggagttcgaatgaattagatatgaattttagaagttttgagccatttaaatgaatttctagaattattaacgaattatgacgcaattattatttatttttacaaaggaaaagagggttgctgacgtcagcaaggggcgccggcgccgacaggcgggccccacacgtcagcgagacgaggtggcggtccaccgtggaccgggaccacaatggacggtccaccgccggtccacgggttggacggcccagatcggccaaggccgatcggacggctggggacggctcggcggcgcggcctggccagcgcgcacacaaggctggcggcggcggcggcagggaccaaagcgacggcggcacatgggctgggcggccaccggcggcggcggcacggcgcgtgcaagcacgggaggcggccggccaaggggagaaacagggaagagggaggagtgctcaccgagggcggcgacgaggggcggggagaggcgggggagggagctcggcgtcggcgctcctcgggatgaaggcggaacggcggcccggcggcgttccgtgagcaggaaccggcagacggcggccggaaggacctggggaggatgggggagaggttaggagggggagagagggttctcaacggcatgaatcgctggtcggaggggagaacgggcggcggatgctcaccggcgcgaggggaaccgtgttccggcgggatcccggccgtgaaaagcggcggccgaggtgctcctcggcgctgcgaagtgagcggcagcgacagcgcgacttggggtggctaggagcggcgccaagcggcggctggagtcggtggcttcggtgcaaggaggcggtgcgcgtggcgatggtgcttcggaggcggggaggggaaatggagcggacgccgggaggtggcacgacgcggcgaagccactggtggcggtcgcgcggaacgacggtggtgggagcggctgtggcgaccggctggagggtcgtcggcgagcggcggcgggaggtgcgacggtggcggggtggttttcgtgcacgggagggctcgagagagagggggaaatggagaggggggtgcggggaatgtttttataggggaggggaggcgggatcgagcccgagagaggtagaaaccggccggcgacgtgggaggagagagagatgcgggaggcagcgacgtggccggattttgcggggagagtgggggaaaacggcgccgacgtgggcgacgaccgcgtccacgcacgcgcgggagagggagtcgcgcgggagaggcggcgacgtgggaggatttggcggccatggcggcggttggtacgacgggaggttggggaagaagatgacaggtggggcctcgggtcccacctgtcggggagagagagagaggagaaaacgggcgagggaggtaaagcagacttgagggagcgagagagagagccgagcgggccgagggaggaggccggcccgagagggagagaaagggggcgcgcaggccgcgggagagaaaggaggggttgggccgaaaggggcccaaagagaggaaggaggattttaattgttttctttttattttaattgatgcaatgatctttgtgctattaaaactatttctcgagctccgaaaattcacggaaaatttcggagagtattttagggcacaaagaatactccaaaatattcccggccaatgatttttaaagggaaaattttaattctcccattaattcgctcgaataaattgctttaacttttagtataatttcttgaaatgcattattaaatgattttaaaacccgaacgaaaatcggggcgttacattggacctgacattatcaaagaggccgaagacaaggttcgcctgatccgtgaccgtttaaaagtggcacaatcacgataaaagagttacgctgacacccaaagaagaaacctggagtttaaggaaggggattacgtttatctgaaggtttctccgatgagaggcacgaaaaggtttaaggtcaaagggaaactagcgccaagatatgtgggaccttttcaaatcatggctagacgaggagaagtcgcatatcagttacagctaccagaaaatatcgccgatgtgcacccagtcttccatgtgtctcaattaaagaagtgcttacgagtgccggaggaacaagctccgttggaagaaattcatattagcaatgatctcacgtatccagaacacccagtccggatattggatgaagcagaaaaaaggactaggaccaaagtgtggcgtatgtataaggtacaatggagtaatcacactgaggatgaagccacttggaaagcgaagaattcttgaagacggaatacccgcatctattcgaaaaccggtaagaaatctcgggacgagatttatttaagggggtaggtttgtaacaccctgaaaattcgaccaacgaaaatcaaaactctaaaaatatgggccttcaaaaactttttaaataaattgcatcatgccgattttattcacctatttcattggaatttggtttcggagttcatagatcgcgaatagagaataattaatgaggaataaagcctaaaattaaacgggaaaaataaataattgaaatataatttaaaataaagattaggtgaggttggaaataaataaaatattatcgcgaccatattagtaacaattaaattttagtgcgatggaataagaattaattctgattaaattcaagaaaattatataaaaataaaatatgggtaatgttaatctagagtgaatcttttggttgaaacaacacaaatattatgtaaacttcatttgtggaaaaattaggaattaaagaataagatttataaagagaataggttaaattagggttaaataagagctagcactgttcattgcgcactaggtgctcgatgaggttccctagccccgtcccctcccctgccgcgcgcgcctcgcgcccctagccgtcgccatcgccacctgccgccgcgcgccgtctcatcgcgctgccgcgccgcgcctccgtcccgtcgcctcgcgccgcgcgctcgccgcctcgcgccccgcgccgctgccacgccgcaccatcgtcgcatcgcctgtcgccgtcacgccgagccccgtgccaaaccgcgccgagccccgcgccgcgccgcccgcccgtcgcgttgccgctaccgcctgccgcgccgcgcgccgcccgtcgcgtcgccgtcgctgccttgcgcccctcgcgcgtcaccgcgcgccgtcgctgttgcgtctcgtcgccgctgtcacgccgcgcgccgtcgccgtcacgtcccgagccccgtgccaccgcacgcgtcgcgtcgccaatgccacttgccgcgcgccgctcgcccgtcgccacctcgagccccacgcgccgcccgtcgcgtcgccattagggccggccacccctcccccgcgctctataaaaccccggcccccccttctccaccccacacccatcccccttcatttccccctccttctccacgtgccgccgccttcgtaccgccgcgccgttgcctcgaagccgccgcgccgcgccgagtgccacgccgtgcgtcgccgccttgcgccaccgccgccggtaagccgccccccccctcgtccggttgccgtcgccgcccgggtaggccgtgagccgagagagagaggtggggagaagccgggagagagagagagaaagaaagaagaggaagagaaaaagaaagaaagaggaagaaaaataaaagaaagaaaggaaagaaaaagaaagaaagaagagagaaaaaggaaagggaaaaagaatagaaaatttgagagaaattgaggaggtttagaaaatttaaaataattagaatttaattatagattaattaaagtgtaggattgcaaaatattaatataattatagattatttttggtaatctctataagtaatcaattcgcggtaggaatttagatttatttaagaactaaataattatgttgaattcttaggaatgtacttctaaatcacaaaatgacttaggttgaatgacccaaaaatttgaataacgtggtttcgcaaactttgtagtcgatatagaatgatcgattcgcgttcgacttctatttgagtttatttggattttatttgaattctaattgaattcaaatcatttcttcgcacgtaattctagagcccgagggagttgtggatccgagcgagggtcaagacccgcaggactacgagcaagacaagtcatcactattcttgaacatgttgatcccaattgcgaaattaatttgtttacaaataagattgcatgcaatgatgaacatcctacttgtgattatgccatgccttgattattgtttacctttaaatccttgtaaccataattacgtatgggtccttagtcaactatgacacatgcttaagaaatgctacactagattcatgcatgctcataatttatcaaatgctatatgcttgggcaattacctttgggaaggtaattgaaatgcggcatgtggagacatgagcgccacattgccatgataatgatgacatgatttgtgcaagtaggaatgaaattaaacactttttttagaccggggcggacggaggatttgggtggtatatgggaaaggctagtaccgtccccggtcaattaaggaccgagccatgaagttaagcatgaaacgacccttgtacaaacgcacttctcgtatgggtatagacctagcggattagatagccgagcggaggcagtatctctgcatagatggttcaccccctgagtgaggcaggtgcgctaccgtgggacagccgttgaggtagggccgagaggcgtgccctacatcggtgtcgccattggtaggactgccatgagtgtgtgagagagagaacttaacttgaaccataatttaatatgtgtgtgagacttctcttttccgggagcgccataactcctctcactgctagaaacatggacgcctagagtgcatgaggatttaagttcatggagcggatactaccaatgcgaagttatcgaaaagctttgccgtgacgcgtctcatgtgttgggacgaggctcatgagttaggcagtcgcggagtgcgggtaaagtgtacatccactgcagtgtgagtagaccaaatctattcgaatacccgtgctcgcggttattgagcaccaggacgtgtattacacttggctagactctaaatccttaacttgtgtgggatgggatattgcatgatgatttttatgctgctggagccacttcctgagaggcgggaaggtggacatcctcagaaaatcatgacgattcaatggcgggaagctatccttgggatcacaatggatggtggacagaaccgtcattatttaaatatgaacactggtactaaaatttgatcagtctatgctaggtcttaggcttgtgaaaagaattacaaaactggctttgcgcaaagaaccatagccatcctttgaatacccctatcatgtgcattgttgctgtgatggcttgttgagtacggttggtactcacccttacaatatataaacttaatcagaggccggagatgaagcttcggaggatccctacgcgtactaccaggagggtgatgaagacgacggcgctcagtacgtcttagttacggtcgttgcctgtggcaatggcgtgccgctgccttaactccgctgccttacctacttctgcttttggaatgtattccggaccgctcggtctgatgatctaagactatgcctgctggcttatgatgtaataatttgcactagactctcgtgtatgtgcatttggtgtttcagctatgaactcgtgtgtaccagactacttgatccagggaaatggtactgtttacacgattgattcctgttataaaaacgggggtccacaccaatagagggggaaccaagcaaagcggacgagggaggtgaggtcgatcagctgcgcatagacaacgtctccacagcttgtgccgagggcagggagctggagaagagctacgagagcgtgatgacgtggtccagtgagaggggctgggcgaagaaggcgttgtaggctgcgaccgccaaccaagacaggaccctcctgaagcaccaacccgagcttgcgcatcaagttgcgttgtgcgtgcgagacagtgtgacttggcctggcgagcgtgagcttggcaacaatcccgttgctgcgcttcgaaactacccccacaggtgcggcgaggggtgccgaaggcgggcgcagtgggaggagtgccggggtcagaggtttggagcagctagcgaggaaggagcacagtgaggcattgtctgcgactgaagtcggcaacaagcgtgccattggccaaccatcaaggtcgaggacgaccaccggcacgtcgaacaagaccccgtcaggcacgcaatccactgtcatcgaacttagtgacagaggtgtgcagacacctgcaacagttgccaccggccttggcgagaagtgggccaatggtctcggcagaggaggcaagcgctacggcaacggcggcggcagcgattgcggtgggagagaccacggcgcatcggctgccgtcaccggcctcggcgaggagatgcccgacagcttcgaatgtggaagggagagcgatggcggtgttgatggcggcaacaacacgcagggcagtgttggtatttcttacaatcacgcacgtaataccattgttgcacttcccattagagtttccaagggtatcgaacacaaggaacgtgtgtgtatcatcaacgatcaagattcgatcaaggacaacaacttaggagaaattgactctagaggattcttatatcttttaattaattaattaagttcaaggtaaaactctaccggatacttcgggcatcggccctcctctggcctgccagcatgaatattgcatccattttatgaatactcgacgaaattcaccccccctgcgttgtccgcgaagcagtggtgtcggcgcaagggcgggatagggttgagcgggggatttagattgggtgacatagggtaggcatagagtgaatcttggccctccaaaacaaaaccaatgggtgaaattcatccacgtctcgcagaagttaaaattttactgggagtaaaatttcaggagttaaaattttactttcaggagttaaaaatttactggagttaaatattaactcgtgttgatgtagatgaatctcagccgttggatttgttttagagggccaatatccaccctatgtcaccgcgtgtctaccctatgtcacccgatctgaatcctgagtgggacgtgtttgtcgactgtcgcgatgccacgaccaatggtgggagccctacctgtgtcgaggcgtggagtctctcggcgggagctccgtctcgtcgaagcccttttgtcttgagttaacaaatttcagactagcatgataagtcgtcaactacatcctggtaaggacatattggattggaggagacacgctttggttcaacggttggcttatcttctcagacttcttcgtgtaattttccactggtaagaagccaagaatgcgtcgtacatgtcgatatccctttttctcttccaatttttactgacatgtggtgcaaaaaactctcttgtgcagtttgggggtgggttccgatggcatccgtcggcacgagtacaggctttgttgaaatgtcaagccgaaatgaacacggcaaaggcttctggaatcaggagccctggatgcctggtctctcatgtcatgtgtgaacaacgtgcacacacaaaaaggatttatgatttctacctagtttcaaaaaggtcagcgtatgtgtaggacctcttttggacgactgactgacttgagtgttttttttttttactaaatcaccggagggggagagcttccccacctgaattttgtcgttgcatgaaaggagtgaaaaagttcattacaacaggtttagagatcttaagggggaggagaaaatgtttttccaaacagagattacatgtctatcctcaatttttaatttctctgcccagagagctgcctcattgatgcatcgatgtaggcaggatcgaatcgatggagtttgtcccctgaatacaacgtcatgccgatgattccagatcacccacatacatagcaagaagaagacgtgatggtgaagctcagggacaattagagagggttttatttgatgaagtagccgcacatcttggattatcggctgcactctaatacgttcccagaaactctacactgactgagtgtattaccttttgtctggactggtatctcttaatatatattggccggcttttcgccggcccggcaaaaaaggtatttcaatcaatcatctcaaagatgagatccactccggtgccttctacttgtagtagaaaataatctgaaccgttgatctcatttgatcatagggttcagatctatttctactaccatcacacttaatggtagtagaattgtagagggatatttttgtccataaaaaattatttgcagagggatattttcgtctttcccgggctccagctggcgccgccccgcgtgctgctcctcctgctggccatccatgtcgccaccgccacccgctcgccaccgcgacgactcgcaaggggaagcttcatgaactggatcgctggaatgggtttcacgcagaattccagcgagatgggcctattcacgttacattagctcgggtaaagaggaagcaaagcacaaatttaatggaccaggctcacggaagttgagctacttcttttcatagcaaattcaggttcttgattctggtatagcaatagagcatactgtccatgtccaaattaaattcttattcagattcagaatcagattcttgattctggtgaagtcatccacgaaaattaacattaccgtgccctgctgatgctgaggctacagaaaactctactctcccgcaccagcctcctcaacagccggctccacgcacgcctgtagctgtcgtcgcagttgccgccgccgccggcggcgtcgcgcgagaggaggtagaaccacgcggggctcctctgcaccgccgcccctgtgcgcacgccggaagtcatcagggcggcgccagaagctcctgcggcggggaagcggacgccggcagagaagggaacagaacaagagggggcgccggagagtattgccgccggcggaagggaacgtgatgcacaagcgccggcagcggaaggagtcgctctctccacctccgctcgaatgcgatggatgaggaagcggtggcagcgctgcttttcctgaaacatccgagcgatccacgacgagaaataaattaagtgccaaatttatcccaaatctatctcagaactttactaatctacccttaaaaataaacggttcagattagttctactcgtagtataatactaacagtagaaagcaccggagcattgctcctcaaagataggtttcaacaaaaaataatacaatctggtgttggaattggttggggaacttgggatgtccaaagtgcttgtagaaaccgactcgctggaggttcgaagatgatttctcaattagagttcaattgttcggtctacagtccgttggtatatgaatggaaagggatgctaaacaactttttggcggctaaggtggtttggtttcagcattcggcaaatacagtactagctcataggctaactaaagaaggtatctcggttcccccggattttatacgatcgttcgttgaggatgattgtaagcaggcttctttagatcatctaaaggatcagtatagttccactaaaaaacaaaaaataataatctcgtaatacaaaacagttatgtttatattttaattaagagaaaatatcttgtgtacccctgaaagttcacctaatcccttctgtacccctgaattttgctcaatcccttacatacccctgaattttagtttggatcccttccatgccctttccgctagttgaccgttagttgaccgttaaattcttatgaaaaagtccattttgcctttggtataaagaagcatatatataaattaatagagtatattgttgaagtatagaaatttgttatatgaaactattatgtttatgagatagttatgcaccatattatttgcgagaaatataattttagatatgacataaaaaattaatacttatttattagttattaaaatattttttagcatatgtattctgatagtaataaacaaatctgttgtattactatgaaaatacatatgctacgtaaaagaacttttaataactaataaataagtattaactttttatatcatatgtaaaagtaaatttgtcacaaataatatggtgcatcacatactcataaatataatagtctcatccaataaatttttacattccaacaatatacttaattaatttattatgttttttcatagcaaagggaaaaatggactttttcaaaagaatttaacggtcaactaacggtcaactagcggaaagggcatggaagggatccaaactaaaattcaggggtatgtaagggattgagcaaaattcatagaagggattaggtgaactttcatgggtacataggggattttctctttaattaacatgtactctctccgtaaaaaaaaatcatcccctcctaattaacaaatctggagattcattgtactaggagaggtgtctttttttcctgacggagggagtataagcgaaactgatgttcgaactagagacacatgtcagaggggtccagatcccctagagttgagtacaactccaccgggtgaattttactaaatctgtgacatctattgcttcctacggctgagatgaagccatctattcttcctatggtttgaatgggaattactttatttttttcatgttagtaatggttaagtttatgcctaccaaagtaacaaagtatacacgttatcttctttcccaaacacaagaagctacgttcatgtacagaaaaaaagtgttaattaaccacatggtacatgcaaacatacataaaccatatacatgcaaaaatagaggcacatgctcagtacggtctttataccatggatgaatcaaaaaatttgggttatgcaagtaaaatttatattctcagattctctaaatatatatattgtagtcggtgatttgttattgttacaagattatgaggacttatttttctttttcaaaaaagactagtgggaagtgggaactaatggcttcatcccaactgttgataaaaaaatagaccgtaaagattttatcaaattcacccgatggagttgtagtgaactccaggggatccggacaccatgtcagagccttcatatttttgaattttgtacagagcaacgatagtttgtttgtaacggttactgtatcaaatcgattttgagtctctagtgggccgtatcttttgtttgggctcgcacaactgggcctcctctctggagcccaaccgttcgttttccttggttagtgtaaatcatgggcacgtgtaattcattcgcacagagagagagagagagagagagagagagagttcatagctgccgggatggtcgccggcggcgactggagctcgccgcccgccgaacagccaaaatgttccccatttttccttcttcaggagccaatctgcttccaccatggcaacgcccttgaggtttccgtatgatttagctttcctactcctactttcgaggatcgccgggaaggtggaggagccgcgcgccctggtggtgcggtggcggtgtctacccctcgtcagcacgaggtgtttgtggaattgtccgtaagcgcgcggtctcttccccgcgaagcaaggatgtggatgttctttttggagaaaaaggatctggcccgccgccttttctgtgtgcatatgggacacgagcggaaggtgttcgtgcaaatgcggcagacagcacaggtaggcagttcttgctttggatgtggtgggatcggagtactggatttcacacaagtttgatgatgctgcacgattgcagtcaacaaggtcattttactagatctctgtcaacaatatgggaatacagagttctccctgtaactgaaatctagcggttaaagatgctgatgatcctaaaatcaagtcaaatgcggctgttgtatctactttctcaggtaacttcttccctcaaatgcatgaacatggaatctttcccatgaagttaacttaaaactatacgtgtctcccaaaaggcagcccctcccatggagatttaatatatacttataagtagttcaagcatgaactagcaggagtgcaagacattaattagtgggtgcattgttggcatcacctcaaagtgtcatttagcttaccactttttcaatcttcttattcctgctcctttttcttttatttttttttaaagacaaagacaatgggggcctggacctggatagtcttgaactcttgatggcaaggtttttcttttggtcctagttcatcaacacatcagtatatattttttcttgttgtgaacttgcgatgattgtgcgggcagttcagaccttcaagcagcctgtcatccatgtggcagataattggtgacctgctgagaagctgcaggcctgagaaatgaagcaacaaccagatatcagggaacaaactgaacaaacaaaattctttaacctgttccggtgggaaacaactaggattcatcatatcatatggcgttagttgagatatcaaggtcagagtgatcaaaattctatcaaataaattttattctacgtgtgttaacacatcacaagaagaaattggagctgctaattgatgtctgcatgtcgtttcagctggactggctccaaaactagttaattaaaataatccacaaggcaagttaattcacttaattcttcttctctctcgttttatacaagacctggaccttgatagtcttgatgccaggtctttgtttttttaggtcccccttcctcggatcaacacctcatctatataatgctgaaaccagcgttggctgaggtgagtggatcatcaaatatccttcatccttcctaagttgctgctgctagagtaaactgatcaaaggcttgtcaaagtaagttggagtggcaaaaagaagttgagctagctagaaattaaggcttgagttttcttttttgatccatatgtgatgatgtaatgtaatatgtagttatgcactgtcattcgtatacatataatacgtatctagctaggatatgatttacatgttctgtaatctgacaggaccttcttgttctgttcacacatgaatcatgatcgtggtatattggcatgcaggaaattaatcaggtatggttatagaggtgtgttgctgcctggggctggctgcgaatgtagcgcagctggctggcctggacgtcatcacgcttgtcaaggtaatcaagagtcgcgtcgagacagtccgccagaacaaggaggactgcgagctgctcgccgaacgcgcggacatgatccttgatctgctacggcgggttcaggcatccaaggtcatcgaggaccctgacatgtggaagcccacagaagggctcaagtcgacactttgcagggcaggtgcaatcgttaaatcctgtcaggaggagtggagctatgcgtaccgtttctgcaagggcggacgcatcgccagagagctgcgcaaggtactcaaggatctcaagttttacatcctccacctgataggaatgatcaccatcatcaaccacgatcaaaacactcgttactattatatcccggagactgatgttgttaagccgcaggtacgtacctgcatacctacaacatctcattaagagctaattctttttgctaattaatttctgtgcaaactgctaaaacctccatttcatgattctgaagtttgttctaacaatatgagaggtaatgtatgtaagtggacaaatgcctgcttaattactcacttgagcctaactttggtatttcaggatgctacagcttccaacgctggaaagcctgttgctctagaagaaacaggtaggagtaatagtgaatgatttataatattcccaaaattagcatgtaaaacaaggccttcttttccaattccctttgtaatgctgacacgaagtttgaaggtaataatcaattttccatgttacttaaaataacaggccttaaaaagttcactttgtctgagttggaggttgctacagataatttctctctggaaaaacaaatcggtataggtgctttcagcatcgtgtacaaggtaatgctttgctcttggccgacctttgcattcaacagaatggttaatgtttaggcagtgaagtcgtttgaaacatcttctcttgtactcagaaaaatattagattttgtttttttctgtaagtatcatgatcgatttgcatttggtgtttacttcttccagggccaactaaatgaaatgcccgaagttgctgtgaaaagagcatcgtatgttaacagaattccatttgaccagctcgaaaatgaggctaaaataatttcaaagcttcagcatacaaatatagttaaacttctaggatattgcagccaagagagagagaagatactggtcttcgagtatatgccaggcagaatcttagattcattcataactggtagggggttcaattcaactagctttatgcctttatctactcagtttcgagaccaaattctattgttcatgttcactcaatgatgcagtacatacatgtttgtcgcatttgattacaggtgagcgagcagaagagttgcctttggactggtctaagcgctcccaaatagttaaagggatagctgatggagctgtatatctacacaagcaatgtgagccacgtattattcatggcgatctgaaaccaggcaacatactcctggatgctgccttgaaacccaagatttgtgactttggtacatcgaaagcacttaggccaggtcaggatatggactgcaccggcattgtggtgggatcacggtaagactgagtttttcactgcaaaatgtttatccatccacctcctgcgtcacgtttgatctgttgataacttgatatttaaattttgttttcatcttctcagtggatatatggcccctgaatataaacagggagggtgtgtctctctcaagacagatgtgtacagctttggcgctacgcttctcgagatcattagaggaagtcgcatccctccgtctacattggagctttctgatgaatcgcgcgattttgggcctctaaataagtgggtaagtgcacacctctctgaacttcacaggccaaccacagtatactcagagttggtcactgattaaccagtagcaattttcctttgctcaggcgtgggaattgtggagaggaggaaacctgatggagttcatcgacccttcgctgcgcggagagactcattctgcagccgagatacaggggtgggttcagatagcgctgctgtgcgttcagcgtgttgaaattataagcacataatgatttaatttattccataaataaatcatgacattgcatatgtgaactagattgaacgcatcattagatctacacatgtaaactaagcagtaaaacatgaacagatcaaatatgcgcaacatgtcgaacgcgtaccgaggtggcggaaagaccggttgctcggcaggaactactcgcggttgcgagcgtcgacgaagtcgcgaagcacgcgagcggagaggaagacgagccggtgcaggatgtcgaaggcagaggttccggagacctgctctcccgatcgccggtgcacgggatggagtagtctacgagcgacggcgcagtacagagtaggaggcaaaccctagattgatgagccggtgcacgggatggagtagtctacgagcgacggcgcagtacagagtaggaggcaaactctagattgatttcgcgtgtgttgcgtgaaggcggcggctcggtttatatagagatatctgcgcaatgttgaggagccaattttgcggaccattcgacgcgtacgtcgtgcacgcgccgcctgccaggcgaggcgacgcgagcgagcgcgcacgtgtgtttcccctcttctctccaccacacatgcttcaagtggttaggagggcatcctcccttttaaggaggtccccctctcctagaataagcaaggtggtactaaactccacatgcatgccatcccatgaggtgggcttttgtgattttccaaagaattaatcttcgaatgggccttagcctatctattaattccaacaatcccccaccaaatctcaaaatcccaatgagatttgccttttctaatgtactgtttatataccagcggttcgatggagaccgattaaggttgaacatccacctagaactccaagctacacttactcacaacttgaacaatggactacgccttgaattgcaagtcttgtgcaagcaagtttcactcagagtcttatctggtactagaccgtctgtagactacccctcgggtggagcgtataagtcatactcataggtctttagtaagcttcctaaagattcacccaaaatctccatagactgcgaccaacagtcaagcttacaaaggtgagtcctttcaagactactctgcaggaccacatcttcgctaattaaagccaacataactcattaaggcatagccaacctgccttgcagctcacgagagtacatgcatcttcacttagagagggtataaattggtactctcctctagtttactaatggtttgttcttcccaggttctaattcacgggatctccgatcacatagactgggttaccaccatggtataactcacatgggtctcaaacccatctccttcgatgcattatctatcacatttcgtgatagtcccttcgtgaagggatctgccaggtttctagctgtttggatgtaatccaacgttataacttcggagtttctcaatttcctgacagacttcaatcgtcttttcacatgtctagacgatttcatattatccttagaactattcactttgacaattaccgtttaattgtcacagttcataaggatagccggcaccgttttttcaacaataggcagatccattaatagatcacacagccattctgcctcaacagtagcagtatctagtgccgtcagttctgcttccatggttgaactcgtcaaaatggtctgtttgcaagacctccacgaaacagcaccaccacccaatgtgaagatatatccactagtggctttgatctcatccacattagagatccagttagaatcactataaccctccagtaccgcaggatacccaatatagtgaagccccaattccatagtacctttcagatagcgcattattcgctcaagcgcacgccagtgatcatctcccggattagaggtaaaccggctcaacttgctcacagcaaaggagatattaggcctagttgcactagccaggtacatcagcgagccaatgatttgggagtattccagttgattcctagcaattcttttgttcttgcgaagcaacaagctaggatcataaggtgttggagaaggcttactatcaatgtagccaaagcgattcaagatcttctccacataatgggactgcaagagtgtaatcccattctcacctctaattagcttaatgtttaagataacatcagctactcccaaatctttcatatcaaaattttgagacaagaatgatttaacctcatttatcacctcaaggtttgtcccaaatatcagtatgtcgtcaacatacaagcacagaataactccctcacccccaccatggcgatagtacacacatttatctgcctcattgactgcaaagcctgcagatgtcaatgttttgtcaaatttctcatgccattgcttaggagcttgtttcagaccatacaaagacttcaacaatttgcacactttgccttcttgaccttcaactacaaacccatcaggttgatccatatagatctcctcatccagctctccattaagaaaagctgtcttaacgtccatttgatgaacgagaagaccatgtgaagctgctagggaaagtagcacacgaattgtggtcaatctagcaacaggtgagtaagtgtcaaagaaatcttcgccttctttctgagtatagcccttagcaacaagccgagccttgtacttttcaatagtaccgtcaggcctaagcttcttcttgaacacccacttgcaccccacaggttcacacccatagggtcgctctgtcacctcccaagtcccgttagcgataatggaatccatttcactacggacagcctccttccagtagtctgcatcaggagatgcatatgcttctgaaattgacttaggagtgtcatccacgaggtacacagtgaaatcatcaccaaaggacttagccgtcctttgtctcttactccttcgaggagcttcacagacatcctcctcagagacatgttcatgtgtatgttcaatttgttctggtggtgtgattgaactgggaattatttcagagggttggctcgaaccactatgtgtatccttcattgggaaaaagctctcaaagaaggtagcatcaagggactccataattgtaccaacatgcatgtcaggtacctcggatttaactattaaaaatctataggcaatgctgtgatgagcatatcccagaaagacacagtccacagtcttaggtccaagtttgcgcttctgcgttattggtacattgactttcgccaagcacccccatgtgcgcaaataagaaagtgatggttttctcccaatccatatctcatatggtgttttgtccttatttctgttaggaactctgtttaatacatgattcgaggtcaacaatgcctccccccaccatgccttaggtagtcccgcggtgtccaacatggcattcaccaagtcagtcagtgtgcggttcttcctttcagcaatcccattagactcgggagaatagggaggcgtcctctcatgtatgatgccatgttcctcacagaataagtcaaactcgttcgagaaaaactcttcaccacgatcagacctaagcctttttatctttctgtcaagttaattttcaacttctgccttataaattttaaaatagtctagagcctcgtctttcgttttcaacaagtacacatagcaatatctagtagcatcatcaatcaacgtcatgaaatatcgttttccacccttcgtcaacaccccattcatttcacaaagatctgaatgtaggagttctagtggtgccaagtttctctcctcggcagccttgtgaggcttgcgaggttgcttcgattgcacacaactatggcacttagaacctttgacaatggaaaacttaggaattaaacacatgctggaaagccgagacatcaaaccaaaattaatatgacataaacgtgagtgccaaacattagcctcattatccacactgccacaaatatggttcacagacttattgcagaaatcagaaagggaaaagcggaacaggcctccgcactcataacctttaccaataaaatatccatgtttacacacgactactttattagactcaaaaaccaacttaaatccgtctctagtcagacgggagccactaacatgattcctgtcgatagaagggacatgctgcacgttcttcagctgcacgatctttcccgaagtaaacttcagatctaccgtgccaacaccatgaacagaagcatgtgacccattccccattaggacagtggaaccccgtgcgacctgataagaagaaaacaatgagatgtcagcacaaacatgtacattggcctcagtatcaacccaccaattagtagactgattaactgaaaaaacagtaggtaaattaccatacccgcttccatctctagtgttgccaatggtcacattagcaaacttagaagtctgccctgcaggtgccttcatccccttgcgctgtggacacttcctagccagatgaccaggttgcccacacacaaagcaagtcctctcatcctggttaggattgttgttgttcttctctgcctcttgaagttggtggtctgttgagctttgtatttccccttgctcttgttctgggccttgtgcacaacattggcactggactgcccaccatcgccctcagacgcggcgtctttttcccgagctttctcctcaacatcaagggacgctatcaacccctcaacggggaattcatgtctcttgtgtttaagtgcagtaccaaaacttctccatgatggaggtagtttcgcaataatgcacccggccataaatttatcgggtaagacacacttaaggagttcgagttacttagccatggtttgtatctcatgagcctgttcgactacaaaatggttgtcagccatcttgtagtcatgaaactgctacatgatatactacgaactgcattgtgtgttccctcagtgtactacgagtagcgaaataacgagacttttgcgaatgcctcttccttgatggatcttagcagtgtataaagtacagctacagtgtttcagcaatggattagctagttgtcaaaaactatgatgtattgcataactgtgttgactattgttgacttgtgtatcgagggatagtagtagtagtatcaaacgatactgtagcaattggcatagtgggctagtgggcattgatatctgctggcccattcggttgacgggtgacttatttgggctggaccaagaactaccgttgactttggttgggccacatcttcagaggtcaaccacaagtgacctgtggcacatgcatccgtggcattgcattgcatacttatcctacaaatgcagcatgccagcatcattaaccaaaacaacgcggttcaagcaagtggatttgggaaggcaatactgaaacacaatgatactaatgataattgaggatttgaggtggccaaatgaagtacttccctgatttattttttcgcggagcttttctagcggagactttgcggagcccattttttggctgaattgcaaatcatatgcgtttgagaggattaggtagtaggagatcacaaggtttcattttcacttttgtttgctactccactatttgtcagaaaaattatactactcctgtactatttttctcgtttgccgtgtcaccgcgtgagttgcgcggggtggagtgtggagtcgacttgactcccaagtccacttccctccataaagcgagctcggagcgcagccacagcagtgtagagcgcaagcacagcgacggcgagcaaccgcggtgaccggagaagcgtactacgtgtataccggcgtcggtcgatcgacggcaatcggccggattccggtgtgattggctcaccggcgatatgcacacgaagcgtccgctgccggcacaggcgccaccagctgggcttgtcctggtgcccgcgcccaagcgcccgcatgtggatgctgctgccggcggcggcggcggcgtggcgtcgccgcgggggaagcggcagcttcgctccggcatgctcgtcctcttcttcgtcgcgcaagtgtatggcctcgatccattcgcctttggcttgatttctttatgggcgccaatatggactccggtccaatgaaaagtatttcgaggtatcggttcctgaca

SEQ ID NO: 21662 - DNA, 11402 bp, Oryza sativa
gacttcgtcgagtggtgagcagagcagctctgcatctctccatccgtgatctgtctcaccaccacagcgtcgtcttgaatcgatctaaatcattttccccatcattttatactacgatctttttggtagctcattgcatagttatgtgtttgtctactgtagatacgtggagagaatgctatttcccagcaaagggcaatcgaaacatttgattgtgtctttcagaaagcatttgacaatgccttccagaagcatcttgatccaatttaccggtaagcaagattgatctctcactccctgcaacttggactgaagaattacatacttccattcatggactagtagagtggttaaatatgataacagattaacagttcacctgtcttcttgctcagataatatatctttccactcctttctaactttgttaaatccagaaaaccaaaaccaagagcacgcgcttgaaatttgatttaggatcctaatatagttatttttttatgatactccgttgtcttgtaactttttttttctagtaggtatgcaaatttcctgtttaattacactccttaaaaatttcatgcttaatactccttccggtaaaaaaaagcgtttaagacaagattaattcggtcaaacttttggagctttaaccatcatatttatattagaatatgtttaaaaaattcaataaattttatgatattacgatggtacttttcaagacgaatctatgcatactcttgaccatcattctcttgtttttaaaatgaacacttgagaagtagttaatggttacatttagaaatttgatcaaatcatgtcttaaatattaaatatttatgactagagggatacctctaaatcagacaaattgctccaaacatgggcaactactaatttgatcatttatagctcttctatgttgttatgttaacgttgagaagatgaaatattcatgttgttagaccatacatgagagaaatatgaactacgaaggtgctatgaaatatagtaaattgaatcaaacttattccattaatcttgaagtctccaattttgcgtgttcaccggtatcttatctttctatttgtaagagaatgatgaagttcgttatctatttaaactaacctttttttccacttctttggatttaaactaacccttttccttccacttctttggctgcagctcccttcaatcccttaacaagcgcactgatattctcagccatgaagtggttagatttcaaatgttccactgcttctttacagttcaacacttcaaacccttttctgataagggagtcccttttatcgagtttcattgcaagaagctacttggttgaatgcaactcaaactaaaaagttttatcctatttattttttctaaaaaaaacaaaaggtgtttgcctgacaaacttcaattcttagctcataatgattcttcacccaacgtgcaggaacaaatcaaacattcaaattctaaccatcatgctaatcagcaatacaggtatgatatttgaaattatcaaaaatatgcatagatgacttctattatttctagtaccaatgtttcactggttcttcatattgtttttcttttttcggcaaccagttcttatcaatcacttcaaatgacttgtgaactaccatgtatccatggtacactatctatttatggggcttgcctaaacaactttatgatgttcttttcatgctgttgtgagtctgtgacttgtgatgtactaaagttgtgatttttggaaaatcggaagtactgtcagatgttcaaatgacactagaattaatacacaggggtgtttcatactttttttaaaagagagaaaaagcttttcctcctatatgttgatagagaaggggtttcatactatttgtgtatgcattgtagatcaaaggcaaatcaagagtctgctgccatcactgaggaagtgaatcaagaacaaacagctgctagatttgtcgcgagtgaagctcaggaggggcaaagagttgagttgaggttcctcaataagttgaaccctcttgtttttacaaaggaaaaaattacagcggaggatggtacagctatcaaaattgccatagttagggataatcagataattacatctggtccactttcttctgcaagaattgaaattttggctctccatggtaacttttatgatgttgtccctgataattggaccgaatctgagtttgatcaccgcatagtaagtagttcacaaggtcccgcgttaggaggggtttgtcaagtcaagctgaagaatggggaggcctctccttctgatgtatttttcaatataccatcttcgaagactgaaagtggaaggctcattctagcagcaaaagttcatacaagtgacattggtgggcttcgaattaaggaagctgtgatgatgaatcctgttgtggtgcaggtttaccgaaacaaacgtaagttttccttcagaattgcaagctggttattctgtagtttgcatcattttttttggtcgggttagctgaaaaatcgaccaaccaaattgtattaagaagagagaaatgtgccagctacaaaacaacattatactgtcacagggcataagcccccctcccccctcccccccaaaaaaaaataaaaagagggaaaaaatacatatagtttgcatcatgtatttattatgtaagttttgtagtgtacattcatttttgatgtagaggccggtttaatctattattattatgtaagtattctccacatggcctgttaatacctcctagtgaccgtacaaaatctattctttcattggatttactttgaaattacatattgcataatcttcacgatatgatctattgtcatttactttgtttgcttttccccagtaaatagaagtagtgaccgtccgaagctaaaagatgaagtacatcgtttaaagggaatttcaggaaagggatgccgcaccaaatggcttaaagataatcaaatcaacactgtggaagagttcgtaaaggctttaaataaggatgaagaaaagatccgcaatgtaaggcctctgggattccaattctctctcatatgtgcacgaattaaatccatacagaaattctgtgtttatgttaattagagcctattattcatttcttcgtatatcagagcaaatttacctttcaatgccatgaaacagtacaagcataagtaaaagggtgtagctatatttatggcgccatatttttcatcaaaaaatagtcggcatgtatttacattgtaagtctctaaattacatatgtaattttagtgtatttacaatgtaagtctcaaaattacatatgtaagtactaaaattacatatgtaaattcgaaaattacatactaattacatatgtaagtggggtgtaaatgaggtgtaactactgtgtaagtggctgaaaaaaaatcgactgtagcatatggcgccatatttctagcaactccgtaagtaaaatattatttttgacaaacgaactataacatacgcattccttggagttcaggagtgtttcaagctaaagaaggataataagctttggaaagatacaattaaacatgctaaagagtgtgatcttgaagggaattgcaagctgaaattatatagagctgaagagcagcatgttgtactcttctttaactgcgtgcatgacctcgttggtgcgaaatttcgtgatcactatgttgcaaaggacaatttcagttcagatcaacaggtatgcgttgatattggcattcttctacagatgcaaacctttgatgagaacttagaagattacacttcttttttgttttctcaggatgcagtgaatcgtttgaagaaacaagcatatgatgagctggatagcattggctttgatcacgaaatgaaaaataactatccggtgatgacgctcagtgatgatgcttacattcccttcattgacacagcacaaaatcctccagatttgcatgttacatttcaaggtaagacattggttttgttctcttgtctttcatcagactcaactactgacgatttgtttatttggatttgacagttcagggtattgcaggagctgagatttatcatgcacatgaactgcctcaagcatttcctaacaacaataatgattttggacaacactttttacatggctttcaaggttggttctgcttttttttttctgcttctgctggttttgttttgaggaatacttttgtgttggaactaaagtaatcaagcaggtgctctgactcagatggaccatgactatgcgcaatttggcattgctgatatgcagtgttatactacacaggcacctgaagtaagtggagtttctttttttttggctcagtttgtaagaacacggatgaacttataagcccctgttaaaatttgaattttaaaacctatttttttacctctttcatcatagtttttctaccattagcttttaaatcggtaagaatacatatgtaaaagttttacccacaattttttttgttattattttttagataatggaataaaatctaggtctttgctcaaagagctacagccaattattactccaattcaagcaaacacaaacgcacctcaacaattcataaaaacactggtctaataaaacaagagcacacacaaactactaaatgcaacacaagaaagaatcacaagactatgaattctatttgtgaatctctatccgaagttagtgaaaaactgcataaccgttgactcaagattgtgacatgcagctttaacaacagttaacaaattgtatgtacgccatgaaaacaagactgcctctgattgttcagatcatagtatcgagtatctttgtgttgttccacactccttgaatgctaacgggtcattctttcttcagggtacctcttatggaggcaacaacatgatcggaccagcaaatgtaccgcagaatgttattggtgacggctctatggacatgtttgactgttatgcatacatctttccggacaatgagaaccagaatgagaggcctcatagctctgcatatccaggaccagtttaactgaaggctttgttgccagctagtaatctatcatgatttctgattaatttcattctttatttagataatggatattttattgttttattcttgatggatgtattactttcaagaaatattcttgctgtatgtattagcatttgttgatgcagaaaattgaactgtactagtacttatgtttcagaaaaaaaaacatcgactgttatgttacataattcaactgttgtatcacactacggtttcagaactccttctagtactattatttactagttagcgtgcatgttcacggcatcgcaacatatccaatggagtacataatcttatattgttgtttatagtaacaatggaaagaagcactaccaattcacgaaaaaaaaattgaaactcaacttctgcaatgtcgtaaacactaccaattgtgttgaaaggtaacaatgaaaattaacaatgtggtaaacatcttcttctgaccgttggatttgcttcatgttttatctgaccgttcgattctttttttttctggctgttagatgtgcttctagatatgtccgtgtcctaaaagggcatgtagcctactgcttgcagaagtgacctgagtagcaccccaaggtcctgagttcaaatcttcataggagcgaattttagattgggttatttgagggctaagttccctgtttgataagttaagttcctaatttaaaatggctgtacatatccgattgaatattgagtctgggaaaaaaaatacccttctctgcaaaaaagatatgtccacgttgttgggcctggtggtattcatgtttggtaacggatttgctcctctagcacgttaactttgtgtgggctactgggcttctttctctcgtcgtagctgaacccgaagcaccgcttgtccgcttcacctcctcgatcgcgtcggtgagactcggcgagcgttccagccggccgccgccgccgccgccaggctttggcctcgggtctcctactaccaaccagccatggcgcaggtctttcgggcgcggcggcgaggcggaggcggcagggaggagccgatcgccctggtggtgcggtgacggtgtctacccctcgtcagcacgaggcgttcgtggaattgtccgtaagcgcgcggtctcttccccgcgaagcaaggatgtggatgttctttttgcagaaaaaggatctggcccatcgccttttccgtgtgcatatgggacacgagcagaaggtgttcgtgcaaatgcggcagacagcacaggcagacagttcttgttttggatgtgttgggatcagagtactggcgttttacaagtttgctgatgccgcacgattgcagtcaacaaggtcatttcactggatttttgtctcaacaatatcgggatactgagttctccttatcaccgaaattttagcagttcaagatgctgagcctaaggccatccacaatcggtgtccctgggtcgtccccccgctcacaccgtccgccgtccgtccgcgcagcgtgtctctggagggaggcgcgacccccacgcggggaacccctctagctccccagctcgctttttccagagacactcccttgaagctacgtgttgcggcgacccggtgccccatccctaccttctctcctggtgtttccccttcttgcccctcaccggcggcatggcgacgagagagagagaagagagagaggcgacggcgacgaggatccacgacggtgacgaccagatccggccaccagctggcgacgggctcggcttccgcgacggagacgacgacgaggactggcgatgaccaccagccggcgacgggctcggctttcgcgtctgccacctcgacgccaccacgccagctcaccatatctgcccgcctcgcagccggatctgcctcctccagctgccgccgacactggaaccgacgctggaaccacttcggtgacgacggcgggacgcggctggcggagggaggaggaaggcagctgctagagggggtgaggagggaggcgccgcggcggctggggagggcgagggggaaggccgcggcggcgggaaccgccggcgacacgcctcgcgctcgacacgaccggcgtcgcctttgtggaggagccaaggcggcgaaagaaagagtgagggggcaggaccgcgggagagagagagattagggggtagtttagtaaaaataaatatggggttttgtgggctgggatactcattgtgggttggagtgtctctattaagttgctttagattttgaggagcccatccaagggtatcctccattgcgagctgagtttccctagagtgcctcagttagtgagaacactctaggagtggctcacattgtggatgccctaaaagtgaatcagaagcggctgttgtagtactctttgatgaggtaactccttccctcaaatgcatgaacatggaatcttgtccatgaagttaaagctacgtgtctcccgaaaggcagcccctctcacggagatttgctatataggagtactatgcagaagcatcacgttttaagcacttaaatagttgaagtatgagctaggaggagtggaagacattaattagtgggcgcattgttggcatcagttaaaaattggatttagctactttcttacttcattttcaatcttcttgtttctgctactttttctttctttttgaaaagtaagatatcgtttaaaaaaaaaagtaagaaaaagacaatgggggcctggacctgaatagtcttgatggcaagattttattggtttcttattcatcaccacctcatatatataattgtcttgtcgcgaatcgtgatgattgagcaggtagtttggatggattggctccaaaactatttaaaagaatccaccagttaattcactcaagtgctctctgttttacaacaagacctggaccttgatagtcttgatgcccaggtgtttgtattttaggcccttcctctttcacctcatatatataatgctgcaaccggagtaggctggggtaaggtgcatcatcagatatctcctcatccttgctgaattcctgactgcgcaagctgatttgaaggtctgtcaaagtaagctagagttgggggaaaagtgaaattaagaagctagctatctcctgctaattatttaatggcatgcatgcttgagttttctttctgatccatatgatcatttagtatatattgtgctgcatatatgtacatgttcttgtttagaaaggatttacaagttctgttctgacatgcaccttcctctgtctacacatgtcatggcatgcagggaatcaatcagatatgattatagaggtgtgttgctgcctggggtttgctgcgaatgtagcgcagctggctggcctggacgtggccagtctggtaaaggaaatcaaggagcgtgtccagacagtgagccagaacaaggaggactgtgagctgctcgccgaacgtgcggaattgatccttgatctgctcggtcggttgcagaaatccaaggtcatagaggaccctgacatgtggaaaccaacagagaggctcaggtcaactcttcgtagggcatgcgaggtcatcgaattctgtcgggagaggagctgcacgtaccgcttctgcaagagcgaccataccgccaaagagttgcgcaaggtgctcaaggctctgaaattttgtgttacccatcatcaatggtgatcaaaccacacgttactttctggtccagcagactccagatgttgttcagctgcaggtacatccatgctacactgttacttcaagtctacaacagctaagatcgagcttcatttgctaaattacagtgtactgtgcaacacaaatcttttgtgcattccctaaaaatacactctaacgtgcaactgccaaatgcctaaaataggataattcaaacaatctatccgttttgtgattctgaagtttgttccaacaatatgagaggaagtgtatgtgttctgataaatgcctgcttaatcggttgagcctaacttaagttgttatttcaggatggcgtacaagtacctgctctagggttgcctgctcaacacttcaaatataatgaccggtgagatactgatcacagtatgtatgtgtatctaatggcttgatattaggttatggatgtacatttttgaaaaaatctcaaaagttaattatgctattatatttgaattttattttttttttagttttttttccccccaatgcatgcagcaatgataggggagaaacactgggtatttcagggaaagctcaactggtaacagagccttcctctgttaacgagccaggtacttcatttttatgggccaatctacatatcatggataagtacctgtaggtgcttttcttgatttctataattttcatttgccctttttttgtcatgatcctaaaattatcctccatgggaaaaaacgaagaaataaacctcggtttctggtaatcctatttcatatgaattcatatatttctgcaaaatttcccagcaagggttattttcacaaacgaaaacaggctaaatgaacaaaaaactttcttttcttgagtgctattctatgttcttaaaatattgatgcatttagcacagtaaacttgaatcaccgttttctacagtcctacataatattgttgaagaaacatcagcagaaaagaagttatcaagatgctgttggtggcatccctggaagagcattgctacctcttccaatagtggcatgcttgttgcccaaaaagaaataggtaatgatgaatgatcaataatccaaaacttagtagtgtaaaatcatgactgcgtttccaattcggcaattccatttgtaatgccaagggaagtttccaaatactaaatgatacatgtttgtctaaatgacaggccttaaaaggttcgctttctctcaattggaggttgctacagacaacttctctctggaaaaccaaatcggtgtaggtgctttcagcattgtttaccaggtaaggatttgcatatgctttgctctttgctggcttctgcattcagcaaaatgatttagcgaagttgtttgaaacatcttctcttgtactaagatattagattctctttctatgatgaattttaccattattgacttgtatttggcgtttactcctaggggcgactaaatgaaggacttgaagttgccgtgaaaagagcatcatatgttgacaaaattccatttcaccagcttgagaatgagcttgatctaatcccaaagctccagcatacaaatatagttaaacttctaggatattgcacgagaaagagggagaggatactggtcttcgaatatatgcctaacagaagcttggattcattcataactggtagggttcagttcaattagcactatcaatctcagttttgagaccaaattatcctgttgatattgatgtactaccctcctattcatattcacttatatccatatttgcttctcgcatttacaggtgaacgagcaacaaaagaaccattggattggcctaagcgctcccaaatagttagagggatagctcagggagctgtatatctacacaagctatgcgaaccacgtattattcacggggatttgaaaccaggcaacatactcctggatgcttctctgaaaccgaagatttgtgacttcggcatttcaaaagcacttaaggcagatgcggataaagactgcactggcgtcgtggtgggctcacggtaaggcggttttgtacagcacaatcttcaatggttatactttggagtggttttacagtcctcgagtaggtgccataggttttagtgttaatttgtggtccttctttgtacattaatactgaggtgttaccaaaaggcaaaattcactagaaaaaaatgtagtacatcgtctaggaccttaaaatactctaatatttaaccccgtttgatctgcttttagttgtgattgattaatttttcatctttttcagtgggtttatggcccctgaatataaacagggaggctgtctctctctccagacagatgtgtatagctttggcgctacgcttcttcagatcattagaggaaaacacatctctccatcttcactggcgctttctgatgaatctcacaactacgggcctctaaataagtgggtacgtgaacctttccgagtgctactcctgaagaggacttgaagggtatgcaagcctgacacattattcagagttgatcactgattaaccagtagcattttttctactcaggcgtggaacttgtggaaagacggaaacctgatggaattgatcgatccgtcgctggccgatgagaatcatgcttctgagataaagagatgggttca

SEQ ID NO: 21663 - DNA, 15378 bp, Oryza sativa
catcaagtgtacctaaataacgagactgctgcagaagtatttgcgatttgtcaaaactgcgatttctgcagagctgtgttgactactgtttgacttattgagttacatcagacggtactgtagcagttggcataatgggccttgatatgtacagcccattcaagaactcccgttgacctttgttgggccacactttcaggtcaagcaccacaaatcaaccgagacctgctgcacctgcattttttaaaataataaaaataaatcccagactttactctaaaaaaaatacaaccacttattacaaaattctctcaaagttagcaaaacaattcggccacatcaaagcaaaaccaacacatgagtgaacaattattgaagtctacctcctgcacggctgcacctgcatgctttggcaaacaaatagtactatataaatatttctgatgcataggcaccttcatgaactctggcactgtaaagtagtgtttaaatcaaatgcagcctggatttatactggggtccaaatccacgcggtttcagccagttgatttctgtccgttgaatttgggaggtgatgccaagacattttaattgaacttggcaaatgcaagaagcaagagggaattctagcaaccaaccggcgaggagaacaggccgggactattgcctgaattttccggagcttttctggcatacgactttgtggagcccgtttaattttgggggaaatctactgcaaaccatgcgtttccaaaggatatgtggttacgtacgaaggttctcgtttttcacttttatttgctgtttgctctcttgtcattcagtcaccaaaacttgcatataataatgtatatggctgcgttcggatggacaggtgataatgcgcatgtacctttaattatatttgtacagtttctaatctatcaaagtgcaattatttaatttcaagttcaaagttagctgtttcatcctaaagaacaaagagataaatagccaaaatgagattttgggggacggatgtattaaattgtaaaatattgatctagtaattgaacgaaggaatagatgttactgggggatgtcaatttacaacctagatacacatgcactcatctcttgcatatcatttgcatgaatcatgcatgatcatgaaattttatgaaaaatgtgactttatatgtaaagttatgtgatattaactttaatttacataatttaaaacaaaatttggctggaaattagtgtaaacacccttttatgaccagatttgtctctgtgtttcttttcttgatgctgtgtagattgattctggacttgaaattttgcaagatttgaattcctttcatagtttgtgacatttcatattataagttattttgacttattttctagttaagttattttaggtttggccaaatcttatatacaaatatagtaaaatattcaaactaaaaaataatgactaggaaaaaaaagtaaaaacgacttacaatacgtggagagagtatttaggaagtgagaaacaattgagtgtgcgttaattcacttgagcaagtttaatagtatagctaattacttgctctaaatcatttatagtcaattcatacatcagatatctataaacatatactacactattaatacatgttcctcacctgccatacacacattatatcttgaagtccgtgctacagctggctacaaatatatagcccgttgcttctctatctcctattttatctactggacatatgtatatgtttatagctagctatagcttgttattgtatctgcttgctcttgtaataatccaaatccaaatccatgcatgttccagtttatttttctcactaaccgcgtgagcaagacttcgtgctcggccgagtccactccactcgccgctcgacgacacgaccaccataaaagctcgtcgtcgaagtggagtggaggggccggggcggcacagcgagcgctcgacgacgaccggagaagcgacgacgaagctacctaccgtcgtcggggaggagtaacgagagctctgcggcatcggcgacaatccatccatccatccatccatcccggtttcaggtggcgcgcgcggccggcgagcgacgagccgacggcatgaacccgaaacgtgcgccgccgccggcaccggcgcacggcgcgccgccgccgaagcgcctgcagatcgacgcgttccggagcggcgccgaggcgttcgcgcaacaggcgccgacgtcgtctccggtgaagcggcagctccggcggggcatgctcgtgctcttcttcgtgtccgccgcgcaagtgtacgcacgccggctcgcacgcctcctgtttgatttaattcctccgtgggaagctcgttgtctgatcacccgcgtgctttgcggatgcgcaggaaggaagagcggaggaacaagaacaagaacaacgcgcgccctgctcgagtggcggtgagcagctctgcatcgatctctcgttctggaactgaatcaaactaaatcttttctcccatcatttttgctactcttttggtagttcatttcagtgtcctgtgattaattgtgtagatacatgaagagagttctacttcacagagaaaggcacccgaggatgatgcctttcagagaggcattatgaaagcatttgataatgcccttcagaaacatcttaatcctatctattggtaagatctctcagtcggggtgaaagtagaattggagttgaagaagttataaaatcgatccttgaactagcagagtggtcaaataggagtaggaccacaaatttacctctctagctagttgcttagataaatccttttttttttttgttgagattgctcatttgcagtttttttagtaagcatcgaacgtgtaaattccctgtttaatacctctaaaatacttgtttggacaactaatgatttcatcatttacagttcctctatgatgtttttatgttaactgtcaagctgatcaaactttaatgctgatataacacatgcaacaaatctgatctatgcagatgctacgaaattaaatcacacttattgcattgatcttaaattgtccagttttatgtattaatcaatatcttatatctttctctatgtcctagaaatatgattttttaataaaaaataaactagccttttttcttccacttctttgattgcagctctcttcaacaccttaccaagcagactgggactctttctgagcgaattgatactgtcagccatgaagtggttagatttcggatactttattacaaggacactactttatactagtttaattaacccctttctgatgagagagcttcttttattgtgttttatcaggaagttacttggtcgagtaaaattaaaactgcaaagtgtttgcttacattttattatgatgaaaaaaaaatgtttgcctgagacaaacttgcagggacaaataaaaaagttaatttctaaccgtgatgctaatgagcgctacaggtatggtctttgtaactattgagaatatgcatctctgacttctgttatttccagtatgcaatcttacatatcaatgtctcacacacacttaggttcttcctattgtgctgatcagttcttatcaatcacttgaagtgacttctgaattactgtcaactgtgtattgatggcactatatatttatagtgatgttcgtttcatgatgttgtgtattacagttgtgaatttcagacaatttaaagtactgccagatgttagtatgagactatagttaatacacaatggtgtttcatactatttatgtctgtattgtagatcagaggtaaatcaagagaatgctgctgtcactgaggaagtgaatcaagaacaaacagctctcagatttgccgcaaatgaagttcacgaggatcaaggagttgagttgaggttcctcaataagctgaaagaccatcttgtttatacaaatgacaaaattacagcagaggatggtacagctatcaaaattgccatatttagggataataagatagttactgccggccaactttcttcagcaagaattgaaattttttttttgaacgactcgcacgagacggtgcgaagttctattgatagagcaggaaaaaattacaaggttacaaccctggagagtcgtaaccaggaaaaaggaaaaaataaaccaccacccacacggcgacaacgccatcacacaagcccaggagaaggctaacactggaccggccgccgctaagcgtgaccgaccgccactaggccaacaaagggacacagacaaggtcaccagaggggtgagacagcacgacaacgctctcaggaggggggataaccatcgttgtcggtccgaccaaggccggactgggttttcacccgccgctcgccacttgcgaaaccacgcctgacgcaccgatgctccaccaccacacaagctttgccgacatgtgggacccctgcaccggcgtcccccgccggccagtcttcgagcgctgaagaccgcgccacacccaccggcagctcctcctcacccctaggtcgcctcctccaccgccggccgcgccactctgcgccaagccggcctcctccaccggacgcgcctcgcgccaatccggtctccctccatcggccgcacctcccgcgccaagccggcctccatctccgccgcccgcgcctctcgcgccgagccggcctccgctgtcatcggctgcgcttctctgcgccaagccggtctccgacccctccaccaaacgatgccgcgccggccagatgtagtcgcctcccacgccctcagctagccgtttgaggccgccatgcctccagtgactgtagacacggtcaccaccactgcagccgctgctgcctaacgcccagctacctcgccgtcgccatcctcgcctcgccgctgatgtcaccaccgcctccacaaacagccgccgtcgccgctgccaccgactccagcccccgcatccgcaacctgccgctgtgccgtcacccttcaccagcatacggctggctgccgcccgatgccatgtgtgccactgccgccatcgccagccgacaccgcagctgccaactaccgcgaccgccgtcgccgtcgccaactgccgctgctgccgtcgccgcaccgccgccgcaccgccgccgtcgtcgccgcacagccgccgccaactgccgccggccaccctccagatccggccgagaggcgcggatctgggggacaccgccgccgccgccgccgaggagcaccgcgccgtcgccaccacaagctcacacgggaccaccaccaccatcttcgtgcccgcggccggttccttccccgctaccatcgccatccccgccgccgcccggcgccgcgcgcccctgccttcgccgtcgccatccccgccgccgtggccgccgtcctccccgccgccagtcgccgccccgccagatccggccggagcggcctggatctggcggtcaccgccgtcccgcctggcggctcccctgcccgcccggtgaaaggtcggcgaggggccccgccgccgccgtccttgcggccggccggctttgccggcggccgctcgagcggcggcgaggcggaggggaaggaggggagggagaggggcggccgggtcgtcgcctcccgtgccgccccaggggaggacgacgcgagagtcttagtggattaagaattgaaattttggttcttcatgataagttttatgatgctgcccctgataactggactgcatgtgagtttgacgcccacatagtaagtagttcaaaaggggcggtgttaggaggtgttcttcgagtgaagcttaagaatggggaggcctccctatctgacgtctctttcaatatgccatcttcgaagactggaagtaaaaagctcattctggcagcaagggttcttagcagtgacaaagctgggcttcagattaaggaagccgtgatgaatcagcctgttgaggtgcaggttaatcgaaacaaatgtaagtttttcttcagaattgcagctggtgtattcagtagattgtttgcctgatgtttctattttgcaagtattctccacattgtttctcggtacctcccaagtgccaatgactatataaaaagtcttccttcgtaggattatctttgaaattacaggttgcatactcgaatcaactggatttgtatgttctgttggcatttatctctcttgtttcctttttgtccagcaaacaaaaagagtaactgtccaaagctgaaagatgaagtgcatcgtttaaagggaatttcagggaagggagagcgtgctaaatggcttaaaaataatggagtaaagtccatcaccggtccctgaacttgtaccgctgtatcatcccggtccctaaactcgcaaattgatcgttcagatcctcaaacttgttcgactgtgtcatcccggtccctaaacttgcatatcactcgtttaggtcctccaacttatttagttgtgtcaccccggtccctaaacttggatttgaatatcatctgggtcaaataggacggtctaaagactttatatttaaaaataattcataactttttcatgtgaactctaatgaagacaaaccttatatcaaacttgtagccctcgacgcgatctacaactttttagttgaattttttttattctaagtcattttttgtcccaaaatgtaattttaaaattaaaatttcaaaatctataaacatgcaacaatattttgggaccctgaacagttttaattcaaaaacttttcaactacaaagttataggtcgtgtcgagggctacaattttgatataaagtttgtcttcattagagttcgcatgacaaagttataaattattttttgatataaagtttttagaccgtcctgtttagggaccgggtgacacaattgaacaagttggaggacctaaacgagtgatctgcaagtttagggactgggatggcacagtcgaacaaatttgaggacctgaacggtcgatttgcgagtttagggaccgtgatgacacaacagtacaagtttagggaccggtgatggactttactcaaaataatggcatccataccgtggcagacttcaaaaaggctttaaacaaggatgaagaaaagatctgcactgtaaagctcctggactcccaactaatctctctctctctctctcttacatgcaatgtactccctccgtccaaaaaaagacaaaccctggtttccgtgcctaacatttgaccgtccgtcttatttgaaaaatttatgaaaaaaattaaaaagacaagtcacgcataaaatattaatcatgttttatcatctaacaacaatgaaaatacgaattataaaaaaatttcatataagacggacagtcaaagttggacacggaaacccagggtttgcctttttttgggacggagggagtaggccctttcattaatatgtaggacccccaaaatattaggtgcctctttggtatgttgcccttgcatgcaacgttaatttttttaatgataatttttgcatttaatttgggatgtgaaatattaatgaaaggagcacatagtttttttattcaatataataaatcatgaataatcaacagttaggatgactagtatacctcttacctctatagtagtagtgcaaaatttgctacaggactgaaaatttgcagcatttgctgtgagacacccaaagaacatgtatctttttgtggacaccgttaaaatgtggtaattagctgttggacactgctcgtattattttattatatcaggtcaagatggagagagaaaggacattgaaagtaccattttgcccctcggctcgtttggcttgtaaaggcgagtgccaccatctctctgcttgattcttccttcgctgcccgaatagccgcttgattccgccaccacaccccactgctcgaatccgccgccctgctctgccttaatccgaaagcgtcgctataatccgccgtcagcatagcttgcttgtcacaccccaatctggcaccgccgtacaacggcacctgacaggagcgtgtcgtgggaaaaacggcgcgaaccgcttcctacgaaaccgcgatctcagtaccagtcccaggacatagcgctggtacccacggtgacaaatatgaatcattgcaatccttaaaataaatagaggacttatttaccttaacttaggttgcagctcagaacagcccgagattgcaaccgacgacgtggacgaggaaacaccaacaacagcagcagcagcagaaccaacggactaacacccaacaccacaggtgacggctgggaacctggacgaaaccctaatcttcactttacttcatcttcaacttccgggcggaggaactacatatatttatatagagcaagggtgagtactttcatactcagcaagtcacgggaatttaggtgtttaatgcaagcttggaagagaggcaaggttgtttttgcaaatcttttgttttgaaatcattttgaaatcacaaagtgatttatttctttctaagtttgggtcgaaaagagacttgcgtctcgattcgaccttaagagatgtttttcaacagctcatttggtaatgtaccgacctcccgggtcagatcattacttctcggctcctagagccattccacttgattaatcggctcccagagccttttacattttctcggactcacagagtctagctgcccagcagcacaacaatccgcttccactcgggaagcctagtctatgatgccggtagacatcccgaatcacacagattcatttcttgaccactcaggtcatccatctgccacataggctgattctggtaacaattcccacaccacaacaacttttcacaaagcacaggcaaacaaatctacgctacaggaaacacctcacatccgcccatgaccgcgggcacggctgttcgaacagttagttaacctctgcagagggggtacactttacccacacgacattactaacccggatcacccagcccgtgagattagccacgtcgggagaccctaaggctttcataacaaggcatttcgaaagccgacacaggtttaccatatgccaacgagaggggtcccagaccaacaccaggttaggtcccagaccataccgtgccaggaagcccgagggttctccctgacaccaccccgttgaatccacatgtctcttggcatcatggctcccccgattagctaattactcagccaggggcgtcccattgcacccgtgtggtcgcacttattatatgctcagatgaatttcccacaggaatcggtccttatatgcgaatacaggacagtaccacataggcacaacccccgcatcgcgagttttttcaaacacaccgacgccacatgtcgggttttcaaggcttctcaaacccatttcccaaattatcgacaaacaacggtgtatgtggaatagttggtataagtgctcagagagcacggataccgaagtaccacaagggtggagcgacaaggaatcagggtaatacgacctacaggaattagtgcgactactgggtaggtccgtcggtttggcacgcaaaccgaggccaagcatgttaagtgtgtgattctaataatgtgagctgcaatcaaaataataatgattttccaattataggagcaattggtcaaagggtgacttgcctcgctcaaggtcttcacagagcttcacgaatcttcgagaaaacccgcgatcgacgaaaatccgataaccgcaactttacgcaaacaaacaaaaacctaaagaaaagaccaagaaaaagaccctatttagactaaataatagtgccattaaatagatctcaattttacggaattactggaagttgaacgaagtcaatcgggtgagcggttgagaagatatggattttctaaggattatttgattttctgtctaaaggaaaaggaattattaattcccttggaaaagaaaaggaaggagggatcggatttagacttcctcgggcgacttaggcgcagcccgagggattcacaaggcttggccggccattgggccgagcgcggccacggggaggcggcccattagggggcgcggggagagagggaggcccaacggggtgggcgcggtccgccgcgcggggtcccgagatgggcccgcatggcagcggtcgggtgtatggtggggagggcgcacgcggggacgggcgagacggatcggtggattgggtgcggatgcggtgcgccggtcgacaaggaggcggtgggcccacgtgcagcctcatggctcaccggggtccgcacgcacggggatgaaggggcgagggcgagcggctgaccggcttgactgggtcaagccgacgtggcacctatgccaggccacgtgggcggcgagaggaggaagaaggggggatgccgagatggacggcggacggtggccgagttcaccggagtttgatgcagaggtctagggccaaggggagcacaccggaacgatggctaggataagagggagtgagcctccggctcggattcgccgggggggattcgatggcgacggatttcgacggtggcggccggcggcgatcaaaaggggaaatcgcggcggggcgacgagaggtcgattcaaggaggagggagcatctccggggcgcggggaactcatttccggcaccggatggggcggaggactgccgaggagggctgacgacggcggcggcctccgggagcgggcggcaacggcggcaagcctatggcgggcggcggcgagacctggggcggcgtccatgcgtgttcggggggctagccgagctaccacgcgagctagggagggagagggcgagcgagaagggagaacggagggtggcactaccaagccgggacgggcgcagtgacgagcggccgacggctcgggagcgagctctccggcctcgggccggggaaggggaagaagagggatggccggagtcctcgtctcgcgtccacgcatgcaccggcctctgatgcgtgcgacggcgaagagacgaaggcaagaggtgggagtggcggcaaggcgtcaacaatggcgcggtgagtgtgaggcgagcgaaaacgagagaggaaggggtttgggggcggcttgggttttatagtggaggcgatgtcggtttggggagggagggaaaccgaccttggtggcggtcaaggagagcgagctggcggtgagctggtgcagtcgcacgaccagcgtccgcgctttggccgcgagcggctgggaccatggatgatgtcacaccccgaagttttcctcccaggccaaaattgtaatttacaaatgaccccaagaaaatgcaggtgaaatcaggagaaaaccctaagaaagtaatgcaaataataatcggacttgacatgtggaatttttcttgagttctacatgtcaaaattcattaacaggatttttagtggaattttcagagctctagaaataattttaaccaattaaaattgagcaagcaatattttattccagggaaaatcctttttcctttttctttttctttttcctctctttttcctcctttttgtcaaatgggccgtcggcccatttctcctttcctccccccccctctccgctgggccggccgcaggccgaggcccagcccggcagccaggccgccccgctgcctcctctctcggggtcgccgacaggtggggctgtcacaccctgaaaattcaaaatatataaattgttgtttaaatggaatttttagaaataattttaaaagtcttgaaaagaaaatctaagtttaattaataaattccaatataaaatggggccagataaaatttcattaaatactttgcttaattctataattcctagatttttctgggatttatttgagctaagaaagtatttgtaataaatggaattgcatttaagaaataattttaattgaaaaaggttttaaaaagtcttcttttggctttgggccgaaagtcggcccaaaacctctcttctctctcctcggcccagccggcccagtcagccgcgcgcgcgcgccctcgctgtcgctgacaggtgggtcccgcctgtcggagccgtcgtcttcctcgggccgaaaccctagcgcggcgccgccgagccgccgccgctgtttccttccaatccggccgttcctttccttctccggccgatttgttagaggggaaacaatctccgggatctcctctaccttttctcctttggaatctttggctcaatcggtttggaatgagtttgattcgagttcgaatcggatcggctttcctctctccaagccgcgagtttccttcgccgttgccgtcgccgtgggccttcgccgccgcctccgagcccctttaaaaggacccccggagtcttctcttctcgccgccaccctcgccttcgcttctcgtcgccggaagagctctagcgccgtgtgccctagctttgccgtcgccgccgccgctccagccgtgtgccgccgtcgtttcagccgtcgccgtcgctcgggaaggacgtcatcgtggtcgccaagtcgtcgccgtcctcgtccgccgcttcgccatcgtcggagaccgccggagcatcatcgccgtcgtcaagccgaagaactccgccgtttcctcctcgtcgccggcgccgtccgttgcttctccgccgtcgttttggtcgtcggtgagttcgccgtgccgcccgcttcgtcccggtgccttccgtttgcgttctcgcgccgccgttcgccggcgagcgtgcgccgtccgctccgccgagccgccgccgctgtcggtgacgtcattgctgacgtcatcggggtcgtccgccgtgagccgctgtggacccgatcgatctcggccgtccatcttggatcggttagatctcggccgtccgttcgcgtgaaccgccgcccgtgcgcccggtccaccaaaccctagcccgctgacgcaataaatccccttttccttttcaaaaataattcattattgcgtcataattcaatttaaaccgatttaagtgttttaatccgatttaatctttaaaaattcataactaattcatcttagctccgggaaaggctaatgttgtagcagacgctcttagcagaaaaggctattgcaatgctacaaaaggacgacagttgccattggaattatgcaaggaatttgaaagattaaatttgggaattgtcggtagaggtttcgttgcagccttagaagcgaagcccactctaattgatcaagttagagaagcccaaattaatgatcctgatatttaagagatcaagaagaatatgagaagaggaaaagctattggtttcttggaggatgagcaaggaactgtatggttgggtgaaagaatttgtgtccctgacaacaaagatttgaaagatgcaattctgaaagaagctcatgatactttatactccattcaccctggtagtactaagatgtaccaggatctcaaggaaagattttggtgggcaagtatgaagcgtgaaatcgcagaatatgtagcagtatgtgatgtttgtcagcgagtcaaggcagaacatcagaaacccgccggtttgttgcagcctttgaagattcctgaatggaaatgggaagaaataggtatggattttatcactggtttacccagaacgtcatcaggccatgattctatttgggtgatagtcgacagacttaccaaagtggctcattttattccggtaaagacaacctattccggaagtcgcttggcggaattgtatatggcaaggattgtgtgtttgcatggcgtccctaagaagatagtgtctgatcgaggcagtcagtttacttcaaatttttggaagaaacttcaggaagagatgggttctaagctgaactttagcactgcttatcatccgcagacagacggacaaaccgaaagggtgaatcagattttggaagacatgttgagagcttgtgctctagatttcggtggaagttgggataagaatctaccttatgcagaattttcatacaacaacagttatcaagctagtcttcagatggctccttacgaagcactgtatggtcggaagtgtcgcactccacttttgtgggatcaaacgggagaacgtcaggttttcgggatggatatcctaagggaagcagaagaaaaggtaaagatcattcaagaaagattgcgtgtggctcagtctcgtcataagagttatgccgacaatcgccgtagggatttgagttttgaagaaggagattatgtgtatcttcgtgtcacgccttttcgaggagttcatcgttttcataccaagggaaaattggcaccgcgttttgtgggaccttataagattgtcagtagaagaggagaggtcgcttatcagttggagttacctcaatctttggcaggagtccataatgtgttccatgtttcgcaattgaaaaagtgtttaagggtacctaccgaagaagctaatcttgaccagatagaagtccaagaggatctgacctatgttgaaaaaccaatccgtatcctggaaacaagtgagagaagaaccaggaatcgagttatccgtttttgcaaagtccagtggagtaatcactcggaagaagaatcaacttgggaacgagaagatgaattgaagtcagctcatccgcacctgttcgccagttcttccgaatctcgaggacgagattctgtttaaggggggtaggtttgtcacaccctgaaaattcaaaatatataaattgttgtttaaatggaatttttagaaataattttaaaagtcttgaaaagaaaatctaagtttaattaataaattccaatataaaatggggccagataaaatttcattaaatactttgcttaattctataattcctagatttttctgggatttatttgagctaagaaagtatttgtaataaatggaattgcatttaagaaataattttaattgaaaaaggttttaaaaagtcttcttttggctttgggccgaaagtcggcccaaaacctctcttctctctcctcggcccagccggcccagtcagccgcgcgcgcgcgccctcgctgtcgctgacaggtgggtcccgcctgtcggagccgtcgtcttcctcgggccgaaaccctagcgcggcgccgccgagccgccgccgctgtttccttccaatccggccgttcctttccttctccggccgatttgttagaggggaaacaatctccgggatctcctctaccttttctcctttggaatctttggctcaatcggtttggaatgagtttgattcgagttcgaatcggatcggctttcctctctccaagccgcgagtttccttcgccgttgccgtcgccgtgggccttcgccgccgcctccgacccctttaaaaggacccccggagtcttctcttctcgccg

SEQ ID NO: 21664 - DNA, 5897 bp, Oryza sativa
ttagatctcgcccgtccgttcgcgtgaacccccgcccgtgcgcccggtccaccaaaaccctagcccgctgacgcaataaatccccttttccttttcaaaaataattcattattgcgtcataattcaatttaaaccgatttaagtgttttaatccgatttaatctttaaaaattcataactaattcatcttagctccgatttagttggttcaagtctctaaatttttctaaaattgagatctacacattaaaaatatccacatgtactgttcatgcttgtttatgtgctgttttggtgattttgctcttttctgcttagatttagtcgtttccggagagtccgttttcgcagaagaagagtttgaagaattccaaggccagcaaggcaagtcacacagatcccaaacaaccctttgagcatgttgatcctatttaaagctattgtttctattcaactattgcatctattttcgaatgtcattgggtggaattgacctatcctttgttatggccctttcgtacttgattaccttattccttgataccttgggttattataatttgactagttgagctttatttatattggtccaactagatactagatataattgcttagccatgcttagaaacattagtacatttatgggataactaatgactcactattatttcatgatggcttattgatagttcacgatggtcaatcgtgattagttaattaattaatgtgccaactaaaacctagtaatggtgggttgtgagcacatggttttgatggtcgtgctcatggcaattaaggaccggttcacgagtttcggttgtgaaacatttatcgtgccaaccacaagccagcatgggcaacggctttatcttttgtatagcatggttcattgcggggcaccagactgagaagtggcagagataagcccacgggggtcgctggggagtccatgccttgtttataagggggtgattatgatccaggaaggtgcgctgcagtggattgtgttatgcgaggggtattgtcacaactcctttccgagataccgtggtggtattgaggcacatggtgacatgatgtggggttgtgtcttgtgggtacagtggtacacctctgatcagagtaaaactattcgaatagccgtgcccgcggttatgggcgggtctaacaatgtctttcgtgattagtctcacacctctcatcattgtaaaagatgcttaaactggtaataatttgtttagctcctggtttggaatggtacattcctggtttggagatagaactgtgcagccgggatggttgttcagaatggttgggcctatacaacagggtatgttgtatagcgttggattaatattgtttaattacttaactgttttatcaaattctcaaatgtttgctaaatgctgcttttgcaaatgaaaccctattatgccatcctttgttatcctgtgcacttgcatatttgctgcgtggcttgctgagtatgtcatatactcaccttgcaatcattcatcagaggaagagttctacaatgaggctgatggtgtggaggattaggtgtagccttggtcaagctgcctgtggagtggagccgtctgcgccgtttattttttttttccgcttagatttttattgattgagaggaactatctacctctgtaatgacattttattcgcttattaattagagtaatatttgtactctattatcaatttgttattgtgtgcctcggctgattcctggacgagggttcacacacatgtaagcgtttggaattttggatagaaattccgggcgtgacaagttggtatcagagcccttgaccctaggttatgccaaatggttacccatagaagccttctaaaaatattggaaaagtagaactgttctcctccctttctcttttaattaaaccaaactaatggcacatgcacttcataatttttttttaatggttctcattcaaaatttattccagtgttattagtactgtacatctattactgtactaatggctcattttatcagcaaaagttttacaatgttgttttatttaatcttgctgcaataaaataaatttagcatgttgattttataattttctttcatttcttttgaaaccagttattcaaaattacaaaatttgtaacttcgtttccaactgtttcaacttatcctgcaagtttggtttactttatttacttaccttttactttgattttctaactttattcaaattaatccaaaaacttgtgctattaattggataaaggtcttaactccctcctttcacttgtctttagatgccgcgttacaagcctgagtacctgtttggtgttgagggttttgtccaggagttgcgtacgatgtcctttgtcattggattcgggactgcccctttttatgcccagattcctcatgatcgtcatgaagaaaagtgccgagtcaaagtcactttgaacagtaatagtgaagatatcccctcagtgatgtttgaagctggaggaagaaattacatccatgcatgtcaggaggtggcaaggatcgccataggagagctccgtgatcgctacagtgatcaattggccgacactgagtatcgttaccatcctcgtcaaccacagggaagtgaccgtggcagttatcttgagactgaaggaattgagaatgatgctaccacaaggcatttggttgagatgctgtgggctatggatgaaagtcgtgcggagactgtactagcagctcaagatcgtgaagaccggaatcgtggtaagatttgcaagttagaagacaaggtggatcgtttggagaaggaattagccgcattgaagggagaagcaccgccgcagaaggccaggattcgtcttaccgcaaggaagagagctttatttgtccctcgctatcaactggcgccaaaggttcgtgtggtggagaaagaagttgccccagctcaagtggatcctccgatcatcatcataagtagtgatgaagaagaagaacccaagcgcaccaattccaagattgagtgggaagcaacccaagatgatgaagacgacccgaatgagccttccatcgaccttcgatgcttggaagaactagagtgacttgttaagtcgttgtcttagatcgttgtgttagtttgcttgcttaaagtttgcttgtgtgtggctcgcatgtgatttacatcagtggtgggatgtaattgcatgcgtttgtttgtttttgagtgttaggaagttggagagtttagtggtgtgagagtcttcagtttgtaataatgaaactcagttaagagcaataaaagttaaagtaattctctatcttaagtagtttccccggtttctcttcttgtgccctgtccatgtcagatggtgaacactcgcagcaatgggaatggtcccaacaaccccaataacaacaacaatggagagaatcccactctggcccaagttcttgctcaacagacacagcttatgaacatgatgatgcagcaatttcagaatcagcaaaaccaaggaaataatcatgcacctccccagaacaagttagcagaatttcttcgtgtgaggccgcctgttttctctagtaccactaatcctgttgaagctagtgattggctgcatgccatagagaagaagttggatttgcttcagtgtactgatcaggagaaggtctcatttgcatcacatcagttgcatggccctgcctctgaatggtgggatcacttccgcctgaataggattactgctgaacctatcacttggcttgaattcaccgctgctttccggaagacgcatataccatcaggagtagtgtctctcgagaagaaggagttcaggtcgcttactcagggatctcgctcagttacggagtaactgcacgagttcaatcgtcttgctcgttatgctccggaagatgtgcgcaatgatgaagagcgccaggagaagttttttgggaggacttaatgatgagctttcttacccactcatggttggagattatcctgatttccagaaattagtggataaggctatacgtcaggaggacaagtacaattgcatggagcagaggaaacgtcggattgctcacttcaaggcacaacaggggagtaatcagaagccgcgtcttactttaggaccccagcccatgtcacagggaggttcttcgtctgttgttcgtccgcagcgtcagttcttcaacaacaatgctggcaacaacatccgtaatcaagctccacgtcctgttgcagctccagtacagcaacaacctgccaagagggagcaaggcagcaagcccgtggtgtgtttcaactgtggagacccaggacattatgctgacaagtgtccgaagccccgtcgcgtgaaggttgtccctgcccagagtaactctgctgtaccagcatcaaaggcccgtgtcaatcatgtcgctgctgcagaagctcaagatgctccagatgtgattttgggtacgttccttgttaactcagttcctgcaacagtgcttttcgattctggtgctacacattcattcttatctatgagttttgcgggaaatcatgggatggaagtggaagatcttagacgtcctttgatggttagtaccccaagtaatcaagcactctctttgcaacgtagcccctctgtcagaatagaaattaaaggagtaccatttctggccaatcttatcttgttagaatccaaagaccttgatgtcatcctagggatggactggttagccagacataaaggtgtgatagactgaaccagataactttggaagagattcctatagtccgggagtatcctgatgtgttcccagatgatttacctggtatgccgcctaaaagggatatagagttcagaatagatttggtacctggaacaactccgatccataagagaccttatcgaatggcagccaatgagttggcagaagttaagaggcaagtagatgatttgctacagaaaggatacatcagaccgagttcatcaccatggggagctccggttatttttgtggaaaagaaagaccatactcagagaatgtgtgtggactatcgtgcactaaacgatgtgactattaagaataagtatccactacccaggattgatgatttgtttgatcaactgaaaggtgccactgttttctccaagatagatcttcgatcagggtatcatcagttgagaatcaaagaggaggatatacctaagacagcttttaccactaggtatgggttgttcgaaggtttatagagaattttttcaagattgctaagcccatgacacgactgcttcagaaagatatgaagtacaagtggtcggaagaatgtgagcagagttttcaagagttgaagaatcgcttagtatcagctcctattttgactttgcctgatccaaagaagggtttccaagtgtattgcgatgcatccaaacttgggttaggttgtgttctgatgcaagatgggaaggtggttgcctatgcatctcgacagttacgtccgcatgaaaagaactaccctactcatgatcttgagttagctgcagtagttcatgcgttgaagatttggcgtcattatcttttcggtactcgtacagaggtatataccgatcacaagagtttaaagtatatctttactcagccggatctgaacatgagacaacggagatggttggaattaattaaggattatgacatgggaattcattatcatccgggaaaggctaatgttgtagcagacgctcttagcagaaaaggctattgcaatgctacaaaaggacgacagttgccattggaattaggcaaggaatttgaaagattaaatttgggaattgtcggtagaggtttcgttgcagccttagaagcgaagcccactctaattgatcaagttaga

SEQ ID NO: 21665 - DNA, 6727 bp, Oryza sativa
tataagtataataatagtatgtgcagtgttactacacacattttagtatgcgtctttttttttcgaggtgaaatagtatgcgtcttatgttcataaatatatatatttacatgcacagattagcagcgcaacgttttagtgacttcgtatttatgtacgctctaatttttcacattatcacagattcacagtgaaataattttacttatattttttcatcataaagaataaaaaaagatgtaaaatgtcaaatctagtactagttgcgcacataatagatgtttccgtttatttttcacagcttctctactgttctacagtggtatatatactggtatctatcagaccatcactagtattatccctggagaaatgattaatttgagctacagcattatctcgttccacactagcttgggtatttttcttgccgatgtaaccccttttgtactttgtttttccaacactaaatcttaatgaaattagtaggcccttccttcggccgacccgagaaaaaaaaatctgtatattcaattctgatgagtatagaatggttgacggacaggttgactccatgtctccatcacatgcacaacagtaaaaagaaaaagacaatacgagtttaatttttttcttacgtaccccgatcctacttttgcacatcatcgccgatctgggcggtggcctcggtcgatcgggccaatattgctggagttgttgactactactttcgtttcaccgtataagtctttataacattacccacatttatataaatgttaatgaatctatacacatatatatgtctaaattcattaacatgtactccctccgttttataatagatgacgccgttgactttttctcacatgtttgatcattcgtcttattcaaaaattttatacaaatgtataagatataaatcacacttaaagtactatgagtgataaaacaactcataataaaataaattataattacgtaaattttttgaataagacgaatggtcaaacatgtggaaaaaaaatcaacggccgcatctattaaaaaacggagggagtatatgaatatgagcaatactataaagtcttataatatgaaaagggaagaagtagttgtcttcgcccatgcatcaaggtggcatcgttttattggagccccaggcgcctccctgctgcaacgactactcctgctcgttaaattcgaccaaattaaccaccagccggtgaagccgacgcgtatagtaatttgcaaattaaacttgtctgtaacttcttcagagtaaatgtcttagaaaaattgtaaaacctgtctctaggtgcatgcatgcatgacagataaaatataccaacaattaataacacgcaaaagtcctagctagtggtggtagatagatcgatgattaattattagaggaggaggagaagattaacaagatcacctgcgctgcacaggcaatcgtgtgaccactgcaaaaacgcggtttcactttcacgtcgtctcgtactaacttctgtatcctgattcattattggacgtactgaaattggcccagttttattaatgtgggagtagtttccctgatgttttctagaactttcttagctccatcgacgaaagtggactgaaattaattagggttgtgtttagatccaggggtcaaaagttttgacgtgtcacatcggatatacggacacacatttgaagtattaaacatagactaataacaaaacaaattatagattccgactgtaaactgcaagacaaatttattaaacctaattaatccgtcattagcaaatgtttactgtagcaccacattgttaaatcatggcgcaattagacttaaaagattcgtctcgtaatttacacgcaatatgtgtaattagttatttttttcgtttatatttaatactctatgtatgtatccaaatatttaatgtgatatagtgaaaacttttgtcatgggatctagacatgccctagagtgtaatcgaacgattaacagcctagctagctagtgatcagtgttgaccgttgactgacacagaaacgacaacaaccgtgacacggttaaaccgttaaacgcgctgccacgcggcttacacgcgtatcaagaattaaactacctagctactcccgtatatatatataaccgtgcaggacacccatgatcaactagtgattaattacactgagctggaagctagccttgacctgtccgtctcgaggtcgaggctacgacgacgatatatagagatcgattagagagagataattaagaaacagggattacggacagctagctagctccggcgacatgccccccaagcgtaagtcgccaccgccgccgccgccgcatggccccgtcgtggtggtgcctcccccaccgtacaggcggcgcctggagatcatcgatcttccccagggagctgctgctccgacaactccaactccggggaagtggcagctgcctcgggtgcccatagctttcattgccctctacttcatcgtcctcgtgtacgcctccgatctcgatctctctctctctctctaagtaagaagggtacaagctttgttcatcatctgatgcgtgttctttgctattgatgtgcagcgaggggaagtccaaccgccgcattcgtcgagtggtgagctgctaacaaatctctgaatatatctctggatccgtcacaccgcggcgtccccctctcgtgcgctcatgctagccgcatgctcgctcacgggggatactcagctcgctcggcctatctggccttctttgtaggccagcactcttttgcttgcgtcgacctactttggcaggccaggggctctgcgaaatgtaaactttttcattggcttgcgttgctgcatgactaatcttcttctacagaagcgagatatagacagccacttagcttgccctttttacgcccagaaactaagaaacggtgaatcacattcttctcgactgcgtgtttacccgcctacagatctggcaccatgtcctttccccctctggctgaccaaaccttgccccctccaacggctgctctcttcaagtttggtgcccttcgtctatggtttgtttgccggagcatcatcttcataaaggttacgactccctggttttactggtttcctaacagttgtggaaggagtaatactctggggttttcgacttctctcttttttcggtcttagtgattttggattcgtcctgtaagagagccgtctgtggtcggcagcgggcgccgccacgtttggggatctgttggagtctagtggagtacaccacaaacctccctttgtttaggagcagccttttcttagttgtaaaagtttctttcctttttttcggttttccttttttttttctccattgtctcctagtaagggccattctgccggttatgtcatgtaattgaaactttaatttcttgctgtgcaatccttttgcgcgttcgcgaaaacaataaatcatgtgttcacacatgtcacgccccgagctagtcccgaccggaactaacccgtgacgctccaaactaacctgttaatcgataccagtcccaggaaacagtgctggtatcacagggagacagaatatcacagcaacagaagtctctttattatagagtagaagtacagtcatgttgggctgcggacagatcccgagctcacaactgcattacaaaaggaaagcggaagccaggacttggaccaaacaatcacaggcgcgacttgggaactaggccgaaaccctaaaactcatcgtagccggcttgctcctggaagaactcctcatcagcaggatctgcttcatcttcttcagcaactggggggggggatatttatatagagcaagggtgagtacgggggtactcagcaagccatgggaattaagtgtttaatgcaagcttcaaggaaaggctgtctgtttttgcgattggttttatttgaactcttttctaaaagcaactaagtgagtgcttctcaaacgacacggatgaggcagtgcgtctcgtccggtcggagtatgtgcaatgtatcagtctttagattttgaaacaaggttggcacccggccaaaagctttttaaacggccacccgggccaacacctttcaaacggccacccgggccaacaacttttaaacggccacccgggcctagctgatcccatcagctgcaggttttccaaacatcgaacccagtttctcaacagcaatttcacaagcagtagtcaaacaaaactacgctaggaatcacctcacatccgcccatgaccgtgggcacggctgttcgaacagtttgttaacctctgcagagggggtacactttacccacatgacattactaacccggatcatccagcccgtggggatcagccacgtcgggagacctccaagctttcatgacaaggcatttcgaaagccgacacaggtttaccatatgccgacgagaggggtcccagaccaacaacaggttaggtcccagaccatactgtgccaggaagcccaggggtcctccccgacaccaccccggcgaatccacatgtctctcggcatcaaggctcccctgataagctagttactcagccaggggtgtcccattccacccatgtggtcgtacttgacttatgtttggatgaaattccaaggaatcggtccttaagtgcgagagcgggaaaccgtacacccggtacgttccccggtccgcggttttggaaattcatttagttcacaagcaccgacccaagtgtcgggttttccaagtcttttgtaaaactccagttttacccaagttgttactcaaattttaagtttgaaggcgaccgtcgatattcgcacagagtgcacgattatcgaggcgcatctgggtggttacaaggggacatggtgtagcaattttcaacggaatgatcaattgcaacaagttaggtaggtccgccaatctgccttgcagacgggacaacagattaagtgtgatcctatcaatgcataatattttgcaagcaatataattaaatttcaaatataggctcaagatgttcaaaggtggcttgccttgctcgagatctggagcttgatcctcgaaatcctcgcactgcgggtcttcgggctccgaaactacacgcgaaacggaacaactcaacaaacggcgaaaataaagccctattaatgacctctaagcgtgccattggatagatctcgagatttgggaaattttggaagttgaacggagtcaagcggagttatggttggaaagatattgaatttctaagattattggatttttggtctaaaggaaaaaggatttaattaaatccttttttggaaaaaggaaaaagaaatgatgaagggagggaatctagactttcctcggacggctagggcgcggcccaagggaaatggagcggaccggccaagctaaatgggccggccggcccaaggcggcccaagcgcgcgcgcgcgcgggagggaggagagagagggccggtggaccgggctcaccacgcgcggtcccgagtgggacccgcttgtcggcggctcggctcaccgtgagcggggtgcacgcggcgtgctagggtttggggaggggaggcgcggcgcatgcgcgcggctcgcggtgagggcggaggcggcgggcccacgtgcagcctcacggcttaccgcggaccacgcgcacggggagaaacggagggagcggctggtcgggtcggcttatctggtcgcggccgaggtggcgccgacgtggcgcctacgtggcagccacgcgggtcggcggaaggtagacgaaggcccggccgaaacggacggcgggcggcggcggcgatcggcggagcgagccacggcgacacaagcgacagcgagtacaccgggtggttgcacgggacgcggggaggcgagccaacggctcggattcaccggagggagcttgacggcggcgaatcgcggcggcgacaaccggcggcgggaggagagggaaacggcgacgaggtcacgaggggccgattcccggcggtgggagcatctatgcggccacgggaactcgatgctagcgtcggatttggagggaacacgccgagggaggctggcgacgtgcgggtgctacggaactgggcggcgacggcggcgagcacatggcgagcaacggcatcggtcggggcggcgccggccaactacgggaggtctactcgagctaaaaccgaagtctaagggggggagacggagcgaggagggagaacgaagcgaaacatcaccgcggaaaggagaggcgctgtgacgagaggccgacggcgcgggagtgatctctccggcctcgggccggggaagaggaagaagaggcgcggccggagtcctcttcggcgtccttgctcgtgccggctcctccgacacgcgcggcgacgatcggcgacggcgaaaacagagacggcagtggaggaggcgaaaatggggagggaaggagaaggggaggccgggggtttaaggaggcggcaatgtcggtttggggaaccgacttgcgcggtcaagagcgcgagctggcgctcggctagcggccaaattggcgacagggaggatgacgccggcggagaggtaaaggggaaaaaggaggggagaaagggggcttgcccctttgccggttcgggaaaaaggaggaggggagcggggcgacgcggcagagggagggggcgctgcctccgtccttggcggcttgcgcgcggag

SEQ ID NO: 21666 - DNA, 3808 bp, Oryza sativa
taaaaagccaacggtgtcaaacattttgaaacggagggagtacgtactttcatcaagttctcgtacacaaaattaattggtttctatgcatgtcctaattaattaaggatctcttaaacatttattcttttgctaggtaagaatctcccaacaaaatctgcaggttcgatggctaatctgctctgtaccgctaattaattagtttatttttttttctcttccgacaaatttgggtaattgggttgtacgtcgtgctgagttatatatgtgcaatatactactagtagtcatttacctctaagttagaactgaatattaattaattaaacatttttaaaacatgtattataaatatgtacttggcttctaaagtcacatacataatccatcctcacatgtttttcattagacttgttttaattgttcagtattttcataattaaatataaagttgtacttaatttgcttggaatctgaattttaattttataatactataataatgaaattggagtgaatcattaattgtgaagttgtacttgctttgactcaagtttagtattttgcagatttttttggaactattttgtaaactaacaagtctaaaaaatcaattaagaagtgcaaagttgcaactgatgtgaactctctcttaatctgagctagtattataattcggtgtcatctagagatggccatatgcattcaatttttttccaattgattaacatggatgtttgctcagattaatttattaatagagggaggatagcaaacaggttaattgtaaagctactatatgttttcttttttactaaacactgtaaaactagtatagctggaggatttgtttatttttctctattttcttcctttaggtaatttgtctgttctgtgcttgttaaggtacgcaaagagaatattatttcccaggaaaaggtgctccaagcatttgataatgcccttcagaagcatcttaatccaattcatcggtaagatatgtcaatcaaagctagggtgatttttagaacaattatgattcaaatatactaaccctttttctccttcacttctttggttgcagatcccttgaatcccttaccgaacgaattgatactctgactcatgaagtggtattggatctaacacatttcactctattaaaaataactactccgtacctcattaaaaataacacatttcacctcattattgatttttatcaacaaacaagtttgtacataaactgcaatttcttagggtttgctcgagacagacaaatgtcctagcttataataattttccttttaatttgtagggacagatcaaacaatcaaaccctaaccatcatgccaatgagcattacaggtatgtcatatttgcaactatgcataaatgattcctatcagtcgtgcattattaattctaaattatagaattatcaagtaaatgaactaaagcatttaaagtatcggtaattcttttttttttcaaaatttggaactgtctaataaaattaaattacttatgccaaaatttaatactccataattaaagaacaataaatgtgaatatatatgtacattccataattaaatattatgaattaataattaaaatataagtttttcatatatgagtgcattgaaagagaaaactattcaataattttgttaagtaggaatcaaatcatgggttaacatttttttcctttcttgtgagtgacgcggtttaacaaataacaattaatccatactaatcacttcagtgatctactatagtaccatatatgttcgttaaaaaaacattatcctttggaatatacttaatgaaaaaatagattcgttcaaaaaaaaactcagtactatatattgatgacgctatctatttatgtagtttctttaaactattttgccatgttcattccctgttctggtagtattgtagttgtaaacttcagacaatttgaagtaataccatacatttcggatgacattggtgtttcacactaaaaagtactgtgcttgtgtctgtactgtagatcagaagcaaatcaagatgctgctggatttgctcattatggggaagctgttgagttgagattcctcaataagttgaagcctcgtctttattatacacaggaaaaaattacagcagaggatggcacggttatccaaattgccttatttaaggataaccagatagttaaatccggtccactttcttctgcaagaattgaatttgtggctcttgaaggtgactttaatgatgttgcccctgaaaattggaccgagtatatgttcaatcagaacatagcaagatccccaaaagggcctgtgttaggaggagtttgtcaaatcaagctgaagaatggggaggcctctccttctggcatctctttcgttgtaccatcttcaaagagtagaagcggaatgttcattctggcagcaagagttcatagcagtgacaaagccgggttccggattatggaagccttgatgaatcctgttgaggtgcaggtttaccgaaacaaaggtatatccttcagaattgcatcttgctgttctgtagtttgttttgatgcgtgtgctattatgcaattctgaacctctcagtcagtgactgtagaaaaactcttctttcatagggttatctttgaaattaaagagatcgcataatcggcattgtatgatctattgacattttctctcctgtttcctttttccagcaaatataaatagtgacactccaaaattgaaagatgatgtataccgtttaaagggaatttcaaaaaagggaactcgcttcgattggcttaaacataatgggatcaacactgtggaggatatgttaaaggctttaaataagaacgaaaagaagattcgcactgtaaggcctctgggattccccaatcattctatttctcaagcacacaaaaattaggcccttagaaattagcattgctttgcgtgtttatgcaaattagaacctttctttgtatatcaggacagcaagcaatttacctttcaatgtcatgaaatagtagaaacataagtaaattaatgtctcaactccaattctaaaatgatatgtttatcatgcagtaaatattcgttttgacaaaatgaaattatcttatacatttcttgacgttcaggagtgcttcaagctagagaagaacagcaaggattggaaagaaacagttaaacatgctagaaagtgtgatctcgaaggcaattgcaacctgaaatcatatagagttgaagagaaacatgttgtactcttctttaactgcgtacatgatctcgttggagcacaatttcatgatggctatgttacaaaggacaatttcaattcagatcagcaggtatacattggtatctgcattcttctaccgatccaaactttgacgtgtgaactcagaacagtacgtgcaatttctatttcaggatgccgtgaattgtttgaaaaaacaagcgtatgatgctctggatgacattgccttcgatgacaaaatgaaagacaactatccagtatctttgtcttcagctatgaacacaagcattactgatggtgatgcttccattcccttaacagacagagcaggaacaaattatccagatctccatgttacatctcaaggtaggtcaatggtcttcttctcttgtctttgatctcagacataacgcgtgatgatttactgtttggtgctgcagcagttgggaattctcatcatgctgagatttatcaagaaccttgactgcttcaagcattactgaactataatagtgcctgtgagatagaacca

SEQ ID NO: 21667 - DNA, 14597 bp, Oryza sativa
ttaattccaacagaagaatactgcaggatttatttgaagaatatttttgttttgataatgatgaggtctgtaaaaaaatttcagatgaaggttatcgagcaggtgctgtggctcagatctacggtggattttctgaagttgacatccctattgggtgctatattggtcagacatctgaagtaagtgttgtttctgttcaatccactcagtatgtaacatcctcactttctagaaaatggattaaaagccagcctctacatcgaaaccagacatacacagccaactgtaacattcttactggaacagagatgaaattattgtcgatttgtcatgctactagttgaacataactcctgaaatcatccaattgctagctttttcatcccaatataagttataagttatttttcctgatgccaataaggtctacagcttgaacatatgtaaggcatacccatgaatatgagtctgtctctaagtattattatttttttaacgaaccggtacgagatcgtgccattttcattgaatagagaagaaaacagttgcatcgccaagggtccatcagtatcaatctattcgtgatagactgtgtctgtctcttattattgagatcactgcatttctgcatctttctcctatcacgcccacactcattgcatgctaacgagtcttctttttttgtagggtacttcttctggaggcaatgccttgatcggactgatgaatatgtcacagaatggcagcgatggcagcaatattgcagaactgattgacaacgacattgatccttatcagtacatcatttaactgaaccagaacaggggcgcatgctcacaactctaggaccgtttttactgaagtctcgtcgctctgcatatccaggaccgtttttactgaagtctgaaggatctgtttctagccagtacgcttgctggctatttatcttctccctgttatttaccctaatgagcagcgggtgtattagcatatttatatatacaccttgaactgtaattttctgacaatggtttcataaattaaattgttagtcatcgctggaactttttaagcaactgtaagcatattacaaagtatttcttccgttcttttctacacatggctgccttgcctccatcaccatctcctgaatcactggacgtggccccatcatttcatttatacttatacttatcttttttttaagtaaacggattttttccactacaaatatcaaggaaaagtaacataaggagaaaaatctaagaaatactattgacaaacacccaaatccaagaaatatcatcgatgaagtgcaagttccataaaatgctattgtacaagcgatttggttctagaaataacatcgtcattagagttctatccatctcgcgtcgttaatgtatatacattgtttatcctatagcacttaatggagggctattaacaaaaccctagtagcgatgatatttctgggataaagtcttgcacaatggcattcatggaactcgtactcgtcgatggaatttctttttggaattgagtgcttgtctatagaatttcttagattttctctataaggagaaaactcggaggaatagaaacccaggttataaagcaactagaagaaacaccctcctgcgctagcatgtgtgctaccgtgttcgccgttcgacggacccaacaaaacttcgtctcttggaaaccaactaaagtgtacttcaaatcttgagtggcttattagcaacaaaaaaaaaatgatttgtgggtaaacttttatatgcgtatccatagcaattcaaaaataaattatgtaaaataaataatgataaaagaaccacaaaaccaactcttgattcaaatttgggcttataagcataataattgttgtgcgttgggtttagccgtatttgaatttgatcatctcaaagttaggtttccaacaaaaaaaataactatttcataattctatgcattcatatttatattttttttactaacatataaaaaccaaactgatattcagaattagagcaccatatcagagattcagggcttgtttggatgactactccaacttgccaagccacaagctagctcgtgccacaagtttggcgaatgatttgagagccacaacttaggctaagaaatttgtggcaaagtagttcatgagcacctaatttcttgtggcaggctaatgtgtggtaagcaaacaaacatatgctaactacctgtggcacgccgaacttgaggcgcggcaaactgtggcacctatccaaacaggccctccgagcctttgttttggctaagatgacaaaatcgattttgaacctaatggtgggccgcatcctttgtttgggcctagttgtcggcgtcacacaactgggcccccacactggagccaagtcgacccggtggtggggcccataacgcgatccctctggcctccgttgcgacgtggcctcatcgtgacgctcggatttgtttgaaacgtccacctgtcgtgtgattcagtgtgtgctcctctatctccgatctcctgctttgttttctctgctagtgaggaacacagagttcgccggagcgagcttgcgcgggagaatggaggcgcggcccagatgccggcgggagggttctcagcgtcggcgccgccgcctgcacggagttcgaggcgaagatcacgccgaccgtggtacctcctgcgtcatggcggccggccaccggcggcctcatatatattcgacatcggctacgacgacatatgaacaacataggctctcatcggatggcctaatcagctaaaaaaaggcaaattttaaattttcaaacttagttttgaaattgattttgtgatatttttaacgtagtttctttttcaatattagcttttaattcaccaagaacacatatataaaagttttatctacaaatttatttttattccctaataatttatgttttgatttattggggaaaaagccaaacgatggggccaatagccactagcacagccccagctagtacaccgatttttttattataaaaaatgacatacacaggtaaacaaaagatgataatagttggagaatggaattatggaaacatgtagaatgtctggttccacatatatatatatatatatatatatatatatatatatatatatatatattaaatttgtttggtgtcctatatatatatcgtcaacattgccatcgagctccaccgcaaatcgtggagaaagcacaccaagtatatgaacaattaattatacacaacagaatgcattaccagcttaattatgtacttatggcacaaatattaggagttatgtattgaaaaaacactgaacatgaaagtaggggttctcatatcggaatttgttgagaaaaacgaggcttgaacttgagctggctagctgatctctggtgctagcctgaagacctccagaccttttctcaaaagttctgtattggggcagtttgtcataaacagctaacttatactgcaccattttactggattaaggaagtcgttgctaacttatattcataattagaactcgtccgcgtctaccggcttgtgaccagtgttcctttttgccgggccatgaccgtgaccagtcttctttaggggcaagggtagtaagtaaatttcatcagggcaccagtcttggctagaagttgatgcttcatacatattccaaccttcttcaaaagatatgccattatccattacaaaaggcatgtccatgtgtggatgaagtacatgtggattcatctcccaatctgacgaagccatcgccgctttattagaaattccctgcgtaaaatgacgtcggcgtaagctgtgctggtgcgccaaccttgggctcagcaggctacacttactaaatcatgttgaatttaagattacgtggagatattattgatgcataaaaaaatatttaaacgcaaatgagtcgggcgatataaattgaacttgaagcatactggatgctaattaagatatagaccgaaataactaaattaattctcagttactgaaaacaactaattactaggactacttattagctattacaaagaggacaaattttacttaacaaaggcaagttgctatctgaaatccaagaatcttccatacacaatcctgaaatgaaaacaacaaacaaaaactccagtcactctctgtcccttccctatggctatgagtcaatgctcaagaatttgcacgtactttataaattatcgtttacctctcaattagtatctttgttcattaccactctacaggaccatttgccgccaaaaatgcaccgtaccctataagttctttctaattctgtagccaacttactgtaagattttattatcaaatcttggaccatatatatgcctatactgcaacactctttttgttttcgtcaaaaaaattgatctgatgtactagtgatcgggcattcaccgttataaattactcctcgcctcaaaccaccgaggtggtactaaactttgccacaatatacttctgctgctggctgttgccgatctgctgctgctcgcgaaatgggccaaggcccaatgcccgctgctgcaccactactgctcctgctgctgcaattgatgtttgctgcctgggaaaaagtccactttgactcccttaaatataggtaaaatctaattcgtacccctcaactggaaaaccgggtaggacgactcccccaactattgtaaccggtgcaatttgactccctcggcggtttcggatagcggttttgctgacgtggcgctgacgtggcgaaattgacccagtcttcgtcccacgtggcattcgaattaaaccaatatatgtgggacccatctgtcattcacagaaaaaaaaatatattgtgggacccactgacatgtggggcccacatgtcatcatctctctctatctcttcccttcatcggtttgcagggacgggagctagacaagcggcggcaggcaggcaggcgacactagggcggcggcggcggtcgagggagtggacggcggcggggccagctcttcctcctccctctctctccctcatctctttctcccccgtttgtcttcacaggagcaggggccacataggcattggcggcggcgacggacgggggtcgggttggcggcagcgacgaacgggggtcgggttggcagtgacggcgggccggtctccatcgcgccatcgccatctcgtcgctggaatcgtgcttggcggcggcaagaacctccggggtgaatggcgacggcttgatccaccgatctaataaacatgtatgtgctctgatgttattagtgaggtccctagggtggttcatgcgcaaggaattgacgcgagactcactggagcggcgggaatcgaagatttacgccggcggccggagttggagaagacgaagtcgatctccctcctcggtgcgccattctccgggatttttgaggggaaacggagaggaggacgatgcgaagtcgacggcgcagtggcttggctccggccctcgcccgcccgtcctcccgccgccgccgccgccgccggctcccgcccaccgccgccgctgccgctggccctcgtcccactctcgtgaagagaaagagagggggaggatgaagaaggtagagaagagaggatgacatgtgggccccacatgtcagtgggtcccacaatataaatttttttaatgacagatgggacccacatatattttttaattctaatgccacataagcgccacgtgggacgaaaaccgggtcaacatcgccacgtcagcaaaaccgcccccgaaaccgccgagggagtcaaattgcaccggttacaatagttaggggagtcgttctacccggttttccagttgaggggtacgaattagattttgcctatatttaagggagtcaaattggactttttccttgctgcctgcacgctagctaggttggcccaccaaagcagcacaagcccactaactcagcagcttttatcttcttctccttttcttttctctaattatcgtggggcgtcatacatatcttctcttttatcatcctctgcttgataaattcacacagtcatttattatttgccactgattttaatggaatgatgagtagcaaacaaaagaacagtaaaatttcagtggcattgagaaattcagctccctagtgtttggcgcagcagcaagtggaagtggttcttgactgcttgtgggtgctgtacatagtaacatgggtaatttaactatctttgagaaggtatgtaaatcttggtacaggtaacaaaatttttaggtactttctcaagtagaaagtaccgtaaaatttctttagaaatattatataggatgggggatgaatgcattgtaaaagtcaaactattgcaagacgtagataatgaagagaaaagatacgataaaacattctgtgaccttgttgatgcgctgcattgtaatcagaatgatttggtggttgttctgcttcttgcattggtacaaatggttccccatgaacacctgtattctcaaaaatattaggcttatagttatataatatgagttaagcgataaattaagagagtgacttctataaactttttgggtttatcccgtcaagaaatcaggtataaagagcagtttatgggagagcttaccatcactgacagataggtcattctcagagtcagcaagcaaaggatttgatccgccacctcctggaactggaatacgtgcagcagtgttgcagttttcaagtgaaggacatgtttgagagacgtgagtaagcccggggataaaattattgactgttacaaaaaaattgtaaatgtcaaaactattttaagatgtaaatagaagaaaaaagctatgataaaacactttgtgaccttgatatgctgcattgtgattagaaggatttggcggtggtgctgcgtcttgcattgacaaagataggtcttcagaaacatttctattaggggaaattttagtaggggcgccattttcattcattatgtagtcaaatggaatgctctctaatgcattgtatgcttcctttctctgactatctactatggcctgcaaccaaataacatcaggacagagttaaccgcaattgtagccagagcaactgtagggtaagatttagagtttaacataaaccttttgatatcgattgaaattctcctttgcagtgtacttgccattaaattctgctcccacaatatcatgtacgcaattgaagaagatcacatcattaatttggttacctacaaccttgtatgctttcaggtaatgattttctttgagatcacactccctggcatgctcgataatggttttccagtctttatgatcttcctttatacctagtaacttcatgccaatgaataacaattaacaagtgtataaattactctattgacaaaaatatatacataggacctacagggtattcgcatggttatctgaaaacaagttttttttttctttttctaattaagcatggaattttagttgttcgcaaagctatattgaaggagacggggtactttttgattatggtttaatattaatcatattaattaataattttatgtgaggatgtctatatactaccagcacaaaaatacttccgcataggaaaacttgtcctctttgtaatatatatggataattttatcatatttgagaaggtattgagaggcatcatattttctagtgtaaaacttaataccaaaatttttagcgtaaaatcttagtatcagcaggcactttcttaaaaactgtaaaatttttcaatatatataagtagaaaaggttgtagatctaacatttctttaaaagagtagatgcattagattccgactataatataagaatgcagagaaacataaaatgggatatttacatcattgagctcttcaggatttttgttgtaagcccttagaaaatgcccgacagtcgtgatgttctatgatcggagcttcgggtagtatattcctttctttgcaattttcttcagtctatatatctcatcatcgaattttggggcgttactttttgcatttgctgcaagaaaaaaaatatgtagctgaagatatatatactactataataagaattaaaggtgtttaacaccagttataaacttataataacacgtggatcagtggaatcttttgctacgcagtgaccttttaagattggtgttcccatgatctatactttctataaagttacaacccactgaatctaaaacttaacatgcaaaccatgccacatcgttattcactaggaataattacatatcaaatctcatacgagcatgcaacattatttataatttattgaattctacaaatcaacatgtaagtatatccaattaacacagctcacatcattttcacaatatatcaacatatctatccattatttttataatatttaatatataattatcaatatattccacatcaaaaatttttacctagagatactttctcaataatcgtaaaatttctcaaaaaacttacgcttgtttcggtttgtttgcacaacgacaggacccatgaatgcttcttgaacccgatggcctccagtggcctcgttcctattaactcttgctgcaatggtgaaggttcttctcaagctcccttccctaaactggattccagggaaggagcaagttccctcgacaagcctgcgagcaacaactcctttcaatacagaaatatgtccatctcgggtcttcacttccttttcgtccaactgctccgtggtgcagttaccaacgacgtcgcaagcgaaatcgtcccgtagaaccaaaagctcgatttttgctgaagagagtggaccggatttgatcacatttccatcggagttgatcatccgaacctccagttttatttgacagccggtgaaaaggggactctccaggttggaagtaaattggagacggtagtcgtctgaagccatttgtctgcatgcggagcataaaataataaggatggaaagtaatcaaagtgagatatatatgtaaatttaactcatctatatgccacatctactttaaacatgagtagtaagacatgatttctaattaatgcattcatcctcctttttcctctaaaaaaaccgctaactctaaaaacccaatcatcatgcatggaaaaccagcatagaaaaaaaactgaatcacttttctatctcctaatcctgttgccaataaagtgtaactagtgtcaataaagttgatggaaaagattttgtggttgctaagaaaagattgtagtctatgaaattaagaaaggaaagtatgtatgtaacccctacataacggaaccttttaacaaaacccttcatcagttaaaagggtaataaaaaatctgaccaaaacatatgggattatccaattcgacaattatttgatcccaactgaaaagtgagagaccatcggattcaaaaagcgttttagggcaagatgatgagacaacttaaattgaaagagggaaagcatgcaaggtactccaccttggaagatttgaaccggtatgtatgaatcgtcctctcaagccccgatggacgtagaatctgctaggatgtaatgacttaattaaggaagagatcttgcatgttcgagcacaacgtagtactaatacttaaagcaaatctgaaagggcgcgcatacttactctagagatcaataatgtttgaagtgatgttgcaacataggagtatatatatattattagcttccgaggggagaagcaggcggatttaaaggaggagaaaccgcgtattcataaccttattaggtttttctcatcaccttccggtagttttccaggcattttcgtggaaggcaaccaaccgcgacgatatatatattaattggtacagataagtatcgatcgcgagtcgcgactgctcacgcaatatagtgctgtaagttgttaaggaaaaggacacgcgactacaagtggtaacgcttcaggcctaaacagctatacgcaaacgtacttacaaaaataaagcatcatgtcttcctcagacgtagcttcgttgaaaaaaaagatgtgtgcactagtaaacagtaaacatgctaacagagccgagcatcattccactagtaattttaaaacctttgatggcttatatcttttaaacaatatattgtttttaagatctgattaaaccaacgtactctactgaaaatatatgacaaaacgagtccaatattgaatatattcagaatatttacttgtgtagcagtgttgttaattcaaaatctatgatgaagagttaattctctctaccagtgcagttatttctaacaccataaaatgctagttccattttttcagttactttcttataggaatgtagcaacttctaatcctttcttcctatatagttggtacccactacaagtcatttatgctataaagctcaaattctatgaggccacatcatcaagattatattgaccattagatcatctcgcgtctatgcaaatcaaccgttagatcaagttcttgtcattcgatggcatctgagaggaccaatgcttgaccaatgctttttatcttcctcttaattacctcatgcatcattatatcttcctttatcactaaccactaatacatctcccacccgaaagcctacaccactatatttgtgtgtacctctttctcattccttttaatttttctaatgcatctactagccatatctaggttgatccaatggattttcttggaatatttatgcttgaacgtgcttcctcaatcatctaaggaggaaatgtcaatggtccaatgaaatttggtttgtcactgtcatagatgacatcagaaatttgtttgtacagattacaacattcgatgatctttaccaattgcaaggatgtttatctcctctggtgattggtttttggtactctatcatgatcttgcttctttttatatctgatttcttcgttcatcaccaagcttcatatgctaatgtaacacaactatggtaacttcaatttttggtaactttaagtattgagggattggtccactctcacatttgactatctacatttgattaaaaggctatgccatatctttgtgcttttcataccgataatcactaaatttgtttctccgtagttcctcccatttacttataggtgaacatttttcttgaaattactagattcatgcacccaatagttgttttttttaagatcatataccaacatatgcatgcagctttatccatattttctctttgttttctcgcaaaaagaaatattttattagttgtttaaaatatctgaatgagatgctaagtcaatttagtacataataaaaatagtgtcctctttgcttaccgttcatggttcttcgaattgggagtatctcaattggaatcatgtcatttctattcatatagcaatataatgtaaagatcgaacgttcaaccatgttgatcatgcaattttgataaatttacaactatttgttcccttctgtgtaatgataatataccaatagtcaaaagttctagaattacatcttccaaattcacgatatagctatcccgcagcaatgcgcggggtatcaactagtattataaagagttacttctaatactgtgaatagttacttctattttttttcgtgtgcggatctcccgcccatctgcaccgaagtgtctgcaaaaatctgatttttttcgtgcgggtctatttctcgcgtgcgggtggcttatgttgcctgcactaaaaaacctcacaaaaaagaactccaaaccctaacccgccgccgggggagcatgaggccgcgctgccgctgcccgccgccgctctcggccggggttagccgtcgtcggccgccccgtgcccgtcgcccgccgagcctgccgccgcccgtgagggacgagagacgagaaagagagatagaagaaatgatgataaaaaaggagacttagtcgagcttgacgagcgtaggggaatcacgctcattgctccaaatgaaacgatgaccgtggagcggtgactcccaactcaacaataagtagatggaagcggctcatcatgcgccaattgaggttcatcctgttcttgtattgagcctcaataattaaattgaaatcgcatgcgaggacccacggtcctatgcgagaagagcacaatgaccagagctcgtcaaggaaccgaagtttctccgcatcctcctttggttcatacactttggagagccaccagggagtatcatcggagtggtgtcgaaccagtgctgttaaagagaaatcaacgaggtgaacatccgtaactattgatgtggaaacacggcggcctgggagatctgcttaactccagtgcaggtccaaggctagcctcgagtgtgtccagggcgtgctagctgatttgatcctgcaatcagcaagaaaaaataagggcagaatcagtcagccgatagccgatcggccgaaatgccaatagagtattgttggtggtcttagccgatggagtcagaccaaatcggctatggattgagtatatcaaagaatattaagctctaaacatgcctaatcggctgtaataccatctatcaagtttaataaattggtttaagacaatattatgaaaataatagatgtgacaatgtttagagcaagagagataatgcactagctaatactctagtacaaatctatataaatttactctaaatagattgatccatataaacacatcaaatagaaataaggcatgagggtgcaaggatctagctgatactgactaaaacttgatatgcttatataaaacgatctatctatataagtggcgaatatacatgaaacaggtattgaaacatgcatattaggtatgatcagctgaaaccccgatatactatcctcattatgcctaattgcaggctagtttgcacggttcaaagcacgactagggatgatgcatctcaaagtatgaaaagaaacatgcagtctagataatcaagcaattaaacacttttcaggatgatagatgccttagctaatctaatctagcaagacaatttagccaaaaccagcataaatcctaaagcgagaagcagccgatagagctaaattgagaagctaataatagattaactaaaacatatgaagcaatgactcacgatatcgagcctaacacgtctaaagcgacattttagcctcgatagaacgggccattgagatgggttatctcttgcgaagaactcgccaaaaacgagaaaagtaaaagggtggcgatgcaccgaagttgtattggattggcccccatattataatgctatggggttcatatttataccccgagtacaaacttagtctattatggacacgactcaaacctttctaaaattaaggtacaaacaagaccatatacgacggtctcttgccaaatatctaacaaacctactcaatatcctaactaatagatacaattgccttatccgagctctatctctaactggcaatgatgtttatcccaatctaggcccaagtcgagcccaagtcatgttgtatcggccgtatcggccatcagacttctcaacttgttcagtcttcaacttctatttccagccgatacagtatccagccgatgcgcaatccaatactgagtccaactcgattcaacaccaaatctgtttcaatcttccttcttcttctctgaatttgatgcaaaattccgttgttaacagtaatagaccagacaactttccgctaggcaagtaacatcccccacctcagaccaacaacagggcaaaaagtaatattcaaagttcaggcttaaggtgaacaggcaaaaagtatccactaccacggattgatgatctttttgatcaactcaaaggagctaaggtgttctctaagatttaccttcgatcaggctaccaccaactgaaaattaggaccggggatatacccaagaccgcgttctcaacacgctatggattgtatgagttcacagtaatgtcgtttgggttaaccaacgccccggcatactttatgaatcttatgaacaaagtgttcatggattacttggacaaatttgtggtagtattcatcgatgatatcttaatctactccaaagacgaggaagagcatgcggagcacttgcagttggtactcgagaaacttcggaagcataaattatatgcaaagtttagtaaatgtgagttctggttaaaagaagtcacttttctaggccacgtaatctcagccggtggagtagcagtggatcctgccaaagttgaggccgttacggaatggaaggcacccaaatctgtgactgagattcggagttttctaggtttggccggatactatcgaaggttcattgaaggattctctaagatagctcgaccaatgacacaactactcaagaaggaaaagaagtttgtgtggtcagaacagtgccaggaaagctttgagcagctcaaagaaaagctgacctctgcgcctattctagttctcccaaacaatgggaaagactttgttatatattgtgatgcatcaaggcaaggactaggaggggtactcatgcag

SEQ ID NO: 21668 - DNA, 9750 bp, Oryza sativa
gatcgagtgccgccgcatcctcccgtccgcccctctgccaactccctcctcgccgcatcctcttcgatggagagccagacgaggccaacgggcgcgaggcgggagaggagatccggccgacgacgcggtgacggccgcgccccgctgctcccccgccggccgccgctcgtgcagctgctgcccctccacctgcgcccacccgcacgccgctccgccgtccgccgcccatggagaagagagagggagaggtgaagaggagaggagaagaagaggctgacacgtggggcccacggggtcccacgctgactcagccaccaacgaccgtggtcaaagcgcaacgtaggataaaaccgggacgaaaaccgctgagggatctcgggtgactggttttatatagttaagggacctcgtatatctggttttatggttcgaggacgttttcgtatctcgctgacaagttgagggacctttagtgtactttttccacctaattcatgtcctcgaattcgtctcaagaataaatatggcccatcaaggaattcagcccaccatataacttgacacagtttactcattaatacttcatccgttttaggttataaaatgtttcgactttattcaaagtcaaattgttttaagttttattaagtttgtagaaaaaagtagtaacattttcaacccaagacaaatttattataaaaatgtattcgattattgatttgatgaaactaatttattattataaatattactatatttatcaataaacttagtcaaacttgaatcagattgactttgtctaaagccaaaatgtcttataacctaaaatggagggagtaatttggaccgccagcaaacttggcccacttattcccatcaacaatttcagcccacctatgaattaggcccgcttgctgcttccgtccctacagcgctcgtcgctctgctgctgcagccggcctccgccccccgccgtgctcgtcgctttactactgcatccggccgctgcccctaccgcgttgctgctgtggccggactctgcccttgcctcgccggcctccgtccccgctcccggcgtggcacggttcagggatggaggctcgggactgactaagggagacctattcctaggtctaggggtcaaagcgacccctttcccatgtctcacgacggtagaggcatcgatggcaaggttggtggcggtgggcagaagtaggcggcgatggtgctcgtggtggcagcgctccagcgagtttaggcaggggcatgatggcttgggagttcgaggagatcacggaggagctcgatgtaatagtggttgggcacaaagatgcactgggggcaacgtgtcgtgcggtccacagtggctaagtagaacagcgacggtggtatagggatggaaactgaggggttttggtgtacttgggacatggattttattcttaccattaattttgaacaaggacggtttggtggggggtgaattttgaggtttggacactgacgagtcgagttaggattcggcttcctagctccaatgacggtgattggcgctgctgagagcagagcagcttcagggagcaaggagagcatgctgtggcgtttctgtttgttggtggtggcgaccgatgaggcagtcgggagagggagaacaacggtgaggacaagagagcggcaaaggagagctcacgtatgcgggcacgtttgtgaaaaaaaaaagatgggagaacaagaatgagttgattggtaggtcgtatattttttttttcacttacatggggtcttgtgtaaacacgttagcgagtcaactatggttaacctatcatattagtaaaaaccgctttctaaaccaccaaaaaagttaaaatgcactggttttcaaagttggaggatatgatttacacggtttgttttgctgttaaaagatgcgattcgaacaggggcaagagggaggcattatagattttagtccatttccctttagtatatttgatccacaactgaaattggccttgttaattcccgtcaactatttgggtctctaatgaatttggcctacctactgtccaatcaacgaaattgggcaactacggccacgaaagaatttaggaaaaagtacaccaaagatccctcaacttgttagccagatataaaatcgtcccccaaccataaaaccggacatctaacgtcccctaacttacaaaaccggtcacaatagatctcttggcgttttttgacctcggttttgtcccacatggcggctgactcaacgttgatctatgtgggccccacatgtcagatagaccacgtcaccaccaaggttgttaggatcgggatactaggcagtatcgttttgctcaaagtaatatcgtatcgtagaatcgtatcttagtatcgggatactatgagattttctttttttaagtttaattaatatttatattaattatatatagccattatctactactacttaaaaaataagaggtgcttctatcgtccgtcaaaaaaaccgagcgaaaaaaccaggtttgtccgataaaaaaactgggcaaaaaaaagtgcgaaaaaaagaaaagaaaaaccaaaactgtccaatccagaaaaaaaaagggcgaaaaagaaccgggccaaaaaaccaaagttgtccgatccaaaaggaatcgggcgaacaaaaacaaaccggacgaaaaaatgtgcgaaaaaaagaaaaatcaaaaaaaattccgattcctatggcaaggcggaaaaaaaatgtccgattcttatgaaaaaaagtggcgaaaaaaacacagtagatccgattcccttaaaagttggaaaaaaatcatattcctatattatcctatttcccgtacgggtgtttttttttcttcttttttttccgtttcttttccctttttttctttctttttctttcttttttttatttcttaatactatgtatgtatataaaatttatatacacgtatacaaactttatatattgtatattttttcttttttatacgtatgtatatgagctatgtatacttctctatctctactattaaaaaatttaaaacatttccttcgtccgtccctacttaaaaaattcatattaaaaaaggtctgtccgatttataagaaagtgggaaaaaaaggttcgtaaaaaataaaaaaacaaaggagaaaaaaagtacaaagggcgaaaaaaagcacggcaaaaaaaaagtccgatttctattcgtttttagtccctatatatctcttctctatctctaatctaatctaatctaactatttaaaaagaaaagttttcatagaacaactaaaaagaaaaaatgcgcgagaaaataaaaacggttaaaaaaagcatgagaaaaaaaaagcaaaaaaacgcgtgagaataaaagtcagaacagaaaagctaaaaaaggtttctgccgtctgtaaaaaataaaaaaacatgcgaggaaaaaactgttagaaaaagcacgccatttctaaaaaaatggtttgaaaaaacctcacataaaaaacaccgtttacaaaaaaaacaagcagctctgaaaaaactattagagaaaaaacgttaaattgatagacgcatgagtcggatagtatcaatcatttttttcatctcttaaacggcttttgtttcgtcatctatagaaattatattaaaaaacaaacatatttttaattattatttagagaagagtgcacatgtagcaaagtgattctattttgtgtagacttgattatacgaggcaatgtaggatttgattgatcctattattggttgcaagaatgagatcgaaaaagtattttagattatatgtatgttgtcgcgtgaataatccaattattttaggtaaagcaagcatcggtaaggttgtgatcgtttatgttgggccattacattaaagatgttccaattttcacccgttgcaacgcacgggtattttgctagtatattaaaaaatgtagtaatgatatatgtcatacaaatagagacatttatcaaaagaaaccacgttggtttgatatatttaactgatttttatataaatttgagcatatttattcacattattttcaaaccatgttttcttaaataatattttgtagtatcgtagggatcgtcgaatcgggataccacctaagatttcgtaggatcgtgtaggatcatgtagtaatgaatagtagaatcgagatactatgaaaattaggatactaggtgggatcggtatcgtttcggcttggtagcatcgtagtattgtaagatactaggatacgaatcgggatactgataagcttggtcaccaccctttctatttttcccctcttctctcccttcctctctcctttttcctctgggcgtggatggcggcagcgtcttcgacgcggcgtggaggagggccggcgtggccggcggctgacggggaaggagcagcgcggacaggagggccgatgggacgggcggcgccgccaatggctgccgtcgcgcgaggaggagcgcggcggtcgtcgtcggggtgaggcggcagaggaaggggagattgaagacgacggcgccgccgatgtggctgccgtttggtggggcggagcggcgggagaccggggcggcggagctagagccacacgtgcgacggctccctggtcaacttgcgcagccgcgaacaagtagagcctcgccttcaccgccgcctcgcgatgacgatggcgatgagttcgatctccggccgccgccccgccgcatgcatgagctagaggaggtgcccggcgagtttcggcagtgagtttcgtctgtgcttggaggggtggtggcgtgagtttcggcacttgcttgcgacggcgcgagcttctccttggcttggagctggcagcggaggtcgtgccacacatccatgctccactcgatccactaccagctgcatgcacaaagctaaccaaccgatagacttgctccactagctcatgcaacacatgcacgtactagcatagcacaaagccttagctaactaactaattaatcatgcatgcagcgttggcgatgccgtcgtgcgagcgcagcggccggcgaagcggaggcggcgtgcgagcgcggcggccggcgaagcggagtggagcggtggcggcaagcgggcgagcgcgcggcggccggcgaagcagagtggagcgaaggcggcctcgggtcacgctcccggcctccgccagcgttgtcgccacacgagccacgttctcgacgcacagtgcgaatccgcccgagccacttgaccagcgtcgtcgccacatcaccacggttcagaagccttagcacgcgaagctgaggagtctccagccgcgagatcgacgccatcttcctcctctccggctgctagtcctcgccgttgatttctctttccttggtgagctagaactcgattcctcgcgaatacaccttcctggggacattgctaagcccctggacatcttcttttagcagcgcatcgatcggagtgggccgccgccgtgaagctgacgccatccgccgtcgccaagccgatcccgaggtcgccgtcgtcgtccaagcttcaccaagtcacgagctatctcgactctcgagtaagcacctaagaacgccgaccctcttccccaccgcgtcagtgacgccgtcgccgccgcatcggccctcctctccgcatcggtgatgatggctgtagccgcgcgccgccaatgccgaccgcacgagggggacggggaggccggcgagctcgcgctgccctaagcccgcgcgccgccacccgggagctgccgtcgccagccacaccaccctctggccgcgcgcgccgccgcctgtgcgagagcagagagcgaaaggaaggagagaaacagagaaagagagagggtgctgacatggtctccatgacatgtggggcctacgtgggtcccacgctgagtcagccgccatgtgggataaaaccatggtcaaaatcgctgaaggaactattgtgatcggttttataagttgggggacgccggatatccggttttgtggttgggggacgattttgtatgtgggtaacaaattgagggaccttgcgtgtactttttccaagaatttttagcccagctctttcgtctacgaattcggcccatctatgtcctagtgtcccgtttcggtttcgggcctctacagatggacaatgggccatgcgaggtgtatggtccacaatggtccggaccacaggagccatgccaagcgaaatctctgcgtctaagacatacttcgtacttccttttgtcacgaaggaagaaattaattcatccgcatgtagcaaacactagggaactatacgaatgcatctaaccaatgagtattaacatgttggctcaggttttgatcaataatttaatttagcatcatacaacgataatccctttacataacatttaaaatatgcgtagtttattataaaatactaataaataaaatatgtatttttggattaagaagcatcaaaaccagataatagaaaatacaggcgcgaccacgatgccatgactcggaggttgcgaccgggtggtgccagaactcgccgagttcgcaccggacagatcgatgcacttcattgtcaataaggtccctacacgtgctttttgctttgaacatagcattatatgcctaatcaactaactatgttataaacttataattcttttttgcttttgcttttatctctaataatttctgttgcaacacacgagcctttagctagtccttaaataaaaggcaataaagaagtcacactaccaaaactttctaacgattttgttatatacatctcaacaaatttctcttaaaaatttatcaaatataaatataatattattatagtgtactttaatataattttgaactgttaaatttgttttaaaattcatattagcaaggaagaaaaaatcacaacatgcttacatgtgaggagattctattccgagaggtccgcttcgagaggtccgcttcgtggaaatagcatgttactgcgagatttaggaacattacatataagttgtatcgtagttacatgcaagttataatataattacactataattgtattatatttgcttctgtcaaatttttgtaattaaatttttttcaataaaatatatagaaagactcattttctaactgaaaagcacaacaaacacatgttataactagctagatttttaataatgtagtcattttaaaaaataatatacaaatagacccataaaacacatcttacatatggaccctacctcagcagtgatatgttggtgccgagatgggatatctcagggctaaatactccggcgctgagggtctgatggcgccagtgaattcagcgtcgatgaattcggtgccaacctctcccatctagacctgcaagtccaattaatttgctgtcaaatttttggaagaattgataataatatatcttaattcattatctctaatatatttttgtctataaaatcttgatatggaggagaatgtgcatcctttcctccttataactaaatcctattgatttgctgtgaaatcttggacaaaaacaaattacaatcatgtgccacaattcaatttccctatattttttcttcaaaatttgacacaatacaatacgggctaaaatgaattaggatacattgattttattggttagttttcttttcaaaatttgatagcaaatcagtagagtttgaagcaaaaggagttgttcttaggtgagcgtcaaaatgactggtgttgaggtatggtgtcggcgctagttgtttggtgccgagagatagatccatatctgaaataagttttttagtggtctgtttgtaaaatatgttttaaaaagtctaaaatgtcaaaaatccagttataactggatgtgaatctgtttcatagaaaaaaaaggatgtgaaattgtgaatcttgacagtaactaggaggcaggcaccaaactggcagatcagacttcagagagttaggctgtgctaaaccaagactggggtaggagttaactgtggaaaagaagaacaggaaaagattaaaagatacactaggggatcaggttaacactaacgtgacgtgtcttacttgaggaggagacagttggacacaacattttccctgcagtttcatctcaacaagcaagcactgccaagagctcaagaccaatggtgtcacgtccaaatcagccaatttttagcaagaaaaaggccggaatgactgtggaagcttacaagaaagtgctattgcacacgtcgcaggataagataaccatcactggaaaataggcaccaaaactgatcaaagttcagaggattattcatctgttccatgctgtctggttcctcataggaaaacaagatatgtctgatttgtttgtgtggtgggtaaagataccctggaatttaacctcaaccaagatctgaatggcctgagaattcagttgaaaaattgaccaaagcatgtgaagaatgaacattgtttggcaatcaatttagagtagaaacaatgtgcatgatttcatttgtcccttattttaaaatgtcacagaaatgtttaagcaaacaagtaaatagagattaatagggttgtttcagtaggctgatgcagaaattcacggtttggtattcacacttataaataaccgtttcatacaaaataaaattgttaaggataatacacatctagttgcaatactgacataaattcagtagaaataattcatattatagaaatctaaagaatttgagtacactacaaaatctatatccctattaaaaaaagtagtggtggtgacagttaatctgctaccccgcctactctcattgtaaattttataagttatccctaaacttcttaaaaaaaactagattgatatgtaaaaggatgggtaatgcattaatatattttttattagtagcaaatcacggacatttagctactaattaaagaagcctaatgttgagaaacaactggaatttttttttattcctgaaaatacccagagctccatggattccgcccctgggttgtttattgtgtgattcttttttctgtttgtcaaaacaaactccaattacacatggcaaaagagtgttaattctaaatcggtcactaaaacatcttacactgcattctttacttacatttaatcaacttctacggcatattttgcaatacgagttacattcaaaaatcatatcaatttatatattttaagttttttaactaatacaatcatacaataattcgtcgctccattatttgtgccatgaaaggggtttccaatcccccaaacaaacaccttagattgtaaattctcaacctcgccatttacttagcacagagtatatatcacgtagtaaacttaccgtaagattgtgtgactaggcacaggaaaaaaaagcaataaacgataatccatatcagttacatatcaccatcactaacaataaacttaaaaatcaaaactaatataaatcagaaagccattacacaatctctcctctctctcgcctctcgctctctccaaatctgtgcgcggttgtgtgcggtgatccggggtgtcccgaccgcgatcagggccgtcggcttcgggtcggacggacggatgccggtggacgtcggccgcgccgcggcccgcgaggcggcgatgccggcggcgtgcagctcgtcctcgattgggaaggacagcgacgagtgctcgccgccggggaaggaggaggaggaggggg

SEQ ID NO: 21669 - DNA, 7716 bp, Oryza sativa
gatgatatgtaccgtggactacctgtattgtttgaggactattttcgggcactgattgtgttgttaattcacagagacgaaatcgaatttgaggtgatgttagtttactggatatattatgccattagatttagaattgagtagcttttaattagtctgtccacgatatcatacagattatgctgttataggttgtgtgttggtcaaaatgccaacttttgctggtgctggagtgctggtgaggtgtttgtgttatatgcttcatctccggacctaacagagcattagcttgactctacagtatagggtgaacagaaatgttttttctggataagtaaagacaagtcgatgtcgaatggaaaatcagttcgttttgtgttaaattcatgtggttgttgagtgctcttccttttcatgcatgattcaagaagagacgattgtgattgtgatatatattttttttgtaggagttggtagctgttgaaagttctagtgaaacttaaactttttacttaaaccttgtcaaaagtctcaaagtttaccgttaattaagatcactttatccaccaaaattttcaatttaaaatgcataccatcgaaattaattaagctagtatatcttctttaagatatgtaaagctagaggaatttctagcatggagaaatgcatgctgtcaaacaatcatggcatatttggttgaattattcattaactgaaaaggacctgcttcatgtggtagtgaccagtgttatgaagcaactttcaaatgagaaggactgcagtggattaacaggtacaaaacatcaattattgtctaattgaggacccattggtgccagtatcatcactacagtgaagtatataagtgcaattttttaacaagcatggacaaaggttgtacaagcaactcctttgctcccctgggtacagaagttgtgatgtttatcgtagtgttttaattctttatatgcagtgatgttttgttatcatgctgttttcctgatacaatcatacaagtagaatgtccttaagcatcttttggttgtttcattctatccatttttaattgtttggttataactaatattagctttatgtgggctatagtgatggcacttattggttcaatcatcattttattagcttttgcagtgtggatgttcacactgcagacatgatatgacatttttctatatttcacctctctaagatccacatgttttcatgaacagacgtagcatctccaaattctacaatggaaaatcaaaatctttcgcgtgtctcaaggaagctgtttcatcttgtggctctgcaaaggacatcgcgaaggcagagagcgcatattcgagaaaacggaagaatctccttgcatacagcatcatgtatgaaacttcacaggagacagcagcagaagtttatgaaactggaccccctaagaggcttgccagtctgagcagaaactctttggtgaccttggctagtagcagttccaggagcagcagtagtatcagcatcgaagaaaccgagctcactgagcagcttcattctcctccgtcgcttgctaatgatgaaaattctgcggtttataatgctccagcactacaattaggatcctgtgatcctaaaacatcatctgtgcctgtgaggtcattttcaatgatggatttgcgccgtctgcataggccaagatcctcatgtcgtctcaaagatcagaaaacgacagagtagcgtagtattcttgatgttttactggggctgctagtgtctttctgtattgtgaataaataaggggggagtttgatggtgttgtctgtgcctgcaagatgattggggctactgtgttgtatgtaaattagcatactacatactgatatcgatggcctaagccctaaggtgtatgtctgtatcatgcaaattaacatttgtaaattaactaaatcctctagtaccttatattatacattcttctggacccgctgactgtatctttatggtgttgctcttttggttaggaacatggaccctctgggccgctacgaaaccagtaagttcagtgcagcctgtagaatctacacaacatgagtaatttggataatgtacattgatttttgcggttaacaaacttacagtgcagatgatcacattgatttatactagactaacttaatatctaatttgatgcttgagtcttgaatggttttcaatgaactcattgatatgaattgaaggaagaatttgcacttttcagtgcttagtaataagaaaatagatgcaacgtttgtttttatgggaccaaactaactctaatttgaaaatgtaggaactattggactcttcaatagcattatatatactaaggctctcctaaaaatcctcacattaatctagtgaaggaaaaaaaaatctagaaattcccatattgatcgaaaaagaaagaaatactcagattaaatcaggaaaaagaaaaaaaaaatcttggccatctattcatggactacctctctgtcccaaaacaattattgtaacatttaaatcttgtctcaaaaaagcaatcctagaatactatttttcccttcaatcacctcatttaaatttcttcccaaccaccctttaatctatgtcagttattttgaaacgaggagtatgtaagcaacatacggttggatggcttcatttggtatgtctgagatcagacgcttgaatttatgtcctattcagttttcatactttgaggtagctaggaccgatgtagtgcatgcgcacggaacaaaaattaaacaacagtacatgtttgcatgctgcacaatcgcacagctagctcaaatataagcatttttaggattcagaatttatacacattataagcattactaaaatagtactacttatcgcatcaaccaccctcccactcacaagggatactacagtctttcatctcaaatcttaatatatatccactaaacatgattatatttcatattataattttacaaggttgcatgctgccgaatcgaattgcttcatctgctatgtatatcatatttagtctacggttggtacatgcatgtttaacagaaattttgcgttcttatacatttagatgataaatgaggcaaaagagagtaagagactataaaattgatatattatcttacttcaaaaataataattggtatattattctcttcacaaaatagctaaagtgatttgaatgatatgtactatttattgttaaaatacaaaggttataccgtgatccaaaaaagataaatacattcatcctaaaataggaagtgctaagcatatgctcgggttgtctcaaattttaactgataagagaaactagaccaaggataaccctggagatggcatgctttagacatgagtttaaggtttagggtttagtccacaacatagatcaaggcaacataaacattagttcaattattcaacataacgtatactcctcccaatataaattaacctagtatgagatgacatatcgtagtgttgtacagattcgtagtattagaatatgtgtcaccccgtacgtaataggttaaattaatattaatttgggatgaagggaatacatcctcgtctagagtagcatgcaacaccacgttctttttatcttactagctaaatacctatgctttgccagaatgaaatgtatttttcgtgaaatgttttacccgttgtttaattctatatgccgctatacatttagattgattggtttttaatataacgaagtttaggagttactcaaaatttacgatgaaagtagttgtgatgacgtattcactaaaacaaccactaaagcctcactagagccttttaaagtaatatagtacataagttcagggggtgatttgtaaaatttacaataaaagtagttggggttggcagattcactgtcaccactactagatccttttaaactagtatagatttgtgggattactgccgtagattatttatctccgtgcttctaaaatacaatttcttaaaaataaaactttattctggtccatttctaaaaagaattatgatttctagacaacttgttctatggtatttgttttatttttaaaatatttacatatgtaataaaacagaaaattcatgtcaacaggaactaatttatatgagagagttcacctctcatctatatctctagtctaacctattttattagccatgctaggtcatcgacttacttaccagccagccgttgctaaaatttaaaatttagttttaaagctgattttgaattctttttcatcgtagtttatttttcaacgttaacttttaaatgtgtaagaataaaaaaaacttttccttataaattatatttcaagctgtcaagagaaccccatccgtttcaaacaaaaccattaaaaatatatgtacacatatattttgtccagttttgaaagtcaaaggcgtaagaaaaacctgctttgtagttcaaggtaaaaggtagactttgagcaaagtttaagggctaaagattttaattttataattatatatttggatagcatgcattcatagatgagttcttaagggaggggcgagatttaaatagccgtgcatatatacttagcttaggacaaccggtgcataattacaaagtaaaatattgcaataaattatttgttgataaatatcaagtttttttttgaaaaacattctttttgaggggatttaaaaagtattttggcacaaagcgaagagatatttaactgtttgaatctcagtcaaacggttgaaccaaggaagaggatggtttctaagaaagaaaaagtgagaccggttgtttaaataattgatcagattttatttagataataggtcgaaatggtttacatctccgtcctctgccaatgagcacatagctaaaaggttttaggagtaaaaaaataagaagaactgaataaggtgatggagcaaaaccccaacttctgttaataaaaaataaactaaaataacatttgtaaaatcacgcaaattctagcacaaaattttgtaggtaccacgcaatccaaaatagaataaaagattcatggttaccagttccatgtgtgtaacaccattgtgtgcagtatcatgttattcctgtgatagcatcatagatcaagagttgaattagttggaacacatgaccataaactgttagatattttttattgtcaaaaaactacatcattatggcaacaccaaattgatcaacataaagcactagttccatatatatatatatttttaaaatctaggcacttctcttcgcaagttaccaaaaataaattttacattacatggagggaaaatattaaagaaaaaatgacacatatccaagcaaagcgtgcaacatgacagtccagtcaaagaaaggatgctcttgtgaattagaaaacaagattgtttgttaccctcaattttctccttgtcaggttatctttagttagaattttctctttaaggaaccacgtaaagactttgatttttattggtacctttaactcctataaaatcttcttacaatcttcttacagattcttacattgaagttcacgattgcattgtacaaggatttgaagaaaaatggttcgttttatgttgcgaccaaataaaggacatctcatttagttattgcaaacaaaaacatgtggaatcatcatagaaaggacatcaaacatcatgttaaaagaataggtatgcagtgttcgacccacatagacaatgacaattgttgaaaaatcagaaagtgtacttgacatttttgcatctcaaataagggctcaacacatttagaagaaaaatcatatcagacgccgagagctgcaaacataataatcaagagcacaaatatatgcacaaacggcaaaactttgtttcccaaaacattgtcaaatcaagaagaaaaatgagaaaaaccaatcctacacataacacatataacctcacaacatgtttgcatattgtacacacataatctacagacatatagtgcacaaaaactaaacttgctgaatcaaaagacacatagaaaaaaagctagcaaagcaaatatacctaggtagtgtagggtggacaacgtcgcggttgcggttctcatggccttcttgccatcatcaacaagaattacatggaggccatcagggaagaatgacaacatctccttttccattgccacaaccaatagagatttacacaatcacacactgctagctatgtactactctcttttcaccgatgagtgattagaccgctctcttctcacggtcttcatgtcatcatcgacaagcatgacacggaggccactagggaagaacatcatcatctcttccttcattgccatagccaatagagatgtacacaatcacacactgctagctatatactactctcttttcactaatgagtgattataaccgatgtgttctcatggcattcgtgtcatcatcaacaagcattacacggaggccaccagggaagaatgacatcatctcttcctccattgcctcaaccaatagagatgtacacaatcacacactgctagctatgtactactctcttttcactgatgagtgattagaaccactctcttctcatggcatttatgtctcatcaacaagcatgacatggaggccaccagggaatagaaggagagcatctcttcttccaccgccacaaccaatagagatgtacacaatcacacattgctagctatgcactactctcttttcattgatgagtggttcgaaccgttctcttctcacggcctttgtgtcattgtcaacaagcatgacatggaggcatcaatgaatagaaggagaacatctgttcctccattctcacacaagtctacacacggtgttactactcacttgttcactgatgaagtgattagaagaggggaccgaagtcactgaccaaggagaaggtagtgaggaaggtccagtatgggtgatgtgttgtgccaatattttttttcttttttttttggagtaaactggcgttgccacatttgaggatcaaaggttggctaacctatgttacggtgtgagcacgtgatatgtgttcttccaattgttcattttagccaagaaattacgagtggcatttctgcacaaagttgataaacttgcttagttctatagctatactttatgcatgcatgctgcttttaaaagtgtatgttacatatacatgatgcacacttggaaccatgtaaaaaagccattatgtgcccatggaaaaatgtactgtacacaattcaaaaaaagtagtacactcatggtactagcaactttctccctctttctctcttcaatatggatattttcaactatctcttgtgatgactagtggctaccctttcgttcatatttgctcgaaatatgtctgatcattcccaatcaagtagactcatccgtgactaaaagtgcatctagtcccttgtgtcggttttggctaattctgatcaaacaattaatggaatattaatgtggttaaagaaacattgtgccttgcaagtgcccatcagcaatacaatgatgtccttcaacgatgttgctgctagtgactgtgcaggctctggtgatggggcaacaactctcttgtggtgtctagttggatgcttccaggtggtatctttggcccttctcctaccaaggctctctgccacctactatgcgtaaccacat

SEQ ID NO: 21670 - DNA, 3149 bp, Oryza sativa
cccccctcctgaatcttgggaggatctgaatttctagtacagatttgatcagcttgtaaactgtttactgttatagacagctttggatcagaacactgaacacctaactccacacctttgacaattcagctgggggtgttcatttggctctctcctgcaagaattagtatctgggatatatacaaggaagcaaatggaggttgagggcattgtacaacaggaggttaacatggtagtcgtgacaccgtcagcttgccggaccgtcccgggtggtggcgagggcaaacccgcctcgttcatacatgcgctggatctcttcccgatactcagttagcgacttgtgtgggagcgcaggcgtcagctccaccacatctcccatgcacagtttccggttagggtcacttatgggcttgtggttaaccctcgggcgcaattcctctttcagtgggaagctgtaagggctgcatcttggactattggcccccactctctccatcagatcgactacagttgagttcgcaggaagctcttggacagacatctaaagtcaaaaatataattttgtcagacaattgaaatggccagttatatcatcacagaatattactattttcgacatgacaagttgggaagaaatcaaaaggagaggcataccttatcatgttcaagcataatcacaaagatgggtccatcgtggttgcactggcgagtgtaagaataagggcagtcctccgaatgcgagggaaatggacatggtggcctaatggcatcagagcggcctaaacctgaggaccgctctttgctcattgcttcgcattgccatgtgagcacccatcttgcccattccaccatttggagtacaaaagagtgcttgcaaccaccttccttgtatctccagtgtgcagcaaatccatactctgcttgtagatgcatttcttttgttcggatctgaacttcaaatgggtgtatgccctcacacatgatgacagtgtgcaatgaccgatacctgcaactagtaaattagcagggattcttgtagagattttaacaaattgatcaaacattattctacatacccattcaattttggatgcaggatatagtccttaaatcgtccagcaactcggggccagagcttatggacaatgtcaagagcttggtaacaatcctgctctgtatcaaccacaagacgtagaccatgaatgtcatgaacatcatccatcgttaagttcttcctggagggccacatgcattgcatggtaagttgctgtgcatacccatttgtgacaataatattcagttttcaataatttaaattaagaattcgacatactttatcatcttggagtatatgctgtacaggctcttgtgcctcccagaaagactgtgatacgaaataccttcatctcttagacctttatcaagtttatccagagtagatgtaagaagtgcttcgtcaaaagatatgacaagtttggaggaaagctccttgtgctcctctgggttcaaatgcttaaagcaaatattttccagctggtctttccagctagcgattcctaaccgattagccaacggcacaaatatctccatagtctccttagcgaatctttgttgtttgaccaaaggcaaagcttctattgtcttcatgttgtgtagacgatctgctagctttatcagaactgctcttgcatcagccattgcaagaaacattgtatgcaggcggtctgcttcaacggttctgcttgcagtattgttgtcccgagcaagtttgctcaagtggcttaacttggagacctgaataaagcataaattgcaatacaaagacttttacatttggactaggtgtaatcaaaattagttagaagatggttcaggtaatgcattgctaccaaaaaaaaatcatttttcaacaaggaaatgtatttaaagacataatcaaattccttcagatgagagcaggaaataagcagttcaaccaaactccactgttgtttaacatttcccaagaatggccatatacagtattaaaaaacaaagaagaaacaacaccaccacacaggggagtacaaaatatggttaaagttgtgtcactaattggttgctacaagtaatagatcaaatctgcagcatgccaaaaaagaggtgggcgacatcctgagcaagcacttcagccagctaaacatttcgtttacttagcagtaaagctatccatatgattgaaagctttagtagtgaagttatccatatggttgaaagcttaagcaagatgagcacatggcctgttgactttgaataatcaacaatgataacatagataattcaatcatagccgtggaaccagcccttcatctactaaactgggagagctcctaaactattatgaatttatgatccatctaaaaatcaagtaaacaaaactcataccccttcaactagatcagccacgccggcaccaaacatccggaaaatctgatcataatccatgaagctatcatcaatggtgtcatgcaggagtccggcagagacgacggtcgcgtttgcgcctatcttggctagaagcacggcggtctccacacaatgctgcaagtacggatcaccactcgcccgcgtctgatcacacaggcaaagcacaaagggcactagatttaaggacatagataattacaccttgcaaaaaagaaaaagcaagaagttaacattggagtttcgtccaagttcttgggaattgggattccacctggcctcggtgcgccctctcagcctcgaagaaggccttgacgacgagctcgtcgtggaagatgcggtggcgagcctgggcgccggcgaggaggtcgcgagcgtacggctcgcacgacggctccgcctcggagaggtgctcgtcgagctcgaacgcgagctcgccggcaccgacaccgacagcagccgagacgccgagcggcagcgcggcgaccggcgcgtaatcgacgcaggagccgagcgcgttgcgcacgaagctggagaagagccgctcgcgctcgcggccggcgagccaggacgccgaggggctccgtgacgccggcgaggaggccgggctgtggaacagcggcacggggctgtggtggagcatgtcccgccacttgaacggcgacgacggctgcgggtaggagtag

SEQ ID NO: 21671 - DNA, 6693 bp, Oryza sativa
  unsure (1)..(6693): unsure at all n locations
gaaattcggatttcgcgctaccaccaatccaaccaacttaaatcgactgaccacccgccaatcaatcaatcaatcaaatccgagcagctagaaggccgcactaaacttaagctgcagagcacgaatcccgcgcgaaacacttcgatcttcgggcgatcaaaccgagcgaattcgcggcgggaggggagattttgcgcgtgtttcttgtgggttcgctcgcgtgggcgtaaggggcgttgtgaggtgtggatttcgggggcgagaggttggagaagaatctgggtgactcctcgctaacaataggccgcagctgggaaagaggaggtgaaatgtcggaactgccccgttccgggaaagaatcttcgcgggaatttagcgggtgtttttttttttagctcatatccgtttcaggcattgcgatagtgtctgcttcttattaccggcgggaataacctctcttgtttattcgtatccagcgtggaccgaccaagctgtgctttcgtcagctgtaaattatggtaaatttggaaagtattttgtattttaactttgatttaaaaattttacatggtcctttttttacttgtcttgcatcatgctccctccgttttcactattgtatcaaattttaccactcataactctcaaatgattagactacaataaatttatatttaagggtaattcgatccatggtattgcaaatatatcatttcaaataaatatcattacaattcgtctactcgtagccatgacactgaaattttacaaaattgtaaccgtgccactatcgttacgttttccatccatttactcatctgcacatgggaccaatcatgttagaatcatcttcttcctttcaccctctcttatcttattccatctctgcaattttcaacactgcctcctgtgccagccacgagcgtcctggctaactccatcggcgtccgccccctacctgttgggggcctccagcttgacgtccagttgcagcgcgtgtatggccatcatgtatctatatctgaccttatcgctgctacttagtgccaccggcgaacctgcgttgcgcctagttgccgtcccggagctcgccgcaatggatctgttcgtgccattaccatcctcgacctggtctctgctagtaccatcggcgaacccacgcctcattgccttccccgagcttgctcgtgttgttcgcatcgccaaactcaccgctactgctagcaccattggtagacccgcaactcattgccttcctcaagctcgtcatcatggatctactcgcattgttcccatccccaatcttatcgctactgctagtgctaccggtggatcagcacctcgttgccgtccttgagatgagctcactgccacggatctgcgccgtagagtcgagctcgtcgacatcaatgggcctcgctgatgccctcgcacctatcaacctaccaaagatggatgaacctcatctcagatatatgcatccggtttacacttgcctgcatatattttattttaccctaacgaacaaccataatttaacagggcacaaaattgtatcgcacatatcgcacctaaaattgcgatttcaattatgtaatcactattttataattaattttttattaaaatagtgctatttaaaaaattcgggatgcgatcaggtggagagagcggagaggaggtttaatagtatagccaattactagcttcaatttatctatagccaatctaatagctcattcatataatagttacatactaaactattaataactggtctcacctgtcatacacacactgcgtcttgtagtttatactgtagctggttataaatctgtagcccgttgctctttgctctcataatttatagcctgctacctgctctgagagcaggccccctcggtcagctcgacacgctgcctcgacccgtcgaccgggcgcaccgtacaccagctaaattatattgcgtcgccccttcgccaacgttacgtggctggcttgctggccgcgccgcccgagctcgcgccggtttcgcgacgcgcgtgccgttagctagctagcgatcgagccagaaagagggagtctccgtggcgcgcgtctccgtcgatctcgtgccttccggaagcggccgccccgggtgccacgtcgcggtggcagctagagccacatcggtgagcaggacgcctacactttgagccacgcatcacctgtgtacagtacactactactagtagtacagtacgtctacagtaaactaattgaggataggagtagtactctctactagtcgttcaaaaaaaccaatcataaagctagatacgcatgtgttagtattgaatatgacgtgtttgtattgagtattttacagatgaaaaaagtataaattatctctctaaactgtaacgagattcaattataccttaaactacaaaaccagacattctttgcccttaaccccagtttaatccgcggtggttttgatactacgtggtagtcccgtcataaatttttttcccctcatcctctctctcgggcgtcattgggcattggtcaagcagcggcgcgggcggtcgacgcgcacgatagcacacagaggcaggcggcgggcgtggcgcgggacgcaaaggtgggagtggcgaactccgggagggagctagagaggcaacaatgagctcaacagcgccccggtactcaacagctgcggcctctccccaatctgatgttgccggctatctatctgacggggacgacaccttgaggagaaggccagggaataggaggactgggagaggcgcggctgactgccggaggaggtggtggagcctgcctgtgaggacgggtctctattggagcgacgttgttgatctggatcctcgccaccggtcggtgggtatgggtctccaccctcgccaggtcgccgtttggttctagaaccgcgccgtgaggtggaaggcgaagcaaattgagcaccaacttcgcagtgcacctctcctgcacgatgccctccgcagcgacaaagatgcgctcgctagggacggagaaagcgtggggcaaggggggtctttagaccctcctagcccctaatataccattagagcccctataataccccctctaaaattttaatccatatatttatagatgaggggttattatagattttgtttgaggttgttagaagggccaaaaggctaagaaggcccaaaaaaatcctaacccaaccctatatctctctttggtgctcttggttattttggtttagccccgctataattntattctggcttcggcactagcgctcgctgacgtgacaggcagagttggcggcggtgcggcagtaggggggcacgtgcattgccccttctgctaatgcaatggccggtggcggcaagaggtagagaaagaggatagggagagaggtagaaagtgggccccactgtttttttaaacaaatgctgactagactgccagtaggaataaaaccaccgcggattgaaccagagggattatttatacggtttgcatatttaggggtgaagaatatttaattttatagtttagggatgtaattcggtggacttaaggggactaattcgtattttttttcctcggcggaatggagaggtactccttaacctatcgtcatacagtatcgtttagtcttctggaaacaaccgtacgcttgacgaaatctatcagtgttctttcccagatcacatgtgaagtactcgtacagtcgtactactactcccgatatcatatcacccatagatcgctaaccgtttgctgctcctgggatcgatcttgcttgcatcggcgaattcattattgacaccggaggtttcgacacacgcaaagcgcttgggttggatcggatcgcacagcacgtgaggattattagtgtaagatactatcctatctgcccataagctgattgtttaggctgtgtgtagttcacatgaaaattaaaagtttggttagaactgaaacgatgtgacgaaaaaattgaaagtttgtgtgtaggaaaattttgatgtaatgaaaaagttaaaaatttgaagaaaagtttggaactaaactcggccttaactgacaagtcctctctggtaaacacggccgatgcctcaaaaactagctatgtctttgtcgacaaatccttgggtcaaaatcacccagattttttcctaccgttagattaagatccagaggacacaaaaaatgctacatatttttttctctgactagtcagatcacaaaactatatgggctcgaattctagcccatagaacaatacaaaaaattatacaggccataactgcaaatacatcatggcccataatgatcaacttcacatccaataaaggttagaaaaaaacaaaataacacagggagaccacaccagttcgcacaaatcccctagatcgagcaaaacaaatcgagcacgccatagacagtgaggagaacgagaaaaagaagaagaagcaaattcttaccaagaacattgaggtcaagaagttgaaatcaacaagacataatcttccaggtaacaaattacctagcacaaaatccacctttacctttccccattgacttcaccatattctgccagtcatcttttaaatcaaacaaaaacaactcagttctgtaaaaatattggagaaaagcacttggaatagtgaatttcttttggagaaaagtgcttggaataggaaatttctttagatcaagtagttaaaagtatgtaactttttcagaaaaactcgtaacaaaaactatcaatctatagtcagttacagttacaaataacaaaagttacagatgtaactactgtacatcaaactgtaactgggttgtaaatggaatcattcttaaatttctttaaaaatttagtattcatgcagcaacattaaaacactttcccctagtataacaagctctaaattatgttacaaatatataaagaactatttatctacggtcagttacagtaagaaataacaaaagttacagatgtaactacagtacatttgaacagtaactgggttataactggaatcatcctttgatttttttttaaaaaaaattcagtactcatgcactaactttttttttgcctatgacaaaatgttctaaattatattacaaataacctaatcatgtagggtcaggtatattgcaatctcaaaaatcaggagatacacaatcagatggatatgaaatgagaagcaaaattgtgtctgaagaaatgagaagcaagaagacagttaaaggtgagaatcattctcacctagcattatggaccattttttatcttgtcagaaaatgtcatgtagcaaaaatttatatacaacaaattagagatagtagcatgataaatttttaaagaactatatatctatatccagttacagtgagaaataacagaaattacatatgtaactacagtacatattgactgtaattgggctttaactgcaatcatgcttgaatttcttcaaaaaattcagtactcatgcaatagcattaacatttttttactattatgacttgttctaaattgtactacaaatgattgaaacatgcaacgcctgatagattagaagctcaagcaacagtgaatacagagtcaaatagatgtcaaagtgacaaaattttctcagaaaaattaataagcaagaagacacttgaaggtcagaacaatggacagatagcattatgcaccaaatttgatcttgtcagtcataaaatctagcacaattttgtatacatgaaagcatgatttttttttgaaaaactatctatctccagttacagtgagaagtaacagaagttacatatgtaactacagtacatattgactgtaactgggatgtaactacaatcatgcttgaatttcttcaaaaaaattttgtctaatatacattatctaaattatattacaaataacctatctatgcaggttctgttacaattcgatctcaagtaacagtggatacataatcagagagatctgaaagagataacattaatttcgtctgatgaaaaaagaagcaagaagacaactaaaggtcataatcatgataacctagcattatggtccatatttgaccttgacagacaatttaatctagcacatatattagagatggcggctttgaaaaatctaaagacctatctatctatagtcagttacagtgagaaataagaaaagttacatatgtaactacattacatctgaactgtaactaggctataacagctttcatgcttgaatttcttcaaaaaaattcagtactcatgcagcagcattaaatattttcccctattataacaagttctaaattatgttacaaataatataaacatgcagggtctgatgggttacagtctgaaaaatcaggggatatgcaatcggagagatatgaaagtgacaaaattttgtccagagaaataagaagcaagaaaacattgaaaggtcagttatcatgctcacctagcattatgcaccataaaatgatcttggcagacaatataatctagcataaaattatatacaacaaattagagattgtagcgtgataaattttcaaggactatatatctatagttagctacagtgagaaataacaaaagccacatatgcaactacaatacatatagactgtaactgggctaaaactgcaagcatgcttg

SEQ ID NO: 21672 - DNA, 1509 bp, Oryza sativa
  unsure (1)..(1509): unsure at all n locations
gcgtttcgggttacaaatatatctagttattcttgatgattgttctcacttgtgtgaacctttcccctgcgcttcaagtctgacatgtttaccacgctatcacacttctttgcctatgtcaaaacccaattctccaccaacatttgcagcatccagtgcgacaacggccgcgagttcttcaacatttcggcccgcacnnnnnnnnnnnnnnnnnnnnnnaccatgcggatgtcttgcccccacatgtctccccaaaacggtaaagccgagcgcatccttcgttccattaacaacattgtgcgctccctcctttttcaggctagccttcccggcaccttttaggttgaggcccttcacacagccacctaccttatcaacagacaccccaccaagacgcttcaacaccacaccccattgtttgccctctatggtgtacacccctcctatgcacatcttcgcgtattcggttgcaagtgctatcctcacctttccgccatagccccacataagctctcgccccgatccaccatgtgcatctttcttggctatccactacaccataaaggatatcggtgtcttgacccttccaccaatagggtcatcatttcacatcatgttgtatttgatgagcattcttttgcatatgctaacatttcttctccaagcagtgctgatgagctcgactttttggaggattttctgctcctacacaggcaccaattggaagaagacacgctgtgcctggcgctggcgccagctcccctgctgcaccatcctcaccggccgccagcccactcacgacagcttccggcccgtcaagcatcgccaggccgcctcccccaacccgtcagcacaaagcgggttggccgactcccctgggttggtccactgtcgcgtcccaaagcgaccctaaaatatatcctttaaattatgcttagaataattaaaatccgtgtgaaagcctccaacaattaaaatgtgcaaagttaaaagccaaataaggcttagaggatttttgtaaatttcctaaaatcctaaaatgcgtaaataaattttagtggaattttcagagcacaaataataattattaagaaataaacaaagttgaaaaggttttataaaaagaaaaaccctaaaaatcccccttccctctcttgggccgaatccggcccatctccctccccctctctcctctcccccgcggcccatccggcctctctccgcgcgcgcgccgctgacgggcgggcccgctcaccaccctcgctgacgggtggggcccacccgtcatccccttcctcccgccgctcccgccgcctcccccgcgccctagcgccgccgccgccgcgaatcccgccgcctcccgccgtccccgcgtgcaataaagtgggggaaatcactccccgtgatcccctctccctttccccccatttttccctctctctctagcgttcaaacgggcggatttgcccccgcaaatctcgccgcgccattgatggtggccgaacctcc

SEQ ID NO: 21673 - DNA, 5385 bp, Oryza sativa
tatggagtttattggagtaaaagcacttttattttccgttggtcgtgtatacgttgcagcttcggaagatccactcttcgtggaggttgaagccaatgtttgggaaagcgagcaaggcaagtcacatcatccttgaacatattgcatcccagtttataaaattattttgatttaaattattgcattatcgctttacttaaatgcccgcgttatcactgttttatttagccatgcctatttacctttgttatgaccttattattattgttattgatattattaccttgttcaccctagattaaacaaaaccccaactagtggacactctactcatggtaccactagtatgattttaggtagatgcttcgctggttagttaggcaacattaggtggttttacaactctagactgtgggaatattctcatcacctggacactatggaatggttggattattgtggaatcggattcacacctccccctctattcaaaaccctaaaatggttttaggctgggctcggggtgcatggttttgatagtagcacctcggccatataaggaccggtcttcgggcctctgttgcaaagcactaccgtacttccacatgtctagtgggtaaggcttagtttgtggctcagtctggttataaacaaaagtacacggatggagatggacgaagtcgggggtcgatggacatctctaaggcaaatgaacgctacacgagctgcggcccggtagtcgagatgtcatggcacagggccggtgtcctgctgctaggggctcagtcctgcctacctgtcccgggggttccggccgtaggtgcggttgggtcgttactcttgtttatggctaggatgggttggaaactatgtcatgtcttctgtccgtataccgtggtggtatgtggcacgtggttacacgtgaggaagatgtgtcttgtgggtaaagatgtacacctctgatcagagtataatctattcgaatagtcgcgccctcggttatgggcaagccgagcaatgtacccaagttagtgtttttaattcttaaaacctgcttaacaactaaaatgtggaatggttggcctgggttggcttgggacgagttaggacccagggttgggttgccagttcggtctgaatcatcgtgggccttgggttaaggcaggttcgtgtgggttcacggccttgattaataatcttgtatagctctaggaccgtgtttacaaagtagctttgagcaactaagtgacttttaatgctgtttactgcaaaccctaaccccccctatattatggctcccttgtactcccttgcatttattctgcacttgtgggtgtgtcttgttgagtacggtggttgtactcagtcttgctcaatttttcccaaacccagaagaggagcccctggatgatgaaggctttggtgtctagctcgtgcctgccgtcaagcgcatgtggtcgtcgccctagtcttccgctgtttcccatttgtctttgtgtgtgctgggccttcgccgcccatgtaataaagtaactatttacgcttccgcttgataaactctgaaatgtatcaacttttggtgtaccttgcctcctgggacaaggaataatacacgcacgtaaggaacgcccgttgggttatttccggtcgtgacatccactcatccggttcggcccactcacctgggtcgacccactcgcctaggccggcctcttcccccggctcggcctcctcacctgcgacggctcgctcgacaactacggcaatcccatcgccaccagtgccatggtttgctgcggtgcccacccgaccccggtcggtgcgcgtgcaaatcgctcctccaccgccctccactacggcaccgctcgtgatcaatgatcacaccatgaccacaagtggcaaagccggtctgcgcaagcctgtccagcgactgaaccttcatgcctcgatgctatctccagtcccacacacctaccgagctgccctcgccgacccatactggcaaacagccatggaagaggagttcactgctctcaccgccaaccgcacatgggacttggtgccccgaccatccagcgccaatgtcgtcaccggcaagtggatcttcaagcacaagttccaatttgacggcacacttgacagatacaaggctcggtgggttcttcgcggtttcattcagcgccccggcatctgtcacatcctgattttcgtttcaggatttataaattatttaataaattaataatagaatttatattaaatgatctttaatttacaagtgaagttaaatgtgggaaataaaatttcctaaatataaagcatggatggatttaatttttattaaattctccatgattaagtcaactctctgaaattttctcggatttttcagagctcaattcctaaatgatacaaagaatagttcagtaattatttgatcaataatgatttaattatatttgttaagagcttttcttatttaaaaatccttaaattataaattgttgtttaaaaggaattattagaaatgatcttaaaagcctaaaagagaagatctaattttaatttgtgaaatctcaatataaaatggggccagataaaatttcattaaatactttgcttaattctataattcctagatttttctgggatttatttgagctaaggaagtatttttaataaatggaattgcatttcatgaataatttaaattgaaaaaggttttaaaagtctcttttggctttgggccgaaagtcggcccaaaacccctctctttctctctctctccggcccagtcggcccagccagtccgagctgccgctctcctctctctctcgctgtcgctgacaggtgggccccacctgtcggacttgtcttcctcctccggccgccgccgcccgaaccctagccgagccgcgtccgagccgccgccgtctccttccaaatccgatcgattctttccttctccggtgaaatcttttgaggggaaatgatcttctcgatctcctcttccttttctcttttggaatcatcgtctcaatcgctttggaagttcgtggattcgaggtcgaatcggatcggtttctttcctccgaaccccgagctttccatcccgtcgccggtcgccgtgggccttcgccgctgccttccaacccctttaaaaggatccccggtgtctcctctacccgccgcctccctcgccttcgtctctcgccgtcggaagcgccctagcgccgtgtgacctagcgccgccgtcgtcgccgccgcttcagccgtgcgccgccgccgttccggtcgtcgtcgtcgctcggggaggtcgccatcgtggtcgccggcgccatccgttgctcttccgccgttgttttggtcaccggtgagttcgccgcgtcgccctctacccgttggtgtcctccgtttgcatcgtcacgccgtcgttcgccggcgagcttgcgctcccgagccgccgccggtgctgacgtcatcgctgacgtcgttgctgacgttatcgttgctgttccccgtggcccggtcgtggaccgatcgatctcggccatccgttttggataagatcgatctcggccgtccgttcccgtgaaccgctgccgtgcacccggtccaccgcaaacccgacccgctgacgcaataattccctttttcttttcaaaaataattcattattgcgtcataattcaattaaaatctatataagtgttttaatccgatttaatctttaaaaattcataactaattcattgtaactcagtttaatgtggttcaagttgcaaaagttgtataaaataaagatctacatattaaaattgtccataaattgaattaaatttatttaattctttttaaatgggctttaattagatttaatcttgtaaaattcataataaattcatatgaagtcagaatgaggccgttcaagtctcataattcatctaaaattatgatctacatgtttgtttactttatatgtattgtttatttggtttttattagtctttttcttcgttttgcgtgttagcttgtcgtttccgtcgttgcgaaggttcgtgagtgcgtcaggagtgttcagaagattaattgaagaccgattattgcaaggcaagtcacacagatcctaaacacaatcctttgagcatgttgatcctatatttaaattctctatttatttcaactgtgcatttattttcgaatgtcactgggtggtgtgaatctcttcctttgttatggccaatttgcattgattactttattccttgataccttgggttattataattggactagttgagctttatatatattggttcaactagatattagatataattgcttagccatgcttagaaacattagcacactattgggataacttatgactcactattatttaatgatggcttaatgatagttcacgatggtcaatcgtgattggttaattaattacttgccaactaaaatatgattaatggtgggttgtgagcacatggttttgagagtcgtgctcatgacaattaaggaccggttcgcgagctactgttgtgaaacattaaccgtgccaaccacaagccagcatgggcaacggctttaccttttgtataacatagttcattgcggagcaccagactgagaagtggcggagataagcccacgggggtcgctggggagtccatgcctctggtttttgagggggtgattatgatccaggaatggtgcactgtggtgagttgtgttgtgcgaagggtattgtcacgatttccccctttgcagtgccgtggtggtacttcggggcatggcaacatgtgtgaaatcgtgtcttgtgggtacagtggtacacctctggccagagtaaaactattcgaatagccgtgcccgcggttatgggcgggttgagcaatgtttttcgtgattagtctcacacctctcacaataattatggatgttataactggtaataatttgtttagctcctggtttggagttagatctgtacagccgggtatggttgttcaggatggttgggcctgtacagcatgggtgtgctgttcagtgttgattaaaatttctgattaattactctactgttttactactcttaactctttgctaagtgctgctttcgcaaatgagcctatattatgccatcctttgttatccttgtgcacttgcatatttgctgtgtggcttgctgagtatgtcatatgctcaccttgcaataatcaatcaacctcagttgaagaaaaaggatccagaaggagaagacgtttggcttataccccagttgagctgcctgtgggagtggagccggagcttcgctagattttatttttccgctgcagttttcttcatgatgaggactaagtgcctcataagtaa

SEQ ID NO: 21674 - DNA, 9437 bp, Oryza sativa
aatttccgggcgtgacagcatcgactttgatgagacgtttagtccggttgtcaaaccggccaccgtccgcactgtacttagcctagcagtctctcacgattggccaatacaccagcttgatgtcaagaatgctttccttcatggcaccctccaggagacagtctactgcattcagcctcccggcttcgtcgaccccacacgacttgacatggtttgccgcctgaacaaatcgctctatggtctcaagcaggcacctcgggcatggtacagcagatttgctacttttttgctgtccattggcttcactgaggccaagtccgacacatccctgtttgtccttcatcgcgactctggcacaatatacctgcttctctatatcgatgacatcgtgctcactacctcctctgctcagctcctccagtggaccatctcatccctgcagtccgagttctccatgaaggatcttggtgctctcttggtgctcttcatcacttccttggtgtcaccgtcgctcgcagggacaccggcttgtttttgcatcagcggcagtacagtcttgatatcctggagcgtgctggcatgacagattgcaagccgtgcgccactcctgtggatacatgtgccaagttatcttcgaccaacggtccactagtggcagatcctacagattatcgcagtcttgcaggagcacttcagtacctcactttcaccagaccagatatttcgtatgcggtccagcaggtgtgcttacacatgcatgatcctcgcgaggtctatctcaccgctctcaaaaggattttgcgatatgtccgaggtacaattgatcttggtctccatattcagcgttctcaggccactgaccttgttgtctattctgacgctgattggaccggctgtccaaacactcgcaagtccacatccggttatgcagtttttctcggtgacaaccttgtgtcatggtcatccaagcgccagaacactgtctctcgctcgagtgctgaagctgagtatcgcgctgtggcaaatgcggttgccaaagccagctggttgcgccaacttctccatgagctgcattccccgccgtctaaagccaacttggtgtattgtgataatgtgagcgcagtttatctctcctccaatccagtacagcatcaacgaacgaagcatgtcaagatcgatctacacttcgtgcgtgacaaggttgctctaggtgttgtccaggtgttgcatgttccaacttcatcacagtatgcggacatcttcaccaaaggtcttccctctcttgtcttcatcgagtttcgctccagtctcaacgttcgctccatcgacgttgcgactgcggggggtgttagacaatatggtttagatatgcatggttgagttttatctctctaagcctagatccttatcctcccgattctgttgctataaatcggtagagtggttatggacaggcatatatatgtacgcactacgtgattaatccaatctacgttgagttcctccatctcacaaagaactcaatggtcgttgcgatgttgatgaacttgtcaaatacgactcgcagcaacttcttgatgacggattgagatcctctacaatcaaatgcagagtgcttttatcactgacatgtgagaccgcgtgccagtgacgcatgacttcaactgcagagcattctgatcccttgacgacatacttttgtatgtatatgatgccttgggtttgggacacgagttattttcgttctcgattcgcccttgcatataccatatgagttttactcaaatccaatgttctaacaagcacaaaaagaatagtacaaaaccatactgtagtttaacgatctacttcagcataagcatccgccggcacagcacggattgccaccgacgggcggctgcacccatctttgcacctcgggcaggagcacgagcagccgcaggagcactcggggcacgacggcgccggcgtcgcgcctccgaggcagcaaggcctgccgcagcagcacgccgacgatcccttcccgccgccgcagcagcagcagcaggaaggctccccctcgcagcacgacgactggcacttgcagcaggacggctgccccttgcagcacgacgaccggcagctcagccaccgccggagcagagccaggcagccgacgcacggcgccgcgcaggacgagcacttggggcagcagccgccgccgcaggacgagcaccccgtgccgcagccgctgcagctcggcttgcagccgccggcgcagctgctacagcaccgcgtgcaggacgagcacgagcacttgcagctggagcagcagtcgctgggcggacagcagccgccgccgccgccacacaacggtcggcagtggccgcagcctgtgcagccgcagctgggaaggctgcaggtgcagcaatcgctgctgcagcagctgcagttggatttgcagcagcacgaagaaggggccttgaggcagccgcagctcggtctacagcacgatgtgtcgcagcaggagcagcaagaacaactgaagcagctcggtttcttgggctttgggaggcaccggcaccaacagcagaggcataacaagcagttgcacaatttcgatctgataaaaaacaacaggtttaagatcttttagtctttccaagggagcgttgaaacagcatgtcatttgcaagaagttcagaacgaaaaaaaaggcggtatttgtcgtgtaaatagcgctgcagttctgggaacagtattggctccacaaaaagactgcgaaaattgctttgatgccaccataactgatgtcagatatcctgacttttttcatcaaaagaaggcagtactccgagttatcatgtagtattaaagtgtgacatttctgacaaatcactttgttggtgtattgaggttctacaaattgagtgagcatttgataaaatgggctaataaggtgaaattcagttcgggcatttgacaggaacagaaacaagtaggagtatgagtcttaacagtgttgactgttgaactagtttattcagcaacaaactgaaaccagcatattgtcatactttgccctatgagtgttacctacttattcactaatggcttgaatttaataaactctcaaattataaacaacaatatattccctcggtttaaacagcaaagcttttagaatgtttttatccgtacacccaaaagcatggacaagggaagagtaagggacctgatccaccgatagaggctgcaagatctgtgtttccttttgtttctggaataaataaggcacagggagaacactgatcagcaaactttgaaaaaagaaactctgaaatgcaaaacataaatcaatatattcatacattggtataagcggatccgactttgcaccaacaaattcgttgacactgccaaatgtgataatatagcattagtatctttgtaatcgacaatggcatttgaacgttacatagtacagttccaaaaggagcaaaattgaaatgtaggtcatgcatgaacagttcacatgttgactgttggaccaccaggtcagaagttactagcagagattattattggcattcaagaaaatcgaaaagtatagtaaatgtcgcaattcatgtgggccactttcttttttttcaaaaaaaaaataagtttgaggaatgtgtcaggattcagcaaataaaaagaacacaatggaaaaaattctaatttttagtgctctcctcggaaaaagaattgtcttgtttatcaataagaccactacaaatcaaagaaacaacaacactaatgactcaaacactactgacattcagagtagctgtgattaaatggcatttgagcctgaaaggctgagactagatcactagaatgaacaagaacttgctagttgcccatccgagcgaaacaccagcactgccggcgacaagatttgcagagagaagcgaggctaatgaggaaagcagaaaggagaggatagggcgcatactctttgcaacacctcgagaccggctgaatccgttcaagtccctgtagctcttgctgcaaaaagggagcccccagtcaggccgaggcacatgcacatggcttccacagacctatacacagtcctgctccatgtgccatgaatggaagcagtaaagaacacgagcaatgcgcagcagcagcagcagcgtctctacctactgattgccattgccaggtgatgtcacgctcaagagaagcagaaatctgaaagtagagttctttttatttttaattatcaattgcaggtactcccccatacccctatagttccagaattcatcagactttacgcatgatgcaatgtaatgaggagacttcggaagtactactcctatactgcacttgctttgcaattctgaaatgcctgatgttgcagggggaaaaaatacatattgcagtagaactctactactactactactccagaagtaaaatggcattggttcatggctgcccattgttcttgttctctctgcaagaagacggcagtaggggcagccatgacagccgcacgtactgctagtacaacatgggagcctgtcgcgcatcggttgtcgcgacagagcgagctctcgcctcgcttccgtcgcgaaaccccaaaccgatgagctctccacatcaacttttttccccggagatttcctctctctctctctctctctctctctgtctctccactccataggaagaacaaaaaaaaatgcacgcttttcttcatcactgtgaaagaaagcgaggtgacatgacggggaagtgaagtgaggtcacctcgaggaagccgacctcccggttgaggatctgcatctccagctgcagccgccgccggccgcacaggtccgggtacctcggcggcgacttgggcctcggcgcctcccccatctcaacccaacttatccaccggagacgcaagacaaccaccctcagcgccgcgagcgagcgagcgagagagctagctaccctgcaggctacagctgcgtagctaaggtgggcgaggagagcggcgaccgacggcccgcgctacggtgagctcggctgcagggccacgtacgtacgtacgtacgtacgcacgctcgccaccggcagggggcgggggcgggggcgtcggctcggcgaatggtgtggatggtggtggcgacgcgcgcggcgttgggttgggggtttaaatgctggcgcagtggctcatcgcgcgcgcgcgcacgggaggaggacgcggaaggcgaggcgctgcgagtgcacgttgttgcgtacgcccactctgctctgctctggtgtggtggtgtgtgtggctcggggttgggcgccgcagactctctcgcgggcgcgcggtgggcgtgggtttttctgcgtgcgcgggggcgcgggggtgcgggtgcggggggagatgggatgtgcggccgtgtcgcggttggcagtcgtacgagacaatgttcagtcgtgtcatcatcgctacgcagaatcgcagacgggtggcccccgcccgggcggacgcgtcacggcgtcagctatagggggaagggaaagtagtaggacggggacggaacgacgattgatccagccgtagcggctttttcaccgattgattcatcactgctctaagttcctttttatttttcactcaggtcctttctgtccggtatgttatgtgtttattctttaatactttttataaggattgttaggctgtgttctttttttttcccaactccaccccactcatttacagtgtacgtgttttttaaacggctaaaagacgtgtgttttgaaaaaaaatgatttaaaataccatattaatccatttttcaagtttattttgttaatacttaattaatcatgtgctgatgaactgctccgttttctgtgtaggaggaaaacgttcccaacacacccaacgaacacaaccttaatcatcaactacttcaagagttctacgaatatcaccctctttttgggatttgtgtttgaattcatattagagcaagtttaatagtatagctaactgctgtctccaaatcatctataatcaacttaatagccaattcatacaatagttacatataaatatataccacgcaattaatatctggtcccacatgtcatacacacatgcatcttggagtccatgctacagctgcatacaaatctgtagcccgctgctcttatctctcatcttttatctcctcgaaatatgtttgtagctggtttatagtctgctattgtatctactctttatcattcacattgtttgatactttgagggaagcccgcataagatggtgttgtttctaggctagggaaagccaatatgtacgagagttgttagagctaaaaaatcaatctagatttggtaatacaattggatgttaatggtattaaggatggttagtaggaaaaatcatcggagacgatgaagaaagaaggttgaagcagaacattgtgtgaacttattcatcaacagtgacacggaatgatactactgatgctagcaaaggttagtgggatttgtgtgccgacaagttcatgactaattaggcaaccagtgttttggcttccaaggaacacggatcctctgaggctctgacttctataatctaagtcaaagccatacaatacccgctcactcatcacccgtttcaatccaagtgttgatgctttatttcctttcttcccttaattctctatgggtatgaggtgaagtgagaataaggccgtgacagttgaggcaccaagtaggacgaaatcagtggcaacgagagaagccaaggcacgcacaagatgttctcgggacagaatgggaatggttaggatatggatctagcctaaaacgtttcaaatgagtttattgaaccatggtttaatagggtcaatccatcatgagtctattatataaataggttatccatggatatcaaaatggatcatctacgctcctaatagataaaaaaaaactcttattgcatgcatgtaaaactcgggtccaaaatttttaaactcgcgttcacattataaagccttatcaaatttaattgaattttatagagatgatttattatatggagaagcaactttgttcaaattttaagtcatttagacatgtgaggcccacgatacattactaagattcaaaaattatagttaccatcctcctaacatcaattgaggagatccaacgatgccatacgccgtaggatggtccgaatagaggtgacagaggcgccgacaaagatctaggtggtagtaccgctcgtctatcgcccgccgccggccgctcgtctgctcccgcctccggccgcccgtcggcgccgcatcgtccactcccgccgctcccaccgttcccgagtccgcgcgggaggagaagcgagcggcgcggtcgacggcgaggcgcacggcggcggcgtccccggcgcggtcgccggatccgcctcggccactagagggaggggaaggaggcgcaagggagaagcggagcggtggcacgggaggagaagcgaagcggcgcgggaggagaagaaggcgatggcgatggagtagaggaagagaaagtcgttaggggtaggtggggaataaatttcgtcccgtaccccgtgtccacacgcttgggtaatgctgcactgtgggtccggttttcttcacctgtggctccatccaattaagccacacatagtatgggtgcttgcactgtggggtgggtgtctttaggccaactttttttgctagagctacgggccccataacttgcactgtgagaggcttaatagccttgagcacgaatgtcaaaggaagacgaggccaaccgttgacgaagctggcaacaacgtagagggctatgaaacagtggtctggcagtcgcaaaaatgggtggcccagagttgcacaggtaggggcgagctggaggcagcgacgatggttgcgcttgaccttgacgaggagaccattctcctgagcggtggtagcctgaggaagggatcatagatgggatgaccgaagaagaaagactacgagcgatggagaggagaggaagagggcaatactgaccggtgggccctaccattttttatatttttcgttgatatgattgccatgtcaaccaaaattctgctaaacgtgtgacatgtaggaccaacaccgctccggattgggccaaagggataattcattcgggttgaagagcttagggttcaagatgtttagttttgtagtttgaaaggattatttgaattgctgtaatagttcagggatagttaggatttctttgtagattgaaacgaacagtgtataagatggtattgcacacatctgtcttagcttaagtaggtcagaggatccatatcacatcaaataccatggatagtcttcgatcgttgtcaattgtgcttgttcaacaattggaacgccactcaacaattggaacgccactaagtgagcccacccacttagggccctttgaatcataggaatgaaaaaacggaggaataggaaaacataggattctaatatgaatgcaagtgcaaaacagagtactgcaaaacgtagaaaaaacacagggatgaccgtttgattgaaccgcacgaaaaacacaggaatcggatgagagagagattcaaatgaaagtttccaagatgttagagttcttgctaaatttcctccaaaatctctatagaattgtccattccataggaattttaaaggatagcatatgattcaatcatttgtttcaaagggcttcatagaaaattttcactatagaattggaatccttcaaaaattcatatgtttgtcgtaagtccagggatcatcgagggctatttggagtttgggcagaggaaaatcaagtcgtcgtggtcttcttttaattctacctttactaggaagcatcgatgcacggctacaacttctgtaaggaaaaagtacgaattacccccccccccgaactatcgcggtcgaccgaattaccccctaaccatagaaccggatatttttcacccccaactttgcaaaccgaacgaattacccccctcgacccaatccgcggtggttttggtctatgtggcgtacacatggcaatccagtcagcattctatttatgaaaaaaaaatgtgggacctacctgtcatacactactctctcttctctctctcacacacacactctctctcactcttcctctctctctcaccatctcacgggtcagcggcggcaggggacacggagcactggcggcggcggcggcgggggatgaggaggcggccgctcggctcagtggcatgcgcgcggggaggacgaggacgcggcttccccctcccccctccctctcagcggcgtgcgggcggacggagctcgccgcggcttcccccctccctctcggtggcgtgtgcgcggggaggacgagggcggcgggggcagacggagcttggcgcatctgg

SEQ ID NO: 21675 - DNA, 2484 bp, Oryza sativa
tatagttgggggtgaagaatatccgattttgctgttcggagagtaatagttcggagggtaattcataatttttttccttttgtaatcagttgcaccaccagctgcctgcctcccccaaaacgggccaagattttccgacggtggtcggagccgcacgcgcagcacggcagcagcagcgtcgtacttgacttcagtttcagccagctttaccaccaccgccgcggcgccagtgcgccacctttcccccgtctaccaccactccagtatgagtagtacagtgtatagtagtagtagtatccctcgatctgccgcgcggcgattgggcatcctgcggcccttctgacttgtgggagcggcacggcacagcacaggcacaaaaattgcgcaaaagcggcagcagcgccacgtgaccaggggggggggggggggggggctctgcctgcctgcgcgtgtcgtgtgcggtgcgtctgtgggcatcgccgcgtcggtcccccgcgcgctcctgccgagcggtgccaatgctcgtcgccaagtcacgagttccgattgacggcagcgcggccccgcgtgcggcgtgccatgctcctcggatgccaatgctcgtcgcgggcgggcgcacccgtgcgtgcgatgcaagggaagaccgatggttttcaacgcgcgcgtgcgtgcgagcgtgcatcggtctggcggctctgctccgctgctgccgtccctctgataggccagggccagcccaggggttgggtggtgggtgggcttctcatcgatgataatttccttgttgggctgacgcacctcggctctggtgaattgaagcagcaataagtctatcatgcctcccaattcccgcttctgattgaatcgtctccctcaaccgcaaaaccgggtataacatctcccccatcttcgaaaatcggtataaatcgactcctttagtcgtttgagaacatgtttatgttgatgtagcaatttacaaacctaccagtagaaaccgctttaattccaaaccactgactgagtcgatttacaccagttttcgaagatggggaggcgttttaaccagttttacgattgagagaggtgattcaaccagaagtaagaggtaaatgaggtagaatagacttattccgtttaagcacaacctaatggattgcgtggctgacacatttttagataatggaatggaacatcccaacctttgctcaagagctatagctaattattgacaaaaaagcaaacgcatggtgttgggtttatgttttgtgttgaaaggctggaagcctggaatgttggagattttttttaattttttattaaaatatttgtaaaactaattttgtgtttcaaaattttacaactagtcgcccgtcgccctttggaagggcgataaaaatcgccctcccaaagagcgattttcgtgacgtggcagatggccattggctcatgcctaacggccggctatagggggctgccattttgcaggcgacccccttgccgcacttagggaggacggtttaacactgtgcggggccgctccccttctcctccccctcacccctccctctttcttttttttcggattttgagtgaatataaagcaaaatcatagagcggcaaggaggctgcccttttgcaggccgcccccccgcacagtgttaaaccgccctccttaagggcggcaagagggccgcctgttaaaaaaaagccaggtcgctatcgctgcccttttgcaggcagcaccccgcacagtgttaaaccgccctccctaagggcgggaaggggaccgcttgcaaaaaagctaggccgtcctcaccgtccttttgcagccccccccggcacagtgttaaaccgccctccctaagggcgatatgggggctgcctgcaaaatagcaggccccctttgccggccgttacttgtgaggcgatagccgtctgccacgttattaaaatcgccctctgggagggcggtgggcgactacttttgtaaatttttgaaacacaaaattagtttcataaatattttaataaaaaaattccaatgttggatgggtaataggagacggtccaatagcccatttgtgttcaggagctgaaggcccatgcgaactttagttacatctcgagcttgcatcttttgcctaattacatgaaagaggatcgattacataaaataaaagatagactttttcaagttcttttagcctaaaaaataaaaaaaaatcattttcataggcggctccaaaagaccacctgtgaaaatgtttcttggcggctgattttgagcctatataaatggtcgattttcataggcccttagctacatgcggattgaaaagcgctcgtgtaacgggttatgaaccgctcacacaaacggttttttaacacaacctcaaagagataaaataggtgatataattatgatctcataaaaattccttcaatatgatcttgggcttatatcttatatatgtagtttgagag

SEQ ID NO: 21676 - DNA, 8477 bp, Oryza sativa
aaaaaccaatctaatactgaatgtgacacatcctagtaatacgaatctgaacatacctatatccaaattcattgtactataatatatcacatccagtactagatttgtttttttcgggacggaaggagtatacttaagtttaaaaaaagtttatttttctaagaacaggcacacaacacaaaggacagcaggggtgaactttcaatacggacttctcacccaaccagtgatctttgttaactctactcaaaacagtgaaccattatcagattattctcagcatgacttgcagcacaacgaataataaatcttctactagtgagcatccaattgggcacttggctctatagatcagttcagcgtgttaggtagcaaccatttgattgtttagaacttgcaagacttgcgaatcgtcgagtcgtgtctttatttatgtatatcagtctgctatatacatgcatatgaacttgcacagctaaccgcacagggacctctgcttacgaactgtatgatgctctgcgtcgcgtatgaattttccgtagatacgtatcatgttcactcccagcgtaggaaaaataagaaatgacgatgtcatgtggaagtctttcttaggcagcccggcgaagacgcaagctagctagcaccaactccacttggctgttcttctattgaaatttgcgaaggtttgcgttcagccgccagcaggttgtgacgatcaagcgatccgcaaccatgagcggctgagcgcacattacatacacatcagcttcatataagcaaagcaacagtgttaagagtctggttacaaatcacaaagatcattaatactcccaacgtcatatatacactaaaacacacatgaccggaggggagtacttatttttttaaaattttgatcttaccgagagagtacttgactgtcgcatatatggtcgatatgattgatcgtttcccctttccttttaatgatttgtgagctcacgaagtatgaaaagaaagagtgaaagaccattcagtagtagttactactctttcctctttctgtactaaaatataaggatttttagttataaatttgaacaactgtgtttctaaattcatagccaaaagttactatattttgggatgaaggtagtacctccacctctcgacgatatcaaatgatgacagttcccacaaacacatgtgaaaaccaaataaattttgtcaaaaattatattttctttgaactggatcgatccaccgagtgaatttatttccgtacctggtgatgggcacaattaccatggtaaccgcgcggtaagagaaaccatacttattcattgtctttcgttttcatttcaattggttacaatgaattttttaatatctaagtttttattcattttcttgttttattgtaaacttctaatttacggctccctttgattcaaagaaaaatcatacaaattttggaggattttatttctataaaaaaatatttttcctatataatcatttgaatcaaaggaataaatcctatgaaatgtctcactccatgcaagttttataagaaatttaatatgggttagaacctcatgggacgtttcttttgagtctttatctctcttaaaatttttgtgttttttctgcggtctaatcaaatgactattcttgtgtttttttctatgtttaatcctatgttttataattgcatttatgtcagaatcctatattttttttattcctccttttttatttctaatatttaaaggggtcctacataagattgtgtgacaaaaagaaaaatgagttttccttttttttaaaatcttttcttgaaggtttttatgtctcccaaagggtatttctgttgtagtgtctcgaagcaaatgtttccaatctgtattgttgatactttttgtgataagatgctttagagtctcctcaagtgaaagttgattgacctaagatttcacgagtttgactgcaactgtttgaagttattagaactgttttcgtttgataatgagctactagaactagcaaagggattataatagatcacccgagtaaacatcccctcatttactaggcaactaaattattatgattcttttctaaaagattgatacgacatatcaatatataacatatcattatatattactgtataaatatataagtataaattcgacttctccaagttataaaaaaaataacaaaatggatgccaactcaagtgactaaaaagagtttctcgatcaacataatctatcaattttcaattagaaaattgactctgacttggcagcataattgagactaacacatgcacatccaccataccaaagtacaattactgaaccgtccccgtccactacactgttgtacgatcgattaccagtagtagctcactcctaatctcctacaaatacgtagcgtcactcgcttgcattgcatcgcatctccaacccaaacccaataaatcctctcccattgcccatggagccatcagcattggccaccttgctatccatggcgctcgccgccttcctgctactcgggctgatcaaacgcaagggcagccgccgtggctacaacctgccgccgggtccgacgccgtggcccgtcatcggcaacttcaacctcatcggcgcgctgccgcaccgctccatccatgagctctccaggaagtacggcgagctcatgctcctccgcttcggctccttccccgtcgtcgtcggctcgtcggtcgccatggccaggctcgtcctcaagacccacgacgcggtgttcatcgaccgccccaggacggcgtccaggaagcacaccacctacggctacgccgacatcacgtggtcgccgtacggcgcgtactggcgccaggcgcggcggatctgcgtcaccgagctgttcagcgcccgccgcgtcgcgtcgttcgagcacatccgcgccgacgaggtgcgcgcgctggtgcgcggcctcttcgccgcggcgtcgtcgggacgcagcggcgccgtgcacctcaacagggatcacctgtccacgctgagcatgaacgtgatcacgcggatggtgctcgggaagcggttcttcggcgagggcgcggacgcggcggaggggcccgtgtcgacgctgtcggagttcaagtggatgctggacgagctcctcctgctcaacggcgtcctcaacgtcggcgactggatcccgtgggtggactggatggacctgcaggggtacgtgcggcggatgaagaaggtgggcaagatgttcgacgcgttcatggagcacgtcctcgacgagcacagcgagcggcggcggcgcgagggcgaggcgttcgtggcgagggacatggtggacgtgctcatggacctcgccgacgacccctccctcgagatcaagctcggccgcgtcggcgtcaaggcgttcacgcaggacctcatcgccgggggcacggagagctcgtcggtgactgtggagtgggcgctctcggagctcttcaaaaaccccgccatcttcgccacggccaccgacgagctcgaccgcgtcgtcggccgctgccgctgggtcacggagaaggacatcccgaacctcccctacctagacgccatcatgaaagagaccatgcggatgcaccccatcgtgccgctcctcatcccgcgcgtcgcccgcgacgacgccgccgtcgcgggctacgacatccccaagggcgcgcgcgtgctcatcaacgtgtggaccatcggccgggacccggagctgtgggacgcggcggaggagtttatgccggagaggttcatcgggagcaggatcgacgtgaaggggcaggacttcgagctgctgccgttcgggtccgggcggcgcatgtgccccggctacaacctcgggctcaaggtgatgcagctgagcttggccaacctgctgcacgggttcgcgtggaggttgccggaggggatgaaggaggaggagctgagcatggacgaggtgtttgggctgtcgaccacgcgcaagtacccgctccaggtggtcgtcgagcctaggcttcccgttcaactctactccttatgaatctgtgggtcagtgtgtgttgatgagtgggacgtacgtgattgtgcactgctgtactagcttacttgctttcaagtttcaaggtttcaagttgcgagttgcaaatagccgttggtgcagtccgtttataggtggccaaattggccccctgacccgacctacatgtcgggtcgtgctgtgccaaccaacgggctgcacacacggcccaataagattcgggtcgtgctgggccagcccgaaggaatgacagtatattgtgcttctccatagaataagtctactttttcatccctcaactctttggggtgtcttgtatggctagaaatatgtctattttgtattcctcttctctttgggccttgccttatatggttgattaagtctattttggatcccactactattttctttgatcatgccatgccggccggccgactgtgtcaaggcatcggccccggcacagcccactgttgggccatgtcatgcttgggccgggccaaatggccgttccttgggtcgggccgttgggcctcgggccatatggccaagtccgtcctctcctccatcccggtgcacctctcccttgccatcgggttgccgaatgggtcttgaaaaccgttgacaaatggcaggaatccttcctttggaatggattggactcagtctatggtaggagttgccttgtcgcttaacccaagatgtattagatcaagtagctcggggccctggaaatcatgaacctacggatcataggatgggtcctgcaaatgcaatgcgatggacttggctccagcgcattagagacccctgctaggccaacattaacctaccacaagtgcagtgtgtgtcggagattttccatgcgtcagtcaatctgtcatggtcgtcatcggagatggatgtcgctcgttgttctggttggacaactggatcgacagacagttgattcaactgatcgccccagatctgttccttgtcgtccctgtgcgtcgtcaagactccacttcggttgttgctggcctagccggcaatactaggatatatgacatcaccagcgccctgactgtgtgcatgctctcccaattccttacgctatgaaatagagtatagaacttcctgactctatccaaaatgagttcatctagcgttggatggatgatgggtacaacattgcctcgacctacaacgcgttctttgagggattgatctccttccttcctttggcgcaacgcttgtcccgcaaagtgtagcttttttctcgggcttgcactttagttacagagttggacggctgataaaatgcacaaccgagggatggacagtcataccatgtgtcctatgtgtgcgtaggagctggaaacgctattgtatcttggtagagtgtgtcttcatgtgacaagtttggctcaagttgctacctaagattgagttgacctccctctcaccctgccgacaatatttgcttcatatttggtggagtcttctcgccagcggctactggatcataataggaaggggttcgattccctcatccttttgattacctggcacctgggctggaaaggaacactcgcgtctttgaggggatactttccacagtagagacaatggttgattgtattgtgcaagaaggaaagctttgtgtgggttacggcgatgcatagtcccctaggagtttttctcggtgcttagacacaaactctttctccttttcccttgttgttttcaggaatctagttgtctttcctagttagttttagaggcggatggccccatacggtagggtgggccggctggcccagcttgctaccagcccataccccatcccctcccctcccgggtcccgacgggagcattgagccacgcgctaggtcgttgagttgggctaggcccttgagtgcattgaggctgatcgaagtacaactactcaacgcctcgactccatgaacgcacgtagccacgcaccgccgtatgtagaaccctatccgctagtgctgccacaccagcaccacattgtgaacctgggagccgttcactgccgccttgttctctgccaccttattctgcatcattggcctcggttgtcctcaatttttttctcaatctacatcattagcctatgttgattgcagcagcaaaggaaaaaagaacattttttgggtgcgtatctccatccatacgtgatttgctcttctgggatttgtgttgttaaattttggtgggtgttgtcatgagctcaatcattgcttggtctctgtgtctctgaattattggtagtgttcgtgtgtgagagaatattagtggattgaaaacttttgatgatgctaattgggttggtttatggataaacaggtatggtatttctgcaattttgttgatgttctttgaaaccctcatcattttcagttcaatagacactccctcatcattaatatctcatggtgtgacccacctaattttgtcagtttgatgtatcctccttacccctcatgatcagcaagtcacggtcataaaatctcgttttttttcttgctaatatatttttgatgaaaatttcttgctaatatatagatgcgcaagattttaagcaaataaggacagtgccgattattataagttgatgcctcgcgcgtggcagttttattgattactatcatggccttgctttagttaacctcgctaaagaatactacaacctccatcctacaataagggtatttttgaaattcaaatttgttccataaagtgtatatttctagagttgtagttgtccattcaattcttccatttcaaacaataagatgttttgactttttatcaagttaaactatttttaagtttgactaagtttataaaaaatagtaatatttttaacacaaaataaacaaaataaacatgctaccaaaatttatccgatgttagatttaatgagactaatttggtgttttagatgctatatttttttataaaattgaacaaacttaatagaaatttaaaaaaaatccaaaacatcttgtaatataaaaaattacaaaacgaagatagtacctttcatttagattattactttcatttagattattactagttcctcctcgattataaaacatcttgtaatatactactgcctcctagttccaaccaactcctaatttagtaaggagcatttacattttttttcttccctaataatttttctttcaagtgctaaaaatgcacatataatgagatgaaggtggtaagagagaagattggcattgggaagaagagaaatagaaggaacagagcagctagcaatggaggtcggacaaacgacatgaagaaagggatatggaaattacatttatactgctttgaaaattaggtttaatgcatccgtggcaaagatcttgaattgggacttgagaaattatggaaggaaaaagtacaccgaaggtccctcgacttgtcatcgagttacaaaatcgtcctataaccacaaaaccagatatccaacgtcccttaactaatcgaaaccggtcacgataggtcctttggtgtttttgactccggttttatcctacgtggcagttgagtcagcgtggaacccacgtggaccccacatgtcagcgtggccacatcagcctcctctctcttttcccctcttctctctcttcctcatctctctcccttctctgccaccgtcgactgtcccaccagcatgaaggacagctggagggcgcaccggcgcgtcgcgtacgacggcgaggccaagaacctcaccgtcgcgctctcctacggcgacgcggcggcggcccaacagatcccgtgctctggtacgccgtcgatctgatggagtacctccccaatgccgtcgccgtcggcttcttcgccgttacgggcgaggccgccgagctgcagcaagtgtagtacttggagttcaccaccagcatcgaccccaaggacgtgtgggtggtgttgggactctacagcttgcttctcgtgctcgttgccataggggtgctctggttcgtgtcgcaatggaggaaagccggagagctcgccgatggcgacatctttgacgagatggggtacgacgagcttgccgacgaggagttcttcgtggagagcgggccgtggcggttccggtacagcgacgcgcgtccgcatccaacgcgcgcgccggccgccgccacaccttcctcctcccccgcgcgccggtcaccgccacaccttcctcctcccccgcactccggtcgccgccacaccttcctcgtcccctccgtctcgccgccgcccgaaacggcgtcggctggggcacccggcgcccatggtggaggcggctagatccggattcgccgtagcctctccgccatcgacggtggccggcggcggcgccgtgctcacgctcgtcctcctcgccgcggctgagtggtggcggcggcggcggt

SEQ ID NO: 21677 - DNA, 2887 bp, Oryza sativa
cgcctacctcgtgttccgctgctccccaccactctacgcctccgccgtctccatctccaacctcctcaacatcaccgccaccgccgtcaccgaatccaacgccgtcgaccccggtcacccccgtcgccgccgaccccctcgtcctcgcgcccgttgtcggcgacctcatccccacccgccggctagcctgcccgagaggagagaaccgagagagggagagagaggaggaagggagaggaggggaaagacatggagggtgatgacgtggcattctgacacgtagatcccacgctgactcagctgccacgtgggacaaaaccggcgtcaaaaccaccgagggacctgtaaacggttttataagttaagggacgtcttgcgttttggggacgattttgtaactcgatgacaagttgagggaccttcggtatactttttccaattatggaatcccaagtccctggcctgacccaataatatgccaacatttgggcttgcagataaggggctttagacagggagaaagatatgggctttgtttagattccaaaaaaattttagccaaaaacgtcgcattaaatgtttgaacacatacatgaaacattaaatgtggacaaaaaaaaccaattgcacagtttacatgtaaattgcgagacgaatcttttgagtctaattacgccataatttgacaatgtggtgctacagtaaacatttgctaatgatggattaattaggcttaataaattcatctcgcagtttacaggcggaatatgtaatttgttttgttattagtctacgtttaatacttcaaatgtgtgtccgtatacttcaaaaactttacacctaaaaaactaatcacacccatgatagcctggtacttgtagcatcccaagaaacaataggcctgtttggattgacgccatactaaaactttggcaggtctacggagagttaaaaatgtttatttggattgaagccaaaatatgtctataagagataagttcaccaaaaaccaattttttttagtaaaggtattgttttaataaagatggttggtttttcctaccgtaccaaaattttgatagggtaaaattcgatagggtagcaatccaaaatgtcccgatatcttttctcaattacacacgagagattcacaagcatgcacatctctatgcacacatatcatacgcacatataggtgagtctgctacctaccacacgttcaaatcaacaccatcacatttctaacatcaacaaatttctattaaaaatgtacctacatggtttttaatatttatgggcattagatctaaatcaaaatggtcataaattttgtatgcagaggccggattcaatacgggtgctaggggggacttacccacattagatccccatagagagaaagagagagggaatggggaagaagagtagggggctggagcaagaagaagatatgtcctccctcccattcaatcctagatccgcccccgttagtatgtatatgtacctaataatggaaataccaatacatacttcctagacaccttgtatgagaaattgcacgggcaaactttatgcctacttgattagtacatgaaaacgaatgccaatgacacaattcgtcaaattgcaagtatacacatgatttgaatttacatcaagtatacaacgcacaaacggcacgaagtttaatttgaagaggctacacacactgatacacagattgatagctgcaggaagccaacaccaagagctagaagaagctgatataaaaggggcaagagtcagccgtaccatgtccatgtctagctccatggcacgtacgtagcaccatgaaaaccatccctacgcgcaggcgcaggggctctcgagctcgtcgtcccccacgccgccgtcggcctcgtccgcgccgccgcggaacgccaggtgcccggcggcgagccccgccacgacggccaggaacaccccgccgttgaacgacatgacggccagcatcaggaggtacccgaccgcggcgctcaggccgaacagcgccgccgccgccgcggaagcagcagcccggggctccttcatccaccgcctgccgaggccgaggccgaggccgaggcggccccccgcggcggacagcagggcgcgcgcgtcggacgcggcgggcacgacgggaccggcggcggaggaggcggcgccgccgccgccgccggcgcggtgacgacgacccgccctgaggcggacgcggcgggcctcgaggtgctggtagagcgcggcggcgaggaagagcgcgaggagggaggcgaggtaccccggccaccccgacgtgcgccagccgtcgaagaggatggtgacggacgtgccccagtagaagctcatgtgcatcatcgcggcggcgcggcgaggtcgagcagcaagctctctctctttctctctccgatctgtgggtggtggctaggcttgccggcggcggcgcgacgtggtcggggtttaatacgactacgagcacacacacactgacgatcgagtccaggcccctgatcttacgcgtttattacggcccggatgccattggatcatcaatcaggcagattttctctccaccgtccatcccaaaatataagcattttttaagtatagcgacaagtcaaacatttttaattttaattattaatagaaaaagaaaataaaaataatcagtaaaattaaagttactagatttatcattaaacaaactattataatatataagtctttttatttaaaatatcttactttttatagataacgttggtcaaattagcatctcgaagaccatgtcaggatttaaaaatgcttatattttaggacagtatgagtactaattttaattagtatgtgtgtcgtacggttcttgcaatgt

SEQ ID NO: 21678 - DNA, 2399 bp, Oryza sativa
  unsure (1)..(2399): unsure at all n locations
ggatagcccaggtcgccgagagtgtccgccatggccttcatcttgcagcaatagtctgtgatgnagaggtcgccttgatgtagcatgcganactcggtctcgagggtgagagcacggcgttcgctgttgcccaggaattggagctcgagagcgcgcgacaccgaccgggcagtggcgacgtgggtcatcacctcttgaaggagatcagcggagatggagctgtagagccacccaagtacgacacaatccatctggagccagtcggcgcgatcgggaaagtagttgtcggagataacgtgatccgtcaaggcgtatttgccaagggccacgaggaagaggccgcgccatcttgtgaagttggtggcgccgacgtcaagggtgatggggacgagcgccttgacgttcagtacaccaacagcctgcgcgtgcagggcgttgcgggcctcgttgttgagaggtggtgcggcgggacgagttggcgcgatagggatgaagtcaccggggaagccgggaagatgggcgccgtgtcgtcgtagttgccgcaggcgcctagtccagtagcgagacgtgccgcggtgaagagttgttccagcgccggtggtatagatggagcgccggggggaacagagaaaggagcggtggacgccggggcggtagtggccggcgcggtggaggcagggatgcgcggggcaccatccgaggttgacatggccgacgaagacgtggtggagaggaaggacgcgagggcagtggagagcgcgtcgtgggcggccttggatgcgcgccgagcagcggcggcgacgaccgcttattcagtggtggggtcgacgtcagagccggaggagggggtgaaggagttactcacggcgtcggcgacggctttgacagcctcgtcgatcgcagcggaggttgcatcgggaatgggcaccgtcgatgtgttttcgggcgccatagggaagcagtgatagggtttaggtgtggagcggaagcgataccgtatctgataccatatgaaacgaaggaactcaacgtagattggattaatcacggagtgcgtacatatatatgcctgtccataaccactctaccgagttatagcaacagaatcgggaggataaggatctaggtttagagagataaaactcaaccatgcatatctaaaccatattgtctaacattctttgggagcatgaacacaagcgccacggaggaggtcattggttcactcaaggcttacgaagataagaaaagatagcgaagaaaaatgttcttgttcttgtacaccgtgtttctttgtgcgttgagatgtttaagagaaacaccaaaacagtgagctaagagatttggctccatcggtctctttaacatgaacaaggccgacaaatctctctttaacaaattcttgtttgtctacatatcgcataaccattgccattttttctttgcaagatacatcctccaactcatcaactagcaagcaaaatacatcatgcccaattttatcaagaatagaacatttcagctccaaaacagtgaactatattgtttgagtctctaaagacaccatcagattattaccaggagcattatgtgttgtcagttgtcaccatactagtgctagattgcgttgagctgtatagtcgtgaaattccttgaaattccctttattcatggatgatacagattcgtcgtgacctgaaaaggcaacccttgcttcaataacaatcgagcaacattgaatcttgtcagtatcacattgtcttttcagtgcaacataaatgtgctggtcttgtgacaacaaggcatcacaatctctcgtttgattggttatgagcactattgacatcccccacatgattatttgatccaaactttttgttccaactagaccatccagtagtaacaaatgcatcataccccggtgccttcttgttaggatcctaaacaagaaacaacaaaagcaatatgctttattttggactcactgcactcaagccaaatcccaaattcttcaaagagtaaattgcacacacggtgcatcaacttggcaagtgggtgtaatttgatacaagaacttaagaaatgagcgttctggtgtaacaacttgataggtaagtgcaatttagtacaagaactttataagtgatcgcataaatgcaataacttacaagatatatacgattttaatacaataagttaagaagttatgtgacaacttaattatttggagcactttttttatacatattcaattttaagtacttattttgacaatatactagcgtggatttgcatataagtatatttatatttttaccaccgaaagtcaattaaactggatgtagaaattattatattttggttgagattttgggaaggtgaagaaaacaaaaattctt

SEQ ID NO: 21679 - DNA, 752 bp, Oryza sativa
tcctctcatccagatcccaattccgaaatctaagtcaaattccaagttcaaattctcttcgaattaatctcctccgaaaaagtctattttgcctccctcgaatttttgtgggccgttttctcctcggcccatctcctctcagccgctcctcctcctccccctcgcacgtgcgttgcgcgtgtgcgctcgctctctccttcttcctcgctctctctcaccctctatctctctctctctctctcattgactcccgccgacgccgcccaaaatcccaaccgcgctgccgtttctcgcgcgcatggccgactggcaaggacgccgctcccacgcgcctcgcctgcccgcggcccaaaacggaagggagaggcttccctttccaccgtcctccctcactttttcccttctaaacccggcctctctcctctcgcccttgtcttcttgcgcgcggaagcagaggacgccgacaacgtcctgccacgcctgtgcccccaccttgaccgcgccacgccgatgctcccgcgcccgtgattcaattcccgccgcacgatccaccgcctccaccgcccctttgcatcctcgccgtcgccacgtttcgcgcagcccacgaaaacgccgctcccgctcgtgaccgcccgccgagcgccagccgagcgctcaaccgccaaggtcggtttccctcctctaaaccgacctctcctcctcacctataaaacccaagcccgagctccccctcttttcttcccgttttactt

SEQ ID NO: 21680 - DNA, 8495 bp, Oryza sativa
catatctcccgatccgtaattctgattaaccccgttccacttccagtattcccgtaaaatcgagatctatttaatggcactattatttagtctaaataggatccttttcttggtcttttgtttaggttttgattgtttgcgtatagttgcggttaccggatttttgtcgatcgtgggatttctcgaagattcgtgaagcttcgtgaagaccttgagcaaggcaagtcaccgtttgatcatttgctcctataattggaaactcattattgttttgttttcaacttgcattagtagaatcacacacttaacttgcttggcctcggtttgcgtgccaatccgatggacctacccagtagtcgcacaaattcctgtaggctgtactaccctaattctttgtcgctccactcttgtggtacctcggtatccgtgctctctgagcgcgtatacctaatacctcatatacaccgttgattgtcgaaaaattgggaaatgggtttgagaagccttgaaaacccgacatatggtgtcggtgtgtttaaaaataaaatgaattgtgaaaactcgcgatgcgggggtggtgcctgcgtggcgctgtcccgtattcgcatataaggaccgattcctgtgtgaaactcatcaagcataacaaagtgcaaccacaaggtggtatgggacaccctagctaagtaactagtcggttcagggaaacctcgcatgccaatagttgggaacgccggggcggggtcagttggagccaacccgggttcctggtaaggcaagaacgcgaagcttgccagattaccgatcaaggtggttggagtttgatttgtgaaaactaaaatggcctatatttatgtgaggatttgattcttctatgtggcatgaggtaaccctgggtcggcttgggaaaggctttgttgcgaacctccgataccgatgggtgtttggaataagttcgtatcttatgggtaaagtgtacccctctgcagaggttaacttactgttcgaacagccgtgcccacggtaatgggcggatgtaaggtggttcccgttgcgtagatttgtttgcttgtgcttggtgaaaagttgttgtggtgtgggaatcgtaaccagaatcagcctatgtggcagatggatgacctgagtggtcagaaacgaatctatgtgattcgggatgtctgcgggcatcatagactaggcttcccgagtggaagcggattgttgtgctgctgggcagctggactctgggagtccaagaaaatgaaaaaggctctgggagccgatttaatcaagtgaaatggctctgggagccgagaagtaatgatctgacccgggaggttggtacattatcaattgagttgttgaaatttgatacgcaagtctcttttcgacccgaacttaaaaagaaataaatcacttagtgatttcaaaatgatttcaaacaaaagatttaccaaaacaaccttgcctctcttccaagcttgcatcaaacacctaaattcccgtgacttgctgagtacgaaagtactcacccttgctctatataaatatatatagttcctccgccctgaagagaagataaagtgaagtgaagattagggtttcgtcctggttcccagccgtcgcctgtggtgttgggtgttagtccgttggttccgctgctgctgctgttgttggtgttttcctcgtccgcgtcgtcggttgcattctcgggctgttctgagctgcaacctaagttaaggtaaataagtcctttatttattttaaggattgcaatgattcatatttttcatcgtgggtaccagcactatgtcctgggactggtactgtaatcgcggattcgtaagaagcggttcacgccgttttttctacgacacgctcctgtcaggtgccgttgtatggcagtgccgaattggggtgtgacaataatctactgaacagtctatcaaatggacatgatctttgcaccaccaaacctactatgtggcatccacaattcgacatgccacctcccctccaagcggccgtactcgattcatttttgcttaatatcatatcacacattaaatattctctctatcaaaaaaaagtcgaactctagggatgaatttaaacatggtaatgcatccctagagttggactcatttcgagatatagggagtagtttggaagtaagttggaataatatacttaatttaaagtgcgatgtgcaggcttagtccatggcgtgcactaattgaggcccaatcatttatcctcttcagattgcatcatgtactgtgacgagttctttaacttcatccgcgttacgttgagagtcaactgtcgaggtcaacgctcgattcaccatttagcaaatcgcattcaagtcaatttgctgtttcagtcgtatatagtgtgacaaatcagatgcaacgcaacattaattaattagcaattactgataattaatcacagtaactttttcagcagcaaaaaaagtttcaaagcatagtctacactgtacaccatattatatgacaccaaccaaaccggcgagcttgctgcgaggctgcatgccacagatgaaagctccatcgcggcgacgacgacgacgaccgtgtccaagtccactcatgcctcgccatctcttctaccctacgcgattgcatcttgcatcaagaactcgatcgatctgatatatattactatgagctaagctgctaattaagttctagatttaattagcaacaatcaatggacgtgccgttcttcctcgccttcgcaatcatcgcgctcctgtccaggtacgtccccttcgcgctgccgccgatggcgcgggacctcctcgccgacaactccgccgagccggcgcgcgccgccaagtgcgcggtgtcggtggccgtcgccgggctgatgctgctggtgtcgctgcagtgcggcgccggcggcgagcagtactgccccgacgtcagggtggaggggagggcgctgtggctcaactgcgcggcgctcttcctcggcatggtcgtcggcggcgtcgcggtggtggtgatgccgccgctcgccgccgtgtcgccgcttgtccaggtgatggtcgaacacctgaccaggttcacggagaccatcgcggtgaccgcgttcgcgcatgacttctgcatctttatcaagctcgtgaggctgaaacaatgaggcgaggaaccgaaggccatttctcctttgtttttcttgaggcttttttattcacgttgtaaaaagattgatgaacttcaatgcgagaatggcattcaatgttcatttgcgtatattaattaaaatttaatttattatttttatataacttgaagaaatcgatttctataatcgaatttaataactatgttaacatgtaatacatccattttgatgattagaatccctcttcggaaccaggaaaccgtgcgcacggcgtccatgtctcgggaatgctaatgtgggagcgaacgcttgtggcgcgttcctgtcagcgaacactttcgcctttcggacaatataagtttcgctgttagctttccactttttctcagggcaaattatcggtttttctattcgatgattgaagtatatgctccatgatatgacaggtagaatatgacatgtaggttagaagggaatggcaaacaaaaagcaatatttgcacagcaatgtaaaactatgaatttaaaaacaatatgtaaatccacatattttaaaggttaaatcatgccatagttatcctagtaaaacttctaaaatatacgttgtttggcaaataaaattagtgctaaatttgccgctttgttatattatggctaaatatgtagttctatgctaactccgttataaattatgggagtgtctagattttaagcacatggaaaattttcaaaaactttaatcacaattctcacctcttagatataatccactggttgttatcaatacctacttatgcaaacaaaatctgtttctactaaaagattgacaaaattacataaaccaccccataacctattttgtcgcaaaagcccacccatcaaatattgtgaggccaaaattacccaaatgcttaagtcggactcaccacaaaccacactacctagcttggcttagttgatatggtccgccgggattcaagtaaaaaatggaccgaatcagttactcatgtgtcagggagagggcgagggtagagtggtttttccaacacaatgggttatgcgatggaatctcaaaacagggtgacaattataatgatttatgcaatttctcctaaaagattaaacaataaactattctaacctataaaaagaattacaaaactgcatgagataaacttataactaataaaaacttactaaattacatgaaaaaaaatgtttgaacttagataaaaataaaactctaccaaataccttacatgacagtttcatagtattgtagcctaaggctgctttcatttgaagcaccgtgagaaaaaatagtgcatcgtttttcgcgtgcgcagatattgaacggttaaaaggtatttttttaaaaaaatatataggaaagtggatttaaatatggtattatccatttttcacttttgaaataattaatactcaattaattatactctaatgactcatattgttttacgtattttcttaatcttctacttttcccttcctttagtgtttttagaaggagtaattctacggttcttgagaaggtaccaagatgtaccaaaaatttagtgcaaaatttaccaaatttacaattgaaaaagtggtacctcatggtacattctcaaggaccgtaaaattgctctttagaagtagctaggcttattccttttcatggttttgaacggttgattttgtgcttaaaatttcctctctcttaaaaagaagagtaaaattcacaaaactacatgttttattgtccaacttgtataacaatgtacatattttaacacttatcacttaactacatatattttagtattgaagtttcacaaaactatactatcaacgaacgaatccacctgcaagacgacgtgattgtttatctacatatatttacaatgcggacgtggcatcgtgaatgttcgacctcggatgaagcactcaagttcgcatcctaggtgaaacaaccgcacatcatctcgcgggtggatccattctctaatagtgtagttttatgaaactttaatatcaaaatatatgtagttaagtgttaagtgttaaaatatatgtaattttctacaacttgaacaactgaaaatgtagtcatgtgaaatttacttagaaaaggttctgcatgaaaaaaaaagaggttctacacgatttttgtgtggttaacgtgcgattaccgcggtaatcgtcctacggcaggggtgcagtaaccccggtcaaaacgaatgggaaaccctgcccttaagaacccggggtcttcagtacaacccagcaccggcgattgaacaggtccagaatccagaatggtgcgattgattgctcccggtgcgtgggacgcgccaacacacaaactggaaaaaaacccaaataagtggctacgagcgagcgtctccaaaacgaaccaagtactagcgactaaacgaaactttttgctcccgcgactcccgactcggctctcccgggcaccgcgggacggaaacttagccgcgttccgacgaccccagtgaaccagaacgaccggttccagctgctacacgcgagcaacaagttgaagcagagagtacggttcagagtgcccgaatgtccgattacactgtggacctggtcacctggacttcatcttggccggggccgctgaccaagatgggcgacccacccaccggtggcgcggctggagcaactggcgaggatcacaagattcagggcccgtctagttccccaaaaatttttcccaaaaatatcacatcaaatctttagatatatgcatgaagtattaaatatagataaaaagaaaaactaattgcacagttatgggggaaatcgcgagacgaaccttttaagcctaattagtctatgattagctataagtgtaacccacatgtgctaatgacggcttaattagtatcaaaagattcgtcaaacggtttccaggcgagttctgaaattagttttttcatccgtatccgaaaaccccttccgacatccggtcaaacgttcgatgtgacacccaaaaatttctttttccccaactaaacacacgcacaatggatctcctgagaaattaacacactgacagataacatggcaaaatctgcaagacaatttcccagccatgctcagttgttctaatatttccccatgtatatcaaaagtttggctgtcctgttaaaaaaggacttgttattattcccgagggagatgtaatcatagctcatcatgcattgtgtttcttgactttttattctataaataaattttcatgagtctaatggtgtgtttggttaggtaaatgggactagatgggagatggctatccattttattggggtgtttagttagagggcaggtagtagcggattaggaagatatagcgggagagtctaaacaaactagataaagttatagcctttctttccatctacatatagctaaaaaatttagtgggggttcccatagtattcgagccagtagtgggggctcgagacccgttaaccccatgctagatccaccctaagaacagtgtggatggggcggtctagaaaaggaaatatttactcaacatactggatgaagggatccggttttttgggcggatgaagccatccaccttctttaggatgttgattagtacatgattagtgagttgattagaatatgattaatgatattagcatgttttgctattaattagtaattaaaatggtaagattagttgttgacaagtgctattaattagtaactagaatgctattattatgtttaggtatgtatgttatatggagcatcataattatatgtattttttaactactttaaaagcataaccatactcttccttcttaaaaaaacgctcactctcattttaaatgaaccgcttaaagaaaatctcccaaaatccaacccatggtgcaacgcacgggtaacctccctccaattttttttatgaactaagggtgtccttcatatggtaataggagatattatattttctagtgtaaaatttggtatcttcagttattagttatctcgaagtaccaaaatttttagtctaaaatcttagtacctttagctaatttctcaagaattataaaatttttcatgaactaaatagtgttatatattaaataaacctaatattaaattttacactcattcgtaaatttgtagtactagaatagaatgcggaagtttgtttaactcactcgccggtgcgatgacacacagccacagagatggaaacctgtagcgcataacgagggcctctccaaacatttacatacgcgacgacctgacacgaaccaccgcgcaacggatcggcacccgttccacgcgtctacgcgggcaggaaaactcgccgattcccaactcccaagcgaaccaaaaccctacatatgtgatgcatataaacgagcgcctccgctgccacttcacaagcaacttaactcgacagccaacaatttgaagctttgaacagatagcagatcgtacactccgttggtgtagaagccgggttttacaacttttcattattaaaagaagtagagcagagtagtctccgttcctggccgatccaccatggcctccttcttctggcctgggccgccgggagcgcagccggtgggcgacctgcaggtggcgaagttggcgctgctcgtcgccggcaacgggttcatctcgccgtcgtcctacctccgccgctgctgcgacgacgacggcccgtgcttcgtcgacggcgctggggagaggtgcttgcacctggccaacctcgtcaccgccatgctcgggctggccctcgtgctcggccagatggcattcttctcggcggcggcgttccggccgcaggtggcctcggtcactgttgctgcgcggtggattgtcagcctcgccaagctcgccacggttgggaccctccagctttgggtctatgttttctgcttgtgcctgaaaatgttgtgcatcagatactaattagcttctcgtccttgcaactctcttctgtcgtgctgatatgatgtgattctttcattctttgcgtccaaaaaccaaaaccactatgtatttcagtgactggatcagatggatattaacatgaggtggtgtactgtgtacacctgtacaatgaatattgcatattacagtctctgtacaaacaattatttagttgctggtgggctaatcggctcataatgttaacgaaagcacttgtactgcttgtaacgactacgctatattatggaaacggaggttagagggagcaacttataagccgttggatgaaataacgacgccagtcatagctatgtcttatggtggcggtattct

SEQ ID NO: 21681 - DNA, 18004 bp, Oryza sativa
tagttcatcaatggtcaaagacacgttgatctaatggctgagatgattctgatgacgtggctagctgagagatcttctttatagcaatcattgcacttagtgggttccaattatataggaagaatggatttgtaatcaagttgttgtaatcaagttgtaattttatagttagcagttatttgtcctctaaattttatgataattggtttaatcttatttagagtaaaggtgggaacggattctattattaccttaaaaatattgttacttactataaaaaatgcatgtgcgttagaacggaaaaaaactaatgttatggtaatgatctatctatctattaacctattaacttaataaagtaatagaaaaaattagcctccacgttagctctccaagaactagaaattctcatattaattagagtataataaaaaaataaggagaactcatttaagacaaggactctttttttcctttttttaaaaaaatcatgttatatatgtgtagtgtccgatcgaatacctgcatagaacaaatcttttgcaaggaaaaaattacctgagctggatagactaatctctctatgtaagtaatacaacataatacaaagtattcctattttttattttttttgttgaatacaatttaagaaaagaaattaaattcggaatttaaaaataagaaatattgatagatgagattagagttcatatagaaatacaattaggaataataaaatttcagaattaaaaaaataggaatactggaagaagaatctagagtccatacagaattaaaaaataattaatattattaatttttagtttaaatttaaattatatatcatgacaaataaataattacatttttttactccatttagctataaatagtttaatttggagaagaaaaaactatttcaaattttagcaatttttaatgcagaaacagtttaaatcgattgagaataaataaaacgtaattaggcccatatttagaaggacggctcaaatatctctttttcacatcatggcatgttaagtgaacagggcccaagtggccatggcccaagtcggcgtaggagcgctgagagccaccggattcgatcgaacggttaggatcactcgtgatttagataaagcattgcactgttgaatcctaaaccctaattcattctccttcctctcagtggcacattcctccaccgtgagcggccgtggcggcgcccttccctaccacgtgttgccgcagtgccctcctccctgtgagtagcggcattgccttcccccaccgcgaccgcgtggggcagcgcccttccctaccgcgagcggcggtggtggcggtgccctcccgcggcttcccacgagtggatccggcggcgacggcggcttcccgcgggagaatcaggcgatgacgaagatttaagataaaatttgtgcgtttttttattattcttcatattccttttctcttttgatgaattgtccgattggattttgtatttatttttgaatttgtgctttatccacccttacacgatgtgttactcgcgtgtgtggaacggaggtcatcgttggatcggacttacggaccaaaaaatgagtgatgaacgaaaagttgtgttaacgtcaacttttggtaaaattatttagtggattcggttaaggaaagagcacaatcaactgatggaaagcttatccagaagagtatgagttcaagaaagaatcatgaagactatgccgtggcagtttaattctatctattaattacgtaggatttagtaaatttcctttatctttagaaagttttatctagtatccgattagtacttgtatattttcttttgtatttaggaaacatgcgtcgtgtccaatatggactagtatctacccatgagtataaatatgtatatacagggtcattgtgatctatcctcgatcaatataactactcccggcgtatcgccaccctcttttccaatgtatttatttattatcactgacggaacttagcacctgacgcgggctgcattgacttcgatctccggcgaaggggtaagccctatgttccgttggccctggtgaatatatcggctacattggtgttgttcaaggctacatcgcttcgatctcttagatcgttctagttcggtcgatatatttgcctacctgatgtttcgattctattttaatagcattgtgtttagagacacatcggtttagttgggactgtctcgattaggtctgattttatgtcttagcctatatatctctacaatcacaatgttgttttaaatagatttgttagatccatcatattagacaaatttatcggctcattgagtattagattattatatgcaatctcgtgttgcatcgattaggttctacctactaaattgttgttaataatcaaagtcttgtcaagctgatatgttcatgctaatgtttcattggagggttagccgcttatataatatgttaaatttattgttgatggttttattgtcttagttaaatttaagacatgaccactctgaaaaacaatgaaaggcttggttgtttagatcttatactttcttttatacttagtactgcattagtcgtacttggaattgtaagaactaacttgctctttggttgacgataaaggtagcatcagggttttcagccgatgagttgtctcaatattgcactggcttataaggattatatacaagttgattttagccgattggatcattacttcattatatcatcatcgactcttggattatttgttcaagttctttcattgcttatctaagcatcggaatatacattgaacatatagccgattatttaaagccttatcgacatcggctaagtaccattacatcggcttgtcaaccaatcggttatttgatcataactatatatatattgttgttacataatcaaattgactagcacatctgcatgtaatcaaagtttaggatatgcactagagttaagcatttctttcattcattcgttttttttcacatcaataagttgtaaatttgttaagtagttaagattttcattgctcgagagtgaacggtctttacttgggcctcgccggtgcgatgccacagagacggaaacttagccgcgtcatgacgacccgacacgaaccaccgaatccaacggatcgacacccgttccacgcgtctactcagccaggaaaactccccgatccccatcccaagcggaaccaaaccgttcatggcgatgcttataaatgagcgcctccacagctcctctgccacttcacaaagcaactcatcaacagccaacaattcgagcagagcagatattagggaaggagaagaggtgagacttgaaacccatatcgtctagcccacttcattgtggagctagcccgaaaacctctagttgtttctcccctgtccgccgatccaccatggcgttcatctggccggggccgccgggagcgcagccggtgggcgacctacgggtggcgcagctggcgctgctcgtcgccggcaacgggctgatcgtctcgccgtcctacctcagcagctgcccctgcgacgacggcggccggtgcttcttccaggacggcgtggcggagcagaggtgcttcgacctggccaacctcgtcaccgccgtgctcgggctggccctcctcgtcggagacatggcattctcgacggcagtgcccggccggtcgacgcagtcgcaggccctggccaccgttgctaggtggctcgtcgggctcgccaaggtcgccacggttgggaccttccagcattggatcaatgccttttacctttgcctcaaaacgtggtccatcacgtcttatattatccacccgtctttgcatgataaccctgtcctcgtctttgcataactctttgtcgtgctgttgtgatgtgattaggctcaaattgtttcattttgaacattaatttatgttcaaactatgaggaaattgattatatttgtatacgaatggattaatgttctttacaacgttggtatatttattttaaccatgtttggtatgttcacttcctgggttgttctttacaactgaagcaaatttatgattggagctacatttggagtcacttttttttccttgtttcatagtagtataaaagttactccaatgtagtttattttctttgcaaattgtttgtccgaaacgtcatctaattatacatgtcatgcgaaaactacaagttacttaaataaaatctatttttcaggtttaaataattataactcaattaatcatacgttattttcttattttatctgcacgcagttacatcttcagcagattcaaaagggacatctagtagcataaacactcacatactcagagaaaaccattgacctgagtaatgacccggttagtcactaaccgcgtccccgtaggaccgtaacgaaccaaatggagcagcgtcccacgcggataaaccacgtcgtccccgtcgatctccacgcgcggctgccagagtcgatcgtcacctcggctagctcggtctcgccggtgacctcaccgtagacgacgacttgacctgacgaaactggaaccaacccaacccaaccaacatatacgagctcaccccgcgctgtgtgtgccgccaattcacaaatcacaagcaagaacacaccaagaacccgaactgtcctacctcgatcgatcaccagcagccagccatggcggccgtcatcgacttcctccagttggagccgccgcgcgagccgcggccgcagccggccgtgcaggcggccctccccgtggcgaagtcggcgctgttcgtcgccatcaacggcctcgtcgcgccgtcctacctgtggtggtgcctggcctgcgacgacggcggcggcggcggcggcggcctccgccggcgctgcttccgcggcgaggccggcggcgacgtggagcagatgtggtaccagatggccagcttcgccaccgccgtcctcggcgtggcgctcctggcttttcacgtggcctcctcctcggcgccggcggcgatggcggcgtggctggtctggctcaccaaggtcttcacctgtgggactctccagtttggcctcaatattgtccacttttgtatcaaaataatttacttcaagttgatacgggggttggattctaatctttcgaggggataattataacacattttttttactgcttggatgcaatgccgatagctgtaaatggatttgaatcgatttgagtacataataatgtacgaaggtagattcaattttgtcagagctgcggcgtgctaatgtagactccatcgtggctaattgacggaataaacgaaacggtatatttgcaaacggaaaataatttgtaaataaaacttttatatacgtgttcttagcgattcaaaacaaaggctgtaaaataaactacgatgaaaaaaaatcccaaaatcaactctaaatttaaggttgaaaatttaaattttggtttataagcataagccaaaagatagagccgatggttcttgagatattttgtctgctctttgtgagaatttcttctattagaatcgtgatcagcttctcgatcaatggcgttgaccgatcgacatacaacggctttaggtcatcagaaaaagaaaaagaaaaagaaaaagaagaagaagaagaacacgtcagtagagggtccttgacggaaaatgatcttatcaagtcaaccatcgattctgggccgccgaatagtgatcggacgggtacgaagatgttatccaagactcccaattatgggagggttgaaacgatgaatcatcctcatgaaggggtctctaacgtaaaatcattgcctggctggcataacatacttttcctagtcgatcaggattgcagaagcattatcggacggtgctggagaacccatgttttgatcgaacctgtgagttaggcccattaagaattaggcccatgcaaatcaccctcggttgaagcccaaagcagtggctgtggcggccgcaggtacaaagatctaattaagttaagagattatgctgtccaaggcaaggcacacctttttattcctttttattaccatgccagtaagaccaaacaaggttttcaaggcaaaatagcaggcaaccattggccaattctatcttcgctcttgattaaccacgatgaaaaatccacaatcaggattctcatcacattattggcacattacggccaataacagaacactatcaataaaatgaataaatcccacacaaaaaaccaatgtggtgttgtgtgtcttgtatcacaacacctctaagatctagcttagttatgtacagatccttttgtttcccctaattaatattactcctatatcttcccctcttaggtctgaccatgaaattctaggcacccctctccttgagatagctcggtgtccttctgtgccgcctgagcgaggtggtgtacgatccgatggagccgtcgcgttgcagcacgatgtcagcatggattgcagagtttgggttcttctgccggtatcgatcatggtgactctggtgcttctcttccactgtcgcctcgatcctcatgtcaaccttgttctcaccatctacttgcttggttttggtcacatcgtccttcttgttatcttccacaacgacggtgaacacaaatgtaccaatttggaggtagtcattcatgtccaatatgggctctagggccttgaccacctccctcatgctgggcctggactttggtgatgggctcaagcacttgtaggctaccaaagcagcctcttgggcccctttgtaggagtattggccctccatggctgggtccatgacgacccggtgcaactggtcgggcttcttgaggtactttcttgtccaatccaccagactttgctccctatggcgacgagagcggtccaccgagtgccgacccgataatagctccagtagtaccacaccaaaactatacacatcgctcttgtcggtcaggtgccctgtcatgatgtactcgggcgctgcatacccgtttgtccccatgacacgcgtcgtgacatgggtcgcgtcgccctgcggcccatccttggcaagcccaaagtcggaaagcttggtgttgaagtcctgaaatcaaatgaatcagagatcgggttaggcagggatcacagttgacaattacaatgacatgcaggagacagacgacaatgtttctgtcagtatcatgctagtaatcacgccagtcggccagtgccattaactggcataatgattctgtacggatatgatgctagggatggatttttattaggtgctgtgtagccatctattcctagagaagacagcatgagctgggatctctgaaccctgaaggttgggccatccaagaaccttccaagttgcaatcatgtctaacgaacccacacacccagccaacgattttggaacgtgtggcacgcagactttgacagtcaaatctagacttgataacttgacaagtggtatcccatcaaaattttcagaaataagaagcgaaaaatggtctgaaagttagtaaaatttttcacggcagtttgaattttcgctctcaggacatggtagttttttttttcctttaacgactgaaatttctactgcactcgagtgaaatgactgcgaaaagtacacagtggaatcaagaacgggatggtgctcaccgagtcgaggaggatgttggatgccttgaagtcacggtagatgaccggcgtgtcggcgtcgtggaggaaggcgagccccttcgccgcgccgacggcggtctgcatcctcctcatccatggcatggcgccatcgagacctgcacggacaggaggacggttcagcgtcagctaaagtcttccccggaattttttcagagctgaaacttcagcgatggcgtaagcgcgctctaagcgcaaatgattcggttaaccactcgcgtataaacaccagtaatctcccggattctattgacgattgcgacgggggtaaaaaaaaagaagaaaagattcaacagttggtaattattctcgtgtgcttacttttgaagagatgcttctccaagctcccgttgctcatgtactcgtacaccagcatccggtgttcgtcctcgtagcagtagccgatcagcttgacgagattcttgtgcctcaactgaccaaggaagaacacctcagcctgcaagaaagaaaggttcgtagattaattagcacggtgagctaaagctcgagctagcccaacaatggcggaaggaacgcatgaggtggagagtgacgtaccagccactccctgtggccctgcgtgccgcagtcgaggtcgaggtacttgacggcgacggcctgcgcggcgaggccggggcggaggccgtcgtcggcgcggcccttgtacacggggccgaacccgccggagccgaggtagttggcgcgggagaagccgccggtgacggccctcatctcggcgtaggtgaaggcgtacaggttcgagcccgacagcgtcagcgacaggtcctccggcgtgagggtccccgtcgagctcaggctcgacagcgacaccctcgacgccgacgacgccgacgacgacgacgacagcagccgctggtggtgaccaccccctctgaccctcctcctctccggcggcacgtcgtcctcaacgccggccaccccgccgccgccgacgcagcagagcatcgacttccacgacgtccgcaactcagccatcgaatcgatcaaatccaagatgaacaagaagccaagaaaaaccaatcgcccacgaacacgaagcagcagagagccagagaccgaaatgcagagacggagacagcgagtaccagagcttgtaaagaagaagaagaagagaggacagagttgaggaagcgtctgcaccggcaatggcgagatatgtaggcgctgtggctgtggcttgtgccttgaccgtgtcgcgcggcacgaaaccacgcacggacggcgacgccgagggctgcggaaaactgcgtcaaatccggccacgaaacgactcaaaaaaagcggagtgggtgagtcccccgcagcatcttggtaagttggcagagagtactattactgtttccgctgctgcattgatggttgaatttttttttctttgaactttttaatttttagttttaaaaataaacatttttcaaaacgtattttcaagatattaaccttttgggctacgctagccgaactggtgtaaaaaaacaacattgtcactccgcgttatttggtcacgccgatttgacgggcgtggccacgccatccttgctggcatgacagaataaaactatcatgtccactgcgtgtagcgtgtcagtattgttttgccatatcacgtcgattggttcggattatagaaagaagttttgaaaaggtctatttttaaaattgaaaaaaataaaagttcaaaagattaaaaaaaatcctcgctggttccatgtagaaacgatgaaaaatcattctctcttttttttctttttgaattttgaaaattcattctttcagacctgtagaacggtgaaaaatcattcttttattagaccgatctcgtacagtctcggctgcttttcaccgcatgtactggcactgtgggtttggtcatttcttccttgccacggaaggtagcaatttttctgttctatttttggggttggaatggaattctctgcgtgcgtcactgtttcttactctctgcttaaacgtgacgctgacatacttgtaaaacaagtgagttcttgggagggttgcttatagcggaattaatccagcgtgctccatgctgatactaaactgattataacagattaagcaattccaagtgcttggatcatgtgaaaaatttcgtgcaaagtatttcattctttatatgttgcttctagttgggtgtttctgcttttctttttttccttttaggctaactgggagtggtcagactggggatgctaaaaccagagttgttttgggaggcaaagcagcggatgcaaaggaggtgaagccatgagctgcatctggttgctacctgaagcaggtagatctgcagcaaaaggaatctgattccagccgcagttcctcccacaatgttctggctcaccattctcgttttaatttaatctccatgatccttccacgcacgagtgaaatgcaattatgcaattgcagtcgatcgagatgagatgatactgtgataggcagttctgaactgaaactgaaccgcacgctccgaacaaccgtacaggatgcagacaaaatctctgctggaatttacaggagatgggaaccatcctgtcctgcgctgcagatcaaggcgcataaattatgatagttttgtaatttaaaccctgcttaggaaaatacgcaagctggaaggaagcatcaatctgagctgtttgctaacccggtgttcagcctagctgtcgtgtttaaattcagttgagcttcttttctgtttcctgatcgatttgtttatccgcgacacagcctcgcacgttcgccgataaagaatgttcctctcaggcttggattagattattcccggaccgtgccgtcctgttcttggaccgtaagattagtttactctcctggttcctaaactctgacagaatgagatcagcagctccgataaaaaaggaagcagcagagcatgttgttcttacggggcaagaaagaggattaggagaaaatgagcgaagaaacactccgcgtatatagctaatgctccttttctgtttgtctcgttaggactgcatggaaatttctcagcatttcagctctgttttctttttatcacagttatctctctcgttttcattttttcagaaaagatgataatagtgaatattattccctcatttcttgacggcagcattaacgcattggatgcggtaagcggattgacctgccaccgtcctaatacttttcttctactactactatttctctgcaaaaatggatggattatactgtgactctgtgagccgtagcagctggcacaacgactttgaaccgaccttggatagtggatgcattgtaactgtacaatacaatttgtacaggaggagtgtatgcttgtaactgtacaatttgagctgcatgtctgaaaagatcgccgggcacgagagccatggccgccgcgtcgtcgatgggttcgagagatgggggggaaaagcagagcacgcctacgacgtggggtgcatggctcgatgcgtgggcgtcggcggcagcaaaagggaaaaaaggagagatccgtctctgctttcgcgaagaggaggaggtcacggccgtccgatgaggaacggatggctcagatatcaagcgcaaacggtgacgatgctgacaagaggggagagattccgtgcatctctccatttcgaattcggggcatgggggcggctcgctccatctcctacccacacctgagatctggcgagcgagtgacgacgtgccgaccaccggccaccacaataatattgctctgtttttcttttttttttgttatcttattattagccgcaacaatttgaaatctaatatttgagttgattttgaatttttttatcgaagtttaatttttatattggcttttaatcgttaaaaatataagtacaagagttgtttacacataaattgttttttactttatttgtttatgtggtgtttggattcaggggactaattttagtccctatcacgtcgaaagttggaacactaattataagtattaaacataggctaatgataaaatccattccataaccctatactaatttgcgagacgaatttattgagcctaattaatccatgattaacctatgtgatgctacagtaaatatgtgctacttatggattacttttgctttaaaaaaatcgtctcgcgaattagctctcatttatgcaattagctttattattattaatctatgtttaatattcctaattagcgtccaaatattgtaacgctccgcttttcgtgagtcgttaaaaactaactcggcaaaatcctaattgcgaaaattttcgttctttgtgtgagagtctaagttgtgccaaggatcccaatttaatctcgttgttccctctcatcgaaatcaaaatcctccccctcatccaaattccttttccgattcgagtctctgaaatcaaattctgaaattcaaatccttcctttgaatcctcgccaaatacttctacgaatccagaattattcaaatcctgcctcgaatcctttccttgactccaccctatgttcccgagaacaaatacccaagtattccttttgaatcttttccatgacttctccttgagtttcccttgatacatccctaaaccctcgagttcgaatatcaaatttgaattcgaatccaaaccctaaatcactccaattctatccaaatcagttttctctgtaaaagtctactttacctccctgtatttttggatggaccgattttcctccatcggcccatctcccctcccagcccatcatctttccccctcgcacgtgcgttgcacgcatgcgagccgagagagagccgtcgctcgctctctctgtttctctcgctctctcgtcttcctcctctctctctatgtttctctctctctcgttcgatctccctctcctcggtgccgatttcccgccgtcgccgcccaaaacctccaccgccttcgtccattcccgcgcgcacctcgcgaggtggccgactggccggtcgccgccgacgccatgcgctgccgccttgcccccgctccatgccaaaccgaccgccgccgtcatcgtcgacgtcatccatggcccccgccactccacgccgcacccgtccaagagtgggagaagcagctgctctccctctcctcctcctcctcactctcccgctcctcattatggcaagggaccaagcccctttttcccttctttttccctttcccgaccactgccggcgtcaccacctctgcgccgcttgaccgctcgcgccacccgcctcatctctttgaccgcgccagcccgcgctccagcagttcgatttccgccgctcgatccaccgccttcgccactcaacgcatccacgccgtcgccgctttcgcaccgcccacgaaaccgccgctaccgccagccgagcacttgaccgccaaggtcagttctcccctccccaaaccgacctcgcctccgctataaaaccaagccacccaaaccccttcctctctcgttttcactcgcctcagtcctcacacccaccgcgccattgccgccgaaccaccgtcgccgccttgttgctgctcgtcccgctctcgccgttgccgtccgttgccgagcaccggaggagccggtgcgtgcgtggacgcgtgacgaggagctccgggcaccacctctccctcccttcttccccggccgcgccctctcggtgtcgtgccgcctcggcgtcgcgaccacctcgccgtgacaccgaccgcgccgccaacgctacttcctcttcgttggtgagctccccaccataatcctcctcctgccgcgcgatgcgccgcgcccgccgccgctcgccatagctcgccacgcgctcttgctctgtcccggaggccgcctctcgtcgccagccaatctcggtgccgcttcgtccaatccgacgccggaaacggattccttgaaccccggagatgctcccacccctttgaatcgaaccctcgtcgtctcgtcgtgttttccccttttgctctctggtgattgccgcaccgcaatccaccgtcgtcggctcctctcgcgtcgattcctctcgccgccacgctcccggggatccccttgacctccccctggctgccccaaggccgtcggccttctcctttgtctccgcgccatgtcgccgcttccgccgccgcctaacgccgccgtgcgtgcgccgccggtgaccatcgggtcacgcgtcaccgcgtgcgcgtcgcaacaccataccggttcggctaagcccgagcccgcgcacccttcgctcttctcgcgcgcggccacgtcggcgtgccggcgagattggccgccgccgccggccgtcgtcgcgcgtcctcttcctgatccgagctgtggaatgagttccccttctcctcctcctgccgccagtgctagccgccccttccggctcgccgctgttcgccggatcccgccgcgcgccgcgggccgtccgatgagccgcccggcctcctctcccttccccatccgacgtgacgtccacgtggcagccacctcagccccgggcccgcttgactgggtcaagtcgcgcccagtcagcctcctccatccgtcttccctcccgtgcgcgcagtccacggcaagccgtgcggctgcacatgggcccgccgccatccgtctacccggcgcgccgcgcctgaaccgcgcgcacccgaaaccctagcgcccgcccccgcgtgcgccctccccaccgtgaacccaaccaccgccatgtgggtcccgcgcggtggaccgcgcccaccccgtcgggcctccctctctccccgcgcgccctaatgggccgcctccccgtggccgcgctcggcccaatggccggccaagccttgtgaatccctcgggccgcgcctaagtcgcccgaggaagtctaaatccgatccctccttccttttcttttccaagggaattaataattccttttccttgtccagaaaatccatttagacctccaaaattcatatccctcgatccgtagctccgattgactccgttcagcttccagtaattccgtaaaattgagatctatttaatggcactactaataggtctaaataggatctttcttttggtcttttgtttaggttttcgattatttgcatatagttgcggttatcggattttcgtcgatcgcgggttttctcgaagattcatgaagcttcgtgaagaccttgaacaaggcaagtcaccctttgatcaattgcccctataattaaaaagtcattattattttgtttgcaacttgcattactagaatcacacacttaacttgtttggcctcggtttgcgtgccaaaccgacggacctacccagtagtcgcactaatttccgtaggtcgtactaccctgattccttgtcgctccacccttgtggtacctcggtattcgtgctctctgagcgcgtataccaaatatcccacatacaccgttgcttgtcgaaaacttgggaaatgggtttgtgaagccttcaaaacccgacatgtggtgtcggtgtgtttgaaaataaaatgaattgtgaaaactcgcgatgcgggggttgtgcctatgtggcactgtcccgtattcgcatataaggaccgattcctgtgggaaactcatcgaacataatcaaagtgcaaccacaaggtggaatgggacaccctggctaagtaactagtcgattcagggaaacctcgcatgccaatagttgggaacgccggggcggggtcggacaaaccgggttcctggtaaggcaaggacgagaagcttgctcacataccgatcaaggtggttggagttgatttgtgaatgcctaaaatggcctatacttacgtgaggatttgatccttctatgtggcatgaggtaaccctgggtcggcttgggaaatgctttgtcgcgaacctctgacaccggccagtgtctggagtaagttcgtgtcttgtgggtaaagtgtacccctctgcagaggttaactaactgttcgaacagccgtgcccacggtcatgggcggatgtgaggtggttcccgttgcgtagagttgtttgcctgtgctttgtgaaaagttgttgtggtgtgggaatcgtaaccagaatcagcctatgtggcagatggatgacctgagtggtcaagaaacgaatctgtgtgattcgggatgtctgcgggcatcatagactaggcttcccgagtggaagcggattgttgtgctgctaggcagctggactctgggagtccgagaaaatgaaaaaggctctgggagccgattaatcaagtggaatggctctgggagccgagaagtaatgatctgacccgggaggtcggtacattactaaatgagctgttgaaaaatatctcttaaagtcgaatcgagacgcaagtctcttttcggcccaaacttagaaagaaataaatcacttagtgatttcaaaatgtcttcaaataaaagatttgcaaaacaaccttgcccctcttcgaatcttgcaataaacacctaaattcccgtgacttgctgagtacgaaagtactcacccttgctctatataaatatatatatatatagttcctccgccctgaagttgaagatgaggtgaagtgaagattagggtttcgtcctggttcccagccgtcgcctgtggtgttgggtattagaccgttggttccgctgctgctgttgttgttggtgttcgcctcgtccgtgtcgtcggttgtattctcgggctgtctgagctgcaacctaagttaaggtaaataagtcctctatttattttaaagattgctacgattcatatttgtcaccgtgggtaccagcactatgtcctgggactggtaccgagatcgcggtttcgtaggaagcggttcgcgccgtttaccctacgacacgctcctgtcaggtgccgttgtacggcggtatcagattggggtgtgacaaatatccaaattgatagggctaaaattattccctcccatctaaacaccaccttatttttcatgtcttatccattgtggagcgcaaacaatacgagtgcatgactacttcgatctggtgtgttcttgtcaaatgttcagatatgctgacttcttgcgttgcttatgcgtcatgaatatacagatttttgcactatctgaagctcccaacatagtagtacatggctacctctgaaggtgtcaaactgtcaaggtgatcgaaaaggaatgctaggctgctaatttagcttcgacgcatgttcagttcgacagacatgctcaacgtgtgtacacatcgaacacactgttgtcaacgtgcatgaatccgaaaatcgcatgaatataatgcatccatcgttaagttggcagggcggcagggccctacgctcgtatgcatggctgcccttcctcagccgagacgaaggtgcatcacacacgcacgagaaccacgcgtctggtctgaccatggccgacctgacgaccatgcatgcgtgtgtacacgtactagcactctctgtattctctactctatctgaatctctgatatcatccaggtgatgggaatggttatatggattggattaacctggacgtcattttaatttggatctgtctgaccttttcccggccgtctcgtaatctcgttacagtgtcaacgtgcagacggctagcggcttgtttttgtccgagccgtttggaccatctgcagagcggcgttatgccttctgagtttgaccagcgtgtgtgtgtgagtgtgtccgtccacaccgattgtttcgagtcaaaattggctacagattcacatgctcttttcaactcctcggtatgtatatgtgtttttttgatacttgaattcgatttggtttttcgtattatcttgttattattactgttgattatgttaccccagttactgtggaggtataattgagtcgattgagaaatcatcaccgtaaagtcgtgaagacaaagttgtggaggcgcaggtaccttaccagctggtttcttcgatatgtatatgtgtttttggatacttgaattcgatttggtttttcgtattatcttgttattactgttggtttctgttactgtggaggtataattgagtcggttgagaaatcatcacgtgaactcgtcaggacaaagtgtggaggcgcaggtaccttacgagctgggttccttcagaaatctggtgttcggcagatgtgtccatatcttatccatcaacggatatggtagtcgtagtatgtgatgcatgcagaatggcaaacgtcaacgcctagttaggaatcccgtacacctaattactagatatcttgatatatgatt

SEQ ID NO: 21682 - DNA, 4212 bp, Oryza sativa
caacatcagtcagtttatgaatgaagctttatgacgtagtgtagcagtgaggtaactttctttcttgcttagaaacagaactagcaatgcatgataatctaaattctaaagggacagtaactagcatggaaaatggcatggggaaaacatgataactcatacctcaagccaaagagggaagccaaacgatgcccttggaagaatctctgattttgttgcatcctcctttttgcttgactggccttcacacgtgatttcgaaagctgctttgcttgtctcacatatattggtaatccgaaagacaatattttcttgattttccagtataatctcgcttgtgctaactgtggtgtctgggacaaaagaagactcctcaagcatagaacgtactttttcattcgtttcgattatttctccatactcttgtcttcttattaactcatccactcttgcaatgtcaacgctaaatgtgcatctcacaggtttgtggtcactctctgtgacatccatgcaagctacatacctatcaaaagagggcaaaaatgatcaatatcaaagaaagggagtcaaaagaagagaaaaggaagtgttatagcatctgacgatgtaattgaagcaactacagggcactccagtgaacagtcagctactgatataggacggctgtcgcggtatagtactctatcacaccaagcaggtatcctcttcttctcacccgaatcataccctgcaagacaagtgatgtaaaggcctcagggacaatgactgaatcttttagccaaatacagtcaaataattactctaaatgaaacattgacagaaaatttaatctattacacaatgaataacaatctaaattttaagtgtcaagctagacttacctcctagacctggagcgtgcttttggaatttgtaggttggagggaatttgatgagaccttcacgcattccttgaaacacctttccagctttcatttctgctcgaagctgatccttctctcttagccaatcaaaacttctttgtgagaccatgtcccttgcttcatcatatgtgataccataaagccggtagttgaaatcaccaaggaagacaatcatatcagcttcagccaagtctggcctgacctcatcgacctggttcccatttacctgtcatctccacaaatctgaacatcagtacaattcattatgatagataatttgaatgttgtataaaacacatacatttactcctctgtgcaattggacggatgtcgcagaagctgcatgaagagaaaccgagagggtcaaggaaacaccttttcaggattatattaatgtagaaggcatgtaacactttttatttagataatgagaaggcatgtaacacttaagacgaattgagagaaaagaacctgtggatccatgaggtttgttgaaagacattgtccggtaaatatgatcaaagtcagcattgcgtctgcttacagcttccaaatgtgcagcaaaatgattgctgacgaaacacattttacgatcatagactcttattcttaatcctacaccaccctgcagaagtatctattgtcatcacacagacaactgaagattataacttagacgcatgcaccatgatataaaaactgactaacgactgcaatgtgcggcatcatccaacgaggaaattaatgcctacacatatatgaaacgacttcaggatgtaccttattgccgatagcacgtccaaaaccacatggcactgcagcagcttccacatcaccaacatatggcttaaggctctttcttgcccttgaaaagttaatgtttacatgtaaaataaattacacgagaatggtaattcatctaattataaattaaacaagttatcattatgtgacaagaaatttatagtgtaaaccaaatcagctaagtcatgacaagacacaataccatgcggcaataagcaatgcggccaactgcctagaaccaactcgatggaatgatgttccctcatcaagtgctttaccaatattgtctatccaccattgcccattagcactgccttcaagtcctacctagaaccatgaacaagggaagctgaataaaatgagtgatatagagttatctacacacacaaaaagtaatagtggaaagttattacgacaattaaagtttgtgatatacacagcacaggtaaaagtataaaaatatagaattcgttaacccctaagaaattctgtatacttccaagtcagtattgatattgaccccattaaccatatgctccaaaagtaacattcctaaagcaccggtattctttctgtgctacctgcttgtttatgcttatctagaatctagatgcattcttcctaacacttaattgcattgaacaaaagcaaggagaaataaatgattgaaggcaagatcaagtatcttacagtttcttttgctgcagaaatggctaggaaacccgcacccatctcgacctcttgtaagccaacgacaaccaacccaacatcagatgatacactacccaaccatgatttaagtgactcagcagatgccttcccctgtgctacattccaacttccaaccattatatttatcttctccattctagtgtatgaaagctctttgttagtcaattcagtgcgcaaaatgtcatcaagaggtcctggtgatgtcagtggccatccccgaataccaccatggtgcgccaacgtgtaaatgtaagaacctccaattgccattcttatgactggacaactatgtccagtccatcctgcaagaaggttaccttcaacatccatgacttgaacaatgccactggcatagcccgcccacaccctttctccaagtgcctttatgcactgcacagaagaagtatgatgctggaattcttgcactctgtttccatttccatcccacagtataatggaaccatttgtgcatcctgaccaaattgttccatccattgcttgagccactgctcccgttctacggttatcttcgacaaatgttccttttgttgcaaccctgcgcaccgcatcagctgctccgatcaaggcattcctagatttctggaagaagttcaaagaaccctgggatttatctttctttgaaggttttactttgacctcctcctcgataggttgctctggcatgaccggtgtctcaagccgagctgactcaacttgcccgtccatcccaaatactttcagcaactcccttgtacgagcatccctgtagcaatatttcaatacaatgtggaggttagaagcaactaatgggcaaaggaacagcaatctgtaacacatggtaacatatatatctttctggaatcataccagatagcaaatgtcatgcttgtaaccgtccacacttttgcgcgagaataatcggcaagcatgtgcttcacatcagaagcaggcaaagagcacacatttccaactgtgcaatggttcctgagatcaatgtatgctctttccaccaacaatgcagccatgtgtctctcctccggtgacaatgagagcgacttggcaatggcatcgtaaggccatgcctttatgacaccaccctcggatcccgaccatatctcgcctgttggattcaaatggaacatgaagtttttttgtcacaatgatttgcgtttgcaattcacatgcaaatatgcaacgatcaaattcttaatactatgagaatctaacaacataaaaatacattggcattacaagatcatgggcaacatatgctcaccatacgaagtgacgaccatggagagcacgggagtccggccgtacgcctgccacgtgagggcttccttgaacaccggcgcattgcttggcccgccatggttgcttcccccaacgctcccaccgccgtcgcctgcgccaccaggcggaggcgcgggcgcggtggcggccgcgtcgaggtccatgcgccacgaccggatcctcccgtccttgtgccccgtccacagcagccggttagccctgtccacggcgacgcagagcgcgggcggcgcgggcatgccctcgcggaacggcgcgctctcctcgtcgccgcgcctcgcgcctgcgccccacccggcgaacacctcgtcgagcgcccacaccctgatcccggactcggccccggcccagagataccgcccccccggctccgccgccagcgtgcggaggaacgaccccgcctgcgtctcccggagcgggtgcggccgcacctcgagcgggg

SEQ ID NO: 21683 - DNA, 15086 bp, Oryza sativa
agatcccgcggcgctgcggcggctgggcgcgcgccaccgccgcggccacctccctcagcgcctcgtcgtcgggctccatggcgatcggtggttggggttgggggcgtgggggggaatgggaatggggagagataagatggaaatggtcaaggagaagggcgcggcgagggaggggggtcggacgaatggacgaccatcggagcgcgccacccgtggccggcggagtcggggccgcacgaggtgatgagagaaagaggagaaagaggagagagagcgggtgagccgggcttactgccaagtgccaacggtttcaaagatggagtatgaattaaccctcttctccgtttcaaatcacttttaaaactgggaaatgccaggctgaaaatggtgacaggaatttctgatcgatcgagtgtgttttcgaccgtcatttttagctatatataatttttgttttctttatttaatttcttcctgcgtcatattaatatcgatactgagaaatttaagtaatttaagtgatatatatagtcgactaccagctgatcaagcgtcgtttccgaatatattgctaccaatcccaaccattttcacccccaccccaccaggtatagtattttttaaaaatttaccaactacttcatcctatttttctatgaacgtccatatatgatcttatcttatttcatttgtacaatatttaacatctatacatatgaaattgtcccagaaaacctcactattaatttattttcatcagaagtaaagcatgcgtatatttagctagattgttttatcgttttaacatttaaataattatgtcaaaacacttattaaaatgcacgtgcttattttccgcgcttattagaagcattcaaacaattatccaaaaagctcactattaatcgagagattctttttctcactgccctcgtcaatacagtcataataatatactactctcacaggaaaatgcaatgcttttctttgggaatgatagtttgaatataaaattaacaagcaaaacacatgtgcattgcaatgagtgaaaaccaaatatattatcacttatggcacgtaaggctacatatagttatcaagtttcacaaaaccctatatatatttgaatattgattaattgcagcatatttaaagctattttttaagcagggaaaaaagtaaactatcaaccttagttaagaacttaataaataatttttcttcatatacattttatgttttaaaattttaagtaaaattgtgctcaaaatatagaagagtgggttttttttgaaatatttagaccataaaatctatggttatgtgccacacttgtaatacctatctttttctacaactttcatcgtataacacgaggttttttcgacagtgtcgacgtggtgggaagctatcacaaattcaaaagatgctccaaagaaagctttgcgcacgcttacactcctagtagcctgggaaatatggaatgaaaggaaccgtagaacatttcagcaaaaggagctctcgacaggaagccttttggctaaaaccaaggaggaggccaagtcgtggtcattggtaggcgcgagagatctcggtagctggctttctttttaattgctcggaccgaaggtcttgagccttggtttttcttttgcacttgtaaaatttattcctcctttattcaatgaaattggcagcttgccgattcgttcaaaaaaaaataacacgaggtttttttttgaaatttaaattgaaaaaaggagaagacgaaacccaaaggccattctcagcggtggtgactggcgagcgacaaacacagcgatggtcgctgctcccaccctttaatgctaaatcgattccatgggaaaagtaaacccatttggcctcgtttaatatcacacggcgtatctctcatttggtcaccagtagcggcggtggcggagccacgaaggggtgtctcttgcccggggaaggattgcaccaccgcagtccgccattgagtcgccgtgtgcgtttgtggggaaggagaggaagaataaagaggagaattctttgagtcccactgttgagttagccggttggatcgggtcaaaacgccacgtcagcaaaaacgtcctctgaaaccactgagaaagttattttgcaccggtttcaatagttgtggggttaaaatatccggtattgaggtttaagatacggattagattaaagctatactatgagggtgtcaaagtggacttatccattccgaggcgtgcacgatacggcttgggcctagaaggcccatgtaaggagggccttctttgagatggatccgaatctcgagaggctgcatgtggggccagacggccagttagtatggtgggcccacttgtcaggacggaagcctccctctccgactccctttctccccgtcccccaaattcgcatctctaccctcgccgccggcggccaagcgccaccgccgaccaccgccgtcccccgcgacctcgccgtcgtcgaccacgacgagcggtggccgccgccgccgccgccctcctcgagttcgaccccgttcatctcatccgtcgtcctccgcgagataaccctccatcgctgtctcgggcgatgtcgaagcagctggtgtcgcggctgctggggatgttccgctcgcgggcgcaggtgggcgccgacaagttcggcaaccgctacttcacccgcgtcgaggaggtcgacggcgtcagtacgtctcccacatctccttcaattcaaattcagtctcgtaggctacatcaatggcggcggctcatttcttggatggctttgaccagtgaaggagaaacggtgggtggagttcaaggggagcgaccaggatccgaccactgttccaggttacctcttcttctctttcggttgatcaacttcaatttctggcctgtgtagagaacctgatatgattactgacttggcactttgtttctgcaggcatgtatggtttgtgaacttttgattctgatttctgaagtatgaatcgacgtgcttggattttgctgatagttgtgtcacacttgtagttgagtggatttgctggttgaatggacaaaggaagaaagctccgacaccagaggtgagagtatggccatgctccacacatgattttctgcaaatgttttgagcaggctattgatgtacagcatgtttccattatactgtgtaggtgacattttgatttcatctgattgtgatgtatcactgcactattgtaggagttggctgagctggaagcaaggcgtgaacgtgtcaagcaaaatattgaatgtatgcataagatgattacagcttatatcctctcttattattttctctttagccctatattattaataagaaggtgttctttacttttcttgttaagcctacattaagcatcgcacaagttttcttttgctgatgttgcggtggtggagatggtggttactggttagcgtgttttacatatattgctgatttatgttgtgggataattgtaaatgtttgggctcaagaataattcataacattcgtgtaatgcgtattgtttgtttggtgactatacatcaattactgttacttaccgtgttttagtaaaaccaacttaaatgcatccagccatacatcttgggattgatggcaaaattctttattgtcttaattttcagtttatctttaaaaaagttactacagtatgtttactcatgtatattataggatgcctattggttctgttaagcttatgttcggaaatgactatgctacatgcaacttccattaaaaaaacaatgaaactacatgatggacttttgtcctacttcccagttcccactgatctcacttgtagaattattgctggttagtgggaaaatgttaattacatacatatgtgccatagtcattctgttctttttttcttgaatgttcatggattttgctccactaatatatttaatctgtttcaatccagtgctcaaaaagaaagaagaagaggaaaagaagaccggtgtccgaccagtcaagacggttggtatgttctttctggatctgcttaagagttgggaaaactgacaatttgcaactccttatagtggcacttgatcatttgtgggattggcaacaatcaaacccctgttcttacttcccctcattgtttatcagcatttttagctttcttaggactttatgcatttcaagttctttgtgttcatggcttaactgatgttacatatctatcatgtcccatcaacaccaatcaatgtgtttctgtttgcaattccttctttctaacttcaccaacagttaaaacttttgaaaaagaaaaacaatattgtcatcattcttttgtctctgctccttagcaactccagattcttaactgttacttctgtcacttgataatatgtatgtattttcatttatttttcctgggggttctcccttttctcttgatggtttgaataacgatattcctccaaatatagggaagtttgaatctccaaatctcaaaagttttattcagcagtttcctgatacttcgctagatcagagaaaaggtatataatcttatactcttgttccatttctgcttgtggttccatttctgcatgtgatacaacccctttaacatccatgataacatttcaatctcactgtttaggacatgatgaggtatctagatcaaaggatggaactgatacagaggatgccaccatagatactgacaggtgctttccaattctccgaaatatataaattgtgattcgatgttattattttgtatctatttcatctagcatacagtgccactggatagctactgtttgctcttgaactaaattctttttggagggcattgctacttccccatttagcattgctttgtgatcttcttatgcggacataataattgttcttgcaagtaaaatataacgaatccaccaaagtagcattactgtatgccatcatggatgatggatctgccaatgtcttacagatacctagttcaaattgtcccagtaccatttcattgttgcagaatatagaaggcatgctccttttgacaacagcaactgtagttaatctggagctaagagtgaaggaacaatttgactattattaaggttattctcgtgtttgtgttctttcaggtcttctgaaccgacaggaactggtgctaccttcaaaccagggacatggcagccaccaacttgaattacaacaaacatataattgtagcaggtgaaatggtgctgcagtcagcatcagcattttcctttgagagtgtactatcttccagttatttgatgaagaaatggagatttatttttactgtgattaccactgtacactccgggagttacatcaacaaatgcagtatccggatgacaacagatatatacttaccaatcttatcaaatacatgatcattcatgtgcctgactaattagttttgttattgagaattatggaacaccacgagtgagctggttctggaggaggcatgcaaatatttttgtgctacatctaaaaatctgatatgttgggctgaatttgttaactgtgcgtgcctttggtccgttagttgaatgggctaaactaactggtatgggccttttcggccattgttgcgtgtgctaaatttcttgataaagcagatgtatcctaatcctatatgtctctagtatgggctgtttgtagagtggctttacttggctcattagtatatttttctctttttttaaaaaaaagaaaaagaaaagatgacgccatatttgtgctcgactcgggttacattttttgccattgcaaatcttcctttgtctaagctctgagtatagtcggaaaggcacactatcctttcagaagcagctgtatcagaaaaggagtgaaccgggtctgcagaagatgtgcaattttctttgtaacatctaaaagttgatcgatccagttttccaacgcagaatccactacatttcatttcatggcaaaaacagaattacatagcttcaaatggcagaaacaaaatcttcaggaacacacttttgacaggtgggaaaaacaggcacaaatcaaacagaaaatagaatcttcaggaacacacatttgacaggcacaaatcaagcagaaacaaaatcttcaggaacacacatttgacaggcacaaatcaagcagaaacaaaatcttcaggaacgcacatttgacaggcacaaattaattagaaacaaaatcttcaggaacgcacaattaacaagcacaaattaattagaaacaaaatcttcagaacgcacatttgacaggcacaatcaaaatagtgctgtctagaagtgtactcagtaaattctagtaatattgttcatctcatagatcacagaggaaccccgaatcctatcaatgtacagaggaatcccgattcccgaatactaatatttccgatcgactatagcgtaaactagagacaacatgatcaaaactcgtgcaccctagtcatgtagacttcctgaaagtgactaatgagcacgaaaaccatctactcacatatgacgctaaaatcttcggccgggattcgaagcttccaaacctcaaggagcctgcgcttcgcctggcggacgaagtcgaggatggtcgtctccgccggtggaggcgagggcggagcagcgcggcgatccggcggcgaggtcgcaggcgcggggtcgggctcgggggcgtggtcgaagagctcggcgggaacagggcgatccatcagaatcgcctcggccaagccctcgaacaggaggccgacatgccgcacggcgccgccgccgagtcgctggtggcggatcgcggcgccggcgtcggaggagcctggaggcgtggcggcgaagcgtggcgtcggggaggtcgtggaggcgcggcctggcgctggcgccgttgcggatgacgaccgggcggttgcggaccaccacctgggcgggcgcgagcgggaggacggcgactcaccggcgcggggggcgagggcgcgcgcgtgctccacgccatggagagagctttgacccgcatcacgtagcccctccttcctccgtgcatctcaacgagcttctgggcgtccgtcccggtgagagctaaccgactgcgtcttcctcttctccgcgccgctcttcctcctccgtctcgccattgccgcaccttgcgcttgcgcttcaatcgatcgctcacgacgccgacacacgcgcgcgctctcaagtgcaaatctaagaaggacatttgaacaattgccaaacttaatagtgtcaaatactagttaaatttcgctttctcttgtatacaggaaaaagaaaagaagaacaaattgaaacatatctcccactctcgtcagtgtcagacggcgccgacgcgatctcctactcccaccctcgcgccaaaaggagatcccccactccgcccggcttaattcctgtcgggttgccgacttgcaaccccgatttgatcgaggtcgaggatcgtcgctgctgctaccatgggtttgctggcgctgacgcgtctcatggctacgcagccgcctcgtcgccgccgccgccgccgcaacgatgcccaagcccaagcccgaagtaagccccccctcgatcacctccgcaacctaaaccgattcatgtatctaggttgagaattgagattgatctaagtcggctaggtccttaagatcttcaatttagtgagattgatctgcaagcatcctggctccttttttttccctgattgatttgagcagggtagtgtagtgctcaagtattccttcctgttccaatgtggatttgtttgcaaaaaaaaaagtagtactagtttcatcgttcagggaaaaaacaatagtttgatctgtaaaaaaaaaaagagtaggtatatttgtggcgccatattttccaatagtcgacttgtatttacattgtaagtcctagattacatatgcaattttagtgcatttataatgtaggtcccaaaattacatatgtaaatcaaaaaattacatagtaattatatatgtaagtggtgtgtaactactatgtaaatttataaatttaaatcttacattggaaaagttaaaaagcaaaagcatatgcagtccttactttctaggagatgatcaggagaagaaatcgaacggtccgaacaggcacaaccgaagacgtgtagcgatcagacggatagcaaagccgactgagatcagccccaaaaaatgtcgacatctttttagcaagtctgaagaaaaagtggttcgggagaagattttaagagatacttgaacaacggatggttccagaggaggcatccagtatcaataaaaccacgagtgtaacagtgcttatgtgcagttccaggaaaaaatagaacattttttttctgtttgtgcttatgtgctttgactttgttgtttccttctgttagtatctttattaattaggagtaaccattaccatacataatattgttgcagatggagtgattacttccatggctaaacggaagggcacactcctccaagggggtggtagttctcagggtggtaaaagattgagatattcagggccagacctcccagaggtatgccataagagtttaggctttgtttaatcctctatgtgaaataatactccgtacacaataatgataatgccttcatcacgaaagaaagaaagaaaacgttaataaggagcctaccaaaatctactgagatccttcttcagttaaaggcagcaatatgtaaagattgcagccatctttgaggcattgtgaccgtaaatacaaagtgatacgagaacactccctaatatacaggcaaccttgtatagaatacttcctattccagtgcactaactttttctttgatgcatgtcctagtaggcaacatgccactacactgcgaaagagtcccaagtgcaccagctttttctttgatgcagaacatttcatgctgacattcacagatcatctgtggtagaatgttattctgcgtggttctgttttccttagttgaatatttgcctttatagtctcaatgttcaattgttctttccatgcttgtgcaggacatttggcgccatatacatttcctaatgccactgcgagatgctgcccgtgctgcttgtatttctcaagcttttctacgttcatggagacaccatcctaaccttatcttaagaaagaaaacaatgggcttggaacataaagcatataggagggttggtatggcaagggatttcactagcacagttcacagcattctgaaaaatcactcgggcattggtgtgaagagactgaagcttgacatcatctatgatcaccgcaatctcaacatatgttatctcaataattggcttcagattgctattacaccaggaattgaagaaatcactctcttgctgccttcaaaatacactttcccatgctcacttttatctggtggcattggaaggtcccttcagtatcttaagcttgtcagatgcgccttccgtcccacagctagccttggtttcttgagtagtctgacaaagctgcatttatgtgaagtgcgtattaaggatgacgagttaacttgtcttatttccaagtctttggctctgaagcagttggaactcctaaactgcagacaaataatctgtctgaagataccgtgtttgctggagcaactcagctgcctgaatgtatccttgtgcgagaatctgcaaatgatagagagcaaagctccaaacctctccacttttagctatataagtaacctagtagtagaactctcacttaaacaatcatcgcaagtgaagaccctagatatcgactgttatgacgagtccaactttctctgtcatgttattaccaagtttccaaatattgtcccaaatcttgaaactcttaccttacattcaattgatgaggtatactcgggcactttatatttgtagttatatgtgtgatggcataatctgtaggcatgcattcattccctaggatatataattaatgtgatatatctttatgcagaggattaatacgccaatggtagcttccaaattcctccacgtgaagcacctggagatttattttgaaagtcttgatcccgacaaggcctttcccccataatatgattatttgtctttggtttctattcttgatgcttctcctgttttggattctttcatcttttgtgtaagttcccatcccttcctacaattatactccctccgtcccctaatataagggattttgatattttgcttgcactatttgactgttcgtcttattaaaagaaaatcagaattattatttatttttttgacttactttattatccaaagtactttaaacacaacttttcgttttttatatttgtattttttttgaataagatgagtggtcaaacagtgcaagcaaaatgtcaaaatctcttatattaagggacggagggagtatgtagtatctatggtgaagcaatatttaggtgccattatttttttattgtatatgcaggtacaacagggagaaatgaagcatgattcagtttttggcgacgcctcaaatttgaggacgatgcctggacacaagcacgaaagcctcaaggatgtggaaatcattggattttgctctgcgacgagtatggttgagctaacatgttatttactcaagaatgcgatatcactggaatatattacattggcactaagaagggagatgatcttggaagcccatagaggggtcatggcaatcgaaagatacatcagggggaaagttccatccaaggttgagttaaccgttctcgagctttgcatctggtgccatgatcttgaacgtttagatgccttagacaaaggaaaattgatcacattccccacttcttgagttaggcgacatttaattattgtttacacgtgtacaatcagatgtttagttacctatgtaatttatccagtatttaacttcgtaatttttacatggatgagcattggaatggttggtcatggtgtctctctccatcttgctttaatgcttccgatgtctcccgatggtacttaaccagtgtacaatctgatgtccagtcaccttgtgattaaatccaatatttaaatttgttattaagagtgtgttggcagtgctctagctttgactccacctctcttagagctagagcacagccaaataattttagtagtgggctagagtgatatgaaaaaaataaagagtgattttaggaggtatcatatttttagtgtaccatgtttgatgaggtagtaggaggtacgaaatttgcactaaaaattttgatacgtttatctctgcaataaaatttctcaaaaataaactagagagaagcactgtaaaatttctcaaaaataaactagagacgtgaagtagggtgtttttacaactccaatctagagttagctcctagagttagattgaggagttggagctccacaaaacatgcgctaattttacatggatgagtgttggaatggttcgctcatgttgtctcccggggtcttgctttagccgatcagtaagaattaaaagattgtccggatcatcaatgctagagcatgaaaaattcgaagttgtgaaatggcatgtagcctagtggttgcagtgacctaagtagcaccccaaggtcctaaattcaaatcatcatagaagcgaatttcagattgaattatttaagggctaagttccctgtcttagtttaaaaaggttacatatatccagtaaaaaaaaaccttctctagaaaacaatgaaaaattcggagtttaattttggtgaaacatttagagtttttctagcttttgcagtctttcattggctgaaattaaagtcccactcaaaccgatcgagtcaggactcatcatcatcaggagaggcatgctgatttcctaatctcttcagaagacagtagattgataaatcgaaaccccccgatttttcaacccgatccggagcgaggagagtcgtcgtcgtcggcgtcggtgtcggccttctcgccgctgctacgatggggatgttggcgctgaggcgtctcatggcggcgcagcgagatcgtcgccgtcgtcgcaaggcccaagcccgtagtaagccctccctcccctcctcgatcggcctctcttttttttaaagggtattttttattggcctctacatccaactggatatatacggcaattgaaatagggaacttagctctgcaaataacccaatctctgaaattcgctcctatagagatttgaactcagaaccttagggtactacttaagtactcaggtcactgtaaccactaggctacatgccctttcgtccggtgaggtcttgtgcgagcgacaagctagctaggctcgtttgcatctatgttgagattgatctatatttatttgaccgtaacgtcttccccatagcagagtgaatagcaagcatcctttctagctccattcttttttttcttttctgtttgatttgatttgagcagggtattgtagtgctccttcctcttccaatgtggatttgttttgtttactatatatgaaaaaaaaagtagcttaagagaagataaatgatgcagtgatcaaacaatggatggcagattaagatgcaaattctaccttgactttctaattaagaattaccctgttcttttttattaagatataaattatatctcgattttcattagaacgttttttttaaactgccaaatgatatgtttcattctaaaaccttttatatagaagttgttttaaaatatcaaataaatccaaattttaagattgtaataataactaaaacttaactaatcatatgctgctaatgacttatcctgcggtgaaaaatcttcatcttcgtataagtcaaacggcaactaagacgcatttacgtacccatttatgtttagagaaacaaaactccccttaggaaacgttgcatgcaaaaaaaaaaaaatcttcactttgttgttttcttctgttagtgtctgtattattcattattatacattatttgttgcagatggagtaattacttccatggctaaacgaaagggcgccttcctccaaggggatgatacttctcagggtggtaaaagattgagatattcagagccatacctcacggaggtaggacataatattgattgtgaaatatttattatacgtagcaagtaaaaatatatcattgctctaacttgagtctgcatacattgagtggacctatgctaagccaactaaaaataagcgacgtattttttttatagtattttagtactttgttataatgtgggcttagcaaccgtaaagtcataaaccgaaagagtttatttttctttttaaaaaaactagcatatgaatatttgatttttatatttttcttgttcgaggtcttacctgtggggggagctcccacttttcgtgggtctcatatgatagttggggacggtaaccaccatcaccaccactatcttcttaactagtcatatccccgttttttaatacatgacgtcgttaactttttgatattcgtttgaccattcgttttattaaaaaaaatgtaattattatttattttgttatgaattgatttgtcattataggtttttaagcatgacttgtattttttttatgtttgcacaaaatttttaaataagataaatgatcaaacatatgtttaaaagtcaacgttgtcatatattaaaaaaatagaggtactatatgaaaaaaactgcatgtttcaaaaaaaggggaattcctctttttttttctcagttaataacaaagaagcacaaaaagccaaatcaacttgatttattgctaatatttgcagatcacatgtggtacaatcttatctgtatggccggtcctatttttcttagttggagcaaactatttgcctttataatcccaatcttcaactgttctttccccccacgcttgtgcaggacatttggcgccatatacattccctaatgccgctgcgagatgctgcccgtgctgcctgtatatctcaagcatttcttcgttcctggagacgctatcctaacctcatcttaacagcgggcacattgggcttggaactgagaaaaaattggaaggttcatatggcaaggtatttcgatagagttgatcacattctgaagaatcactcgggcattggtgtgaagagatttagtgtggtcgccgcaagctcatatgtcatctgaacaattggcttcagattggtatcgcatcaggaattgaagagatcactctctcgctgcctccggaatacagcttcccatgctcacttttgtctggaaggtcgcttcagcatcttgagcttgtcaattgcgccttccgtcctgtggctgggcttggttgctcgagaaacctgacgaagctgcatctgcattctgttcttatcacggatgatgagctagcttgctttctttcagagtcttttgctctgaagcatttggatctcagcgattgcagagagatggtgtatctgaagataccatgttcgctggagcaactcagctacctggatgtgtcctcgtgccgtctgcaaatgatagagagcaaagctccgaacctgtccagtcttagttattctggtaacctagtagaactctcacttggacaatcatcgcaagtgaaaaccctagatatagaattctatgataaggccaacttcctctgttatgttattaccaagcttcaaaatattgtcccaaatcttgaaagtcttaccatacattctgatgttgaggtatactcgggaactttatatttttagttatttgtgtgatggtataatctgtagccattcagtcagtccctagaatataaccaatagagaaattttacagtctttgagaagtatctcgagatatctaaattttatactaaaaattttggtatctcgaaataccttatctggagatatcaagttttatactagaaaatatgatacatctcagtgcattctttcttgaggaattttttttatttataattttttttattaaaagttttacaaaaataattttccattttgaaaattgacggaaatagtcgcctaccgccctctgggagggcga

SEQ ID NO: 21684 - DNA, 7073 bp, Oryza sativa
ggggagggcgattttgtactgtgctctatattttttttatataaatatcaatagttatcaaatctttttatattgaaaactatacaagattaaaatctccaagattggtaaaatacaattttattattttttagggcatatttggaatgttaccgtacaaatattttgttaatgccaaaatataagcaagttttggcactaccaaatatttggtaaggtaaaattgcatttgatcatatttggtttgctgccaaaatgtaaaattgtagtgaagaatgttgtacataatctcaattctagattacgtattaccaattaataggcttccattttcgtgtgtggtgtggtagtgggaaagaagatatgaagaggttgccttcagattgtcaattatatagcgtcgttttcactgcaatatatgtgaactcaatgagatacattattcattagatgtgacaagacgatcacgcgtgggcgtgattcactttatgtcaacaggcagcgccgaaagttgatagtgataactcgagctgccgcttttcatgtgtgctgttgtggactgtgcgcgctactggatatggcactaccgtgaagcgccgaaagtgtgttgttgtgagcataagttgttcaagcaccatacgaatgaaaagaactacgtagacgagacaaacacaagtagtactgcagtagtaatagcaaaagtagtactgctttacaagtttgtaagccaaaagaaacggtcacataaggactgaagaggtagaacactactgacgaggcctcttacccctgtccctcctaccctgcgccctaatgtgcccctgggagtacgtgagtcggtccgggggtacggcacggccaacccgtcctgcctgtacaggtgtgacctctggctgctcctgagtgtgcgcctctggagctcctccaagctgagaggagcctagtacgtcctggtggtctgcaccgtgcaagtcgtcgtcgtagaactggctagtaggaccagtcctaccggcgtgagacgaagaggccccagtaccgaagatcccggctgcaaatcctgctggacaaggaccatcagtttcgtataggtatttaacagtattaataaaaagtaaagtaccgtgtgggcgagggatcgacgctccgtgagaggaagagctggcgaacgcgcctgaagaggtggcgaacgcccctgcggagctcgcggaagcgccggtcgtgcctgcgaacgcgctcgaaggcatacgaggtcctgcgatgaggaaacgtgcagttaaaacatggtgacacattcgtgcaaaagctgaaacaaaaatgaactaatatctgggctgaactgtaccgtgcgaaaccggtgctgtaggtcgcactgctccgaagctaggggcgctcgaagacaaacgaggtcctgctccgacggtaggaccgcgaggccgtgggtgtaccggaccagctggaggtacgacgtccacggcgctgcgacaggagaagacgcgcatgaccgcacgcatcttctcctgcatccggtcgaaggtcgacctctgctcaacgtcagtcaagtgcaaacctctgttcaacctcacctggactgcggtgatatcggcactgatatcccgtgccgcatcagcctatgcaagatggaaataaaaaattcagtagttgtcctatattatgcaagataaatgacataattgttggaagtaatacaaattggacgtaccgccacgaagtagtctcggtcacggtgcgtgggatacgcgtccgtgacagcggcaacgtgcggctctggggcgtctggagtgaaggtcacacgcgcacgagtgcgaggaaggtaccagcgaaggtagtcacggtagttctcctccgtgtgtgggaagagctcgttgatcacctcctctgtagctaacacccagtcgtcaacgtactgctgtacacgtggagcccaaagtgcgcctgctagctgtccccgtcgagtcaacctgtgaagagaggtaaattgtatggctcgatgatgtaattatcataaaaatttagaaatgaacaatccgaactcacgagtggtcggcaggggggacggtcggctgcacgttgccgggaaacacctgcctaagtccgaactgtctcatcacacgctgcggccagtgaggctcaacgaaaatgtcgaacaccatcggcaggatggtgagccagtaagcctggtcgcgtgtgcacaaggacgaaagtcctagcggtgctctcgcagcgacggcctcttctgtgtacggctcccagatgacgtcgctcggctggagacggtcaaactcgaacacgaagtccgggtaaccacgtctcacctggacgtgagcgtaacgacgctgcaataaacatgatcggaattagacatgttatgtgaaggaaaaaaaaagaagaggactgataaacttataacgcagcgaagttgcactaaccccacgtcgacaccagtaagtccccatcgtgggaccgtcctctggccactgcgcgctgcgaccaaccccgtagggtgcgctgtccaccactggtcgccctatggcaaacctctcggctgcccaaagctgaagcaacataggacagccagcgatgatcgctcccgcgtcagtcttcgtgcacgcctcacagagggcacggtacgtggctgctagcacggcagaaccccagctccactgcggcacgtcctgtggctgagcattcgcgatggaccgtgcgtagtggaccagccggaagtccacagcgtgcccgtgggtgctagtgaacatcacccacccgaacaaccacaacaggtacgcctcaagggagcgtcggaccgagtaatcatcagcgtcagggtgcagaaggtccgcctacagttaagaatgaaatgttagtacaaaacactgatccggtcgcaaataagcacgtatgataataacaacttatttacttacagtgaactggagcaaccaagccttgctaggcccgactgtagagtacggaggaagggtggtggtcggtcctaggtgtggaaggtgcatcacctgctcgaagcgcgcagtgatatcctccttccacccaaaaacaccgtcgacgggaccaactggtgctcccgccagcggtagcccgagcaggtacgacacgtcctgcagtgtcggagccatctccccacagggaaggtggaacgtgtgcgtctcaggtctccagcggtctacaagagcggcaaggagtgaccggtctgcatcccaccgcttcgctgggtcacggtcgtccgccgccgcctcaacaagcctacaaagtggtagaaggcctgccgcacgcaacctgtatagagcaaacttcaaacataagtataaaacaaagcaaagttgagttgaaatgtgaacatacgcgtaccaaggaacgtgacgggggtcgacacgcaaccactcgcgcgacgtgcgtggacggaaggtgctgagctgtgcaccctcgactgctgacaggaacgagcggtggttcctgtcaatcccacggttcaacagcgccggtgtgtcgtacgccatacctgcatcaaataggttgatcagaaacatataaataattagttcaacataagtaataaatgttcataagcgaattactaacacatattaaacaagagtacaaacaaacaaaagtgtttagtccgaacactcatcacgataacattatgatacaacaccgaatagttcgcaatactactagtacaacaatagtcggaggtactcattacaacaagattgaattgaaattacacgatagaagtatttagtccgaacactcattacatcattttatttcctaaatcgaaagcattgttacaccatggaatcgcctgctgcgcgacgacgccttggccttgcgcgcctgcttgttgttccttcaccaggtggtcgcctaccatcacttgcctgtccagatggactagcatctgcgccgcttggaacttctgcattcttcgggcatgtcttgtaagtatggccgcgcagatcacacttgctgcagcgtaaagtcctcccacctgcttctgactcatccatatcatttctgatgcgtctagtttggcgtcgaccctttttcaccctaaacttagatggatctggaatataaaaaacttgggcactcagcgttgtgtaagatcctgagatcccgaacccatatatctcctcactccatgtatgaaagattgcttctttcctgaaataatttgagacgtacacattgggagatatgccacaatcaccggcagcagcaagaacgtgtgagcaaggaaggtgatgaagcttcggcttcatacaactgcaggtacatccaccatccgccttcaagacacattcctgcacggcttgcttgcgatagataccacgcctgctcctatcaacacacattatttcataccgatgcacttgtgtgccttgagcaacaactctatgtctccgtgcctttttgattttatcttccatgtactttgtcactacgttgccaaacactatgttgttatcggccatggacggaccaattttcttgtatcgatccctaaagtaggcttgcgtgccgtgaaggatgaattcaacaatagcaaccaatggaagtacccgaactcctcgcattacccagttgtacacctctgccaaattggttgtcattatgccataccgagatccatcggtgtcgaacaatagagcccacttctccttaggctcattctcaatccactgagagaaatttctgatggccgaccctgacctccttctcattgttggtgggtcatcatgtaatgcaccaagaggtatgggaggctcgtcaccttcaacttgtggtctgcgagattgctcatctgtttgcttcgttgtcaactcatccaacttgtcccacaactcattaaatttcttctcttggttctgtgcacagagcctcttaaagagctccataagatgcttgttcttgaattgcttgtagaaatttgcacccatgtgacgcatgcaccaccgactccgaacatcaggccacttagctggaagtcccttctcatcccaaccgttctgcaagtagtcaatagcccgcaacatacccgcatgatgatcatgtataaggcaaacgttgggcctcatacgcaccactgcaatgtgcactctctctaggaaccagtaccagctttcagtgttctcactctctacaaatgcaaaagccataggtagaacctggttgttcccatcacacccaattgctgtcaatatctgacctcggtatttacctgtcataaaagttccatctatgcatagaacaggtcgacaatgcacaaaagcattgatgcaagcacccaatgagaaaaaggctctttgcagcacactctttgttctatcttcaaccgatgtaaatgtatgtaggtcatagtaagtattattattcctctgggcaatggtggctaacaaacgaggcaaattatcataagaagcttcaaatgtgccatacctcatctcaatgatcttttgtttggctctccaggcctttgcatagcttatggtgtacttgaatttgttctcgatgtgcctaataattgattttggttcaaagccaatgttaccaacaacactgctgtacatctcacttgccacaaaagctgaagtgatgtttcggtgatacttctccaccccttgtaagtagcacttgtgctcggtcacaatgctaactttccaataatcattccatttacccttatatgcatggacacgccacggacaatcttccttcatgcacctcacttcatacacataatttgttgacttgaccaccctaaactctctctgcaatgaaactgcccaatgcttcaccgcctccttcatctcatccttatgagcataccttgcaccctcaattacctcgtactccttatactcccagggtacatgatcaccctctgatataacaagaccagagaagtcctcatttgcccaatcagtggccattacatcaccttcctcatcggatgatgcgtcgtcctccgcttgctcattatccgaatcttccctctccatttcatcaacaattataccgactctctccccctcatccgccatgcccatggcctgctcctcccttggttgattttcctcattttgcatcgatggtccaacaacatcccctgcattgctaggaccctccacatcttcggtttgcattgaaacatttgtatctttctcttgtaccgacacaaatataacgaggggccatgaccgttcaaaagccatttccacataccgtctcaagcagcagtgctgtccatcggcattagttcccaaaaataaccttctattgcacgactcactacaacagatactgacattgtgtagacttcttggtctattctaaatcctctcaacaaccaactataaattgactgaaatgttctctccgcaggcctatcgatgcccttagatgtcattacaaaatctgacagatcaacaccatctggaccaaatctaatatttccttcaccgtgaactatctgaaatgtgaccttacttgacattgtgcctgatgaaaacaataactgcgttaacctcgcatttctgtactacgccctaagttacattctctacaatattgttctctaaatttctaaaagtaggttacattctccagatcaaactaaactacatcttacaattaacactactgtctatgtctcaattcatactattatattctatgctctggatctacacatatgtgctgtgtgctacagatctgctaaaatatatggaactaaaactaaaacgcaacatatgtactcaaacgtaatatattagtacaaatgcaaaagatgtatgggagcatacctgtgatgaagtgagcgaaccagcagggcttcgccgctccccttctgctgccctcccctctctctctctttcgttttttttggatttttagtgaatataatgaaatttcataggggaggggctgggctttataggggggaggcaaaaatcgccctcccccagggcggcaagggggccgcctgcaaaattccatgccccctcgccgcccatttgcaggcggccccc

SEQ ID NO: 21685 - DNA, 6740 bp, Oryza sativa
ttcaaaatggaaaattatttttgtaaaacttttaataagaaaaattataaataaaaaaaattcctttcttgagcatatggtaaaattaccctaactaatatgatgtatatttatgcagaggattaatacacctatggttgatgccaaattcctccacctgaactacttggagatttattttgatggtcttgatggcgatgatgaggccttcccctagaatacgattatttgtctttggtttcagttcttgatgcatctcctgttttggatactttcatcttgtccgtaagttcctaattatatcggtatctattgtgaaccaaagcactttttaggtgccatcatttgttatactatggaggtgcagcagggaggaatgaagcatgattcagtttccggtgacacaaccacaattttgagaacaatgcctggacacaagcatgagagactcaaggaggtgatgatcattggattctgctccgctacgagcatatggttaagctaacatgtcatatactcgagaacgcgacatcgctggaaactattacattggatactgtatgtgatgtggatgatcttgaagatgttgggagatgttgcacgactactcttcgcaaaactggctcatgctacccgctaagaagggagatgatcttggaagtccatagaggggtcatggcaattgaaagatacatcaggaggaaagttccatccaatgttgagttaattgttcacgagccttgtacctggtgccatgatcttgaacgcttagatgccttagaaaaggaaaacggccacatcattccccacctcatcttaagcttgagaacatttcattattgttaaaacgtgtataatcgcatgtaaggttattatggtttcagtcatgtgttcggcactgctcgtgtgatgtctaggattgggagtatataaaaaactatcgtatgcccgatatgtgtggaatttttttaatttctagcaatttgtttttcttcgtacataaatcttgagacgatccaatggtcagttggtcataaatctgagttttgagggcaaaaaacttagaagtttttgaggaaatctatttttaatatggtatagatatcctggattccaataaaagatctttcacatttcctctgttccaaaggggcccgagcatctttcaaatacatggattttagaggatttttatgtaaattgaattatctcgtcgtagaaaaattctgtaaaaattttgttaggtcttctcctcctccgccgtctcgtgcgccgatgcaagcggcaaccggcgaaatccccgcggcaaccgccggattccatggaaatctcgccggcgtccgccggtagccgccgcggtcacccaccctagtcctcccccacagctcgctcgcgccgctgtgaatcagtgaatgacttccggtttctcgcccgactccgcccagtctcctcccggttttcccctctctgagctcgccgagcagatctgccggctggagagcggcgagcacaaggaggaggaagccgccgacgccgacgccgacgcggtcggcctctaccatctgatggtcgacgagaggtggatttctgctgctctgcacttgtactcttatccgattctttttttttcagtctcttagatcgaatttggattgtattctactgaaatcacacggttttcgatctcagtgtagttgaaatcgccggttaccgctatcagtgttagcagattcagaacttctatgctcggtgctgtggttgcttaatagttactgcttaatttcatttcatttgagcatgtatgctttagcaatagaattactgtccagtaataccatattaagagttattgctaagtgtttgagcatgtatgcttagcaatagaattactgtccagtaataccatatcaatagttactgttaaatgttttctgagagattttctgttattctgtctatggtagaactgaggcagttggtggttcagacaccataatggcatcacctccagcttctgcctcaaggccactggatcctgcatgggttcatgcaaaagtaattggcaattcaaagaatgccttagcatgtcttcattgtgggaagaagattggtggcggtggcatcacccgctttaagtaccatcttgctggaattaccggccaagttcaagcctgcaagaaggtgcccaatgatgtcaggcgtcagatgaagcaacttgtcaatgagcataggtcacggcatgacactcgagatggccactattcaggctttgaagaggattcttctgatgctgttttgtcgaatggaagctcaggggttcaacttaggccgtctaggaagcgaagaacagggtgtgtttctccgcaagctgctgcaggctttgaaagaacaggatacgtctctccacaagctgctgcaggttttgaaagaataggatacatctctccactagctgctgcaggttgcgaaagaacagcatacgtttctccacaagctgctgcaggttttgaaccaagcaatgatgcattgttggtatcacgagacttggttcaacatagcatggatggtgtggaagttccaaatgatctgttacacaatgctagagttgctatggcaagatggtggtatgatgcaaatataccctttagtgcagcaaaatctcctttctatcagccaatgttagacgccatagcatccgctggagcaggtctcaagggaccgttgtatcatgacctacgcgggccattgttgaaacatcttactgatgacattcgcgaatatcttcatgatatgaagaaagaatggaatgcatgcggttgctcacttattgctgataggaagaagaatcatggagagagttcaataataaatttttttgtatactgccgacgaggtactatgtttttgaaatctgtcgatacttcagcagagaaagcaaatttgcttgagatctttgatcaggttgttagagaagttgggccggaaaacattgttcagtttatcactgatttagatccgagatataagactactgttaaggttctggaagaaaggtataaaacttttgtttggtctccatgtgcagcacgttgcattgacttgatgttggagaatctcgcagatcctagatattttcctatgattgatgaaactctaaataaggcaaagaagataacccagttcatatataatcatgcatgggttttgtcattgatgaggaaagaattcacaggtggtagagatctgtgccgtccagccatctcaagatttgccacacatttccttagtctccaatgtattcttaaatttgagaaagagctctgccaaatggttactagtaacaaatgggtaaaatcaacttatgctaagggtggtgtcggcaaagaggttgcagctatgattttgaatgcccacttttgggcccagtgtaagcatgtagtcaaggtcactgagccactgttgtgtgtgcttcgactggtggatagtaatgaaaaaccttcaatgggttacttgtacgaagcaatggaaaaggcaaaggaattgatcagggcacggatgatgcataaggtgtctctttatgggccgtatgttagagtaattgatgctaggatggagaaacaacttaacagtccattgcaggcagcagggttgtttttcaatcccggaatattctttagtcccactttcaagatgcaaagctatgcacatagaggacttgttaagacaatttcttgtctggtccctgatgatgatattcaagataagatatttctccaacttgaggagtataagaaaggaactggtgactttggcctaccaattgcaattcgtcaacgtgaaaaacttgatccaggtaacaatttattcctccatgtatacttattacattgattatctgaggtattttaccggtgtttatggaaaataaacctgaattcctcgaactgttttttgaatatatggatttattttcattctcacaatgttacatgtttgtttattagttgcatggtgggataactttggcaatggaactctcaagctccaaggtcttgcaaagcgagtccttggccaatgctgcagcgcaacaggctgcgaaaggaattgggacattttccatcatatccactcaagaaagattagcaggcttgaacgctcaaggctaagtgatgttgtcttccttcaatacaaccagaagcttcgggaacggtataatagtctggaatttactgattaactaactatttgctaatatgatactctcatcatgtgattgtctacttactaatattggtaacaatcttgtaggaaccttcacaaacacagagatgccatcgacccaatcagcattgacaatattgatgttttagatgaatgggtcagtgaagagcctagccttctttgcagagatgacctgaactgggagagaatagacgcaccatttgccgagccgacttctgaagacgaagaatttgtcgctattgatgacgaggaggctccaacagcgtcactgtcctggccggcagcagcagcagaagactcatattgcccaccacctgatcaagatccctatcagtatgtcacccaggaggatggaattctacctttctgaaaccgggaacttctgctctgtagcgaactgaaaactgtcattaggacacacatctagctaatgtcttggaaaacttcctgggcatggatttgtatcggtttaactgaatctgtccagttaggaaatgagaagtttcaatctactgctgaaatcatttacagtctgaggcatgtgcaaagcttattttccatccccccccccccaccccccaatcccctcctgttggttttggatgcttcagagttcagacttaagctgtgatgccaaaacctggaaggctggaatttctgttccatagtgaactgagctgtcattgggacacatatattaggttctgaaactttccctgtgcatgaattggtggcattttaactgaattctagacagttcggaaattagtagtataatctgttctaaaataatgttctgttccaagtctgtgtcatgttcagagtttcttttccttccctgtatttttggtcttggattgcagtgcttcaagaaaaaaaaacacaagaaagttaccttcacccaacttgtacattttttagatctttcaatctgtgaattatgtatgataatatgatatcaatacctgtggttaaaaaaccaatacatgtgtgatcacagcaactacttaacgaacaactccataatataatgcacgaacaactccataatataacgcgattgataatataatgcacgaacaactccataatataatgcgattgtgggtgctttttgttgttatataatgcacttggtgctttttgttggagggatgtttgagcgtatcaaatcaagtaatcagaaggagctgacgccacgcaaaatttagaccagctctaccaaattcatttctcttactggttccaatgtggggatcaaactcaattcgattatagctagattttaacagaggagatagcagatagctagagtaaaattcggaaagaggagaaaaacaacattcgctactctaatcaaacaccacgagcttctggtactcctccccggcgatggcggcggccatgaccgcctccgggttcaccacgccatcgttctgcaagaagatcttgaggaggttcttggagaagccgctcaccatggccaccccgggctgcgtcgacgtcaccggcgtcgacgtggagtcgcgaaggttccagaacacgatctgcggcaccgcgtcgccgtagccggcgctcccgaacttcctgcagatggtctcgtagtcggtctcccagtggttggtcgacgcctcgtcgaactccatgtcgctgaacacgaacacggtcctgatcatcttctccggcggcagcctgccgtcgacggccgtgcggaggatctggtcgaacaccgcctggaagttggtgttcatgcaccagtccatcctctgcacgaaccgcagcttctcggcgagggtcttgcccttgatcatgtggagctggggcctcgcgctgaaggtgatcaccctccccgcccacggctcctcgctgagctccgacgtgagcacgccgagcgccacgcacacgtccatcggcgtgccggacatgctcccggacacgtcgcacacggagatgcagttgcgcagggagcccttggcgcggaggtcgtccaccatgcggcgccactgcagctcggacacgtcgtcctcctcgccgcgcatggcggcggacgcgatctcgtgcggcaggagcgcgcccgccgcgatcttggccttgccctcctcgacggcggcgaggtactgggcgaagcggtcctcgtcgtgcttcttgaacagggccttgtagcgcctcatggccacggaggcgacgcgggtgtagggcagctcggaccatcgccgggcgctcatgtacacctcggggagctggagaacgtcgcgcagcggcaccagcgcttcccggcggaggcggcggaggacgctgtaggcgtagtgctcgtccgagagctgggcgtagtctgggctggagtcgcgcgggaagaggcggcgggcgatggcctcgcagagcagcgtcgtcctgtcaaacgacgatcccggcgtggggcaccacttggcggcgagtccgatcttcctccgcttgccgccgggggccagctgctcgaggtcggaggcgaggagttcggc

SEQ ID NO: 21686 - DNA, 1531 bp, Oryza sativa
tgctcgtgcatccacagcgcggcggcgtagaacccctccttgttggacttgccggtgccgcgcacgccgcggaggttgcagacgagcttgagcgcggtgagcgggtcgtgcgcccacgcggcggcgacgaggccgcggacgcggtcggcgggcgtgtcggggacgacctggaagaagaggtcgaggcaggggttgccagagttggcgtaggtggcggagtcgttctcggtgcgggccttccgcggcgtcgccttcgtcttcgatccgaaggcagcgggaggaccaggaggaggggggttgaagttggcgtcgagtagctggaggaaggggtgggaggcggcgtcggcggcatcgtgcggcggccgcgcggctcggatcaccggagggccgaggaggcgggcggcggcgacggtggcggcggaatccatggaggcgatcgttaaaacttcaggagctaggcgagactgcgagaagggatcgctctggatttccgatctatataggccatggccttcttatttgggccgcaacgggaggcccatgaagatttccttccttatcctgtgccgttgattcgtaccgacatagtggttggacggatgagatggatttgaaccgacattagtgatttgaattgaaccgacctgattatgcatctagtctgggtttcatgcgagtcgtgctcgccacgcacgcatcgcgcatctgcaggcgggcgaggcggccataataatatccacataggaaaacttggggtagtttaagattaaacttaattttgcaataaatgttacattaatgtgcgattaactctttcttacactatatatatgcaacgtgtacattaattttgcaataaaacaaggagaactaaattattggtagtgttaaaccttagataagttttagcactaccaatgttctggtaatgtagtatcaattgtaatagcttggtaaaaattggtaacaatgtaaatgcatagtagcatgtattattcaaagttaccaaatatttggcaagacaagttttggtatgcaaccaaaaaaatagccctatataattcatacattcatacacacattttttttgcagaagaaaaaaaaagagcagataaaaacaaggacacaaccgtataactgtacaaaacacgttgtgcgcaagatatgatgcacaaagtctacaatgcgtgtaaggctaaaggctagatatttgggccgggctcaatgcaaggcccatagaaaaaaatgccttccttaattgtaggctcggctatggcaattagggcggcgtaaatccagatcttactccgttgatttgaaccgacatagtgattggacggacgagatggctcgaaagtcgtgcatgcgagccgtacgtgcttgccacgccatcgcatccggaggcggcgccgcggcggccataaatctcaactaatcgatctctctccttcgcctaatctgctcccttcctccgattcaaaaaaaaaaaaaatccaccgaaacctcgccaccctccgccggcgccgccatg

SEQ ID NO: 21687 - DNA, 44636 bp, Oryza sativa
cgtctaccgcgtcctccacgggccccgcgacgaacacaaggaggaggaggaggagggcgatgaccagaccgagtccgaggatggccgccgccgccgcccccgcctccgcttcaagcgccgctgcatcgaccatgccgaggcggcgaaggccaggctgcagaaggaggcgcagctcgcgcagtccgtgctctcgcggtacggctcggacgtcagcttccgcttcctctacgacggcgtcgccgacacgttcgccgagctgctcaagtccgacgtcgagcacatgcgcgccggcgagaacgccaagatcgggctcgcggccaagtggtgcccgtctctccgctcgtcgtacgaccgggcgaccctgctctgcgaggccatcgcccgccgcatgttcccgcgcgagtcgagccaggagtacctcttcctctccgacgagcactacgcctaccgcgtccgcaaccggctccggcgcgaggtgctcgtgcccctgcgcaaggtcctcgagctcccggaggtgtacatgaccgcgggcaagtgggaacagatgccctacgcgcgcgtgccgtccgtggcgatgcggcagtacaagggggcgttcgagaagcacgacaagtcgggcgtcgcaggcttcctggacgaggtgcgcaccgggcacgcgcggctgcatgtcggcgccgcaatgccgcacgagctggtggccgctgcactcaagggcgagcacgacgaggccgccgagctccagtggcgccgcatggtgtccgcgctggcggcgggcgggcggctgagcaactgcatcgcggtgtgcgggctgtcgtcgggaggcgacgtggcgaagccaccgggcgcggcggccgtcgcgctggggctgctgatctcggagctgagccaggatccatggaaggggcgggtgatcaccttcgacgcgacgcagcagctgcacaaggtgtgcggcgcgacgctggtggagaagctccggtcgctggcggcgcccgtgcgcgccgcccccaagggcagcagcctgaacctgcagggcgtgttcgaccgcatcctgaccgtcgcgacctacggcgggctggccaaggacatgatggtgaggagggtgttcgtgctgagcgacatggagctgaacgccagcgcgtggcgggtgcaggacgagctgaaaaccatcaggtccaagttcacggcggaggggttcacggcgccggaggtggtgttctggaacgtgggcgcgccggcgtcggcgccggtggtggctaccgaggcgaacgcggcggtggtgagcggctactccaagaacctggtgaggctcttcctggagtgggacggccaactcacgccggccgccgtcatggctgatgccatctccggcccggagtacgactcgctcgaggtggtggactgaccgaatccatcctctgcttccgtatgataagagacgatcagtagtagcttgtgtgagtgagatctagtgagtgttttctgcactttgaatggaatgagtttgctggatgcttaatttggttgatctaatgaatgaaatctagtgagatatcacgccttggctgatttctcccactcttttctttgattttcgaactgattaaattagtagaatcatccctggcgtaatgtgattgcacgtttcttgattttctgtttcgattaggagttgcatgggcagcttaattcccagctcacactaatcaacatacattggcgcaacatgttatgttatcataagctcatacgccttcgatctaagcagtaattttttaagatgctcaaaatgatcaatagaaaactaattggttcaagatgccccaaagaaaacgaattgtaaatttgtaattggcaatccactccagaaaaatacatgttaaagtgccatatgcgttgaattcgagcaggctagccgaatatgcgttgaattcgagcaggctagccgagcaataaaaatgtaaagcgaaattaaagtaaaagacaacaacataaactgataaacatggatacttagggtattctcaacccaatgattaggatagacataaatgaatatgtcttgtatgagacatggtttctacacaacatccaagatattatgtgagataagtagcattaaaacattatgtgagataaatagcattaaatttaagtatgaaatagtagtgtttgcattagaagagtagtgtctagtattagtttcttgatgatatagagtttatggaaactatatctagtgtcttgggttgggaatgcccttagaactatttcagtttgagcacatcccctgttccattggaaggatccatgatgatgcaccaacaggatttaatttgtgtgtactagttatagaatactagtgattgtgcagtaattagcactacaaatatttgtgtataaatatttgggatacagttagctctactttcttttctcaagcttaattcattcagtccagatccgcgcagcatgttagaccgcaaacctctactctcttttctcaagcttaacgcatgttaaaccgcgaggtcgagctattggagtttcactattggggatctcaatctgactgcgaaacagggaaatcttttatagtagtagctagcaaaagaactaggtgaaacggtatctatatacagtactaatacgaacatctctgaatattctcacgctagctttacacttgaactgggaagccaaaattctggaacgcccaatccgcaagctgaccggagctgaacatccaaagctccgatgcaaaagtcggatgagcacttgagcagtgacccggactgctcttggcagacgattgtttctcgtcaattttcgaatttcaaagcctctaattcccctgttttgcagaatctcttcaaatttcaatcaataaaacagaattcaatcaatggtattcctgccgcagatcggcagatggtggcctttcgagcacggctcataagttgggccggtaacgggttccccggtatccgattagggcccacctcgaacaaacagacacggctgaatgtggcccaaccacacagctccaaagtggtagcatcatcgctacaacaaagcccaggcaaataaagccagttccaaagtgataatctctcatgtgatgcggcatacccaagaattattatatggaccaaagctcttagtgctgccataactaattatggttgtgtttgagagaagaggattggagaagattgagatgcaaaagagataaatcattatagcataattaattgagtattaattattttaaatttaaaaaataaattaatatgatttttaagcaactttaaaattttgttaaaaatataccattagtagtttgggagacatgtgcaccctctctttgctcacttgaatgttgcctaatctcaatgtactactccctccatctaaaagtttaagccatatttattttatcagcaagactaaaaagtaattaattcatccgtcatgtgataaaaccaaacaactatacaaatgcatgcatgtaactaatgagtactaagatgacagatgacttcttggattccggtcaaacaatttaatttagcatatagtgactacaaatgtaccttagacttttataaaaatcagaaaataaaatatgccttacatttttaaatggatggagtattagggcccctgaagaaaaaacataggaattttagaggttttcaatcctatagaaataattcctatggaaggataatcctatagagattttggagaaaacttagcaagagctcagagctcttggaaaattcctttgaatctctctctcatccgattcatgtatttttcctagggccaatcaaatggtcattcctatgttttgcaattctccattttatgcttccatttctattagaatcatgtgttttcatatttctttgttttttctcattccagtgattctaacggtccttaagctttgcttaattaatttgttctaactgtttcagctttaacactcttaggtcccttttgattcataggaaagttagatgatttttggaggattttattcttatggattttttcctagatgatcctttgagtcaaatgaatagataaaattgaatcctatgaaattcatataaaataactaataccatgtaagttttggaaaaaaaaaatctaacatgaggtttaactttcctttgagtctttatctcttatctaatttctgtgtttcacaatcttattaaaatcttacgttttctcggtcctacggattcaaagtgtcccttacgcgtatgccttaccgtaatcagccagctctttactgtactacgtgtataccagcgacaccggccttaattttgtcctgtagctgcccatccaccacccagatcagatgtccctgcacgtacggacggacggccggattgtcccttaaggcgacgctgcggcggatctcggccgtccgtgcgtccgtccgcttcgcctcgcaccaaaccaattttctcctccaccaccgtcagctgcgggccgtacgtgcggccgctgcgcctcactccatccgtaccgcctctgctttgtttttcatggaggaggctgataattaactactaatcaacaaatcaactaaaagtactttatatgtaaattttatatcaattggtttaaaagctaaggcagaagaagaaaaaaagctaaaatcaacaatgaaattaacttttacaaattaaattttggctgcagctaatataaaatggttgagtacagactgaccgttgagtacttcttggcccatctaattcaatggaacgaaatttcaaaattgaatctactttatttagttgaattaggtgggtaaaatatatgtcatgtttaaagtatatttagtgataaaacaaatcacaataaaataaataatacatgcgtagttttccttaataaaagaaaaggtcaaataacatatctaaaagctaacagggtcatatatttagaaaatagaggtagtatatgggaactgaggatcttgttagataatgcatatgcatggaatggacaattggtatcccaagataactgtcttaaattctccttgtggccaaaagaggctcaccggcggccattggtcaaaagcctaaaggatcagtcgcttgagcatcaaggttcagggttgtgatcattccttgctaatactcatctcttacataaaacaaatcaaacgccggtccatcatgatgatgatgatttgatcctcaattcttttaatcttactggtctaacaacctgtcaacctgttaccgattcttatcataccatgtctgaatgtccgatgcctgttctcaatttctcattatgaactttgcaggaacaatatgtactgtcctgtttccttttgagattagggaaaaattgagattactaaacatcggttgtttcagctccactgcaacctgtccttaactccttattgagagttcagatcatgaactcagatagacagacatctttgctgaatcttctcaagttctgaagaaaatggaaggcttggctaccaaatggatcctggtctcctggaaagaactgcagcaaactcactctcacgaaaggaccttcttccttgtccccttctacatctgctactgcaccttctctctctcacaaaatcaccagtgctgctggatcttgctcatgtccatttttactgctgcctaaaagaaaaataaaaggacatggttgcagctgctactgccatttggagctctgctgctattcattttgcagtagatggatgcatcgattaacagacaggcacaaagtacagaacttgggagttttgatttatttatttattttagttttgaaatgggaaagaacacagataagggattcgaaattcaaatcctctagtataacatattattctgtcactctcaatgatatatagacaatcatagaaatttcaccttaataaaccaaaccacccacctgataattaaatattattgttcaaaaaactttggaagtttttgtttgcatggatgtgctatactttgtgccatacaattttggtttcaagaaaatgatctccctacaataacgagcaaattgtgagtgttttttatttcttaaataatggatagaaatccgacatctacattcatacgcggatatacacagccagcgtctttagggagaaagatataccttggccaactatattggtttatccaggaaggagaaggtggttgcagaagctaaaagcagctagtagtactatagagagagagagagagagagggctggtgttagtttggttgagtaaagtggccacacatctagatctaaagcagtagcttctaattaacacaatgtttattgggtggaatcatgtggagttactgttgcaattgcttgctttctagtgctcctatagctgtacaaagcaggcccgaaggcaaagcctcatagcttctctatgatctaacttgtgcctcttcttccaacactctcttaacaaaaagggggtgcaaatgcatatctaaattaaaactaccaacaaattgtccagaattcggtttatataccaccaaaaggtgcactaatactaccactattgccattcacttttttgtccatgatatttagaatgaattcttttagtaaatttggcaaatataaacttgcagtatcaccattggctgtttttgtccataattactcctatttaggaagagttttctaatatataaaggggacaattataaactacttgggcacacagctattgacaggctgcacatatatacttggcgcatattgggtccaaatttgattgattttgacaaaaatggctatacacagacacacactcactacatatggacaaaatcaacttatgtcactaaacccatttgaaataaataatgttgaagttagttctgaagattgtccaagaacgatatacataattttctttctccatcctacactacaaaaaaaaaggattccatacattacagccttgctgcacctgacacagcacgaaaagaaaataaaaacccttacagataattggcatgacaatggcacagtaaatgcaagtaaatgggtgtagaaaaatggagtgaaatgtcctttgcagctgtatcttctgatatttacctctccatgcagtaagtacccagctggcttttattacctgaagaaatgtgggtatatatatagccagccgttgggggaaagaatttactcctgcaacgtttccattcttgtggaggaattcattaagaaacatttaccacaagcccagagagaatccgaggttaaattactcacttgcaggtgtacgttctctggccctttgacttcactgctgctgctgccatttcatcttagtccctttgcatcattcattctgaaatccaagtatgcgtcccagaattctgtccctggcgatgttcagatatcatatcacacagcatattaataaacattataattcttttatcacatatatagtataggttgtgcagtgtagattaagaacatagattggcatgttagattctactactgcattcaggtgaaaaagtttgagactgaagaatgagaaagaaagttcagtaatcagtaataactactaccattgttgtcttatcagctgcagccaaagttttacataccattttagagttgattttgagggattcatttttcaagattagcttttaaacggcgaataataaagatataaaagttttacctataaattatttccgttgcttcgtttatttttctacggcttatatagatgaaccaaccagacaaaaatgagcaattctacggttcttgagaatgtatcatgaggtatcaaaaatttagtataaaatttggtacctagttaccatgaggtaccaaatttagagcattgctaccgtccagcagatggtactgaggggtaccagtaactcccggtactgaagtaaatcggtccatccatcgcgatggggtaggatcggaaataagcgaaagatcacgagcccatcacgtgaccccaattttataatagaaaaagtggtaccttatggtaactcctcaaggaccgtaaaattgcaagacaaaaataagtgaggaaactgaagttgcagacagatcgacataacagaacacgtcttcagaatcctcaactctcgcatcgcatcacctctttctctcctaggataaagcggcatattgctgacctgttcctgaggcaacggcacagaccttaacaacccatgtgacctatgcgaggtgagcttttcaggtattcattctctctcattcactctgtctctctacctatctctgtcttgatcaaggcccttctctttctgctctttcagagacaaggccatgtttgctgaactgaatcctgaaaataactgcatgagcttttgatgctatggaattccaagtagctaccacctgtcagtcatttggcaagttttgcccaagtgtgactaaaatggtctgtaaaactgtttcaaatttggattttagttaaacaagttggtgagaaacatctgcttaattagcttcagtctgaagagtgccataatgcaggagcacagtgtttcatcagaaaaagaaaggactgcactttgatggtgttaactgtagactgacaggcaatgtgtatgtatggcactgtttgtgacttgtaaaccagaagatgtggactgaccaatgtaacagaagacaaaaggccctgagaaagcaatacttggagcctaaccctgccatgatccatgaactgcatgttcttgtaactgcaaacttggatttttgcccggttttttcgtcatgatacgacgtttcgttgtatagataaaacctggaggagtgacaattcttttaagtagtttgtatggatgaacatgaacaaatgaacagttaaaatttggacccaaggtattaaaatcctgaaaagttaatatggtaaaaaggaggttaaaaccatgtcatgtcctgatcaacagaagattctccctgtctgttctctccccaacactggggcagcacggccaaaattacactcacgatcagagctattttctttgaataattgtggattaacagacaggtgtccagtccagcccagagttgatatagtttaattagtaaatcacgtacggaaaaaatttcaaacttgttaggatttcatatgccagaattaacaattatggggttacctgaattgtaagaatgctgctagatctaccaaaattgtccatgttaatttcacggtgttcatgcacgagctagttagactcaccaagccattaagaacaattttcttacaaaaattcttaaggacaattaggacaaggatccggcctaaattgccctgatcatttttaaatacgtaaaaatctacaagatcatgcgaagaggccatgagcacagaagaactgaagatgataataaatggttttggtagctatcataattaccaagatttctgtgaatttttcttacaaccattatttggcttttcacttccatccagtaacagcctcctcaattctacaactacaaattctccttcacacaaaggcataaaaaataagataaaaaacacacataaaaataacaccttatttatacgaagaactataatttatacgatggccgtggacaccagtaaataaattaagaagaaaagaaaaggagaaaaaaagaagaagaaggggaagaactccaagaattctccaagaaatcaaccaaaccaagaagccgggcggccatgggaaattatactggccagatcgcggcggcatcaccacgcccggatccgcttcttcggcggcagtgaccggaacacggcggcgaggtctcgcgggacgtcgacgaacaccaccggcgacgacttcctcttccccgccgccgcagccgccagccgccgcggcggcagcggctttcgcggcgccggcgggcacaccgccggcggcctcagcctgctctcctccgacgtcggcgtcgacggctcttcctcctccgcatccgcctccgccaccacctcctccttcggcggcgaaggcgaagctgagacctccgcctccacggtcgtcggcggcggcgacggggtcgacaaagcggtcctgatcggcggcagcgccgggagggcatcgtcggcgggggactccattgctgcctgctcgaattggcggcgaattcgcgcgagaaattgggcggagtgggatcgaattctcgttcttgcacgcgtgcaagaagtgggtagaagaagaagaagagagagagagaggagtaaggtcggggcggtagcgcgaaggcgttaaatagcggcctcttcaatggaggagagagaaagaagggtaaaagtaaaaaaaaaagaagaagaagaaatgaaaagaaaagaaaaggaattagttatgagggtgtaatggtaacttctggggtttacaatgacaaattgttataataggacacagacagtaatgcattcttactcgaggtgaattttccatgattattggagatttggaggtaatttttcaagttttgggcaggatatatatgtactacatccctatatgcattgcacaagttcatatattgtatgttttctgaaaatgtatttattttagcaaaatatatacatgggcctaacttaaattactaatgcaacttaggtgaacactcatgtaaaccgtgataaaaaaaggtcatctaaaatcacacaataaaatctaatatgttgatgagatgatgatgtgcaaccttttcttttttctaaaaaaaaatcatgtccaagttcgacttcgtttgtggatcatggaaatggcaaacttcaaaccacaacacaaccatgtcgatttgggatttttttaatgtgattctagatgatctttttttttaccccaatatatatagtattgccttctttccatgccatgatcaattgaccattacattgtgtacaaatcacttctccaattccttaccatcacactgtgcccacggtgcaattgtagtgagcctaacaataatcacagagagagagagagagagagagaaaagagataaatatacaggagtatacagagagaaaccatgcatgtatgcatggcaccaagggaagaggacatagaggctgagttgaaaagggagatgatacagtacaataaagccatatgctgtaaagttgaggcttggaaggtagaagagagcattatgatggatggatggatgcaaatgcagctgatcatgcagaataaggagcagcagagtctcttcttcttgttgttgttgttgttacagcagcaagcagcagatggggtagaagagggcaaaaggaggaagctagagaacaagaaggaaacaaacaacaacagggaggggaggggccttttctctgccattctagttctgcagtttttttttttcagctcaggcctgcacattgatgaagctgtaaacagttgcagtgaggactgagctgaggccgccaccaccaccttccctggtctgctatgccctgacaaatcggtcattttagtttcggtatgactcaaatttctaataagatcgagtctatgggaaaatataccatctgtaatatattaaaatagagtcaacataaaatatgtgtttattgtgttttttaggtggatttagatgttggtgtatttttttctctataaactcatttagagccgaagaaatttaactaacaaaagaattataatatggaatagagagagtagtagccaattaggcattgtattgccagccgaggtggacctctgcataatatttctcgtggaaaaaatggttaatgcactttaatttatttttttagtgatcaacaacagtgaaaagttagctaggtgcaggcttgtcttttttctaacaatgtttttcttcaaactattattgttttttgggtgcgggtgggggaggggggaggcggaattgtggagacgactatgtcagtggggttgatgagttggcgggtatgtatcgtcgaatgaatagaaagatcaatataatcacaacatgactataatagagtcttgctatctatataaatattaatgtgtgttggcgcgaagtgtacttcaaactcatgaaatttacttaatatgtgcgcaggcaattttcgttagttctatcctcgcttatccatccgagaaaagaaaaccaagtaactaataaaattccaccaattttacagcttggacaattaccacaaatttacagctaacaaatctaagatatctcatcatagcaatgaaaatatgaatggcaatggcatgcaagaataggatgcttctcatccgctaaaaatggtggttatgacttcatgagtaagaccagatcaccatgttatactccctccgtcacgtttttgactttttatttataacgtttgaccattcgttttatttgaaaaattagtgtaaatataaaaaaaagataagtcatatgtaaagtacttttgataataaagcaattgacaaacaaaataaataataatttcaaatttttttgaataagacgaatgatcaaatattaacaaacaaaaactcaaaaagacaagtaatatgggacggaggtagtaacatacatgtagggacggtgaaaaggacagtaccctccaattatggtggaatttacggccaaatgtcactggcttgcagtggaagaggaggggaaaggaagaccagatctgggctccagccccaccggatccaagggtggttggcagctacaaaagctggtgatgccacatgggaagtgttgggttggaagggcttaatccttctcctctccctttgctttctctaacttcttgtttattttactcctaatctttgattagttaacctctccctgtacttttggtttgcaacattgcatccatcacttttgtcctctccaaggaaatttaactgtactattgtggacagccatgcctacagcccacatattctcaatttgcactagtgctgccgttcacatttcgatatcaacatcattagaaatgatatttggcgagttggaacaaacataaccaattatgtattttgacagaggtcggagatttagacgaaagtaggccaattaggacttcagccctaaacttaccttcaaaattatggttaaatcctcttaaatcacaatataaattttgggagaaaaaaacgaacaactcattagttaagccctattttagccttacttttggataatttctgaccttaccactggcaggacaatttcgtacatacataaaggaagtggtgtggcattactatactgaattaagtatgtgagatgagatgagcatgttcaagattggaagaagaggatatatactctctccgtcccataatataagggattttgagtttttgcttgcactgtttgaccactcgtcttattaaaaaaattgtgcaaatataaaaaacgaaaagttatgcttaaaatactttggataataaagtaagttacaaaaataaataataatttcaaaactttttgaataagacgagtacaaataaaaactcaaaatctcttatattatgggagggagggagtatatatatgtatgggacttgcaatggaagcatgcagatactaatcatgtggggccatgtgagtacgtgatcgccatgcatgtgagtgcccattgccttttcatgcaaggatccgatgtatatggatacgtaaactaagcatcattcccatcattagatagcgaataaactacttccctaattggagtacggagaacttgcatggtttggtctacttttgtgtatgctccctccggtcaaacatgttcattttggatatgtgatcttgatcgttaattttctacttaatacaaaacacattgacaaattaaatccaaaaaagatcatgcatagaattacctatatgaaattagttcttctcttagaacaatctctacacatggtttttgaagcattatccaacttaaatataaaaaggtattggtgtttaaagtttttaaaagtttgatacgaaacttgtccagaacgacatattattgtgacagagtactatggagtactactactctgtgtagtacttcctccgtcccaaaatgaagtcatttttgaggttggcacgggtattaagaaagtaggtgagaatgattggagaaagtgtgtgattggttgaaaagagaaagtaggtgaagaagaatggttgtgattggttgagaggaggaggtaggtgaagaaatagcttcattttgggacaagacactgtgctagaaatagctatattttgggacggagagagtagcagctactaatggcttgtcagtagaacttgtggtataagttttgttaaacctttttcccacattgagtagaggagtacatgggccagtccagtcctcacttgactaaggttgtactatgataaggggacattaactgaaaaaaaaaacaagagtatttgactttgtatgagcgttaacaaccaaatttggtaatatcgacatcgggaaagaagattagatcgaagtaaagtcgaaggcggagatctatttcggaaacagagcaggaatcggctggagtccagatcggctatgattaggatcagctgggtctgagtcgggctaggtaagccgatgtagccgattccgacaatgcaacttgatgtatgataccgggttgaattgaggcgctttaaggtgattgctgcacatgggtagagtcctgagaaggcaattgtatctagtaattaggatgttttatgtaatttccttagagatatgtttgggcaaaagtctgccgcaaagacttatggtatcttagagtttgttagagatagtagtcatgtccgttatggacatatcttgtaattctcgggtataaatagacccgagccctatgtaacttttaacacacacgttcaatacaatctcggcgcatcgccgcctttttgctttagttttatttcgacgagttcttgctttcgggttgagctgcatcggtttcgatcttcaacaagaggtaaaacttgttatgatgaattatgttctcgggattagtgcttccatctttatgatactctaatcttgtctatgtaattcgtcaagttatcatatatcttacataatcttcgacaatatcgtcatctaacctacaatcggctaacatctgttaacagaaggcagccgatttggttaaataacaacgttgacctagattatataagatatctaccactctataaaacttccagcaacttgattgtatagatattgttcttcttttcatacttaatgctgcatcagttgagtttgatttattaagtcgtgcttagaatatcaatctttagcctgccctctggtcgccgattagagtaccgtcggagtttcagccgatcttacctgatttaatcgtatttgctctatatgcttcaatgatacattaaatatgccctttatgtcaagatcttattgcatttaagtatattaggctcttgtttgatatattttacttgttttagtatcctgatatagagtagtatcggagtattagccgatacatgctagatctatctgatcggctatgctattaagatatataaggctgttatcaataaatattttgatctaagtgattcatactgtctcggcatggcgaccgatctatcccagtcacttgatttaagtatatatcgatataggagctatatattgttaatatttacaaccgatcgaacagatttagttctttattgcctatttacaaccgtcgatcgattcacatatgacatcggctgccagatagataaatgatgtgtcatcggcacctagccgatcggctatcatttatagatttaactgcggtttctttgcttctatttcttgttaattacaggatcaaatcaactggtacgctcatacattcgaaggcgagctttggacctgcactgaagttaaacagatctcccaagcctcgtgttttctgtcaacaatgaggtaaaaaaataatttacaagaggcaacatgtttgaaacaggtaaaatgacggatgatgtattgtttatagggtttaatttaactaaatatattcgttcaaaaaaactaactaaatattatagcactatcatacgaagctacctgatactatatactccctccgttctaaaaaaatccattcctagcatctcaaggtagaattagtggagagtgagaatgactaagactatgttcggtactggaggataggaacctatcttctccgcacggaaaacggagcggtcattagcgcgtgattaattaagtattagctttttttcaaaaatggataagtatgatttttaagcaacttttatatataaactttttgcaaaaaaaaaatcaccgtttagcagtttgaaaaacgtgcacatagaaaacgatatgggggatttggaaactcccggtatcgaacacagcctaaaatgttccggtactcgtaaaggaagtcgtttaggacaatatttaagtcaaaccttgggaatataaatcatgataactctcaagttgttaagtttgaaaacgtaaaaagtatatgaatagatttgtcttgaaaaatactttcataaaagtatacatatatcactttttaataaatatttttatagaaacaagaagttaaatttgtgttttggagaccgtatcgctgttaaaaacgacttccttttaagtatagtgttgaagttagttttctccttccaggcgagttatgaaattaattttttttattcgtgtctgaaaaacccttccaacattcggtcaaacgtccaatgtaacacctaaaaattttcttttcgggaactaaacaaggccacagtgagctacatactcctatatgctcaagtgaaatcagccggaatacatgccaacaaaaaatggccggaataaaggccaattattagcgagctgctttggtaaacccgtaaaatgtgtggatattgtcatcaccaattggaaatttaggtgttttttactcgtgtaattaatcatttgtgacgacggcatttgaattcagaatgaagtgcacatgattaaaaaatcgattggggtttgttggttagcgtcaggcaaaacaagacaaacatgctacatttatctatcttgcttacgacatgtgtacaaatgcatagtgctactattagcttgcactgatcagttaatcaagatcacctcagatcaacaaagtaaaaaaaaatgaaaatctccagccacaagcactgtaaatcacaagctttcatcaaactgttcatcggcagggcatcttcttctttccctttgcctgtttactttgctattcgtcagaaaggttaaaaaaacacacacactaaaaagtgcccaattaggcagcaggacaggtttactgttccccatttaatttttattggagcccattgcataataattcacctctagctacctggtactcctgtactcctagctatagctggagtagcttagtggctgtttagattccaccctaaaactttatatcctatcacatcgaatgtttagttatatacatggtgtattgaatataggctaaaaaaatattgcatagattacgactacttcgcgagacgaatcttttaagcctaattgctccatgatttgataatgtggtgctacagtaaacatttgctaatgatggattaattaggcttaataaatttgtcccgcggtttattgacgaatattgtaattagtttttgtatcagtgcccgaacacactatactacaccatatataatacccgatatgatacgttaaaactttataccctgaatctatacgcacaaccttatcaagagttcccccctcccccgaaatgatatgatatgatatgatatgaagacgatgtgctacgtttgtcgtcgtggtcgtcgtcaaatcacaatgatccattccgacgtgtgcatgcatgcaatgcacgcacgcacaattattgacgacgactcgatcgatcgccggcggggaccggccggccatctctgagaacgcccaccagccggagacgggaaagaagactcatggtcccgttcttttcggattatcattcacacgtttttcaagtttctaaacggtgcgttttatgtaaaaattttgatataaagtttattaaaaacatgtttctgttccctaaaaaaaaacatgtttccaaagtaattttataattttacagtggcatatttatttatttatattttcaaatagctaccataaaaattggataatccatcgaatagctatctgagaccgtgcctgtgaggacgaaggctcgttcgaatctgcttaggatgaagattaagtacgtgtgtacgtaaaacgagaaaaccatcaatacaggatcaattgcattttatttatttcaaacttaaaaaatgaatttgtttgatatcttaaagcaacttctatatacaaaacgtttgcacgaaacgtatcgtctagcagtttagaaatggagttagctaaaatctaggttaaatcgaggtggccgccaaggagagagagccaaagaggaccacctgaagaaaaggcgatgttttgcagctagtcacctccctcccttttttcctgcacgcatgattcacactgcaatcctgcgtgcactgtgcagtggccgccggcagtgcttgcttgtcgtcgccggccggccatggccggggcccctcctcctcctcatcatcggccggccatggccagccagccatcactagctctcatcctctgcatgtgcacagtgtgacgcctgatgcagtagcctgaataatctggcaatgtgctgcatgaagaattcagcacattcagattttcagggtttgaatttttgatggatttctcagcctgtccatggctccatgcgctgcgtgtctcccaaagaagatggcggcagacagggacaccgtaccttctgcaccttctgctgcattttgcctgcaaggctgcatctctctgcaggctgctgctgatgctcttttcctctcccctttcctgcaacactgaattttggttaaccctgatctgtaattcttttcagaaatttaccccccccccctgcctctttgcaggttgatcggcagtagatcgccgagattgattggttggttttgcttttgcaatggatgaatgatctattttgccttttcgttttactgttgaggagtaaattcaccggtgccagccagtgacagtgtgagtgagtggccgccttttggtgatccgatcaagctgagcttaggttcggtagccgcagagtattgcagtaagctgagctaagcctctcgtttgcagtagtgcagtttatcccttgcaggttgcagctgaatttacagtttgggagctcattttgtcgatctctctctccactgtcaattccctgacacgatggttgtgtgcaatgatcgatcgccctaattgtaggagtagtgagttaaatcaccacagtttttttcttgttttttactcttgtcagacaaatagcctcattggttacccatatttcctaataaatcaaaacgacttattgagaaatataaattaatttgtaggcaaaatttttatatatttgttcataacaacttaaaaaccaatgaaaaaagaaatcacgttaaaaatattttaaaatcaacttcatattcaagtttaaaattcaaatttggctttttctttggcttgttagaccaaccgatgggctcatagactaatcaaagcactgttcatatgttctcattgaataaaaaaagaaagaaagacatctgatgagtaaaacagtaactctgtggcccatcgaaaggctgctagctcgggccatgtgggccagcctgattggacatcggcccaataatgacacggtgaggtcttttcatggccggcccatacaaagtgaatttcacccaagtcaccaaacccgagtcttcaaagttcaaactgaacaaattagctgactactagtaattcaaatctgaatatttgactaaacatcatgaccatagaacgagtcaaggcaaggaaaccacctcgttgttccacgactaaccacgagtttaacatctggtttaccaacgttcttggccatgaaatccagtagatattttctgaagaataaatttactagtaccactgatggcccatccattattgtcagctgcgacctagcaatactttttcagtcctaactataattaccaggggttaattcaagtaattactttcgagttaataatctcggcaggtaattctggttaaattgagagaattaaacagctagatagcacaaggagaacaggaaaaacaccaataatctcggtcaagatttccggttgatgctgtactacaaagttcatgcgtctcgacgaagaattaatgctaagggaaatattctaatcctagagagcatctcccaaacatgatagttaatcaccaccaaacctagacttagtaccttgtctaatccaagaaatgccctcttgcttgcacaattatcttctcttgtaggcctaatatgccatgtacggatcgttcaggtttaactcaggcatatatgccttggagggctggctcatggcaactaggcaaagacttgagaggaggaacaagtcttgtgtgagattaattgcacatgccaacctctgctagtcctcgtcaggtagcgcgtaacaaggattagcttaattagccaggtctcatcttacctctaatcttattccatattaatgcagcccatcgctagctatggtgcctggtcagcatgcaacccaattcttcagtagtagtacagtacaacacataggagtacattgatatgtactagtgcatataggctatgacatcaaaattagaagttaggttgaaattggaacgatgtgacggaaaagttaaaagtttatatgtgtatgaaaattttgatgtgatggaaacgctagaagtttcaagaattattttggaataaacacgtccatactagtaatgggtacacatactcctacattgctaggtgtacttgcctatttatttttattttcaaattacaatacatacgtcaccattaagggctggtttggtttgtggcctaaataggccttatcaaattttattagtgccaaattttggcatgactaattttggtaaggtaaagttgtgtttggattgaagccaaaatagtctaagttcactattgaaatggcctattttcttaggcatgccaaaatttgacttcaaaccaaatagacactgaacactattgaaattgccaaatattggtaagcctaatttaggcctcaaaccaaaccagccctaaatacacacgcagatcatattgtgggtgcgttactttaaagagaggaaagaagtggattaagaagatatataccgcccccatcgtttggtttattggggaataagcgaaacgatatatttgcaaatgaaaaataatttatgaataaaacttttatatacgtgtttttagcgatctaaaagcaaatgttgaaaaataaacttcgataaaaaaaccctaaaatcaactcaaaattgaatgttgaaaatttaaatttttgttgataagcctaagcataagcgaaaaattgaggttgcgagtcattagtgtgtgattaataatgtattaattattttaaacttaaaagataaaagatagtttaatatgataatttaaagcaactttcatataaaaactttttacataaaacggtctatttagtaatttgtaaagcgtgagcgtggagaatgagaaattttcttctctgatctgctgcaaacaaacgcaacctaagcatcaacacgtgcgcacttcgctagcacatgctaaagagacgaaaattagcatcatatcagtaaccttcctaaattcatattgaaatttacttgggtatatgtaatatttgtagaaaccatgatttaatctctagtggatatcagtaaccttcctaataacccttttcgccgcatattctcatggagcagctactactactatactagtactagtactccctccatactcataaataaagtcatttacgaccatgtttaagtcaaacattgggaatataaatcatgaataactctcaagttgttgaatttgaaaatataaaaattctatgaatatatttgtcttgaaaaatattttcataaaagtatacatatatcactttttaataaatatttttataaaaataagaaattaaagttgtgttttagagaccgtgtcgctgtccaaaacgactttctctatgagtacggagggattacgtagtttagctcctcctcctcgtcgtatgtctgtacagtataaatacgaaaagtgcatacgtgtagtagtcgacactttgtcaggtagcgcatacgcgtagcgttcggtgatgatgagattgagagagagcaatcgaatcgaattgaatcgtgccaagccagcagcagcagccagcaacctcgtccaaaggtcactgtcgccatgtcaaggaacgtgtcaaaacgcctcacactcaccaccggtcggtcaggttcaccaccacctcatcggccttagccactcccaccccgctgcgtggtggggcccacctgtcagtgggggaggggtgtaaacttcctgtaacggatagggacggcctactgcctgctcatcagctttgatcagcagctcagcccggctgcgactgcgtcttgtacgcccacagaacggagggaagccgtcgtctttgggtggacacggtccacgcaccgggcgtggggggcacatccgttgtgtgtctgccccgggatcctctgcggagggtggtcgtttagcccttcagagctaagggggtaaatattagcatttatatgctttttatggcttgccactaatgtccactgaaaaatgggtaatacataaatgaataatatgctttttttgacttgccactaatatcaaatgaaaaatgtgtaatacataaatcaattaatttatgtacaaaacatttacataaatcaattaatttttgtacaaaacatataaccaccaacctaatttagcattatcttagacaattataagggagtaagtgatcttagacaattataagggagtaagtggggtcataaatttaaattctaaatttgaaaattttgtatggtaactggtcaattactgtatttcagtgggaatcggaaattcttgacaaaccactattctggacctaggtcgagatctcatagctataactcttgatttcattggcacttcttgtttttatccactcaaaccaacataactcactagtgtcaaactagacatttattacactcgatcaaaagacatttcagtagtctcttcctttaacatattaaacaaccatcaatacatgaagcaaccgtgctagccataccagcatatactctccttattagatgtgtcgtattatattactacccaagacaacaatgaaattcaaatttagatttttttttctagtaactgactatggattatcttgaggggccgaaaattctagagaaaccgatattctggtcccctagtcaagatgcttaaaagcctgaattagctgacacgtttttgtttttttttttgctcaaaccaatgtaactctctccggcaccaacctaaacgtttattacactcgatccaaagatattacatcaattatctttcttcaacatattaaataattatcaatacacgaaacaacggtaccaaccacaaatactctcttcatgagatgtgttatattatatttgtgtcctagacatttattacactcgactgaaacagatttcgtcaaatatctctttcttcaacatgttaaacaatcatggatacacaaaacaactataatagccatgctagcacacacgacctttattcaacacgtcatattatattactacccaagacgccaataaaattcaaaatttgaaaatgttctttttttgtctagtaactggtcattggaattcatagccttggtcaagatgtcatagctgtagcgcttgaatttgctagcactttttgtttttgattttttgctcaaaaccatcgtaattcgttagtgccaaactagatattcactacactaaatcaaaagagttttcatccattatctttcttcaacatattaaacaatcttcaaaacacgaaaacaacccgtgaaaaccatgccaacatatactctttattacacacgtcgtattatattacttcacaagtcatcaataaaatacaaatttagaaatgggaaatttttttagtaatcggttattagatttcactgagggactagaaattctagagaaaccaatattctagtcccctcattagctataaggcttaatgcttgaatttgttggcacttctatttttttgttcaaaccaacataactctccagcaccaacctgaacatttattacactcgatcaaaagagatttcgccagttatcttccttcaacacattaaacaatcatcaatacacgaatcaaccatgccaaccataccaacacacaatctctttattagacacattgtattacattagtacccaagacatcaataaaattcaaaattgattttttttcttcttcttgtaacctaccattggatttcactaagggaacggaaattttggagaaaccgatattctagcccaccggccaatatgtcatagctataacgcttggattagctagcacattttgtttttttcactcaagctagcgtagttcttccgctcaagccagcgtagctcttccgcaccaatctagatgttacactcaatgaaaagagatctcgtcaactctcttccttcaacatattaaacaaacatcaatacatgaaacaaccgtgccaaccataccaacacatactatctttattagacacgtcgtattatattactattcaagacatcaacagaatttgaaatttgaaattgatttttcttttctagtaacctgccgttggacatcagaaattccagagaaactgatattctgccttctcggccaagatgtcatagccataacgtttagattagctagcacattttgcccttttcgctcaaactagcgtaactcttccgcaccaacctaaatattcattacactcgatcaaaaagataagatatttcgtcagttctcttccttcaatatattaaataatcattaaacgcacgaaacaactgtgccagccatacagcacacacaccctttacgagacgtgtcgtattatatattactctactcccacgcaaacacacgagtcggagtaggtagcacccgatattctggcccacccggtaatatgtcatagctataacgcttggattagctagcacgctttggttttctcgctcaagctagcgtagttcttccgctcaagccagcgtagttcttccacaccaatctagatgtctattacactcagttaaaagagatttcgtcagctatcttcctcgaacatattaaacaaacatcaatacacgaaacaaccgctagccataccaacccatactctctttattagacacgtcgtattatattactattcaagacatcaataaaatttgaaattgaattttcttttccagtaaccgtccgttggagatcggaaattacggaggagctaatattctgcccccctggccaagtagttgaatatgacttgtgaagtaatttagaaatgtgccaagcgttatagcacgttttggttttttcgttcaagcgagcgtaattcttccgctcaagccaacgtagttcttccacaccaatctagacctttattacactcaattaaaagagatttcgtcagctcttttccttcaacatattaaacaaacatcaatacatgaaacaaccgtgccagccataccaacccatactctttttattagacacgtcgtattatattactacccaagacatcaatagaatttgaaattagaaagtgattttttctctagtaacccgctgttggagatcggaaattccggagaaactgatattctgccctctcggccaagatgacgtagccataacgcttggattagctagagcattttgtcttttttgctcaatctagcgtaactcttccgcaccaacctggatgtttattacgctccatcaaaagagataagatatttcgtcggttctcctcctttaatatattataaataatcattaaatgcacgaaacaaccgcgccagccacaccagcacacacgtcttttaataaaacgtgtcgtattatattactccgctcccacacaaacacgcagagtcggagtaggtagcacacagaaagagtagtctatcgtacagaggttgcagaggatcctggccattgcggccccgtcctgcctacaaagaccccgctcacccaaagctttccctgctgtcgttgctcttatcctatcctacgtttgttgctcggttgcttctcttctttcctctctgtcttctgtcttctcttcttcttcctcaccaaagttgttgagttggtgtcctgttcttggacggacaagggtgtttatccaaaagaaatccatcccgagatttgcttctcttgcgcgcacactggcaccgtccggatcgctgaatcttgctggtggtggtggtggtggtggtggtggtggtgcacggccatgtcgaggcggtggcggacgtgccaccggcggcggcctacgggttccccggatcggccaagagagggaagcctgaggaggtggtggtgctgatggggaagaggaggaacgaagggttcttcatcgaggaggaggaggaggaggaggaggtgctgacggagagctcgtcgatcggcgcgccgtcgccggcgagctcgtcgatcggggagaactccggcgaggaggagggaggggacgacgaggaggaggtggagagcaagctcaaggcggaggatgagcaggtcggcctcggctgcttggacgccttggaggaatccttacccatcaagtgagtcaaagatttcttttctttcatctttcttatcagatctttttttaaaaaaaattatgtaggtagatgtaggctttcacacacacaaaaatggcgaaatttgtgcaaaacacatgatagttttggtgcttttgcttttcttgcatctcttcatgtgtactagtagttgctagttggtcaagagtattttgatgatttgagtccatagctacctaaaatggcgcggcaaacatggattcctttccagtaatcgttaaattgcagagccaaacatgatgtactagttagcaccagattagcattagcagcagacatcctattatctttagtactatcctagccatgtcggatgcaagaacatgtactacatgcttattatcatctcttcctgaacaaacatgacagtgacggttccaatgtcaccactgatcacatcctcaaaactgcagttgacaaaacaagatgctgcagaattagctctaaaattgcttatatttttttcttttttttcgcgacgctcagaaagattgtcatgtcaatacgttagaagtaaaatagtttttgttacccaaaacaatcagccagacgcttattccagggaagggagaaaaagcaaaacaagaactgaagctaggaaaagactactaaaattgcttttatatatatatatatatatatatatatatatatatatatatatatatatatatatatatatatatattctgaataagaagctctaaaattgtttgatttgttcaggagggggctctccaacttctacgccggcaagtccaagtcgttcaccagcctcgccgaggcgacggcgtcgccggcggcggcggccaacgagctggccaagccggagaaccccttcaacaagcgccgccgcatcctcgccacctggtcgcggcgagcctcctgcagctccctcgccaccgccacctacctcccacctctcctcgcgcccgaccacgccgtcgccgagggcgacgagggtgaggaggaagacgacgattcagacgacgatgagcggcagcaccgtggcaagaacggcggccggcgagagtcggcggcgccgccattgccattgccgccgccgaggctcaccttgcacacccagatgggaggaatggtgaggaggaatggaacattcaggtcgccgaggtcgctctcactgtctgatcttcagaacagtggcggttcatgttagtttgctgctattagtacaaaaaaaataataatttttacagttagagcaaaaagccattgatctccttttggctggtagagttgttactgctacaactgcttactattagtaactatataattataattataattgcaatgcataaggtccaagtttgttgtgatctactatgattctagtaactctctggtttttctgagtcctgacctgattaagaagacatgtatcaactatgtatatctatgaactgacctaacttgaggctatcattaactaatgatggtttatgattagtcaattgctttgcttttgatgatctctctttctaatttgtttctgtaaatttgatttgctggatgaggaatcccatgattgtagtagcatcaagttaattgctccatggccagtgctttgcttgctttgtgagttgtggggagaactggtgagattggaatggccaatgagggagaatccaagtccaaaatgcctaatcccaagaaggaggagggaaaaaaaagaggcacttttgcatgtagctttgttttgatttgacacaggcggcaaatacatacatcattttctctctctttttccctgagcaatctgcgtggtgtgtagatctaccacaacagaatactttaaaatggagcaaaaattcgccctctgttttcaccaaaaacaagaagcaaacaagagaagaacagcaacgggttgccacataaacaaacttgaaatgcacagcaagatgatgccatccttttattttagtaattttttttgtgttttttgggtaagtgggtgagaggttagtagtaattagcatctttattgacggcacattgttttcacaacaaagtgtcaatgaccttgatgattgctcattctactctatttatatgattaatgatcttggtgatgatagctgaagatcctgagagaacagacaaagtgtgtgtatctgacagtctgaaacttgggtgaaacaggatcctatatcactattctactaattgatgccctaatcttgatggttttgttcttaaatgtaagcagatgtgcttagaaatttggagttaatcaagtttggtaggaactagagagagaaagaggggggctgactgtacatgtgcaatgtgatcttatcctgttgcacaatgggtactgtaaaatattctatgtggtactatgcattagcttttcttaatgctttgcttgtaatttttaatgcttggtagttgggactgcctgtctttccagccaggggattggaaaggtaggttagcttaaatgagttatctaaaaccaaaagctcaaatgagattagctgtaggagctagattttttgtttcaataataagaaaatactatcagtaacaaaagcaaacatggctagcatgataatatgaaaaaaaaaagggccttccttgtaaggtagagacatgctttatcacctacttgaatcttgtcatttatatgatttttgtgtgcacatgttgaaaaaagaattacttgagtatagctagaacattactttcataagcgaccactctatagcatagataaccaaatgcttggttgagaatggaacaagagaatgcatgtcttctagatgagagtgacctttggtgtgtgcatcatctgcagaggcaacggacgatgaaaatgaaaggcaaacaacatgctactagaaatgtggtgatcttttcttttttttttaaaaaaaatgtgattatcatttccctggaattaagcatgataatattaaaaacagaccatacatgccagccaatcagccacattgtccttgtgattgtgggtcagtacttgcaagcttagtaagcagattaactggatttaaaattagaaaagtatgaaactgaaaagaatggagatagaccactcaatgtttggcacaggcctggtttagttcctaactttttcttcaaacttctaactttttcatcacatcaaaactttcctacatacacaaacttccaacttttccatcacatcgttctaatttcaatcaaattttcaattttagtgtgaactaaacacacccatatttgtacatctctcgtcatgaaagagttcaacaaatgaaagagtccaacaaagggtccacaatttcgggggaaaaaggaaatctgaaattccagggtctgctggtgggtccctatagcatgtttggatgtgcctttggccaaaattattaattttgttagaagttagcaacaatctgttcatattcagcaaaaatctggttggattctaactctcccattcaaaatccccaaatttcagaatttggtcccaaaaattggacacatgaaacatcttcctgcatgcttctcaatgctgtacgtatgggcaaaaatgactccatttcatcatcttataaaatctatttatttatatatataatgcgagatgacaaatatgttatttatgattatgtttgtgcacgccaggtacaaaacgtggatccgctagctctctcgttcacattttgtttgtggattgtggtcaagagttgagaaacgaggacaaaagatattgtacgtatcggatcagatcgacgtcctacgtaatgtacgatatccatcggcatctcagctttaagtttttttttccggcctaatttattgagacagcttttgtcaatatggatcgatgccactactgtaccaaccacgaattactgtgtggatgatctggcaccagctccacgaattactatcagttgtaacctaacaccagctctacgagggtttcgttatctagtaaccaggcttaccgcagggtgttataatgcaaaaaaaaaaatcgaaaacctcactatttttttaaataaacaaaaagtaaatttttagtaagtaaatattcgtctggtttaactagtgtttatcgcggctatcgggcttatcatcagggtaatgggtaatacattccctcttatgttggtaaatcttggttctactgctccaggcatatgtactccataaaaaaagcaagtggcaattttaaaaaacggtgtcaaataagtaaacctgaaaaagtagaatcaaatcggtatttaggtttcaaaatagggtcaactgagcaattagggcataatataacccttacctacccacctatcaagtgatgcatcaatcttcatccaattcattctcccaattctataggggtattctaattctctggtcccgttcttttctctaacaagaattggatgaagattaagattttcgtgacacgtttttcaaaccgttaaccggtacgtttcgtgcgaaaattttctatatgaaagttcctctaaaatatcatattaatattttttttctaagtttgtaataattaaaactcaatcaatcatacgttaataccatctcgttttgcgtaaaaaaaacttaatcttcagaaaagaacaccaccggagagtagtaagctgaaagtactcgaggcccaacacatttatcaggacgcaggtgtagtggaattgagctgttttggcatgcaaaagatgggaggaggggagtgcttgcgtccacgactcggcggcagatgggaagcagaagctgctgcaacttgcaaggcgagatcagctgcaagtactagtagtagtggaggtgtagtggatagagatgcactttgtggtagcagtagtcggcactgcacggcggcgtcatccccagatgaggagacaaaacaccttggtcgttgccgccgagctgtcacactgatctcacctgtagtaagcaagcgacgtcgccgtgtgggccgtgcattgtgtcggccagcctatgttgagattgggccggtcaaaaagcccactagctctgtccttcaatgcatcgcatcttagtgggccaaggccagcccctagttccatcggaatatgttcactttagatccagtttattgatgacaagtttacattagatccttaaaccgctataacagatataaggtgtaccttacaaaagtagagcaccctaaactgttttgtgctctatttcgactgacgtgacgagttgactgaggttaacccgaccgagttggtataggatccacatgggccccacatatgaatgcgccagtcttcttcctactttctctcccttttatttcctcatttctcaccagatcgagaggcgggagggcactaatcttgttttagacccaacatttaaatttataaactaactagaaaattgcccgtgcattgcaacgggctacttttaattttgttattgttatacggtttgattaaggtaaaattcactgtgagaattagcttgaatatatatttttttataaaatcatgagctacaataaggagtccgatcatctcaagttaacatgcaagttttttaaaaagagatttcttatattacttcttttgtatttctgtaagcgaacgaacttaaaacccgactcaaatatgtatctgtattttcaaaagcaaatgaacttaaaaaccgactcatactcggatgacgtaacaaattatcggcaaaaacatcttcagtagtttttctaatagtagagaaatgttaggttctttaccacttttagattcaatgttgtaagtgaatctttagtaaaaaaaaaacgttgtaagtgaatcaggtcctggagttcatcttcgaacctatatccggcgatttgcctcgagttgaagttcaatggaagtgtgtttcctatcaaaagagattaaaaaaaaattgcatatgggcaccgtttcacccacgcgcgcgcacggggcgccggattgggcggtcgggggcgtccgttttttctcctgcccgactccaccgacgcgcggattttgtcggtagagcggtgtactcattgcactgcacacagtttcgcacaccgcctgcttgcttgccaattgtcatcggcaacatctcctctagtcctctttggtttgcccatggccaattgccgtgcacactccctgtcacgtgtcgccattattattgtctaaacaaatgagcatgcagcagcgagcgagatagagagagaaatacccagatctgcatgcaaattgcaaagggcttctgaatttatgagttgactgacgccgtgtttagttacagaataattcttcaaactttcaacttttttatcacatcaaaattttcctacacatataaacttttaactttttcatcacatcgtttcaatttaaatcaaacttctaattttgatgtgaactaaacacagcctgaaaaccgctaaagaaaattaagggggggggggggaagaactgtaggctgggtcgaaagcaagagaaacggggtttaatgcgtcttcttcgtctcttcttcagacaggacaattttgcatgctgcggatggttgagaaggtattctgacaggtgtgaggcatttgttttggagtcattcgtttcaaattttgaagtggcaaagcttttgccatcctttcaaaaaagaaattttttttccaattttgtagtgcatcttgagaagagagtgagcgtttattcgttcactacagtactacacccaactgacccaagtctcagtcttactaactcttaaggatgtgttgttttgagggtttacaaacacttctaccggtcgtacgtataatggaattatcgattaacacataataattaactattagctaaataaacttaaaaaaataaattaatacgatttttaaaagtattttttgtgatttttttattaaaaatatattttttaacagtttggaaaacatgtttgctaagaatgaaagagtagaagttgataaagaagagaaaagaacacactcaccgttcatagaaacgtggaaaacccttctggttgtacgtctgtacatagcaagcttcgactcttgtatggtttgatggacttatattcccgatatcaattcattacttgttgtgcacattatatcagctactccaactaaatatttgaccaagagtgtcccttaaaaagcatatgtacgcatggggtaggggcgaagctaggatttaagattagggggtgtggtgagaggatatgccatgagaccgaataactaatattgatagcaaaggaggtcaaataatcaccatcaataacaatcaatgcgtaaactagtcctttaaaaaacttaaaatttagctctttaataatatcattgaaagtttaaaactagtaattattgctaaattctttcaatgtaaactattgaataatctcacaaataagtatcataaaactattgaataatctcacaagtaagtatcatctattttactttgaaaaaagatgagaaatcacaaactaattttgtagattatggttcttgctaatgttcttagacttgctaactaactaaactgataatattttcaagctatacaaataaactagataaatacttatcttagttaaccttaatatagagtaaaaacagggggtgttggcaccctccgacaccccctagtcggtgccactgtatgtaagatacttctacccctgtcccaaaatattcttatataggatgggttaaatctcatcggaagtggtaatatattgggatggaagaaattcagccaaaaatactcaaacactcaaaatacgagctgaagtttcatctcctcgtatccctacagacaagatgaaaatagtcaaaaatggtagtattttcttggaaacgggcaaatatcttttcggaaactagttacatgggcccactttgtggggcccaaatgtttatcactaaaactaactactcaatatcaatattaatacaatatagaaagaaattagaaaaagtaaaatttatatatagcaaaaaataataacaataaaaagtacccttatacgaaaatttccgatcattttcaccctacactccctactccaccagaacaggacaggccggagaatttaccagcgtacaactaactgaactaccacccaccattcacatttcaccacctgtcggctgtcagtcaagagtgtcagaacaacaacaaacccagcagtaaataaacaaattaaagccccaccaccaccacgccacgcgacgcgaggctccgcgcgcatcgcgccgcgcgggtgacgcagtgtacgcgaagcccatttatcgctagctagctagcggcaaagccggcactgacctcgtgcttgtcctctgggtctctgtccccctcatctctctcctcctcactctcctcggctgctctcctcctctgtcggtggtgcactgcttgctcgatcctctgcaatggcggtcgacccgcgccaggtggtggccgggttcctgaccctgtccatgttcgtcatgctcggcaacatgatcaagcacgaccacttcacccccgtcggcgccggccaggaggaggttcgtgcttcttgattccttccctttcccgtggagatctctctcgtctttagctaattgctcttccaggttcttggtctctgcgtgaggaattctttctttcgctgttgatttagctcactctctttgtccgggtttctttggttcggagagtagttcagatgaagggatttagtagctgttcgtgttgatttggctcgccggtggaatgcaggagtgtgattatgatttgggtttctttgtttttgttttaattcttggataattgcaagcgatctgtggatctagtggtgaaggggatcttgaacgtcttgtgaccttgactttcattaggggttaactggggtttacattaattattacctactagtcgatcagcacgttgtctgcagtcaaaaaagaatccgaagctcgataaccgtgaagaatagcactaaattatatgccttcagccttcctaaagaaaggctagttggtgggggacacatcatcagtaaagagagcatcaattgcaaagatgaaaccaaaggaggaaatacagtacatcgtttttaatctctttggatagtgatagttatcattatgaacttgatatgacagagagagctcagtctctccaggaagcaaatcatgtgcgattgtgtcatgagcttacttgttctgattcttgtatgcaaatcattgatgtgccagatttttggaatcttttactacagtgttcattttgtccaatgctcaactggtatgagtcaattgacactgtcccaagcttccagtgatgaacgattcttttgaactgactaaatttaaactgggcattatatgactgaccccaatttgaaaaccaacagttgggcttggaggcaacaggcatagaatcaaacgaaattaaaattgcagatactactgaaatgactaaggtcaacaaggctggagtggatctcccaaaggagactgctgaggagattagaccctgctggtctaaaccaagatcaagtaagtaaaatatattcttgacaagttctttagatcccaactcttgagtcttgacacattggcacttgtaatttctgcagatgttcaggagtctaagggttttgttacattctcattgactatgggccctgaataccacatctcacaggtgagcttgcaactcagagctcatatgtatagttaattactatatgtaagaaaaacaagttttgtgtctgcatattctgtttgattgaattgctggaaccccgcttgaaattttcaggaccatggtttttcttactgaatatacttctgtctgcagattactgatgctgtggttatcgcaagatatttaggtgcaacacttgtgcttccagaaattagaggaaatgagttaggaaagaggcggtatgtttcattgctagaaccttacacttttcccccctcaaaactgcacaaggctatcggctattgctatcttgtattcatatttactttagatatactgaagaatttcaaaactacaagcttttcttttccaatttataaaatcttccacaatttgtttacaattcctttcatgaattcattaaaaaaaacgtttcttctataaacatgaaaaagatgtcattcatttgcactaatgatataaggaatatacacaggaaattcgaagacatgtatgatgtggataaattcatgacgagcttggatggagttgtcaaagtagtacattcacttcctaatgcagtgtcttctaagaagccagcagtagttagagtaccaaaccgggtgactgaagagttcatcacgggaaccattgagccgatcttccaaagaaataactacttacgacttgcgactattttctcttcagtaagtttgaaacagaaggagtcgggtaacaaggacttggattcgactgcctgccttgcaatgttcagtggccttcagttgaaacctgaattttcagcagtagccaagcatatgttggacaagcttaaagaaataagcgagaaatccgatgggatggttatagctattgatttacagaccgaattgctagaaaagaagatctgtaagacgaatggaggtgcaagaagaagaggctgttattaccctcaggaagttgtgcacttcctgaagaaggttggcttctctgctgatacaaccatctacttgacggagacatggtggcacaaaagcctggatactctgaaggaggcatttccaaacacttataccaaggcaagaaaactctttcaccaattttttagtttgtatgaatcatcatccatcttctccccccaacaaaatttactgaatgctacactgaaaagctattcatagagaaacacacttaaagttcagactgaatttgatcgttggcttgtgattccaacttgtgacatacatcagtttttttttaataagtataaaccgagctggcggaattcttgacacatagttatcattcttgcaggatgatataatgccggccgctaacaaaggcgagttcctgaaatccggggattcataccttgcaagagcactggacctcaaaatctgctcggagagcgacgtgttcgtccctgccatccccggcctgttctacggacatgtcgccggtaagaggatcgctgcaggcctgacaaacatcatagttcctgctccagtgtccagcagttcagctctggcttcagagttcgtctccacatacgtgtccaagaagagccatcttgcctactcatgttactgctagtactgttcttatatcatcagcatcagcatcagcatcaataagttcaactgaagtgagttgcttggccaagctttgggtacatatgtaagtccttttgttgtatactagttcatgatgttgtgaggaacagtatcatttatgtgttacttaattgttgttgataacaaaaggagagaagcacagaattagtgtgctgaaaaaaaaaggacactagattaggcatgtggaaagagtgtgtgcttcatgtactaccaagttatggttcatcagctggaaattactccaaaatactgcttccatagaagatgtgatgtgtgaaattctcttaactttatatgcttatttcagcaatcccattctttgacaacaactcaaattaggctgtgtttagttcagcgcaaagtttggattttggttgaaattgaagatgatgtgactaaaaagttgtatgtgtatgacaggttgatgtgatggaaaaagactgaagtttggatccaaactttggatctaaacacaacgttaatcaagtttggtcctaaattacgcttattaaatctagtctcgtgatctcgagttgcggacggggacgaagacgccgggccgtacagttactcaggctcgatgttttgggattgagatcctcttacttcactcttcatatagtgaagtcagagaagcaaaggtactctaactttagggtattctcagccatccaatctgcagcgaacggatctgcagcgaacggatgagatcgatcgctacagtactttacagtaacacgtgaacagtacatgtacacagtatattcgcactgtagcacaaggtagcactaaagtcagacaagcatgtattgacacccttggtacgcaagaacaaagttttttagtaccataccgaatttttttttgtctaaagcccacataaaagaggacatttatgcatctgacataaaagaggattttttttagaaaattgattaaaatccggcttctacatccacaatggatgtacacagcccaacgtcatataagagtacttagacccgaattccttacaataaggataataaaaagtaccaaagtgacaacacttaaaagagaagactactactccaatcttcttataaggttccacccatattttgcatacaactccatgacccttgcctccaacatcttgcgatattctttcaaattgtggccatcctcttccttaaacaacaaagaccactgttgtgcccaataagtccccttgaagatcacctgcaaaaaggaattagttttggagccattaaaaaccacatcatttctatttaaccaaaccgcccaacacaaagccgtgatgcccacaaaaatttggtattttagtctaggttgaacaccatttaaccaactaccaaacatattagcaacactagtgggtggtcgaatcccaaaggttataaaaacgacattccaaacagatcttaccaaatgacaataaacaaagaggtgttgtattgtttcattagaattacaaaagcaatatttaatgctacccttccacttcctttttgcaagattgtctttggttagagtaatccctctccataagtaccacaggaaaatcttaattttcaaaggaattctaaggttccaaatgaaagtcctccttggaactacatcacaatacataagagcattatacatagaatttactgtgaagattccatttttattagctctccatctaaaaacatcattttgctctgaaaggttaactgacacaactttcgacactaggtcatgccaagccactagattatccccacgatggccctcctaaaagagacattaagaggctctgtgtttaacacatcagcaacaacaacatttttcctcctaactatattataaagtgatggatatagcttatcaaaagatgtggcaccaacccaacagtcctctcaaaacctcaactgagtaccattgtgaacctcaaaggatccacacgagaagaaggactccttaacagccataagccctgactagaaatgagagtcccccggttgcttatcaacttgggtaatacatttcttagccaaatacttcttcctaagtaagttctgccaaactccctcttcattaatgagcttatacacccatttactaaccaaacacttgttttgcagttataagttatgtattccaaggaccctacacaccttaggtctacacacaacactccatttagccagtctgtattttttttatggtcatcacattgccaaaagaatctagatctataataatctagcttcttgaggatacctttaggtacctcgaagaaggataatataaacatggctaaactggtcagctaaaaatctcaaacttatgcttagtacatttgagaaactttcaggcttgaaaatcaattttcataaaagcaaattgttttgttatggcaaggcaaaagaagtagagaacgagtatgtcatattatttggatgtggcaaaggaaattaccctttcaaatatttagggattccaatacatcacaagaaattatcgaataaagattggcagaggatagaggaagattccaaaagaaattgagtagttggaaaggaaaattcctttcggtgggaggaagattggtgttaataaaagaggacatgtatacataaaagaggacacgtatgtcctaagcccacataatgtgcttactaagctctcaccggccaacactatttgctaacatagcatccagattaaatatagtttgttactcatttctattcatattataatatgttttgaccccttcttttaatcatcaatatataagtgaattaaacttctttaactttaaccagatttatataataatacaacaatattttcaacacaaaccaaatataatatcaaaatatatttagtgttagatttaatagaattaattaagtgtttatagatgttgctacgttttcttacaaacacgatgaaacttgagaaagtttgaattaaaaattaaaatgtcttataatataaaatagagagtaattcgttttttaaggtcccacacattgaaggagaggattagtatttttgaaacagggataaattaccgtgtgtctcatgctatcaataactactgctgggcaggcagctcaatacacagcaacaaattaacattttagtagcactccaacaacagatgacagagctgaaaagggctaggattacccagaatatttcatgatacttcttggtccaaatgacaattttattagctacgtacttttacaatcgacgaccattatacaactaataatttacaatcgactagaataaatagaactgattcatcctatggttatttcagcagacgaggagaatccatctataagcttctgctttattagactcttttctccttggtcaacaggaaatctccatttgtttgaggatgtagatcccataccattcatggcattgcccttgtcacatggaacttgatcgagcaagcggattctcttcaagttcacagctcgctccataataagcctggtataatttatcatcttatcatccatcgcaaatcctgtaatctctaatagattcaagtggcgatgtttgaaatcagatgacatctgatcccataacaaattgaccttctcagcgctgtcctcgcatctgttcctttcacatggatgctgacataacttcaagcaacaaaaaccagttagataaatagtgctcaacagccaacataggcatacatcatcaagctcaagaatttggatatatcttgaatgaggtaagcacaagtttctggaaaaagaaaacgttttcgcagtagattggcaccataattttggattttataattgaataatctaatttacagtctcctttctaataaagtaggaaaaggaacaaattactatgattagttaatatggaaaatatatccatataaccatattggttctgcagcgcaacaatgtcattataactttattaaaaaaacaatgtcattatggaagttgcatatttgatagaaatgggcagagataaccagagatataacataccttgagataaaagttgctgagacgagctgcagcttcaaggacaaacacagtccagttcaggtcacattcatagaaaatgttgcaaagatagacatctctgacgttgctgaatacaggatagagaagtttaggaccttgtggctcaatccaaatctgcagcagaagaggaaaacaacataaagcagcggataccggtcagcacaggacgaatattaaaacaagaaagagaagcagtttgggaaagttttgctggtagccatgtacttaccatctgatcttggaaatccaggtataagatagttaagtttgtggcgcttgatataagctcggtcaacctgaacggcatctggtcatacgtcgcagagcaagagaggctcatgttgtgaaggcgagtaacattgccaaaacggattggggggtttggaaggcaccaatcccagcagactacccgcctaagatttggcaaatggatcagatcagctctgtcaaacccacaagtgacaatttcaagcgtgaggagctccgagtgtggggcatcgatcttgaggacaacaaagtccgagacacaagaacacaaggcaaggaacttcaggttatggcatgtgtttaggatatgggagacgtccgattcttgaaacgcgaggttgcgcagggcaagattggtgagccacctgaaagcaaccgggcaagagtgagagaatgacatgaagcgttgtctgagcagctggcaatgctcaagggtgagtttaccaacatccgaccacagtgagaactcgagcaagtcggtttttccggcatcgacaatggccccaacggcatggccaacagagcataggtaggaagggtcttcagagaggaagaaactgagctgcattcacttgataattcttctcgtgttgctgttactgctggagggggatgacaagagcaggttgttgactgcagccgtgtaggcagccatgatctgatctacattgaaattcacagcgcggcgaggaggagcaggcatgaagtgggtgatatctatgatgagatgggagagtaagcgagggagttgcagccatcttctggagagcgtgctggtccgaattgccataggcaggtcaagtctctcaaggatttgcagcagaatatcgtcaggaagcgcgctgatcctgtcatctcctacagtttcgagttcctcctcctaaagaaaacaatttatacttatttatgcagtatatatgatcagcattcagcagcagtgcagcacaacacaagagctagcagtttattcaccatacacatatataaacatggaaagaaaaaggaattcttttttttaacaaaaagataataaatctaaggacatccaaatctaatttaacattcattgtgatcagcattcagcagcacaataggcagcagtttattcagcacacacatattatatactccctccgtttcacaatgtaagtcattttagcatttcccatattgatgttaatgaatctaggtaggtagatatatatatatatatatatatatatacatatatatatatatatatatatatacatatacatatacatatatatatatatatatatacatatatatatatatatatatatagatttattaaaatcaatatgaatgtgggaaataatataatgacttatattgtgatgaaacggaggaagtacatgaaggaaatttattgtttttaaccaaaaagcgaagatggatagatgcaacaaaaacaaattaagggaaaacctaattaaggagattgcaaacgaaatatccaatctaatctaagctgcgacttacgatagcgcgcgaagaagccatagtagtggggagattgattggtgtcgatgcagcaggcaaatcaaatactactccactaggttccttacaacaagatattagtcccctggcctcgatcagatcagatcatcagaatcggctccgcttccgcttccgcttccaattccccttccgattccgagcccaatacctgctcgggtggggtgagggaggattcctttcctcccttcttctgttgactgctcgagctccagctccagctcgtgaatcgtgatcctcccatggccaaggcgagaataggtggcggctgcagcgctctctcaatctctctctctctctcatagaggagaactagcgtaatagaagtcaattgagatcctcgcatacagtact

SEQ ID NO: 21688 - DNA, 22681 bp, Oryza sativa
ggctcacatgtcagcctgcactgtagacgacctgtgtccaatataagtatatatatataagtactccctccatcccttatatttagggacatatatataacttccacagttccacccctctactgccgctgaatttctgaatttcttttagaaataatactgattcctccgtcccaaaatataaggcataactactcataacacaaaaaccaaaaaaacatttaatcatcttcttggttgaatcaccttgaaacatgcaagcaatatgatttggaggtttgatgatataagatttaaacaaatcaattttataggaccaagagatgttaattaatatatgtatgcatgcctgccctatattatgggatatgagaaaaaaatggttatgccttatattttgggatggatggagtattttaataagaaattgtaaaagtatagatcgatcggctggcaaatttagcactgtgtcaaacacccatagttcaataggatgcatctcaaatggtcttaatatgattagctatgagtatggcaatttttttttttgaccagggagtatggcagattcggataccgttgttcgataggttgtttgacagatgagtcgaataacggttgctcgactggtttgctagcctctttttttttaaaaaaaaaatagaagtattatgcatgcactgtcacaaaagtagcatatcaaacaccctttaggcctgtttggatcccaccacaaaattttacaccctatcacatcaaacgtttgaacacctatatgaagtattaaatataggcttaaaaataactaattacacagattacgactactttgaataaaattagatgttctcttatcttacatgaataaaattaaatgtgacaattaccccttctgtaaaacttgctcttatctggctaaaagccatagcaggtgaccagccaacacctatgctttgacagcaagagatgcttcagatcaaagaaagctcgtgtgacttgttcattgttcaaagcaagggaagcaatacattacaacccaaaaagcatagcaacaggatgccacaaatgtcaggcttgcaattgcctacaagttcattgggaactgggaagaccttcatgccaaagtctagcgtcgcctctgccaattggtagatatgattttgagtgcatccgtgagatgtcctgcatattccaatttcctgtgctctccttatgtttccaagaaactatgctgtgtcatgcgaagtttctagctcagcaaggaattcgagttcgtaaaactgaccagccaacttgcatttcattgcttgtggtagtaaagcttgccaaatgattttgcctaggtgtttgtgaagaaaaaaatgacggacataattaagatgtaaaaaggattcaacacaactaagttagaactagaaaacactcatacaaatagtaggctaacaaaaaaaagtgaaaactcaccaaattgaattgaactgggaatggctgtgacaaaaatttggattccaagcaaagacgagctagctgattgacactgccagcgtcgttgcttgtacatcggaggaggtcgtctatgatccagcaagtcaagacttaccagatagcacaaaagaacagttgcatctgtgaccagtgaccactgatgagtttcctggaaaaaaatccctcgtacgaccatacggaaaatccagctgaagatccagagcaacatcgacatgcaaaacacatagacactcatgcttcatggccatttcttgtaccagaacaaaaataatacaagatttacattgatgcagtaatgcgcatgcgcacggctcacatgaaatgagaaaaaaataattcacattgaaagaatgttccacattctcatccacattcatgccagttacaattgtacatgtgcaatcagtcaggggggaaaccaacctgaaagctcagggctaagtttggtagagaccacaaaagatgaacgcgtgaagtaggctttgtgccttcttagtttggtcaggatccccacatataataaccaatgcatttgcatccccaggttttggatgatggacagtaattgtggcacctgacatttgaaaggtaacaataactcccagcgttagaacatcaaaataacaaagatgatgcgagggatcttgttatggcaagacatttagtacaatcattggttgaggtacaatcagcttttgtatatagcaccaattaatatggaaaattccaagaacaaatgaagatatattctttatggattgtcctagcccccatcaatatttcaacttcaaggacaaaatttttaagatacaaaaagacaagtttgctatgaataattattttttcacttttccttttaatttatcatttgattgccttttctcttcttttcagccttaaaacagagtgaatttgaaataggtatagtgaagaagaatgttttacatgttcttttaattttcatttcattttctggtaccagtaaatatggcatgatagtgactgttgcacaggctgtatgcatggactttgttctagagaaaaggacaaggcaacaagttgacaagggcttccactccatgataacaagtaaaaaaactggcatgtcctttgcatcactggtgagggcaagacaacaagggaagttagatgaatgctgaaaactaataaagcagagagtaagtaccttctttatctcagcaaggtcactgccattggctccacaaataaaacctatgtacttgcggggaataatgacttcagttgcattagatggtgtagccacttgatttgttctgttgagaagaacaagtcaaaacactgttctaagtaaccttctttagaaaggagaatttgccatttagttttgtttttcaaaatgggttgcattgctagaagagaactatatatgcttcgattcaatcttttgctttccacacaagttctcatgcatatacttttcaaagtcttttagcccctaaaagattaacagaatgagaaattgagaatatttccttttagtgaaaggtcaaagagaaagaaacaccaccaaatggaaattaacttaccctgccactgctccctttctgaaatctgcaggtggtactgtctcaggcatatttcttggagcttcactgtttggtgcctgcacaagatcagggactttattctaagcctacaacacctaaatcaacaagagaagtggtgtgcaaacttttacagttttctaataaaactctggtggcaaggcaaacccaagtcctggactttgatgtatttttttacgacaaatgggctttgatctttttatgatgctaagttaacatgagccaaaataggctgagttgtcccagactgcccagtcctggatccacccctgctggcaagcatcctatcgcttgtcagcaggacccgaatgttggtggaaattcatgaaagagaccattgtgcactgcacacccaggaaaaatgctgaagaacttctgcctaattccaaactgcatttcccatatatgtgtttcctacattctagaataaacgcatagtaagttacctcaggagcccaggcacttggtgatggctggtccagaaaaggtcgaggaccacctccttgttcacaaccatatgagtagggcatcctatcagcacccatgtgctccattgaatgagggggaggtggtcgatgatcgaccatatcaaaaggacccataggacgatcagctctgaaagaaggcataggatatggaggcatgcctccagtgggatgcggtggtgctggttcttgtcttgggtggtaggtggagcgtttccaccaggtggatatgggggcatacctccacctggatgtggcttcatgggaatgatgacatctctaatccttccagtgatatgaagcaatgcatcctgaatggattgaaaactacctgtgacctgtaagaagaaactccatagttacatttaacacctggtcagcaattgtcaagggaataagaataacacagctatgaataacctaagtaaactttcttaaaaggaagattcaatgaaagccacttgaaagagttgattagttgtgataaactgtggatcatttttcaaatggataacttgtgatgtgaaacaggttggccaaaattaccacaaaagagttacagcatatgccacaaagtaaacaattctgctttcttaaatttaacaggacaaagatattctgtagtttgcttctttgaatacgtataaagtagttcacttggaaatctttttcaagagcatgctttgcatacttgacatttcccaacatacttgaattgatcacatattcacagtatcacactgaagtctgaagaccttatgctcttagctattactggtaaacaaagttcacctcaacactgaacctttaatgtgattcagtaaggtgggaccctttatagtagtgttgatactttacattaaccaacacttgtatcaaacttaaaatttttgctacaagaccacaattaaagcaaagaacacactataactaggtgttattagtagattatatgcataacgatgaaaatttcgaatggacatgtaaacttaagagaccactgcggcgcacataaaacatggaacttattactgaaaattcatagcatgcacaagaacataaaatggagtggttgattactataacattaaatacctgaactagctcatcatttcgttgtgcacatcttggaatttgttcattcccgaaaattcggataccagctcctgttatttttctcatttctgcgatgatagaaccacctttgcctagtaagcaaccaatatgctgtgatggtacaagaagtcttgcagttacagcagaacttttatccatcgatgactccgagattctagaatgcacccgaagtactgcatcctgagctggagaatgcatcatctcagaattctgcaacaaataagattaaacccatcaaaaataactccagacaactgaaaacctaaggacaaaattaatcgcatatctcccatcattgttggcaggacaccgatgcacatggcatgccaatgtttacagatgcacagatctatattgtacgttgagaaaataaaattcactctccctgcataaggattttaatcacttgaaattaaacagatacttttatttataggttcagagacacacctcatgtgcagatatcacaattacacgttcttctgaatcagaattaggctctataatcttaatcgaagcaccagtttcactttgtaatgcgcgaatagttgaaccaccttttccgattatgctccccaccatttcattgagacatatcatcctgaagactatctcttgttcaacaaagaatctaggaccgggggcagccatattacttgaataattccttgcatgataatcaggcatggatggtggtaaatagcctctttgagaatgaggatctatgccaactgggccaggaggcccaaatcttccaggtggaaagttgcttgcatctggcctagggttatcttgaaggcaggttgtaactaacaataatgctttccttactgcagaaaagttcccacttatctaacaggaaaaggttaccgtgtcagaatgacctgaatttttaataggtacccaagttaaagaagaaaaatgtccatcttgagcatttcaaactataaagccgttagcaatgcaacacttaagtatacgggaaaggtaaaaagaactattacaattttagtatatttagaactgggacattatgatttcctagaactacataatcagaggtgcggaacttgctcataatgaatttgacttctatgactctatgcaacaaaaataaccaacctttaattatattttctctacaaactccttatcgataaaacactattgtaataaattatatgaaagacatcacccttatgttttcaattgctgaatcgcaataagagccaattataaagtacaaatcaggcaagatagctcatttcgaacttatttgttcatttgaacaagatgcatatgagctgaaagaaatacaggacccgtaacataaccatgaatgaactgaaacttatcctaccacctatattaaattatcatcctatcaaaaaattgccttttcattagtttgcatagtgcaatacaccgctcaaactcccataaacaattttagcagttttgcaagcaactaaggcacacgatccacctcattataagtttgaaccacctcatttcatcataaatttctagctaacggatgaacacgccgggcgcaccgaaaaattgtgatgaataatccacccacgcaatgtcaggggggatgattagatgaatatagcacaaaaaagaagaaatatctgtgagctgagttgagatgcgtacatggataagctcgtccaccggcgcagcccagggagggagctgatccctgttccggaacaccctgatctgcgcgccgctctcctgccgcatcctctccaccgtcttccctcccttccccagcacgcacccgacctgcccgctcgccgccagcatccggcagcccaccacgccgggcacctccctctcctcctccccggcggcctcgtcgcccccgaccctgtgccccacgacccgctcccacgccctcacggccacggcgggggcgtccggcccggagatggagagcacggcctcgtcgccgacggggggctggtccacgtggaggtcccgcgacgccccgcggagcgcggacgcgcggctggaggggcagaggatgcggagcgtggtggtgaggcgcttgggggcggatggggaggaggtcgaggaagaggccggagccgccgccgtggcggcggcggtggcggcggcggagttgggggagatttccatgggggtggacggttgagctaaaaccctacagcttagctaacagagaagaaatgctgacctctgcagttttaccgcaagtggtggcaacgggccgggtcggggccgggttgggctagaacgccaacccggatgggcccccaaaccccgggtcaagccccttaggagggactatgggcctgttcgaatgactggactgcggctacgccacagccagcacgaacagtgtcgtaggcacaaggcagctgctgccagccagccagcagtagggtgtgttgcctgattttacgcaaatctatatactatcaaacaaatgagagaatagtattgttggtggttattctgctactactttactactttagtatgtttaaaaattagtccttaataactttttcgatactatacaatagtataatatttgtttgaatttaatatatattgacataagcacgaaaaaaacaagaaaattagtattttacccataacaaagtatggttactttaaaggatacagtacaaatagagaagaagttcatgatatgatagcctcatccataattctacggaagcaatgaatcgtcatcctttgcatctcatgataaagtttcatcgctatctttacttcctatacttctgtatctctatttcctatactctctacatatattaaggaaatgataatttaaactttttcccaataaaaaatgataggcccatacaatgctaggtgcaaaatgtgcagcttggaactacaagggaaaacaagcatggcaccgttgtcaaacccatgttacagagggcgctccaatagttgtcgtaacaaatgaaaaacttctaactattatcaaatctctctgctccacttctttgattcgggagaagactccatcggtgttgagagcttcagttcgaaatgtttgtcagttgcattcttttgtgatgcatccttttccattgtagatatgcacatgtgttgtaaaaccctcaaaccctcaagaaaaatatatccttgatcctacaaatgcaattgaccacgcactttctttcttcaatttcctcattttttttcttctcgtttgcaatgtacatgcacttcaatagtggtctctcaataccaggtataaaaacataacgtcataattagcgggaacaagctttaatttgttttgattccctggttattggagtaatgttgtggttagaccgtattaggaactagagatctatgtctcaagctatcttgacctatcattctcgatgtaaaattcccgtgatagtcaatgtggacgtaaaatgcaccttcaatttgtgtgatgcacaaccataggatcaccttcgatgtcacctaggacatcaaggtcgtcctccgccgtagcaccaactattggaactcgttggtaacgaaaatctttcttactatcatgtcttaggcagggcaaggcaatcagggcacacacttgcgcctgtgaagtgacctccattgatatcgtgcatagtaggctttggtttaattgtgtaatatccacagagcctagcccatttctccacagccctctacttgtgaatttactctcgttcctcgcgatgaggaccccatgccaatttgctcccctctagctattacactcttcaattgtccaacttgcaagttgcgagtctttctactctaaactctgaactctgaagtctggaatccccttcacactttcacactttcacagccattgcgtctagcatcctgataataagttttctagtttttttttcttttgggattcactgttacattctattttttttttctgttttaaggatctggtttagggtaagaaagggctgaaagaaaaaggaaaaaatatattgctaatttatttgattattcaaagaaacatctatatatataaaaatctttacggtgtcattaagacaagtaactgaatcaaacagggctcttagctcaatcatacttggcttagtgacatttgcagattcatctctgtttcttgagcaattgggctgtgaaatgctcgccccagaaatggaacttttaaccacagacatatgcttattcctcttcgtctttttttggcgataactattttattttagggagcagaaagcgagcaaatcatctacgagattcccttcgggcacctaggagattccctgcgagcgattgtacgaaagtgacgaaggaaggaccacgagattccgtgggcgctacgaacgcgacgaacggccgagaaaagaaagagtagccgttacgaaatttggtgacaataactgtttttttttttgcgcaataagaggattaggcttgtgctgggttaattagcatgtgggctgatcagtaagagccagtactccctccgtccaaaaaaaaaagacaaaccctggtttccgtgctcaatgtttgaccgttcgtcttatttgaaaaaattataaaaaaaattaaaaagacaagtcatgcataaaatattaatcatgttttatcatctaacaacaataaaaatacgaattatagacggagggagtaccacactgccacagtagggctctgctgctgtctactgtgtattgttgctgcagagtggccgtagctacagccagccagttgaaacttgcagatatcatttcgaggttttctaaagcttatggtaataatggtatatgtggggctggtttgctttatgacctaaaattgaccttactaatttttgtcaatgtcaaatttttgtaagttttggcatggctaatcttggcaaggtaaagttgtgtttggactgaagccaaagcagtttcatttcattattgaaatggcctatttttttaggcatgccaaaatttggtttcaaaccaaatagacactaaacactattgaaattgtcaaatattggcaatgccaatttaggccacaaatcaaaccagcccatggttttttttactccctccgtcatataaaaaaccaacctagtaccagatgtgacacatactaatactatgaatctagacatacatatgtccagattcgtagttctagaatatgtcacatccaattctagattcgttttttataggacggagggagtacttacctactagattattgaaatgtgttctttgttatacgtttctaaaaatacatttttaccaaacaaagtttcactgtatttttcaatcagttggtttaagttatttgttaattttatctctaaaacatatctttataaccaaatcgataatccgatgcaataatccatttaataatcaaacttttcgttaccaataatttggtaaggccaggaacgcagctcattctaaatgccacctaaactaccggggctttcacacacctcacgcactcgacactttggaacagaagacaatagtgcatcgcaggtaaagaaaacgtgaacacacctcacacacacaaaatggatatcctagtctggccaaatttttggatgatctcatcgagcatttttatagatatttattttcgaatatcttatccacatctactcatcagcctaatacactcaaaagttaaatggacattatctatctagaaatatcttttccaccaaacacaccataagatgaacagatccacgtcagaaccagttgcatccaacagaagcctactcagcatccacgtcccagtgaagacagttaaaggcgtagctcccccgaaaaaacaattaaaggcatatctttatatactcatgatagacatacagcgttcaagacacttttataatattatactacctcagtcgctttgtcttatttcttagttaatttttttaagtttaattaagtttaaagaaaaatatagtaatattttcaagttaaattaacatactagtgaaactaagttggtgttatagatgttacttttttttataaacttaaataaaattaaagaagtttgaatagaaaaaaaaatcaaaacatcatataatatgaaaaaagagtaagattttaaatatttatatatttttaaaaggaaaaaaagatagcaatcaacgaaacgacgacactaccggtttaccacgccgcccacgcttcgccagggccatttcgtctttaaatacggacactagaccagaggcctacctgtaacctgttcgtccagctccaaagtctcaggcgcacgcgcactgacagcagcagacagggcgagcatggcggcggcggcgaacaacggcggcgagggcggcgacggcttcgacgtgatcgtggtgggggccgggatcatgggcagctgcgcggcgtacgcggcgtcgacccgcggcggcgcgcgcgtgctgctcctggagcggttcgacctgctccaccaccggggctcgtcgcacggcgagtcccgcaccatccgcgccacgtacccgcaggcgcactacccgcccatggtccgcctcgccgcgcgcctctgggacgacgcccagcgcgacgccggctaccgcgtgctcaccccgacgccgcacctcgacatgggcccccgcgccgaccccgcgctccgcgcctccatcgtgaacggcgccgccaccgaggtcgcctccgacgcggcggcgccgtggccgtggtccggggtgttcaggctgcccgaggggtggacggcggcgacgagcgagatcggcggcgtgatgaaggcgaccaaggcggtggccatgttccagtcgctcgccgccaagaacggcgccgtcgtgcgggacaggacggaggttgtcggcatcgccaagcaaggtaagacaccgatcgatcaagctagagcttagcttagcttagctatgtcgtcgtcgtcgtcgtcttcctctcgcccaaccaaccaaccaaccaatctcgttggaagtatccgggtagctcttgcatgattgcaactttgcttgcatcacgtgatcagtcgctgccaaccaaaatgccagcggcaaccaccatgcgagagctgagtgagctcctgctccttgcgggaccattgttcttgttgaatagtaccgcaggagagaagataaatattgaacacattgtactgagtcttagagaaccggtatacataagagatacatatataaatatggggaaaatatgtagtgcaaaccacatatgtagtggaagcttggaaactactgttggatcgagcaatagacgtccgagattcgtccacgtcatcgtgagttaaaatttaactcgcagatcattcatgagttaaaattttactcatggtaacgtagacgaatctcgaatgtccattgctcgatccagcggtagtttccaagtttttactacatatgtggtttgcactacatattttcccataaacatgggaggagtccacataaatcaatcctattataatatgactttaactactggtcgttgttcagtctggacaatattggaacaggtagccaaaaattagagggagggggttcctaatggatcgctattattggtagttaattaatatttgaacaaattaagcaatagttaatgccgtttactccatcaaaattcctcccattctaattttgtcactcggaaaatcaattcctcccattccaattttcctcctatcaactaactaattttcctccatccaaattaatgcgtgattttccatcttgtgttcttatctcatctcaatggtttacacatgtgcatatagtttccccccaatcttctactctcatatcaatactgtactatgagaatcaaaatattcgtgctagtattgagagtgtgtcaccatgacggtaacactactgatctcttttaacatgaataaatattcaatgtaatttttattgccgtaggaaaaacgtctatcttaaagtttacaatttactataccttcatagctactactatagaaacggagtcgtcctcctttcgttctctcctcccactgctcgtgcccagcacaacataagagcataaaaggaacaaccattagatcacattcttaacctattctcagccatataaacccgttgcaatgttcagtcatgttactagtatatagtacaaaaagaaaaaaaaattaaatttagggcctaaacctaacattaagcgtgcatcacccaacttccaggcacggccttggctctatattcccaagtcagacaagggtgaaaacaagaaatgtattgtctcattatttaataaataaataaatctggttagcatctttgttattgcattattacaaagcatgtgtcagcttattgtacttttaattagaactgaacgtctgttttaattttatagcccccctattgcccacatgacataaactcagataggtcagtacaagattctagtcaagtagctatttttttctcttaaaaaacttatttttagtttttttattcaaactgcaaaacctatatatgtgtcaattaacaaagttcttgatttggttggacatgcatcaggaaaactatattttaaaaaagaaactcgtcttttataaagattgggtaccagcaatccgttattgcactaaaaaaacatttttcatgggtttaatttccattccatttttatttatgcccttcagaatcatatatactagcttgcacataatgttagtgaaatccattagctgatttagaagtgaaaaatcttttactccattagcatatcaaacacttaatttgatcaggagacggatcgatcgtggtgaagacatcgagcggcgaggagttccatggcgccaagtgcatcatcacggtgggcgcctgggccagcaagctggtgaggtcggtcgccggcgtcgacctgccggtgcagccgctgcacacgctcatctgctactggcgggcgaggcccggccgcgagcacgagctcacgccggagtccggcttcccgacgttcgccagctacggcgacccgtacatctacagcacgccgtcgatggagttcccggggctgatcaaggtggccgcccacggcggcccgccgtgcgacccggaccgccgggactggctcgccggcgccggcgccggcctggtcgagccggtggcgcggtggatcgacgaggtcatgccgggccacgtcgacaccgccggcgggccggtcatccggcagccgtgcatgtactccatgacccccgacgaggacttcatcatcgacttcgtcggcggggagctcgggaaggacgtcgtggtcggcgccgggttctccggccatggcttcaagatggggcccgccgtcgggaggatcctcgccgagatggccttggacggcgaggccaggacggcggcggaggccggagtagagctccggcatttcaggattgggcgtttcgaggacaatccagagggaaatctcgcggaaaataaggtcaaaaattaggtcctcacaggtatggtcgcctgcgaaattggtgcaacgtgtgaaatgtggttatcagtagggggtttgtttaccgtaaatctattgaacattgtatttcataacttctatgtgtgctttatactcttggatattggtagattgtaataatttgcatcttctctgtccttgtgtataagattcaaaataaagttgttctgttgcatttcttcatctttttgcaaaacacaaaatgttcctcattttgatcttcactttttttttcctcgggagagaatcacactagtgctgttttttttttccctcgggagagaatcacactagtgctgttcctattcccagtcctattcatggtagatatgccgttggtgaattgaaagagacttgggtgttcgccattgtcggattcaggcagtacacgccgcaaacctcacaaagttaatcctttggaaacaaagggttattttggaggaattttgaagggattcaattctatagaaaattttctcatgtgatcctttggataaaagaaatagctatctaaaaatcctatgaaattcctttgggttcactctaaacatacataggggatttgtaggaatttcaacataaggtccaacccgtctctatctttctctcttctaattcctgtatttcctatgctccgttcaaacagttacatttttatatttcaaatgctcttttaatccataggattagagatgatagctccaatactatattttttttattgttcctacattttaagaattctgcattccaaatgggccctctgagcatgaggaatatgctaggatttgaatagctccaaaacgttgagtctttctaaatacgtcacgtcttgctgcaactatttcttagttttaatcatgcatgttgcatggtgaagaattatcacttacatctagctataacaacatgtgttacatgctagctgatgggtctcattcccatgactcatgagtgatgagtgcgtcaagtcatgtgctgagaaagtgacaattcacttgttgtttttgttaaacaatcaaagagatgggcacaatatctttgtatcttttcagtctgatgtaatggtgcaagtcctaaaaaatcagtagtgacaatcgaattgagccacacttcggttgcttgtcctcattaggtggcatcgatatcgcacaagtgaattaatgcctatcgatctgatctgaagacttggctgttttcaatttgcacaggtcatgttcttgatcttatcatttgatagattgtcgcatagtgcgttgtcatcttgatactatccaacactccatctgtatggagtatctggtgagacagtgatgctttagctttcgcagtacaaagctgtctctgttattgatgactggtacagtaggttcaagactgaagaacaacaggctagtggagatgatgaaatttggagtgatggattgttggtgtaattttcagaaggaaaaatcaggccggtcctgtgcacagtgggcacttggcaccattgacttgacctggacttggacttgttttttttttttttgcagggactggacttggacttgttaaagttcagcgtaatcaaatcagtttgggctgtgtttagttcacaccaaaattgaaagttttgttgaaattgaaacgatgtaacggaaaagttggaagtttgtgtgtataggaaagttttaatgtgatggaaaagttggaagtttgaagaattattttggaacaacacacggcgcaaatgtctagctgaaattcagtaaattcagttgacgaagtacatgcatgtgtctcgtcaatgtgaatatttctgaaattctgtccatgactactaatgtttctactatctagcaatatatttagatcttctgaacttgagtacaaagaatagaaaattaatgaatttaatcactgctaatatacacgaagaataggactaatctctgaacttctcgatcaactgatctctgacaagccttcttgatcgtgaactcgtaatctcttctttggtgcagttaattactactaggagatgacttccattaatggtgtgctcaaatttcccaattcttcatgcttcactgtcagatcagaaaaggaagacgagcagtagtagtagcagtagcagtagcagaagccatggctgggtgcatcgtgtgctcgccgacgacgccgtcatcgtctcaggctcatgtgctcctccaccgccgttgtagtatatcggcggtctactgccgccgccgccgccgccgccgccgcggtaagccggcggcgcatttccgccatcgccgtcgatgatctgtgctccgaggaacacggcgtccgacttattgatcctgcagcaagaatcacacagctattaaaatttcaggaatttcgatcccctcgaccagaaattatttcggctaaatttttgtttgggtaagacaattttcattcagatttaaccaaaatttgccctaatgtaacctttttggtccgaaattttcagaaaaccctgcaatttccgaaatttcgcttcaatgggtaaatctcagcaattccacttctatcggtaggttttccacagttcccaaaattcatgcaatttccgatatttcacttccattggtaaatgtccgcaatttccgaaatttcacttctatcggtaagtttccagtccctgaaccaaaacctgtccaagtgctaacttttttcaatccaaacatttcccgaaatttcgcttctatcggtgtatttccgcaagtttgaaaaattctcctggatctatcggtaacctgtccaagtgttaacttttttcagtcctagaatttcccgaaatttcgcttctatccgattttttttcgcaatctccgaaatttcacttctatcggaattttctatcggtgaatttccgcaatttcgaaaaattctcttagatctatcggtaaatttcagaaatttctcttctgtcgtaaatttcggaaatttggcttccgtagctgcatgcgtacccggaggtagggaggcagaaggcgatggtgtagtcgtaggcggccttgcaggtgaaggtggaggtggagtcgtcgtacgcgtagctgtaggcgcgcgggcacgccgtcttgaagatggccgagtacgccgtcggccggcacgccgccggcgtcccgtactccccggcgcagcagtacctgtcctgcccgaacgcctcacacgcgctcctgcacgcgatcgccccgccgccgccgcactccacctgcaactccctcggacacgctgcacacatcgtcgtcgtcagctccggcaatggcgaagtggcggcggcgtggcgcgcgttcgtgcgtgcacttacagcggttgaggtcggccatgcagccggtggcgttgcaggcggcggcggcgcgagggatggcgacgacggggaggttgtagccgtcgacgaggctcacgtcgtagaagtcctcgccgccgcccctcccgagggtgacctcgaacagcgtcgccggcggcgcggcgccggcgccgcggcactccacgcgcccgccgcagtcgcccgtctggcacacgccggcgccgtcggcgtcgaacacgcaccccgtccgcgcccatatcctccccgaccaccccgccggcgccgccagctgcgccgtctgccccgggtcaagccggaaccccgtcgtcgacagctgtggcgtgccggcgccggcgagcgtccccggccatatcgggtgcgaacaatagttcgctatagtgaacgtcatcgccatggaactgcacgaccaagaagccgccattgccaccacaagaagccatagcttgcaagctcttggctctcccatggctcctatggctcaaaatttgggaattgatgttgataggaagaagattgagcagggaaggggaagaagacattgagagaattcttgcaagatttaaaggtgcaagtgccatgatgcattgcatttttgcatgtttgcatgcaaagaaagctttttcttggtgtgcttggtttagcatgttgcacggatggggtggcctaggaaagaagaaataccttttgggatgatgcaagcttatgatggtgacatgatcttagcatcaagagaggtgaatcttctgatgcttgtgctaatgcagataccttaattactagtcaaacatgctatgttttgaatactctgtagtctgtacacagtctgaacatttggacagagtacatgtttgtgagtttgagcaaccgggaaaatggaaatgtacagaatacttttcttatttggatacagaaaaaagacttgagctgaactctattacagtattagaatcagtagtcaggataacagcatgaagattctgaatttgctatcatatccatgcgctgcaagcctgcaattctcattatccttcttttttcttagtctttatttgggtttgatttactgctcgagtagctgctatctcagaacattagttcgctacatgtagttctgaacacttcaacctatcggtaagcttgtaaaatttatgatccatttttgcgtcagacatgctcttcaattccaatttataaaatcaaggtgcaagactgcaaattcattttgtctacaaaaatgtcatgtgttttgtaaaaagcgtacgatccatttcatacaagattctttcaggaggcaatcatgcctttggaggaaaactgcaaggaaggaatcatacaagaaaactatcaacatgaacaaccggcacaaagatcaatgaagatgacaaaagatgcacctttttgcagttccataaaatcaaataaccttgcaaccagaccagataaagaatctattctgatttgattgcacaaaaaggaataatcaagctggaattgtgacgcttatggtagctctctgtatattgcctacctttcaagatacccttgactgaacaaaacatgtgtgaactgtaagctagtccatgagaactcagaaaaaaatccatttcagaaagggttgagaacagctaactcatagtgcagcactacgaccttgtaaattattagaaaacaatggaagattacatgattaggaagtttccatattgtacagtactcatgatcttatcagaggcacaacaaacaagtggagacctactgcagcatcactcctctgacacaggttcctcagcaccaccttcgggaacattggagtcatcaacaaccgtgacaccctcaagatccaaggggcgcccagtcatcggatgaattgggcgcctatcacgaggtccaccctttcgagccatagctagcattggaggtggaggcagaagcccagctcgaaaaaggatgcgctgcacaggatctgatggctgagcaccaacagacagccagtacctgcaacagaagtataattgtatgctgttacatggccttgcaagggagggaaggacatcatagcattcttctagcaattaactcaaagaaagaaatattgggaagatcagactcttgactctcgacaaggtgggcaatgaacactggcaactagacaatacaggatcaaagatactagttctgctattgatgaaactaagcaccatgcttgaaatgtctgaaactttatatctgtaattttcttccctgttacggatactgttaagcaaatctcatatgcttaaaatctctaaatccttttctgctatggatggatgccagtaagcacatctacaagctacaaaattcagaacccttgaatccatcattttctacccagagaatggaaggcacggatggttggaaggtacatggtaattggcaatacaattaaatagtacacagaagcaataacagcaccccaactcctggaacgaagatcgcattacaatgataactgaatcagtccattttgcctatcaaacaatcagtttccatcaaagaatcaggctgctatagcaatgtcagtcctagactagcatcagcaaaagctccagcacgccaatttttctccagaggaaatactagaacacatcaaacactccaaattacgagcataagcaaatgaaactcacttgaccctgtcgaatttcagccccatcctcttgccaccatccttccctgcaatcagcaacagaaagcacatactcctccatcatccatcaggcattcaatcacaagcttacagccaaattctcacgcacgtacagaaatgtttcacactctactaatccctctccaatctgatccgattcaccatttcaccaagacgttgaggccaacgccaaccaacggggcaaagacaacactcgagaacaagccgatccaggaggagcacgagggggggatatggaggaggagggctcaccggggagcgggttgtagtagccgaggacctcgaggtgcttgccgtcgcgcggggagcggctgtcggcggccatcacccggtagaacggccggttccggcagccgaaccgcgccagccggatccgcaccaccatgctcgcctcccctcgcgcctcctcctcctccgccgccgccgccgccgccttcccttccccttctccggctcgggtcgcgtcgtgttcactcctgtgggagcaagggttttggatttggattctggagaaacccaacaaaaaaagaagaaaaaaaactcagcgggctttacctctgtgatgggcctgatgtcccatagagtatgggccttccagctagagcttgttcacacgagacttctttctgggctttagcccatgggccaaactccggcccacttatggttatacttggttaggctcctgaatggttattagccatttaagctgacttatgcattggccaatcaataattcaatagtagctccatccattcagtgatgaacaaaattaacacgataaaagctcacataaactgtctgtaaaattaatgaaaaaaatcaatagtctgtttggacaatgtgcaggaatactgaaattgcacaagaatcggcccaaaagaagggaactgacaaggccagaattcatttgtagttctctgctcttaacacatttgataacctaactaatggaaatcaggaagccctggtctgtgttttgctgaagtctggaggcctggagaatatagcttgttgctcactcagtcacacccaattgatcattgtcatggttggtagacgaatgctttttcctgcacaaaagatggaagcacacatgctgaactttgcccaagaatgagtgcagtaagaatggaattggaagagaaggatgaggcacaaaaaactgaacaagcaaaaggcttacttgtttgtattggcatcgctctctaacaaaaccgaattggcaatggtattttgttgtctaacagacacaaaaagatccgtactggcatatggcatgctttttctcacctaagagcacctaaaagtgaaacaacctgcatgtaaagtcattttcttgctatgacaaacagctaaggaatctgtgtcaaaacaaaaaaactgattactcctttagggattagcatcactgaaatcatgagagaataaaatgatgtcttacattcaatgaactgatgcatcaaggaccttgtacctgtagaagtaggacccttcagattaggctgctccatgtttgaagaataaaactgtgatttagtcatccaaatgcattcatacatgttaaagaaggcaaaatcttttccatcacatacttttcctagcattagcatgaacaaacaattactgcgaacgtcaagaaagtaacagaggttcaaaaatgatataaataaattagtagatgatgcctaaaaataaaaacgataaagaaacaaaattttatatgcatgtcaggttgagagaaactctaaatgaggaagatgtattggtatgtctaggtagtttatttacccttctccctttcttttctccaactcccaatgtttaactaagatagtctatctcgcattattccacaggcatctattgccacccataattttatgtcccatttggtaagaaaaatgattgattgctgaacccagaagtactgaattgaattattgctagacaggttacttgtgctgccaacaatgtccatattgagtactctctactatgctactgctagatgtgaaaaaatatatatactcacacgttttccttgaatgtcttaaaaagcaaagagaaagtacacaaataatacaccaggaatacgaatagaaagagatgccataaaaaatatatgttctctggaacttcagtaatgatcctgtaaaatcaataatcatgaaagctacccctgtgatgcattcatccagaagaaaactagatactccacattgaaacttccaaatggctagccaatgtgaatttcataattttatatctctgttagtttctgtgtgcatatatgaatacttagctaacaaatcttggcagtggagtaaggatgtcgacaacaagcgattgcgcgcct

SEQ ID NO: 21689 - DNA, 562 bp, Oryza sativa
  unsure (1)..(562): unsure at all n locations
tgattcgagttcgnnnnnnnnnnnnnnnnnncaacgtagcccctctatcagaatagaaattcaagaagtaccatttctggccaatcttatcctgttagaatccaaagaccttgatatcatcctagggatggactggttagccagatataaaggtatgatagactgcgccaacagaaaagtaattctcaccagcaatgatggtcgagttgtaactgttcatgcattatcttctgagtctttaaggtcaagtctgaaccaaatgactttggaagagattcctatagtccggagtaccccgatgtgttcccgaacgatttacttggtatgccgcctaaaagggatatagagttcagaatagatctggtaccaggaacaactccgatccataagagaccttatagaatggcagccaatgaattagcagaagtcaagagacaagtagatgatttgcttcagaaaggatacatcagaccgagttcatctccatggggagctccagttatttttgtggaaaagaaagatcatacccagaggatgtgtgtggactatcgtgcactaaatg

SEQ ID NO: 21690 - DNA, 39360 bp, Oryza sativa
caggctttctaggaggtggatgagagtgattgagtgtctgcagttcatatgccttgattacagagattttaaacattggaaggttgagaaatttgctcgctttgtggacaacctattactcatccgttctaaagtagacctgcatactttccagctttattggtttcattatcttccactgaactgcaatgatcttaggaagtggatcctctatgcggtgaagcacaatgttaaagtgcttgatgtggaactggatatgtatgataaaacggccttaccgtctcgcattttcacctgccgttcagttgaggagctaagtttgcagatgggagaagcccctgatgaagatcttgaacacgtaggccttgtgcttccggacataattcaacttccttctctcaaaaagttgactctctctgatgtagaagtggaccagctttctctgaaccaattcatcggtcggagccctaacctagaagatttgcatttgataaactcggcaacatatcttgatctgattgcctccaaagtgctaaaaaggctaactcttgatggcttcatgcatgggcccaaaagattcacaatttccgcccctcatctcgttcactttgagtgccagggttgtgcactgcaagatgtttcttggggagagaaaccatctctagagagtgcacacatagatacttgggggaagaaatatgatggtgaatctgagtttattggagtacttttatctgccaagacactcgcactatttggttctgacgtcaaggtatattcgcaaaagacaagcctgctgtcttttgttacttctctactcttttgttttgcaaaaatcttgactatatttattctagttaactactctgaatgaaaatgtgcatggcttgaaactataccaacttggtatctagggcttgtgtaaccgactagaatcttggggatttgatatggaaaaaagggttctattctggaaagatcagatcatagctgtgtctgtgtctacttgctgtatatcttttctaattttgcccttcgtatatgtgtcctgcaaaaagagtaagtttgctagttcagtaattagtagttcctttgatctgttagtttctcccatacaactttcaaagctgtcagctgtagtatgaaaaatttgtacgatatggtctcacggtaatctcatgggatgaatgtggaattttctttcacatgtcaatattacattgttattatgcttggagtttggaaatgtcctggttttagttcttagttatgacttgctcactcactcaatacaaggttatgttggaaaaggagctgccggcatgtccagtgtttgagaggctcacaactcttgaaattggtaagtggtgtttaactgaggatttctatactgtgcttcgtttccttcaactttcgccgagactaggagaactgacattgatgcaagaggaggtatgccgcacgtaaaaatcttgcatcatattggaaattcctcattaaatacacccctctttttatttatttcctgttatgtctctagcttcctcacgcagcaagaaaaggagcagaaacagatgctatgccaattgatggaatgaccttccaatgtccgttccttgagactgtcataatacaatgttccaagggcgatgatgggatcaacaagctggtgaatgttctggcagcaaatgggattaacccaaagaagatacaggttaatttctatgaagatatcgaagagatggagcgggctgagaacaggcgcatcatagaggagcgggagaaggagctgtgcaacttcgagaagatggcgaagaaaaacccagaatgggtcgacgaaagccgttatgctgacagtaaccctgaaactgatagcgatgagtatgatgatgactacgatgatttctagagtcctgcagggtgtgcttccatcctttcgcggccgcatgaagcctgcattttatcttcccttggaactgacttggtgtaatggtgttagagactttaagcatttgcctgtttctgtttattttgtgctcgtgactgctggactataatggagcaaacaagacaatttgtaggcactaatcctttgcggtttctgtttgatcatattgctttctccatggtacctctcagccttttgctgctcttgacatatcttgagctctttgaatttgaaagtgaacttgagagtgttttgttacatgaggtcgaaaatcaaaaacaaatttataatgagaaaatatcattggacagaccaatgacaaaccagttgtccaatcccaagctgactggcaagatttggggtcggttcaagggagccgtccgatcgtccgttaacggatacgatttagtcagaaacaattgcgaggaattttaacgaaggcccttcttgtcatgggcctcctttcttgtgcttatgttttggcccagtagcttcatacccatacccccaagcaaaacctagccgctcgccgcctccgcctccgccgccgcgacgagatggaggtcgacagggccgcgagcgccgccgctgcgggggagtcctcctccgccggcgcgatggcggtggagaagccgcggttcgaggcgctgatgccgagcgagatgagcggcgggaggccccagttccggaaggtgccggtgccgcagcaccgcttcgctccgctgaagaaggcgtggatggacatctacacgcccgtctacgagcacatgaagatcgacatacgcatgaacctgaaggtagataaacccgatgctaaaaactcactcttggttgtatacttatgattctgttgttcggggcctcaaattgggctttcgtgtaatatgtggttgcgaattcggtttttaaaaaaaacgtggttgcgaattgcgaagggtgagacatgtcctgccaggcttcgtgatttttgagcatgacgccggggtgtaaaagtttcatcttagacatttacaggttaagcgattgtgtgaaccatatagtaatagttagaacaattatcgcagctgttacaaagttggtagtgacatgcttggtgctagaggatatcttagctggtgctaggactaaatggtggtactgtttagttcagtggatcatggtgtaaaagtgtgctccttttatggccattccttatgttgtagattcctcattggaactggaaagcctttcatggatgcgtctggtgtaagagctttcatggatgagtccggttttaacaacaaagttttggcaatatgactgaatataggaatacaaaaagaactaagttagtattgcttatagattcaagtttgccaaacacttggttatttgtatttcgattcaagtttgccaaacacgtggttattagtactatgaatgtactatgccaattcagtaaaggaaagtgatgcagaataagtacaaatcacaagaagaatgcaggttgtgtctaaaacgtgtaggtaaattggttttcttgtgaattttcagttattactaaactcgaatggtggctaccatgttttctctgatgttttttaggtaacgcaacgactgccatcagtgcttacattattttactttctgaaaaagaaaatcctgtattaccattttaatattgaatgctcatgcctgcactgtatccactatcaagcttttcaacctgtttctgttatcccaggcaagaagggtggagctaaaaacaaggcaagacacaccagatgtgagcaatcttcagaagtgtgcagacttcgtgcatgcttttatgcttggatttgacatcgcagatgccgttgcattgctccgccttgatgacttgtatgtggattccttcgagatcaaggatgtgaagacactccggggtgagcatctgtcacgtgctattggccgtttgtcagggaaaggaggcaagaccaaatacgccattgagaattctaccaggactcgcatagttattgctgacacaaagatccacatacttggatcctttgttaacatcaaggttgctcgggattcactctgtagtctcatcttaggttctcctgctggcaaagtgtattcaaagctaagggccgtttctgccaggttggctgaaaggtattaaatgagttttggtccaatcatatagttgcagttttgatcttatagtatgttctactagctgatttgtgtgagtgggcaacttattgtaatgttccgatgaataaccaaatgtatgctagtaatagatttgtaatgatatgccttttctaccgcctgtttgagggaatggtaagtcgtgctatgatgtactgcatgtaaaatgtttacatccagctgtgccactgaaatgaattcagtgccagaaacctgataagttgcttcctagaattgtcaccccgttccttcagaatgcaagaaatgttgatatcgtcaagctggtgatggtcgtttgttcttttgtcttgcctattatgctccgtcattctggttttagttcttattaccggtctattagaagaagccattgcaaatcttgtttgtgctgagaaactctgcctgtcaacactgcacaaattactaaccaacaaattgagattttttttcgtctggtttggttcgtgtggaagtctaaaaatgacttgtgctgggatgcattttcggatgcttgactatgatgccaaatagaacgtgtaaaaaagaagtgactagtttactcccttggtcccctgtctcaaaatgtaataatttataattctttaggtgatagcgaatgttaagaaggaattatggtagaaatagctacttatcttcgcaggatagataacccgctgactcggattataatagagtcaagagataatagatgtaatatgggtgatttatactctctccgtttcaacttataagatgttttgactttggtcaaagtcaaactactttgagtttgactaagtatgtagaaaaaagtagtaacattttcaacccaagacaaatttattataaaaatatattcaattagcgatttgatgaaactaatttagtattataaacattaatatatttgtttataaacttagtcaaacttgaaacagtttgactttgacaaaagtcaaaacgtcttataacctgaaatggttggagtagtaaacgttatctttatactccatgttctagctgctatgttttgaatagatttaaactctagaactttgctatattttttaatagtactataatatgtgaagcgggactaatatgacatccttcaccttcagatagatacgatcttcttgagaagactaggggctttcctgaaaaattcttgagactaggttggcaaaggctcgaacacctgaacggcaaacctctccgagactccgatgcgcgctctcctccgcctccgccgccggttgcctctgcccataaacacgagggccttctcgccgtcttcaccctcccctgcgccccatgagatccccaccgtctactccttcctccagccttccgtcttcgcgccgcggcccaaaccccagccgccgccgccgccgccgccacctacacctcccgcgcacaagacgctgcccgtcggcgatgccgtcgcgctcgaggacgagctgctcgccgccgtctccgaggaccgctcggacgacgcgtggctcgcgttcaggtccctggcgtcggcctccctctcgccctcgcctcccgccgccgcggcgctcgtctcccacctcgccgcagcgcaccaccaccgtctcggcctcaagcgtgccttcgcggccgccgtgttcctgctcgagaagagcccccacgcggaccccgtcccggaggccgccctgcaggccgtcttcacttcgctcgccgcagcggcctccgccgctccggccttggccctcgtgcgcgctctgctgcgctgcgggcgccgcctcccggctttccctgtctggggctccccgcttatagagctcacgcgcgctgacacgggcgccttcgtggccttcttgaaggtcttcgacgaagcctgcaagcaaatggtgtcggagaagtccccctctgcggcagcggcgatgcgtcctgaccttgctgcctgcaatgccgttcttggtggctgctgccgtctgctcggttcagtcacagaagctgagagggtattggagatcatgtcggctattgcagtgtcgccggatgtggatagcttcggatgtcttgcgttcttgtatgcttggagagatattccaagccgtgttgatgagctcgataaattgctggatgcgttaggattcggcaagaagatttttttcaagaatttgatcagtgggtatttgaagagctgcagctttgagtcagtttcatcagtcattcttcgtgtggtggaggagagaagagttgggggtagcaatgcatttgatttagaaagctatacagaggttgcacagcgttttgtagataatgggaggatcagggaattagctcagttgatcatcaaagcacaggaaactgagtcattgcagcagtcactggcagttgaggattctgttgggtttgggattgtcaatgcttgtgttgagcttggcctattgaacaaggctcatagtatactcgacgaaatgactgctcaaggagcctctgtggggctaggtgtatactcctcaatcctgaaagcgtattgcaaggagcaaaggactgcagaggctgcacagcttgtctcagagattagtgcagcagggctgcagcttgatgctggcagttatgatgctcttattgatgcttctatgacagcccatgatttcctatctgcattctctctcttcaaggagatgagagaggcgaggttaccagaccttaggacaagctatcttactataatgacaggcttaacagagaacaaccgtcctgagcttatggcatcattcttggacacagtcgtcgatgatccgaggatagaaattgcaacacatgattggaactcaataatacatgccttttgcaaggttgggaggttggaggatgctcgaaggacataccgaaggatggtattcctgaggtatgaaccaaataatcagacctacctttcgctaatcaatgggtatgtctcagcggagaagtactttagtgtgcttatactatggactgaagtgaggaggaagggggctgatttcaaccatgagttaattgatgcatttctgtatgctttagtcaaaggtggattttttgatatggcaatgcaagtgattgagaaagcacaagagttgaaaatatttttggataagtggagacacaaacaagcattcatggagacccacaaaaaactgaaagtggcaaagctgagaaagcggaatttcaggaaaatggaagctctgattgcatttaagaattgggctggtctcaatgcatgacattataatctttttatcagtctatcatgactgattttaatggcacgtatctgagatggcatcccatagtcctcttggaagtaacaagcagcggaccttcagagatgaacaagtgaggggttttgtcatcatgtcaaattttgataaggttaggaaggccggtgcgctttcggtttcttcttttacttaaagtaatacatgtttaactatataggctgacctgtctctgtactagttctagtcatttacgctgatgtaatctccaaaccatgaaaatcttaaatgagctaatatcatgtttatcctgaaatactcatgcaatacatatttgtgttcatttggttcatttagattctccaatccattcactcctcttactgttagtccattacatggacaaggaacttctgctatcatgtttctgattaaaatagtttgtacggacaaggatgtaagaataactgagtaagcagctcacatgtttctgctctctcatagtgttgaatagtgaaagcaggaataaccaccatagttgataagccctcaacactaaaactgaaacattctaaaattgaagtctagatgtttcaagtccagtacgaacagcttgtggcaattgggctcatagtaagaatgtaagtttttcctttttactcttcaaactaaaagagaatgaagttttggacttttggttttcgaaaaattgctaagttgtgcagtgaaggttttcgaaaccagtttccttaaaaaaatatatattcaaaaccaattcggcaagcaaggcaaatggaggtaattgaagaggcaatttaagttctaaaagagcatccatagaataccaaatctgcaaagaaaactgcacatcgatgttctaaaatagcacccatagaaattaagaggcaacataggttctaaaggagcatccatacgatagcaaatgtatccgcgtctctgcgaagcaaactgcatcggtacacggcagtcgacatccatcaggcgcatactacattattacagcaaagacacgatataagtttggccttaaaaacattattacaggttgttaacacaaccttaaagttctaattaattcagcaaattctgggagatgcagggtgatcggagccgatgaatccccttcgcatgttcttgatttttatctgcacacggacctcccttttctccctgtacaaaacagacgagagctcatcagcaacactagcataatatcaggaatcagatggaacttcattagcctagtttaacaggaaacttgtcaatgaaatgattacctctggtgtttttctgaatctaggggtggaacgggctaaccccgtagataccagaatgctcgttcatcagcgtcttcttgacgagggcaatggtgtcagtcatgagcctgattgccgatgccgcagaccgggaatacatgcgatccccactggcgagcttcaccggaatctggaagcccatggtcatgagagttcccccaacctcgccgagggcgatgccgctgctgtcctgggcagcctcgacgtcagggagaagggagaagccggtggggtagagggacggcccgccccgcccgggcggcaggtcgctggggctcaggaccatggtgttcatcagctcgctgtcgatctgggagtagaccatgaacgagcccgacgcgtcgtacccgttgttctgcaggatcatggtccttcccctgtcctccctgccggcgcgctgatcaacaccgcacatattgtcggagtcagccggagtacggcacgagagatggccggtggaggtagcaaaattaaggtttgtggtgcggtaccttgcagtggaggacggtgacagtgtcgtcgttcccgacgcctctggcgatggtgacctcctccttcaccacgctgccgtgcaccaggacgtcccactgcacggccggccggcgtcgcggtgagttcgcgagaattaggaaagaaactaatttttcttctcttctttttttgtttcgtgtacgtaccttgcagcggtgagtaaggttcctgagcagatcgaaggttttcctcatgggcagcggcagacgcagggacgcggtgacggacaggatcgcgttgtagctgctgctgccctcggtggtcctcctgtacgcgaccctgatgtccttctccgtgccggcgccgatcacgacggtccacgttcctccgccagtggcggcgatgccgccggcgaagctcgcgagcaggtcgtccgctagcttcattagattcttcctccccttcgtgctgactgagacacacacacacacacacacacacgcacacaacaaaacaacgaaaggatggaaacgttgttcatgcaaagctggaaacggctccctgttctgacaggaatgcggcaattttcagagtttcaggcaccgaaaggattttacaggttgccattaccttgcggagctgtcttgttgtgatgaacatctctcatgcgtgcagactgccgcgccatggtcgccacccagcgccgagctccgaagacgagtccattcatacaaggctggtagagctcatgaacaccggtgtcatccgcaaggacgtgctctatggcagtgacctgccaagaagatatcatacgacagatcagatacgggattgaatatattggtaaaaaacaattcttggccattttttttataacgtttgtgtgtcacaataccttgcagctgtttggccttatggattggatcagaaaccctgatggcattttacggcatttggagaagatactgccatcgtccaatgacacatcaatgacgaccactaatccttcgttcagcacattacaatagcgcaggaatgtgcatttcctagccggtaccaggggcgatgggaacatcatctcgacagtcatctgttgttctcaagaactgttagtaccaactaaaaagcacatgaatatatatcaccaaaaggtaagtactgctgattttgcctgcactctatttccccataagatatactactagtctatacataccagttgtataaccccattataaccatcactggtaggccacgtgtagatcctgttggttactgccccggaaataacttcaggaaagaaagttcggtagttgtactgcagtaaaaatttaacattgagatcaaattgcaacttgaaatattatctaaaaagaattgatacgggcattcatattcacatctttttagcaaggcactattaaaatctatataccacttacaggatccatgaggaaatccacaacgcttttgtagtccatcatcaccatagaaactgcacgagtagcctctgtcttgaatccaatggcgtttgcactgttatccccaggatatgcttggtcataagccatcttgttcaatacttcataagaacagccagggacgggaaaccatagagcgacatgggattcggccaaaataatcaatgcgtgcattgcgtttttggctagttcagcaatcatttgttggtcatgttgccctgaaaatacatagtctgctgatgaattaagttgaaaggcaaggtttgcagccgggggtgttccattcgaccgtgcaatctgacaaacaaacaacacagcattagttcaattctagatacagtctctataggactctggagcttgggaaataaattccagacaaactatttaggaggtaaccacaatctatagttagatagggtgcagattggtaatcacaaggtagatcagattgtgcaaataaatgaatcatattgagaacatagtttaacatgtatggttgcagctcgaacaaatccattcaagatactgaattgaaaattcaacatgccaagtaattgtaatttaataggagaacatatcagaagatgatgtacctcttgttgcagccactcactctgccccattaacctttccatctcaacggcaagctggttctgtactgatgaattacagcaagtgaggcatacagcagtgcagtgagctatcttaactctcctgttctcatccctcagaatttcattctccaccgacaacttatagttctcttccttccagcacatagtctacattgtgtcatggaatttttttttaatcattccactaaacttttttgttcatcagtacatagcaatgttttagaacaaacctttacttgtgttcttttattctgaaaccaaaacttcacttgatctaaaccaagacctgttgtctcactcagatgcctcttttgtccatcatcgggatgcccacagatgctgaaaaacctgttcatccaagaaaaatgaagataacccacatgatgaaattctcctcagaaaggagtaccatactgcaacatacacaatatatttaaccaggatagaatcctttctttttataaagctaatacccactaaacatttttataaagctaattctcactaaacacctaaaactcaacatgcaagcattgtatttattagcactcttaaaacctacatgtcagcatgcaacatcaatccattaagcatacaaagctcaacatataagcatacagtaattatatctataatttatttcattctaaaactaaacatacatatgctaaatcatcattcttaaattattttcgtaatatttcaatctaaatcatttcatcatttctccaatatctaacatctcgcatcaaagcgcgggtcatcatctagttataacatataagagatggatatatctagaaatatttgttgatgtaataataataataataataataataataataataataataataataataataataataacaacaacaacaacaacaacaacaacaacaacaacaacaacaacaacaacaacaacaacaacaacaacaacaacaacaacaacaacaacaacaacaacaacaacaacaacaacaacaacaacaacaacaacaacaacaacaacaattataattgctagctttcaataaatgatgatatgtgcttcaagaaacatacccctcaagtacctccgactgtttgccagtgagcctctgtagacgcctcttccttttttcattagtgttgctactgttcacaggcaacaagcctgagtcggcctcaattgctgcaaataattctcttgctggaatactcattctctgctccccatcattctgattaaaagaaacaagatactctcagtgctagattcacaattcattctacaaattatagtcagtcagagagctaaaacataatactccggcacattgaactgaaaaaaaaaaacaaataatttaaaagccatcagaaactgataatgtacaaggcatctataacatgccaaaaataacattcacctttgttcgttggttatacactgccttttctaatccttcctctctgacttagtacataagtttaggtacagtaaaaaaggaaaaccaatgactagtatatttaataaaggcatctggattgaaattgtatacgtactattaaggcccctttgttttggcccatatctaaacaaacaaatatcctttttataggcacacattattaagtcaaatgctaaatttaagtagattttttagttacgtaagttagagttaggatattatatttaaacttaagacttaaaagccaccgattaacaaaagtgtacactgctgggcaaagccccggcagtatttccggtcaaaaaaaaatgtacaagtcaaaaagtcaacttaaaatcctaaaccgaacagaaactatagatctcactaattaccttttaccaaccacttaccttgtttatgatctcatttatgatatacctcacgagactttaatattttttcgccgggccggcgaatagccggccaatgtatattaagagtaagaaagggaatgtacaaggtagcgcggtgcgtcaatgcaccaccattacagacataaaaagaaagctaaaatctcacagaatgagttgctacagagtgacacatggggctaacaagacctgcagctatccaagtctcccattcatcccccatggcggaacagagctggggaatcgttgccgcgatcccttcggactttaatattaatagaacccttctagaaaagatggctttagtgatcctaaacatcaaaataagcaggccagggtaattaaacaactaaaacaacttgtctaaggattattttttagacagtccagaggtatcgaaactttacgggtaaaaaagaagaaaggcaggattgacaacaggatgtacagaaaagaaaagaagaaattatagctgtacaagtgtctatggattattatggtctggagttagttttaaacctttactactcttttgtcttttagagcttgtttggaatgtataaattaagaaaaagaagggaacatgacaaaaaagtaggaatcgccttacctacatgagaaagaatcgaaggattgtgttaaaaatagcatttcattatactggtccacagtaaacacaggggacatatgttaaacattgcatgtatgtggcatacatgtcatacaccaaatgccctcacagaagatttcaacaaaggatttgttttttttttcccacaaggatcatgaaaaggtaccgctcaatgtggttttcaaaggaattttgtgcatgtgtccccttttcttttcaatcataacatgtaaaaaaaacataaaaacacatgcatatgctattttgagatctctactattgttaaaacgaaatcctactccaccatcgtacttccacacctaaagaaattatacccaaaaaaaccaccctacccaaaaccagtacttttcaccaacaaaataaaacacttatactgaaccccataaaaccgtttgtttgtgttcccgcagatcccgttgcaatagacaggcatagccgtagttagtgaaacacagtaaaaatgagaaacgagagttagaaaggagcatctaatcctttcaaaaaaaaatatagagagagagaacatataaacagaaatcttgccaaactatttcaagagcataccaaatataacactagaaatcaaagaaccatgcatgccagcaaatcttcaagattcagctcggtatatgcaaagataatggaccaaggaaacatgacgctcaccaaaaaaaaacttatttacagaacagaagtatgcccttatgtgctcacattttgtgaaaaatcattcttctatcccaattctttcggaacacaagcacaaaattctcaagagaagaactatgaaattttgggagaaaataccggtagtgttgccgtcccgtcaccagcaaaaccgttcatcaaggccacgaaagattcgttgccctcattatgctgttgattcatttccatctctggagattcaaccctaaaggttgcaagtgactcccagtgtgtcgttcacccagtattctgtatttcgattctgttgtatttccccgtgtatttgcctttgccctcccctctatttatatagcatttgccagaaggaaaaaatatatttattatatattggtgtttatctgtggtcctcatctgtgtatgtgcacgattttttttaattaagttggcttcaataaaacagtaacgttcgcttaagccgagcaaaaatgataattcattgctccttaacaaagtgacgatgttggtaatctcttcgcggtaaaatatatacaaattagtgggatttgtgggcttgtggctccttaaaagcatgcatcatgccaatgcatgcaacaaatgtgtacttagtgaggatataaaagtaattgtggctagctaagtgattacagtttaggaaaactgaggattgcaatcaaattcaaggcagatatgtccatgtataattcgtatcctaatggatatataattttcaacaggcatttagaaatgctctaccatttagcgaagtaactgttgataatgaaaattgtgcaaatttagtttctcatgtacgaaatgattttcagacaccgatgttgaatgaaatataaagccgttttaacaatgcgaccgataaactaggttagtaggaggaaggccatatttggcccagcttcagattataatctaaagcagcttaatttgaatatacgaactccgccaaatatggccataaaaaccaagacgtcatattagttggattgtgatgggccattatgcgcgcttatattcgagtcaatagttagcagaattacaggttggcctggctagatcgctgcttggaatgtcagatatccgtattagatatgtaattttgcatctattattttataaatgaacggttattctttgatggatgtagtatcgttgacatctccctctttctcgctgtgttctctttgaatagttagtatctctatcccataaactcagatgacagttatattttgttgacagaagaataatgcttgcagtttctttcaaaaacaactaggtagttgatcaataattataaattatgtactcatttcccttcgttcatcttgattatgaaagaatgcaggaaaagaaagatctatatattcctttccattcgttcatctcgattaaaaaaaatggtttcaaatcagtagtaaaagcatgtgtagattgctgcaacgatgccaataacagcgagatatagaaaattagttagtcttaagcggctaatggctatgtgagaaagttaattagatgacagaaaatcaggagggttagttagaatattagtgattcttaagttattttctatccctaaaatgccctttggagcatcaacggtggatattaagtatcttaggaagtacatgaggtaccttccaagcaccgtaaaaggcctctttttttttttgggccgatcaaaatgatggacccaaaatattacaagatttccacgaattgcgggagcatagaaaagtcgagaaaaatgccgacaatctatgtattgattcattcttgtattggaccataatatgttacccatatctggcccaatgcttctctttttcgacatgtgaatcgatacatttagaaaataggtggttggatatttttcgaaaatagacatgaaaaacaaccatctttttcttcattttttcatagtatatatgccctcctaaagaattgttgctcctaaaagaaacctgtttagtttctcttttttaccacaacaacaatgaattgattaattatcaatcgattatatcacattgaataggaacacttattacattattatagcacatattagcaacaaacttaatcaaaccaacaatgagtacatctttctctgtaagcaaagcatccgtgtgactgtgttagtgtgttatgcttgatccacatcaacacggtcatttcaacaaaacgtatcaaacgagtgcatagaacagcgtcccaatggccagcccggccgcgccggcaatgcccgccgccctggggcgcgccgcggcgttgatcgactgctccggcgtgggcgagatctcgatgcccgacggaggaggcggcggcgacggtggcgagttcgggctggtggtgccggccgacggggccagcgccggcgccggcgccgtgccattggcggcgcgctcccccatgaccacgacgatgagcttctcgttgcggttgcagttgtccttgttgccgctgatgaagtagtacgggccggaccgggtgaaggtgaacaccgtgttgccgtcggcgaacgtgtcgatcggcgtgttcgtgttgcaggcgtcgtacgagctcttgtcgacgagcagcaccgagtcgttgccgggttggtaagagaacgctgcatgcaattagaggtttgatcagaatcagtaattccctaatcaaattttttgagagctgacgtcacgtggaagtttaactttctaccccttgggagtaaaccaaacggtgacagtgtcattagccggtgacaaaagatcgttagcacttaaacacagttcgatacaacctaagggaaaggaaccgtcattctatctcgcatctgtcgtgttgcgtctcaacgggcagagagtggaagttttgccggtggaagcttcgcggagatagagagatagagagatcaagcttagagatagaaacgacgtaagctatctagccatagcgtcaaaagtatgcatcaacagatgggattggagatatgcatctgtggttctccatggtcaaggtggggagaaggagagccagtacaaaattgcgcacaattgtcaggtgtgactcataaatgaagtggccctgtgccccctgtgtcatcctggcagcccaacgtcgcttgcaaattgataaatgatttcgatgctacggacgcgcatgatgtgtgtgcttcggctccatgcaactaatgcaaacatatctgataacgctccacgatttagcaattttagcggacacccaacactacaacgtctatcaccctttaatgcagtacaataaatatacatctgatcgaacggctgggaaagagcagtcaaagggagtcggtggagagcgagcgttgattacctatggcgtcacccacgcgaaaccgggtgtgctcggcccactggttgtaggcgctgacgttgccgctggcctgctgatccgggacgcgccactcgcccgtcccgcccgccttgaacacgaacgcggacgcggtggtggagaccgaggccaccacgcacgccaccaccacccagcattgcatccgctgcacgcgcccgtgtgccatcgcgcgcgctctgctacgacctctggttgggttttttttgggggggacgctggtgtagtagtgaattgctggaggcaatgcggtttcggttacgatcgattgaacgagacggtgaaatatatatacgtgcacaaagcaggttggttgtatcggcgttcagatgtgttacggttctttacgtaaaagcgaggggacgtgatcgcggggaactggaatatttgcgcgctttatgttctcgacgtgccatgctctgcatgatgtgactttagtgtttgtgtgttatttatttgttgtttaggagttttttcgtttgctggcacgggagcttacgggaacgggaagctatgctttgcttcctatgtgttgtggaatatccatgccttgagagctggttcagagcaagtggccgggcctcgatcctacggagaaaaatgaacaggttcactttaggtgtctcaatttgattttcatctacagtccgcaaaaccaaatacatcacatcccttaacttataaaaccagtccaaacgaggtgccttagcactattgtccctatttttggctaacatggctcctttgactaggtcttcgtcccacctgacattgacgtggcaatttcatccgggaaacaataaaaggagctgacgtggtagctgagtcaagtgtggtacccatatatcagggcaatttagtctaaataaaaatattaaattggtgggccactgttaacggaaaaatttggtaagccccgaaatcatcatcggtctaaagtcagtattggcttcaaagtactagaatcagccgatgagcattatagttggatttcttgatgggttcgattaagaaaattaatcaattaaagaagcttatctagaagatatcgagttcaataaggatgtgacatgtcaatatatctattaattaggtagagttagttagttccctttagttgttatgaaagtgtgtttagtgtcctttcttcgcccgcaggcctgttgacgaaaaatccgtgctcggccgatggtgccgggtctgtgttggcacaaactaagttgacgaacacaatggtctgggagatccacttaactccagtgcagatctaaaagttgatgagatgcggacgtgccagttagtttgatcctacaactgacaagatatagaaataacatatcaaagagccaatcggcttacaagccgatggagtaattctagccgatgtcgatagggttttgagcaatcagctatatgtccaatgtagatgatgatacaaagacaatcggctgatgatgatgatgtaataaaataataatataatccattaaaccaatcggctaataataacatgatagaataaatactgatcagaaagttaaagcatatatcggctggaggtccgatgtcattaaatccacaagattagataaacaatgaaatctttgttgcgatcggctaaatccaacttgtatgtaatccttataagccgatgcaacgtccagataactcatcggctaaaatcccgatgtaacccttattggcaaacaagaggcagaatagagattacggttctaaacatgacttagtaggtcgaatgtactgatgcagcactaagtatgaaaagaaacacaatatctagacaatcaagcctttgaatgatttttagggtagtagatgtctaagctaatctaatctagcaagacgatttagccgataccgacagataccgtaaagcgagaagcagccgatagaggtagatcgatatgctaagactaaattaacatagatatatgataaattggtaggcaaatatatcaaccgaaccaaagcaatccaagaggtcgaaacgatgcagccttgaacgatgtcgacgtagccaatacaattgccagggccggcagaacgtagggctgaccccttcgctggagatcgaaagccgatgcagcctcgcgtcaagtgccaagttccgccgaatgataagtaaaaacctcggtaaagagagtggtgatgcgccgacagtagttgtattgatctatgagatcgtttacaatgaccccgggtgtacatattatacccatgggtagatactagtccttgttgggaaaaaaaactttcctaaagataaaaggaaaacataaagtcattattggacactaaacacacttttctaaaattaaaaggaaaaccaacagactatttctaattaaaagataaactgtcatgccgcatccaccttgaactcggtcacttctggataaactttcattagtagattaatttcttaagaatccgactattggcgatttgataatttccatcgaccgattccaagactctaggccgagatgacttcggggctaaccaaatttcactgttaataagcccccccgcctagcgctcgtctatccatcgcggcccttcaccccatcagctatcgggcgccgctcgcccgctctgctccgtcggcctactctggccgccgccactccgcgctccatgccctccgccacccacatgccaaaatagggaagggagagaggagtggagcggtcgtcgccgctccgccagccacccacctcgctccgcccactcccgccttcttgtagggaagagagaggatagaggaggggagtagtgaggatgacatatgggggccatgtcacatgggcccacccttttttattagttttgtgtgtacctaacatgtgggccccacatgttttattatttttcggatctaattgccacgtaggacgaagacctagtcaaaggatccatgtaagtgccatgtcagccataccggggttaatactgcgcagggtactcgtttgcatggttttgtaagtggcggatccttgcatctggttttccggactgaggatgaaaatcagacttgcgacttgagggacctagagtgaacttattcagagaagacttgtgcttcatgggccattcctttgggttggttgcttcatggcttgtgcgagactagactagattgtttacatccggaattcctttacagcttaattaggactgctactatcaggcttatacttgggcttcaactggaacgtacaggaccgaactatattatgcaggccttattaagcccagaattgcatcgcaaagtttggtgttaggttggggaatcccctctagcttaatccagccattagtacgagtacgaacaccacaagtcttaaggccccgttcgattcagatttatcaccggtatataaaacaaacaagtcgcacatgactaggtggtaggtggtgtttgtatcttctgaagaagatgaagattaaataatttacgtaaaataaggtggtaataacgtgtgataaattaaattttaattattgcaaacttgaaaaatgaattaatctgatattttagaacaactttcatatagaaagttttcgcacgaaacacaccgtttaacagtttaaaaagcgtgccacgaatatccaaaacttaatccagtttttaagtggaaacgaacggagccacatatatacaaaattttcaaataaaatataccgtttaacgtcggaaagtatgctaactaaaaacaaagggatatctcagttcagaagcggaaaaaaatttcaacctaaagtggaagtggagaaccaaagattgcagatgtgggtgttcttctctcctttggggcttctttcccccaaaggacgtcggcaggcactgatccaaatagcaacaagacaaagttagattcttgatggcttgatgtcggtggtcttcgaattccacagccttcgatcgccacaaattcaagtcagtttgagcgtggcatattggccctccggcgttgagtctttggtgttagcaagtctgcatgaggaattggttgttgttgagctagggtgccagctctaggttgatttggttttcggctaggtaagtttgcaggtggcaaacgccatttgttctctttggggaggttgtctctgtgttgtattatcttctctgtattcctcgtgtattctctactactatcctccaggacacctgcgattgcgtagatgaagcctgccctgtgtaaaatctcttgatgcaatatattctggtggagaaactcttctctctggtgacttgctaaaaaaaagattgcagatgctgtagtccaagcaatgagttggatgttttttagcttgagcagctagtattaccgtggtactagggtttatatttttgcgctccttaccgatttatggaaaccattaaaaattgacaactttggattaacactatacgaaaactaactaatattgatcggttttttagcggtttcacgaaaattaactaatattgatcggttttttagcggtttcacgaaaattaactaatattgatcggtttttagcggtttcacgaaaaccaatcaattttgtgaagcttgtccgctaatttttcagtcgattagcagacttacaaaagtatgcatagtgcatctttcgaagtatatgactcatctgaacaacttgcaaggatcctagttgaaactttgaaagtctgcactatgcggtatgcatatcactgaagtggaacgatacactacatcctactcaccactccacaaacatgcccatcgatgtggtaggctgtaggaagatcagaacaaatcagatccaatctcgtttgtcagattggctagctgtacagtactaacatcctcctaaaataacctcgctatgaaggtatgtggcgccaatgagactgtcacttttatccccactcccactccggcacttcaccagttcaccaccgtggcactccctgggactgaagtggaacgaactagtccaagactcggagtcgtctcctccctccgtcagcgcttccatcttccactccacatcacgatcgcgggcgccggtatgcttcttccattccacctatgtgtttcttccttgctaacaaatcaaccaatttgtccattccctatgtcatctcctatagaaactctagccaattcgttcgtttcttcttaagttccacagaatcccacctgatgctcgcccaacagttgcatcttgtctgctgatcagatcgaggttcagaaattagtccccattcctctcccataggcactcgaatccatcaattcgttcccaaatccagtgcttcccctttgtatgccactaaaaaccggagctttcttggtaaagatcgaggtttttggttgccggagatggagttcgtggcgtccatcgtggacgcggtgttccggccgctcaaggactacttcgcccggacgttcgggtatgtcatgtcctgcggcgactacatcgacctgctgggccacgagatggacgagctcaagagcaagcgcgacgacgtgaagcgcctggtcgacgtcgccgagcgccggggcatggaggccaccagccaggtcaagtggtggctcgagtgtgtctccaggctcgaggacgccgccgcccggatcgaggaggagtaccaggcgcgcctccgccttccccccgagcaggcgcccggcctcagggccacctaccacctcagccagagggccgacgagatgttcgccgaggccgccaacctcaaggagaagggcgcgttccacaaggtcgccgacgagcttgtgcaggtccgcttcgaggagatgcccagcgcggccgtcgtcggcatggacgctgtgcttcagaggctccacgcgtgcgtccggcacggcgacgtgggcatcgtcggcatctacggcatggccggggtcggcaagaccgcgctgctgaacaagtacaacaacgatttcctcatcaactcgccggacatcaatgtcgccatcaacatcgaagtcggcaaggagttcagtctggatgatatccagaaaatcatcggcgaccgcctcggcgtgtcgtgggagaacagaacgcccagggagcgtgccggaatgctctacagagtgctcaccaagatgaacttcgtgctgctgctggacgacctctgggagccactcaacttccagatgatcggaattcccgtacctaagcacaactccaagagcaagatcgtgttgacgacgaggattgaggacgtgtgtgaccgcatggatgtccgccgcaagctcaagatggagtgcctgccatgggagcccgcttgggagctcttccgcgagaaggtcggggagcatctcatgttttccagcattgagattcaggaacaggcgaaggcgctggcgatgaagtgtggcggcctgccgctcgcgctcatcaccgtcggccgggcgatggccagcaagcgcacagaaaaagagtggaagcatgccatcaccgtgctaaaggttgccccatggcagcttcttggcatggagatggatgttctaatgcctctcaagaacagctacgatagtttgcccagtgacaagctaaggctttgtctactgtattgctcactgttcccagaggaattctccatttctaaggaatggataatagggtactgcatcggtgaaggtttcattgatgacctgtacactgacatggatgagatttataacaaagggcatgaccttcttggtgttctcaagattgcctgtttgctggagaaaggggatgacgaggatcatatcagtatgcatcccatggtccgtgccatggctctgtggatagcatcagattttggcacaaaagaaacaaaatggcttgtccgtgccggagttgggctcaaggaggcaccaggtgcagagaaatggagcgacgctgagcggatttctttcatgcgaaacaacattcttgagctgtatgagagacctaattgccctctgctgaaaactttgatgctacaggtcaaccctgcattggataagatatgtgacggcttcttccaattcatgccatctctcagggttttagatttatcacatacttctatccatgaattaccttccgggatcagttcattagttgagttgcagtaccttgatttgtataacacaaacatcaaatcacttccaagggagcttggagcactggtaaccctgcggttcctgctgctttcgcatatgccactggatttgataccaggtggtgtaataagcagcctgacaatgctgcaagtattgtacatggatctcagttatggagactggaaggttgatgcaaccggaaatggagttgaatttctggagcttgaaagcctacgcaggctcaagatactcgatatcacaatacagtctctcgaggctctggagagactgtccttgtcgaatcgcctcgctagctcgacaagaaatctactcataaagacatgtgctagccttacaaaggtagagcttccttcaagcagactttggaagaacatgaccggactcaagagagtgtggatcgcgagctgcaacaacttagcggaggtaatcatcgatggcaacacagaaactgaccacatgtatagacaacctgatgttatctcgcaaagccggggagatcattattccaatgacgagcagcccatccttccaaacctgcaaaatatcatccttcaggcacttcataaggtaaagatcatctacaaatccggatgtgtccagaacataacatcgttgtacatctggtattgccatgggctggaggagctgattactctcagcgatgatgaacaaggaacagcggcaaacagcagtgaacaagctgcaagaatttgcagagacatcacacccttccctaacctcaaagaactgtatctccatggcttggcaaactgcagggcattgtgcagcactacgtgcttcctgcggttccccttgctggggaacctgaagattgtcgactgcccgaagctgaagaagctcgagctccctgtcggtaatctgaatgcggtacaatgcacaagggagtggtgggatgcgttggagtgggatgatgccgaagtcaaagcatcttacgatccactgttccgtccactgcactgattccagttttagttaccacttaaccatttttttgtcatctgctactgttgcttctctgatcgttgtgtagttcaggtctgtgtttcctcacttgtatgatcttacaagttgagtggttttactacctttttgcacagaccatgttccacacacgtcaggtacggcagtaggaaaacttagtatcattagtactggatgtatagatgtgagtatgtaacctgtgaatacagagcagcaccaaaaggacctaaacagcatgtaaattttcttctttttggactataaattgatgattcttcattcacaaacgatcagatcaaaacagaatgattgtgtaagactaagatctgagtctgactgacattatgcctgcgttgtctttcagggactctccgcatcagttgcagagataaggtttgacgttttcaaagcagattcggccacgtaaaaaaagaaaaaaaaaagcaagttattgggcttactttcgtcttagctacataggtaggctttagcttagtacaggagcatggcccggcccagcaatttgcgctagtgtattgtcctttatggtatggaccatggaatataacacgtgaatacggcgtggcagaacgaactttgagatgcacctccgatcagattgatctgatctgcgccattagcatgctttattgcttttatttcctgatgatgacgatgattagtactccgtattggaaccaacagggtgcatgcgaacatggcaactcgtacaagatggcagatcaataatctctacccttctaatcagagcccctcgttgtagttgacgccggtggccttgagccagtttccgccctggatgaactgccccacggtgaactgcatggcgacgctctggtccgtgatgacgtggtacccgggccagttgacgcggccggccgtgctggcgccggggccctggttctggtactcgccgtagaagagcgtcttgagcgcgaagtcggcgccgttccactcgagccaacccctcgggtcgacgtgcgagtccaggtaggacagcatgtacaccgtccgcgagtactccttccacggccggcccaggaacgtcgggaactgcttcgcggcgggcgccaggtcgggcgccgggacgacgcggcaccggtggatggacgtcccggtgttctggttcgggtcggtccggccctgcgccgtgaccgcgttcttctgcgcctgcgcggggcgccgcgccgtgagcacgcagccctggagcaccgccgcggcgttgccgaacacgaagtccaccgtgccggagacggcgcagtcgcggtagaactggcggagctggtgcgcgtacagggtgtcctggtagccgtccaggcggcagcggttgatcacggcgcggtcggcgctcacgcggagggccaccgcctgctgcttctcggcgcccgccgtgttctccaccttgaggtcctggaggatgatcccgtcgcccgacaaggctgcacgcacgcatatgttacgcatatatccaaggtcaaacttagtcatgactgcttgcagtcagtcaatgcatcaatgcaagacaggaaaatccacgcaaattgttcatgtacaagctattgggcatgttgttaactcaagtgtgccatcgtggtctcgtggcggcgtgtcgtacgttttgggccgtctactttgacccttgggcagggctagtggattggaaacagggcattttaatactgttcgtcaagccgtgttcgtcgttaattggtttgtgcgagaagctgggctgtttcaggctccggttttgcactcgccgcggtattccatcgcccttgtgtgccgcctgctaattaaagtattcccagtttgcaataagtgcttttggttagctatatgtcaacctttgattcagagaatgtgcctccaagcgatggttcttctacacttctactgttctacacagtacatactgctacaattaggatgagtcggccagtttgatggcaaaaatcgagtaggaggctaaaacttgggtcctggtggaagaaaaaaagactcggagattggcttacagtatagttagctagggcctaaggccccttactcatacagtttatcccttctttattcagctagaaagaaaacccgcgcagatgcgcgggaaatttatttattgtttgtaagaaaatagattgtaatagtaaagaaacaaatatttatatcctagttatatgtgaactcgcatatcatccttcttcgcaaatatatatatatatatatatatatatatatatatatatatatatatatatatataatatatatatatatatatatgagttaatatgtgtttgtttttttctttcattatacatccgattcaccgatgcatattcatgggtaacaaacaatagaataatctatattgtcaaaattatttgtgctaattatcaacactatttaggtgagaatgttataattaaaagggatataatgtggttccatgtgatattttttatcgtaagtatatatgttttttctagcgaatagtagtttcccctgtacgaatgtacttttctccttttataaggtaggtgtgtaattgtatttataagttgtatgtgcctgcatttatatgagtgctcacaatacccttttataccattagtaaaataaatactttgaagagatttggtgggatggtgtgaagcagcaatgtggtggcgtggctttttcggcaaccccaccagaagtggtcactacatatatacataatttgagaaaaaccttagagctgcaaagaaagaaagagaaaactacttagggagggattagccggtatttagtagcgagggattacttgatagatatattctaatggttgacaataatgaatccactggtctaagtgtaaatcaatggctaaatgattttttctttttcttataattttcttacattttctctattttattagagtgtcttgtggcatcttaattagaagtatatgcaggtgtgtaggaacactattaataatagtcatattctacttgtagtcaactatttttcgtggtggcttggtgtatctctacttacatatcatttattgatggttaccacttagtacttcctttatctttggtacttgataacatatgtacatgcttattggatatcaactaattattagttgcataatgcatgtatgcctcataactattatgacttggcgattggtggatagtaatttctatatagaacttatatacatgggattagtggaaacatacgattgatatatatttggctattcctattgataaattatattatatactacatattaagtgtttaagtaagtaaggttgacttttaaagtgcttatctgattggctactttattatttatgacgagcatgttcccaaactacaaaagtttcccgaactaaacaatgcgtgttttgtaaatactttctatacaaaaatattttaggaaatcaaataaacccatttttaagtttgtaatatttaatacttaattaatccttttttgatgacatgtatcattttgtgtgccttgataaactcagccagatcgattgaaggcctaggtaggagataaaggacatcgacacggtatcaaaagaatatacttcgtcgttaattttctagcaatatatgaagaagaaaacatgatacatgaaaatattcaagataaatttagtaatgtcattttgtcatatgaatatttttatagtaggtattgagtaaattttgaaaatgctactcacagtcgaagttgttttatttttgaaaataaaaatctaatataattatacatgttgttatgtgatatatctataactttaatttatttatatttttcctggatgtttccatgagatatattttttatttgaacaaattatagttaagatgtgctgattattaaattggtttttcaacaaagtgagaaataaaaaaaaggaaagagaagtacgtacaattttttttggtcgggtgtgggtttgaggatacatatgtacaactcacgtacagatatggaacgatgtagatctttcgagatataaatttgattgataattttgacgatagatctaatagttaaaaataatggtcccaccaaattaaatgaaaattaatggctagatgctttattttttcttagattttctatgatttattaaagtgccacgtgacgatcttggagcgtttgtaggagtgctacgtggcggtttgagagcgtttgtaggaagtttaatggatttttagtatataatatatgaaaatcgtttcgttcgaaaaaaaaaaacaattaggacgagtgaaggcgataccgaagaatgtcattgctttatcgcctgtggtgcagtttcagcactgttatgtactcctagtaactgtgttgcaagaaaattatgtaccaatggatgccttgacagctttctgtcctgctgctatggttactgaattaagggcttttttttacttagataccatttttaactttaccaagttttaataaagttgtcaaaaaaaaaattagatacattagtttgctgtcaaattttggtaactatataagaaattctgccaaaattttgtcatgtcaccaaaattttgacaactatgccaaaattttggcattgccataatttggtatgtttttttttcatcaaagtgatcggtccctaaaatccacgcattaaaagctgaaacgtggggaaactctctttgccatggaaaaatcaggtgggaacacgactctcccctccgatgatttaaaaaaaaattgaaatgtgggtgaaaccaccatctagaaggtttgaaaataattaataataaattagaaaagtatataatctaagaaatttaaattatgatgcccaccctctaaaggattcaaattacgatgcctaagatctaaaattactaaaaaaatcagaaaataattactacgagtaaaccatgatactccctccgggctgataatacttgtcgttttaggcaagggtgaggtcaaactttagagtctttgattatgaatcatttttaaaatatttgtcttttaaatatggtgactacatatatatagattagtcttaaaaagtactttaataaaatcatatatttgttaacacttttatacatattataatagaaaataatagttaaagttgttttttggagaccgtgcccttatccaaaacgacaagtattatcaacccagagggagtataaaaaaaactcaaatcccgatactcctaaatgttaagtatacgtaggtgcgttttcaatgaggctaggaatgtatctatagtccaacaacagagcatgtgtttgttaaataaggctgtgtttagatctaaagtttggatccaaacttcagtccttttccatcatatcaacctgttatacatacacaacttttcagtcacatcatctctaatttcaactaaaatccaaactttgcgctgaactaaacacacagcctaaaaaaatagagcaggtatttgtggatgtgtaagtgcggtgtatttatgtagcagtggagcatggcatggagcacgtagcacggacatgtgcaaaattaagtacgtccactgtgtgatgtgatgctaccaccatttaagccaaacaaccattgccgaagattttaagtgctttgcttttggggataactactctatgtttccacctgtgtgtattctagccaatggcacatcgatctgcacatgcgcaccatgtcaccaacaaccactggtaatcatttttctatctgcttatactatattagtcaacgaattagattatgagatccacttgttgattcttttccggttatttcgaagttgacactaactgtttactgacccaatcctacgtacgtgagcttagcggggcttatattatggagtatatcagtgcactacagtactgtgcctcgtacacagtactgtgtagactggtataccgattaccaagctaagtttagatgactagtgtatatcaagcaagaaatgcgtagctatccatgcatgtcagtaggacgttacgaagaaggcaatctgaaagaatacccatggtttagtttgaagaagagaaaagaatattcatgcgcgccaacgttcaggaattatcatgttgtgatttcccttttgaaaaggttgtattatgcaaagtaaagatgcggtttgcgaaatagtcgtagtgtcgtagatggaatgagtgcgaatttcagaaagtagagagagacaaagacgcagacggcgatcgagagcatcacctagcgtggcggagttgaaagttgtggagccgtcgaccacgttgcggctgccggtgatgaccgtctggtccatgccgtcgccgacgatcatcagcacccgcttcgtcttccccacctcgaggttctccttgtacacccccttcttcacgtagatcacgtaccggctcttgccgccgtcgggggccgcgtccaccgcctcctttatcgtcgtgtacttgccgctcccgtctttggccaccaccacgtccgcctgcacggcgcccgcgcccgcgtcgaggagcgtgcggtctctcgccgtcagccacgacgggaacctgtccacggcctccgcgagcacgtcccgagcgccgcggccggcggcgctgagcacggcgagcgacgcgctcgcgagggacttgagcggctccaggtgcgcccccacggagtcgcgcagcggcccgtcgtcgaggccgtccaggcacgtcacgtggtcggtgagcacggcgctgagccacgtcctcgcgtcgtcgacgtcgacgtcgacgtcgggcgcgcccgccgcgtcggcgagacggtcgcgcgcgagccccatcagctggacgcagtcctccagggccgcgcggtgcctcgggtcgctggcgcgccggcgcatgcccgccaccgcttccgcggccgcgtcatgccgatcgagagacgtggcaaggatggcgcggaggacgtgcgccgggcggctcgggtgggagtgcggggacgctaggacggcgtcggcgacgatggcttggcacgaggccgggtcaggggagctcgcgcagaggttcgtggccgtcggggagagtaggaggaaggcggcgcccgcgcagaggcagagcacggtggctaaagagagcagcgtgaacgatagaagtttgcatgggtaggcgtttctgtgcgagggagaagagaggagaggctcgtctctctgacgcatggtgtcctatccctgtgcgacaagtgaacctgtttacaactactgctgcaacctgtgatgtagcggctcatgatgagacttaattaggtcatatttatactgctggggacagcggttggttttgggttataccttatcgcgaacatagttaattagcgctagtacttagcaccggtgcatgcattaattgttctcaactggagtaggagtagttttctctggcgtcgcctgattctgaatagagactggagagtagtagtccggttcgatttttcgttcagctcactgaatgtatcgacctgtcggtagatggtacccgttctgtttttcgttcagccacgtgcagttcactgtgctgtcccctcggtggatgatacccatatgccatacgttccagcacgtggtgttttactgccagaccattgtactatgaacgaaccagaccattgtactatgagctagtatcttgattagtgctggtgttgatgtatggttttgattcagttgctatatactccatggccgtatgagataataggcatgtgttcttcccccatacgattggcatcgacgatcctcacgagttaatctcgcactttgcaagtatcttgttgtggagcttggacatggacagtttgatgtggatcgatttgaaggttttatgcttttttttagctagggcttgacggtccccatttccattactagaaattagaaatgatactcccttcagacgatcaaatgtaagtttactgtcttaaaactagaataactctcacggtcaaggatcctctcacgtcgcccctccaggggcggctcgggaggcgacgacccggccgcccctctcccccacctcccttctccgcctcaccgtcgcctaagcggctgccggcaaagccgcgcggccgcaacgacggcgacggcggggctctcctcgtcttcttgtgctcgggcggtctagggagctgcccagagcggcaacggcggtgaccgccagatccgcgccgttccggccggatctggtggagtggttggcggcggggacgggcgatggtggtggtcgaggtgagttgcgggtggagttgtgggtgatggcggcggggatggcgacagcaatagggcagcggttgtggaggccgcggatccaacggtggccggcggtgggcagcgcatgcaggcatcctgcggctgccactagcgttctccggcgctcctcttggtgtcggccagcgttggtggtgaggagggcggccggatctggctcctcttgcccagatccgctgcgtcctcgggtggggacggggtggattggagtgaatattggggtggatctcgtctgtgcaggtggtgtgaatattgcaggtactctcggtgtgcaggtaacatttggtggctcccgccttggatgctatggttgatgggtgctccaaggcaaaagccttgctccgctctcggtgctagcaacggtaacccctttgggcgccgttcaccttctcgaaggtgttgctactggagccctcattcaactcaacttcaagagatttctccgggtgaaaacctagattcattaggatcagacgatgtcgttccgtcagcgtaaccttcttgaaagcttcgttctaggagtttttctcctgttggacggctgtacttaggttcaatttgtcaatgtcggggttttcgccggttttcttttaattaaccgtgctgttataagatttttaagtctgattttcttcttctatagtgaattgcaggagcaccctgcctgtcccctcgagaaaaaaagaaattagaaatgattaggaagataaagaattcgaaccaaaccaaaaacacgagctgtcatcacagcaaagagcctagaagctgtccatcgagggtagagaaaaaacagaaagctgctctaggcctcccaactatactagcgagtagcgacgcagcacaaaaacacagtttggagctccagctgacagtctctcatctactctaggtgccttgtgcagaccctccatccaaacctggaccgaagacctcatttgctacttgtcttgtaagtttggtccccagcagcagtcttcttcgccttttctccagcttctgcaaattagcctaattttcagtcaaatgacaggtaagaaaaaatagttcaataggatcataaggcatctttttccaaaacatgctttgttcctggctttccagtcttccagagtttatgcagatttataaaggtgctttggtgaaattctggttaggaattagcccgttgtttctccttggcttgcatctgcacggaatcgactaatttttccttgcaagtcgatttgaggggatcacctcgataggatagaggataagcaataatatcacgaatatgggcgtaagatcccatcctatgagattaaggtttctacgaggagttgtgttgtcacttgtcagccgaatgattgttcctcagtttcggagggctaaatgttagacaatcactgcattcgtcccaaaatggtaaccttttttagataggtacaaatattaattaagtaggtaaaaataattagatgaaatttgtgattggttgagaagagaaagtagatgaaaaaattaaataaaaaataatgtgattggttgagaggaggtagtaggtttagaagtaatttcattctaggataaatcattgtgctaaaatagttacatttttagatggaggtagtattacatgtagtccttcatcttaaaataaatcaactattgaagttaaaaccttattctaaaataaaataattcctacaatatcttcttacctacacttagtcctagaataaaaaaaaatatttcttcatcacttcatgctactttcttaccttaccttaccaacccactcatcgatactactttcttgaagtgggtaacagggtaagtgatgtaagtgggcttaaaaattaccacatcagatttatattatggggcggagggagtagcataaaaaatctgtttctttttaggagaaaacctttactgtggaggaaaagttataggtgcatggttatatccgtgagtccaaatctcaaaacggagaaaattccttacgtgtacatgagtttttccttcctctaaattttgtttagttccctaaatgccattgagttctcattttaatcatctccatatccaatatcagttagttaaccatgggttaaacatgtttttttttaaaaaaaaacaacaactatattgcctgtccggccctcaattatacttatgtgctgaattgttgagtaaaataaaattctcaatgtgaaaaaagattcatttgtgatagaattatttcatcacaatttaaaatttaaaattaattttataaataaatttaaattaaaattgatgaaatttttaaaagattttcaccaaaatttaaactcaaataaaaataattttgatttttagtttctcgctgaaacactataactcttgtatggatttgatcgtttttgaatttgtttgaaaatttcaaattttgctttccaaatttggcaggaaataattttattccatttgattttttttttcaaaaagttgatatctatatttttaaagtaggtagcacataactatgagaaaggggcattatagttatttagaaaaatctaatggtccactaacgaaatagataagaagagatcaaaatgaaaactcaaagtacatgtagagtatgaagcaaaatttataggcatgaaaagggttgagccaaaactcacgtgcacataagtaattttctataaggttgtgtttggttgaaggggttggatgggtcgggtggggttggacccaatttatagggttttcgtttttgggatgggtgaaatggaatggacatattccatttagatccagatctaaatcagccaacaaaatcaagcggaccatctcaaccaacatggacggggcacacaacatgagtctcgccgctactcccagtcgtctgcttgccagccggtcgctacccttcagtgtcgtcggttggcaccgctcctccttttttttaaaaggtatacgattttaacctttgtctatttcttttttttaattataaaagcattattttcagtcttgactcatatatttgccatgtgttaaaagacattgtgatagtacacatatttcctgtgtaactgtaaaaaaatggttttcttgtctaaatggatgtaaaccggtagcccatgcatggagatttcaatcgttccacggaattacttaacaatcaggagaaggcacaacacaacacggtcatcgcccaacttattctacgatgctacatgaacgaaggtaaaagtacagaggatgaaagcgaaacggtagagacggcccggagaagcttctcgcaatctcgcatccacatgggcccaaagcatcctagcaccctgttcctttcggcagccacacgcaacctgctgctagccgtagttgagccggaatatgtcattctgcacgaagaagcttccctgctcgttgggcaccagctgaaacatctgggatcaaatcataacataaacacgagatcagaccgtttccaaactgaaagtaaaaacaagagaagggaaatgaagtcgtgtcggtgtcagccaagtgctaacgggttccaagaattgttacctggctgaacctgagctggtgctcctcgccggcgagctggaggttgccactgacgaagacgaggatgcctcccgggaaggacggcgtgggttggcagtcgacggtgcagacggcgtgccggcattgctcgaagggcagccccaacagcttccggccgatctcctcggcgccggccaccatgtgtccctcgaaggagagcatggacgtctggccgtagagcgcggcgagcgcggcgcggttggtgtcgaacgtctggtagtagtactccacgaaggccctggccaccacgtcgcactgatcgctccagccgccgccgccgccgccgctggcgccgttgctgctgccctccttcccatgcccgtccattgcccctgtctccgcgcgccgtctgtgtctagctatccgtggctctcgtgtctcgtgcggcagaacagacagagtacgaaacgctcgccgcgggcgcgccggctatttgtatgcgcgctgacggatgggacgaacgatttgtatatgggagatcgaagaggtgtgttgctatgctttgccgttcttttttctgcatattggcgtaggtcgcacgcccatatcgtgtacgcgagtgcgtggaggtggagccacgagagcgcggacgcggagatggacgaaaagcagagacgattcagctgaacacggaaaaagagaatgagaaaagtgggaggcaggagaaaagcggcaaaggatggatatgaatctctgcatttcggactatgggtgtgtctagttcacgctaaaattgaaagtttagttgaaattggaatgatgtgacgaaaaaattgaaagtttatgtgtgtaggaaagttttaatgtgatggaaaagttgaaagtttaaagaaaaagtttggaactaaactcagcctatattgcctgatcacagtagcggcatatattatttgatgggaagttgcaaagttgcaatgcacatcatctcaaactccaacctttcatctgaaatactgatcctttgcattgctggctgcttcggaagatgcacgcaaagaatccacacgtggacgtggccaatcccaaatatttggctgacaaggcgaaagataattcggaagcgcttgcccactagccgcttggagcgagccttcgaccaccatacaccgaaagccggcggttgctttcggccacggaaaggcgacccgatccggcgccgtcctcgcgtggtcgcacagcggaaaccgcagcgctttcgccgaccacacgaggtgccaatggatcgcaccattctttgccgagtcgccgcagacacagcccgcaggagttttttttgtttttagatttttttttaatatttacagaaataatctatcgacaaaaaaaattgcagaaatagcccctgccgccctaatggtgggcggcaagctgacgtggcagacggtgggtcgaccgcgccgtctgccgccgtcggccaaaattgcgattaggcccttgctg

SEQ ID NO: 21691 - DNA, 1926 bp, Oryza sativa
ggcctaatcacaattttggccgcccataaagagcttgcggccgtactttttcatctgggtcccttgccgccccacccagatgaaaaaagtacggccaaaagatttttctatgttatgttaataataaataaagaagtatttattggtaaaacttgttaatattgttataaaaatgtattgaagttggttgttgcgcaatttcatatgttaagtgaggtattattttgtaccttattcgacgtattagtactcggataatttatataggcctatcgcagtctgggtcgtagaaacattatatggacttaaacaaggagaattatgtaacatgaagaaatagtagtataatttgaacatgatacgattatttgcattgcggttacatagatgatattagattcgaactaggagggaggtagtgcaatagttgaacacaacgacgatgtagtaatgggacaaggaagcatgacagtagaaatttcaatatgccaagttgtccgataatagctaacccctacgtgaggatccctctcctctctcaaaccgcgctttagtaaccctgtattgctctggtagttcaagctgctctactggaaagtgaagcaagtaaacaaagagaagactgctctactggccctgccccgcgccgcgaccacgcttggtcctccgggcctgtgctcgcacgtggtcctgggagtaggtgaaacgatccggtggcacagcacgggtagcacgagtgtcccgcgaaggagtggcctgcgcctggtcctgcgtctgcaccggcggtgcgcctcccagctgtgaggggccaatgacgtcctctgtcgagcctgaagcaaagtcgaagtcagtgatgtcgaagagcacggtggaagacaacaagcggtccgacgaggtcccagcatggtccagtggtggaccctgactcgacgtgccggctgcctgtgacgctgaccctgcagcctgggagaagtgggcggcctgcgtcatagcgaactgggcaaaacctacacatcgacaacgggacccttgtaagctaagacataaaatgtatgtaaattgattgtcgaagtaatgttgtttttttaagtacctgtggggggcacaacagaaggcctagccgaggaaggcggggtgctgaacggtgcatgaaaccctgaagcaatcggcaagtgaaacggctcacttatatgtgtgaggcatgtacagaaatagtaataaaaatacttacctccgtgcggagggggagtcggcctaggaacgtgcgcagctggacggggaccagtcggtacgggtggccgctgtacagctgcgtctgcccgagcaacgtcgtcggcacgacaggtgagcactcggagaaacgagcgcatcgactccaccatccgcgtgtacgtcgtcaggtgctcctctacgggtaccggaatccccgcgcctaaacgttggatcgtcgttgaaccgtcaacgacgacccggttgatgtcgtcgacctgcatggttaatttgttcgtaaatattcgtaaaatttgacgaagagaaagacatgaaaacataaaggaatggtgcgatgcagggtactcacagcacgagcgaagtcctggtcgcggtgcctggcatagaggtctctagtgctcgcaacgtggggctgctgttccaagggagcgaaggtgaccctagtacgggtgcgtggctggtaccagcgtaggtaggcctggtaagactcctcagtgtgtggctctccctcgtagtccatgacctcctcggttgcgagcaaccagtcctcaacaaaagtcgccaacttggcgggccagtcgccagctgagtgctgacccttgcgcgagtacctgcgaattaatgtgtaatattagtgtgaaacgacagatgttacaaattattgtgaacaggtagattttaatgcaacaacggaaa

SEQ ID NO: 21692 - DNA, 17407 bp, Oryza sativa
  unsure (1)..(17407): unsure at all n locations
cagatgtcgaagaccatcggaaccatagtcatccagtacgcctggtccctggtgcagagtgtggacagacccaacggcgcacgagcctgggtagccgcggcactgtagggctcccacacgacgtcagtcggcagaaggcggtcgaactccataacaaactcaggatacgaccgcctaacctggacgtgagcccatcggcgctgcaatacgagacgatcgatgtgatgtacaatgaacttagcaattaacttaacaatacgataagatcgatgcaacgtacctgacgacggcaccacagagtacccatcgtagggtagtcgacctctggtcgctcctcgtacagtgactcctcgtacgtgtgctggtccacctcagggcggccgatcgcaatcctctcagctgcccagatagaaagaaagagagggcaccaaccaaaggtcgcgctgggatccgtcttcgtgcaagactcacaaagtgcacggtacagagccgccaacaacgcggaaccccagctccactgaggcacctcgcctaccgcgacgtcggcgatgctcctggcgtagtgcacgagtcccttgtcgaccgcgtgcccgtgaccgccacagaacatcacccagccaaaaagctagagcaagtacgcctccaaacatcggctgtaggagtactcgtcggcctccgcctgtagttgctcaacctgcaagcagtcgataaaatgttaggcaccttaactgcggactaaatatgtaatacgattgtcatttcggtacaaaaacactcacggtgaactgaagcagccacctcttcgtaggtccggtgttgcggtggtgtgccaacggctcgagcgggaggtgcggtgcgcgctgtactagtgcgaaacgtgccgtcagatcgtcctgccagtccacagccatggtcactggcccaacagcgtctcccgcgagcggtagccccaacaagtacgatacgtcctgtagggtaggggctacctcaccgcacggcaagtgaaaagtgtgcgtctctggcctccatcgatcgaccaaagctgctaggagggacctgtccacagtccatcgtctggccgggtccgcgtcgccggccgcagcctccaccagccgacacatcggtaggaggccggcctcacgtagcctgcaataacaaattaatatgtcattataaaaaatattacagtgcaactaacttatagtaaaacactgttcgtacctctcgacgaaggagtcgtgaaccgtgagtagctcaccgcacgtccgtgcccggaacgtcccaagctgagccccctgcaccgcagtaaggtgagactggtgtcggtgatctatcgccgggtccaacaactgaggtgtatcctgacgtgccatctctgaaaaatatagtgtttcgtgttagaacaattcaaaaaatagtaatgtaaaacaaaagataacttgcaaaattatgaaatagtaataaaatcatgagattaattatgtacaacaagagtacaggctatttaaatatagcaaacgttactaatggtacataacgatgacgtgcaatttaacatatatgtagagttcaataatataacataacattaccaggtagaaaacatgtatgcttggtaacgactgacactgtccaataatccttccatttccccttatacgtgtgcactctccagggacaaccatctttttccttaacacaccgaacttcatattgcgaccggttcgacttggcaaccctaaactctctatgaagtgacactgcaaaatgttttaccgcctccttcatatcttctgctctactataaatcgctccctgaataacctcattttctttgtactcccatctcacactatcctcttcagagacgattagcccagaaaaatcctcactagcccattctgctggattaatatccgtctcatcatctgacgaatcaccttcctctacacgctcgttgtcagaatcctccctctccatttcatccacaatagcaccgacagtctccccctcgtcggccactccacctggttgaatgcccactggagctactacgcccccgtcctctcgtgcgttgacctcctccacagaagtctcatttacttcagcacttggtccctcgccatcatccatgttcatctgcacacctggatccttcgggtgaacaaacggaaccaaagctagaggccacccgcgttgcaatgcattttccaaataccatctccacactcgagagttttgaactggcattagttcccaataaaaaccctcagttgcccgacttactataacattgattgttatgtcacttgtctgtggatcaactctcaagcccctcattaaccatccttttatagagggtacactcctctcagccggtctatcaattcccctttctgatacaataaaatctgacagatctaccccagttggcccgtaaccgacgtttcctggtccatggtaaacttggaatatttgtttgttcgacatatctgtcaacgaaataactagatcatattactctttcatgcaataaacatctacaacgtaatatcttcttgtgtaagccaatgcaacggtaatgtattgattccaaactagcagatctacgtagttaccgatatctacaatacgcacttctagattagtacaactaaaaccctaaaaatataatgcatttattcaaacaaaattttaaagaatacacactatttaactcaatagtcacatataggatctatgaatattacctgaaatcggcgtctgaatccggcagggcttcgccccttcttctcttctcctcccctctcttctttttttttcactggaattgaggagagaagaatgagggctgggggctgggcagcaggccttttataggcagcgaggcctgccgcccggccagagggcgacaaggggccgcctgcaaaatagctggccccgactggcttttttgcattcgggccccttgccgccccaccagagggcggcaagggttttcctgcaaaaaaccctccctccgttaccgcccgttcctcccccgtttgccacgtcagcttgccgctccagaggtgggcggcagggtctatttttgtaatttttttggccgatagattatttctgtaaatatttttttaaaaaaatctaaaaccgaaaaaaattccagcccgcagcaaggctgaaattacgtcgtgggctagctaccttggaccaggccttggaatcataattcacctgaaaaggtacaccgaaggtccctgaacttgtcagagttaaaaacatcctcaaaccgcaaaaccaaatatccggcgtcctcgcacgccgcctccgcccttcgccacgaactcgcccgccactgctctgctccgccggccgtcgcgcgctcgcctgccgcctccgttggcgattgcttagccccgctcaccgccacttgttgctactcccctgcggcaaagagaagaaaaaaaaagaagagaaaaatgaaaggggaaagacgggatgctccgcgtcgccggccaccggacctcctctcccgccacaccgcatcgatctcctccccacccatcggctggcctgcaagagaagagtgagaaagagagatgaggaagggaaagaagaggggaaagagagagatggcgtggcatcctgacatgtggggtctacatgggtcccacgctgactcagccatcacgtcggacaaaaaccggggtcaaaaccaccgaaggatctattgttaccggttttgattagttaagggacaccggatatctggttttgcggtttgaggacgttttttttacctcgatgacaagttcagggaccttcggtgtacttttcctaattcacccatggtttccaatccctttcggcccaatataaggggtgagcttctgtgtcagtagaatagttagcgcacactttttccgttttatcgtataccaatctcagtccgactccccagcgctcaggcgcacccacgcgtgccttatgacgtccgtgccgctaattacataattagcaaaaattaccatcattagcattattttctagaaaacacatatacacataatctctatctctactattataaaaattaaaaatatttttgccagtactttggtacgtcatccattaatgagtcaattttaatttcgttcgcttttggaaatacatatctatatttgagttgggttttaaattcgttcgcttttgaaaatacaggaggggtcatgtaagaaatctctttcaataaaacttacatgctaacttgaaatgatcggacttctatttacagctcatgattttctagaaaaatatatatccaagcgaattctcacggtgacactattataaagattggagatgtttttgctagtactttggtacgtcatccgtgtataagtcgtgtttttggtacatcattcatatatgagtcggtttttaagttcgtttgtgttgacagaaaacacgtggcctaggagatctgcttaactccagtgcaggtccaaagctccccttcggatgttgttagcgtgccagttgatttgatcatgtaatcaacaagaaatagaagcaaagaaaccgtggttaaatctataaatgatagccgatcggctagatgccgatgacatatcatttatctttgagctgatgtcatctgtgtatcgatcggcagttatgaataagtaaagaagaactaaatctactcgatcggttgtagatattaacgatatatactcttatatcgatgtatacttaaatcaagtgattgggatagatcggtcaccatgccgagacagtataaatcacttagatcgaaatatatatcaataacaggactatatatgtttgtagcatagccgatcagatagatctagcatgtatcggctaatactccgatactactctatatcaagatattaaagcaagtataatatatcgagcaaaagcctaacattcttagacacatcaatatcttaatataaagggcagatttaacatatcattgaagcatatagaacaaatatagttaaatcagatacgatcggctgaaactccgatgctattctaatcggcaactagaaggcaggctagagatcgatattctaagcatgactcaataggtcaaactcaactgatacagcattaagtatgaaaagaagaacgatatctagacaatcaagccgctagaagtttcagagaatggtagatatctcatatactctagatcaacatcaagatctaacctaatcggctgccctctgcgtacagatattagccgatagtagattaggtggcgatattgctagagattatgtaagatatatgataactcgacgaattatataaataagattagagtatcataaagatggaagcactaatcctaagaacacaatccgtcataacgaattttacctcttgttgaagatcgaaatcgatgcagctcaacccgaaagcaagaactcgtcgaaacaaaactaaagcaaaagggtggcgatgcgtcgaaattatattgaacgtgtgtgttgttaattacatagggctcagggtctatttatacctgagaattacaatatatgcccataccggacacgactattatctctaataaactctaagataccaaaagtctttgcggcagacttttgcccacatttatctataaggaatttacataagatatcctaattaatagatataattgtcttcccaggactctatccgtgcgtggcaatcatcttgaagtacattaacttgaacccgatgtcgcgtacaagtcatattgtcgggatcggctacatcggcttacccagcccgactcagacccagccgatcttatcgtagccgatctagattccagccgattcctgctctgttttcaaactcgatctccgcttccgactttgcttcgatctaatcttctttcctgacacagatgttaccaaatttggttgttaacacatgccccccaagtccgggatatttgataatgttccggatttgccatgtaccgactccgagcaagtttcgcactccgccgcttttgaccgtcattccagcactttaaatactaactgttacccccgagaaatctcacgccgtgacttccgttttcaccactcaagcgaaacctcttctctctcttctccagcgattcccccggtgcaaaggcgatttctaggcaacttcctcctcgacgagatctccgcccgcaccaatgtcatcttccgctagcccatctggtgcgccatcagccgaatacgctgaggtaagttctcttcggctaaatccccttccttagcagcagatcgattttctcctacctcatattgctttccttctcttggttgcctcggatttgtagcatctttcccaccaagtcgcaattcccagtctgacgcatgaaaaccactactttttcggcccaatcggcaatcctgaccccgccgagttcattattggtaaaaccaacaggatccccttcaaattaaccaacccagatctatgtcactggaagaatactttcaagtcctggccgtctctagagaaagttccaccagaaaagagctggactacatggttcaaacgttgaaagttccaccagaaaagagctggactacatggttcaaacgtgtatcagccagcaagagggtccactgggatgaaatcggaatcggccaagcacttgaccttactatagccaactcggccaaagatgaacccctgatggcagctgcttcttacttctggtcaaacactattaatgcctttttattcaatcaagggccgatgaccccaactcttatagatatcagcatgatcacgggtctagatgtcacctcatcggccaaccctatgagcttgaacacaaagaaccaatatgacttcaagaccaaaagcataggaggttggtcaggctatgtagcggcatatatgggtcagggctcggtcactcctcgggaacatgtggcctttttgttaatgtggctagaaaaatttcttttctatggatcaagttgcggccccacaaccaactggcaatttctagctgaagctctagaaacaaagagacaatttcccttaggcaaaattctcctcggctatctataccagatgttgaacaatgcatcggctaagatagccgtcggttcagtagttggagcaggtggaccctagtggctgctacaaacctggttaaacctgatagttatgaaggttgtcaatcggccatccgtatcagaagctgagttcccaagactagagccgattgtaggggatgatggagaagagcgtactcatcggagatgcacatcatacggagaatacgcttctacaccaactgatgccggggcaaaactatcggttgaactgcttaaagattggttctgcagcttctatgaaggctttcaaaaagatgctcgagtttggttcctttatgaagattctgcagaacttgagcacccactagacttcagattcgaagacatcaaccacgaaatataccaatcgtccagggagattttcttagctgcaatcagcccatgcatccttcctgttggcattcatcaaggaagaaacatccaagcttcttacgaattctatcatccaatgagctcagctagacaacttggaatgggccaactcccaatcggcttattctttgccgacaagatccaatgccgaggagaaatttcatcgaccttgatgatgcatcagctactcaaccttcaaggaccccctctgggcagtattgacaacatagaactttgacagatggtggggtgaatggaagctgcatctattccaccaaccagcttcaatgtatatgacagacctcttctcagatgttgtccctcaagtaagtctttaactccagttgatttaaatagctgtttggccgattaatctcaactaatcctcttgatttgcagacaacagaatcctctcctccccgtcaaagcaacagtggtaaggatatccaatatgccccaggtttaattcctaacggaggtgggctatctcctccggttattggatatgatgcccccaagacctcagctcttcttcaagggcttatcagagaaccagccgatgccgacaaaaagaggaaaaccagatcgtcggctgtaaacatcgtagccccaactaagaagaagaagacaaagaaaaccaagccagccgatgatctgcctaccctagattcatccattgaacaagctctggatgaagagataattgaagacaaagttgatcaggctgcagccgaggtaagcgatactgaaagaacaccatcagcttcgcccaaggaaacccctgcaactccttctgctccggttcacttttcaagggtaaatatatctctttaatccctttcataattattttgtcctatagccgatcattcccaagtcttataattgcagaaaaagaagactacggtgaagaagaaatcggctgcaacaacgtctaaaccagctccaccagtaagatagttttaactttcattagttaatttttagccaattctggctgacacttatttcctttcagccttcccctcctccttctcctcctgtacaacaaacatcaagtgaccagaccccttcagctgtggggagtcatcacgtcgaggaagaagaacaaccagctgctcctgctatcccagtaagtttctttttgtctcaacaagcattcagatcggctatgactgtttctaactgcttctaaattgttgctgcaggtattagccgatcttttctcttttgacatcagagactatcttgatgaaggagaagaagataccacaagcaaaaccttagcccctttatctgatgatgtgaagaaaactctaggaagtatcttggatcggctagaagcatcatcgctagatagcctggtgattgattgtggctcaatcagggctcagctacatgagattcaggctctaatcccagatgagttagtcgatatcctcaccccagccgtttaacttgagcaacaccaattcaaactggaaaaagccaaattaagactggccgaacggcgagagcgcaaggatattgaggccactatccaagctaatcgacaacttgtgcatgaagagaaattcaagcttgatcaactatctgaaggcccaatcaagtctaatattgatcgactcgaggctcacaagattgaacacttagcacaacttgaagaatgcaacgctgagctggacatggaacacaaaaaactagccgatctcccaaagtctattgaaaaacagaaagcaagactcaaatcggctatcaagcatgttgctgatctgaccaagtctctgaaagttatccctggaaccgacgctcaggatgcccaagccatagaagaagtagagcagattaggcagaaggctatatcggccatccagcgatacttatctcaataatttttgtgtaataaaacttagaatttttgtaatcggctaatactttactgtcttaacaatcctttgtgcccattaatatgactttgaaatttttgcactgcattttgatatatatgtgccccccagttttacaatgtcaagagcattgataaaattatataacaactaagggcgatataacaatatcggccattgtacatcggcaaatcacaactgattacaccatgaaaaacaactaagggcgatataaccatatcggccatctcaaggcgatgtaaacacatcggctgtcatgcatcggcaacacgagccgatcatgcgttaacccaaacacttgggtaatatttcttcaaatatttgccattgagcgctcgcccatagacttcgccatcaagcccttgcaacatatatgctcccttagacacaaccttataaatctggaacggtccttctcaattcggcgaccatttgccgaatttactatcacgagtaccaatcggcaaaatcaacttccatacaagttcaccttccgaaaaatctttaggtaccactttcttattataatgccaagcaacacgttccttatccttggtaacctttgtaagggctcgcaattgcgactgaaccagatcctccctctcatcggccataaggttgtaatactcatcggctgttaaatcattttgtaactccgttcgtcgagagccgattctaacctcccatggtaaaacagcctcatgcccataaacaagtttgtaaggaggaacttgaatcgatccatgacaagccatcctataagaccacaatgcttcggccaaccgagtatgccattgccgaggataatcagaaattttccgcttaatcaatttgatcaaacttttattagatgcctcggcttgcccattagcttgtgcataataaggtgaagaattcaacaacttgatgcccacactatcggcaaactgaacaaactcatcggacacaaagattgaatcttgatccgtagtaatagtttgaggaagaccaaatcggtagattatatgctcctgaacaaatggaatagcatacccagaatcaactttcttcaaaggaatcgcctctacccacttggtaaaataatcagttgccaccaatataaatttatgtcctttactcgatggtgggtttgtcataccgatcatatcaattccccaacctctgaacggccatggcttaataataggattcatagccgacgctggtgctcgctgaattgctccgaacttctgacaatcctgacaccccttataatatctgaaacaatcctccagcattgtcagccaaaagtatcctgtacaccgaagcaaccacttcatcttgtgagctgattgatgagtaccacagatcccctcatgaacttcgccgattgcaaccttagcctgatcggcactcaagcacttaagtaatactccatcaatcgtccgataataaagctcgtcatccaacagtgtatactttaatgccttatatcttaatttcctagaagccgactgagatggattactcaaatactggtgcacatcgtacctccaatcatcggctgacatcgctgcaatttcaactttaacatctttgatcattggcttataccacgacgccccttgagctaaatcattagcttcaagattttgttctcgagatacatgctttaaagtaaccagccgaaactctttcattagttccaagcacttctcattataaaccatcaacgtatcgttcttgcattcatattctcatgccaattgactgattaccagcaaagaatcccccatgatttcaatggtatcaacttcaacttccttgagtaattgcaaccccttgagcaccgcttcatactcagcttgattattggtcgcatatggtttaatagtataagcaaactcgaaacatgcccccctaggggaaattataactaagccgatgccacaaccatgagtacataccgatccgtcaaagaataaagtccatggcactacctgaaccgagccgattgaatcatcacgatgctctacaataaaatcggctatagcttgtcccttaatcactttcggtgattcatactgaatatcaaactcagtcaaggaaaatatccacttcccaactcttccctttaatattggagccgatagcatgtacctgactacgtcggctttgcatataacagtacactcattagataatagataatgcctcaaccttgtacacgaaaaatacagacacaagcataacttctccacaggagaataccgagtctcagcatccaagagccgtcgactgagataaaatacaactcgttccttcccttctaattcttgaatcaaaaccgagccaattgacttctcaccagccgataaatataacctaaatggtattcctttctgtggaggaatcaaaacaggaggagagctgagatactccttaatattatccaaagccttttgctgctctaacccccaaataaactgctgatcggcttttaacctcaataagggtgtaaaaggttccaaccttccggacaaattagaaataaaccttctaacaaaatttatcttgccgatcatctcttgtagctctgtcttattttccggggctgaatcttcttgattgcattaacgctcctttgggttacctcgatccccctttcatgaacaagaaatcccaaaaactggccgggcgacacaccaaaagcacattttgtcggattcatcttcaagccatatttcctggttctctcgaaaactttccttaattcggctatgtggtccttcacttctttagatttgacaaccacatcgtcaatataaacttcaaccagccagccgattaaatcatgatatatataattcatggctctttgatatgttgctccagcactctttaaaccaaaagtcatgacgacccattcaaataagccgattgcaccagggcatctaaaagccgtcttatggatatcttcatcagccataaagatctgattatatcctgcgttcccatccataaaactcaaaattttgttccctgatgcggcatcaactagccaatcggccactggcattggatatttgtcctttggtgtagctttattcagatctcgaaaatcaatgcacaccctgaccttgccattctttttaataactggaactatgctagaaacccattcagcatatcggtagggacgaataaaaccggcatcatacagccgtttgatcttagctttaacaggttcaagcatatcagctttacatctcctcggaggttgctggcgtggtctaacccctggcttgataggtagccgatgttcaacaatcgatcggctgagtccgggcatctcataatactcccaaacgaagcaatctctaaactcttttaggagctctatcagcttggttctaaactctggaaacaaatttttgctaataaatgtcggccttggccaatcgcctggacctatgtctatttcttccaactcatcggccgacataaaaccttgatcttgcttgtcatcgagatcatcaactgtatccttagcgtagacatttgaaccctccacgacgccctcaaagtaatagcttgggttctccatcttcgattggctatatatcagaatcggacacttttagaaaatctccatcccagacttttccagataaacaatcaaggccatccatctcctaaagggctaaatcggcactggcaacattaactgacctgtcggctggcacgatctctatcttgttgccttgccattgaatcaagcattgatgcataatcgaaggaatgcaacaattggcgtgaatccaatcccttccaagcaacaagctgtacgaactcttcccatcgatgacaaaaaacgtagtaggaatagtattgctgccgactgtcagctccacatttagaacacctctggtttctgatggattaccaccaaagtctttgagcaccatatttgtcttgatgagatcctcggcgctcctacccaacttcctgaacgtagcgtaaggcatcaaattcaccgcggtcccaccattgaccatcatcttagacatcggcttcccattgacgtagctgtttacatacaatggtttaaggtgccgattctccgtcccctcgggtttctcaaatactgtctgttctggtgatagaaccaacttagccgatccctcttccacttcatcgacatcggcctgatcgatcccgaattcagctggcaatgtaaaaaccatgttaattggtgccgctataacactcttcccttttgccaacctcttcgcctcatcggctgcagcatcattggctacaggaacctaattcttaacacgccactcctgtcttggctttggtttcctcagccgatggttgatttcctcttcaacctcctgaaaacgctccctgtttctcaatctctggacccttcttttctgattcttcatgaaaataccagaaggacaccattgattcttcctgattacctcatcctcttggccacaatcttgattcatcggacccaatctctgatgaacaggaagtcttacctgccttagccgattacctctactatatgaccggctcgagctctcgatgatatcactgcacctagggcagttttcaatggatggcaacctcatcccttcgttccagcagaatctgaagaactcacaaccccaatgaggatcaaaaccatcgtcgtattcttcataatgcttctcctgctgcttgtcatacttcctctgatacttgttgataatcctagccgaattcacttgaaaaccctttgcacggaccctatcggctgcttgaccagctgtgtgcaccatattaacaggaaaaggattaccatcgaccttcatcggctttttggaatcgtcaaacctaatcttgcccccctcaatggcaacctggatttgctgtctaaaaaccttgcaatcgttagtagaatgagatctagaattatgccatttgcaatatctcttcttgcctaattcctcagccgatgggatcgtatgaccagcaggaagctgaatttgcttttctcggagtagtaaatcaaaaatcttgtcaaccttggtgaaaacaaaatcgtacttttcctcttttccaagactttttacccattggcatggtatgacctttttgctcctcacccattcggctgcagctatttcagaatcatcttcctcgtcatccgatccatacatgtatggacaaacatgattaactttcttagagcttctcctgacttccgccgacctatgctcatgcaaggttatcttctgtatcagatgcgataagctatcaaagtcttcggacgagaatttctctctgattggaggaatcataccctgaaaggccaaatcggctaactgagcatcagtcaaactcaagctaaagcatttgttcctcatctccctgaacctctgaatatactcgtgcacgggttcatcatgccgctgcttgatcgctgtcaagtcggacaacttcatctcatgaaccccactgtagaaatagctgtgaaattgcttctccaaatcgacccaactattgatcgacccatatggcaaagaagaaaaccaagtaaaagctgatccagacagagataaccggaataacctaactttcaaagcgtctacagccgatgcttcaccgcattgagcaaggaatcggctgatgtgctcataagtcgacacgccctcttgtcccaaaaacttggagaaatccggaactttaaaccgattagggagagggactctttcaaaccactcaagataaggctgccgatacaagcttccagtctcttttggtttaagcccaaattgttctctcattacatcggcaatcacgtcggcccacggtcgttgctgagctgctccttgtggctgttgttgcctagactcgaactgaccatactgagatgcggactggggctgaccaatccccctagctgatattgggcttgcgaggaaggaggctgatattgatagctcaagttacccccttggtaattatgaagattcggctggatgttgcgcaccaagtgctcaggaaccatctgaggcatcactgtaccgtccggctgtgcatggtgaaccaaatgttctgggatgacctgattcacaaactgatgtacatgctgaccaccaggtactgcgaacccggccgatgcattcaccgaccccgggtgctaaatcggctgaacgacctgctgtcttaacggagtctgttggatcggctgctgaggctgctgtcttggtggcgtctgctgaatcggctgcagaggctgctgccttggtggtgtttgctgagctggttgtacgacctgttgttggatcgattgtacaaccggctggattggtggtgtctgctgaatcggctgctgctgcactggatcaacgataggtggaggtggcagaaacatggcagcgacttgatcttgggttagccgattcgtagcctgcccgccatgctgtggctgatcccttgttaacaaccgagggttcaccggctgtcctggcgtcatagctagtgtagcaggcaaaggagtcgacgctggagccgtcggctgagttgtgggtgcaacggagggaactgcttgaacagatggctgaacatcggtgatcaaagatcgataatttggtaagacgcctccttgcaagtaaattgggcctgcagcctgatgctcagctatcgaaccatcggctattgtcttcatcatgttataccccggactgattgatcaaagcatgatgcacagcgtaatcaacccgatcttggaagttattgaaaaaatcttgtgctagttcattattctggtcaagatttcctccttgtggctcctgggcgccatcaccttgaacgccatgaactccttgagaattgtcgccttgatcgctcggtgagccgtcggtaccacctttagtactcggctgagccgagccgtctggagcttgtttcacttctccatctttagaataaccggtcccaggactatcagcaaccacttttattttatacttctgaacaagtgtccccttacgggtctgcataaatgagttcaggaactgatcccgtgcctgctgcagggttgcttcaaactccgccttctgctcaggcgtgaatttctctggatcgatcggcatgacgttgtcatcaatgatgtcagtcaatccctgcttcaacgccttgcctttaacggaacctgngctagatggtggtggtggctgtttctcggccatgaggaagaactgacgtctgacttcttacacgtcccaccaggcatgccaaaagcgtgttgacagaaaacacgtggcctaggagatctgcttaactccaatgcaggtccaaagctcgccttcggatgttgttagtgtgccagtttatttgatcctataatcaacaagaaatagaagcaaagaaaccgtggttaaatctataaatgatagctgatcggctagatgccgatgacatatcatttatctttgagccgatgtcatatgtgtatcgatcggcagtcatgaataagtaaagaagaactaaatctactcgatcggctgtagatattaaagatatatactccttatatcgatgtatacttaaatcaagtgattgggatagatcggtcaccatgccgagacagtataaatcacttagattgaaatatatatcaataacaggactatatatgtttatagcatagccgatcagatagatctagcatgtatcggctaatactccgatactactctatatcaagatattaaagcaagtataatatatcgagcaaaagcctaacattcttagacacaacaatatcttaatataaagggcagatttaacatatcattgaagcatatagaacaaatatagttaaatcagatacgatcggctgaaactccgatgctattcaaatcggcaactagaaggcaggctagagatcggtattctaag

SEQ ID NO: 21693 - DNA, 35492 bp, Oryza sativa
tcaagatctaacctaatcggctgccctctgcgtacagatattagccgatagtagattaggtggcgatattgctagagattatgtaagatatatgataactcgatgaattatataaataagattagagtatcataaagatggaagcactaatcctaagaacacaatccatcataacgaattttacctattgttgaagatcgaaatcgatgcagctcaatccgacagcaagaacacgttgaaacaaaactaaagcaaaagggtggcgatgcgccgaaattgtattgaacgtgtgtgttgttaattacatagggctcggggtctatttatacccgagaattacaagatatgcccataccggacacgactattatctctaacaaactctaagataccataagtcattgcggcagacttttgcccatatttatctataaggaatttacataagatatcctaattaatagatacaattgccttcccaggactctatccgtgcgtggcaatcatcttgaagtacattaacttgaacccgatgtcgcgtacaagtcatattgtcgggatcggctacatcggcttacccagcccgactcagacccagccgatcttatagtagccgatctggattccagccgattcctgctctgttttcaaactcgatctccgcttccgactttgcttcgatctaatcttctttcctgacacagatgttaccaaatttggtcgttaatagtttgcttttggaaatgaacttgagatgatcaaactcctaattgcagctcatgatttctagatagaaaaatattgtcgacggggtatacccgtagacaggatatcgagggtactggggtacgctggtacgaggatctatgtaatacgacatcaaggaaacaagagacaaagattatactggttcaggccccttagcaggtaatagccctaatccagttgatatgggattatatggaaagaaccacagattacaaagggagtagtagaactcggcggtaccgacgagatcgtagtcaagttgattcgactagatcaccctgcgacttggcccctgtagtctccaacttcgtaggctatggtcgttgtgtaggctctgagattcgatgccttaagttccctcggggggtcccttttatatcgcaggtcaaacggtctccaagtaggactcggagacaccggaccctgcacgatatagtaacgacccagtcctatacgagtagtaacctttccattggcagacttcgtgatggatttccttaacgtgttcagagaatgttcgtatatgcaccgatatactgtattgccgtatagcatgcattcaagggtagagggtataccttatccgtaaccctgacagtagcccccgacttcaacttaaatgaactcatgtaaccaatcgcgacttctaatgtcggaattgttgtcgttctcgactgatcgatctcggtgtgagggccgtagagacaaagagcgttcgacaacaccatgtgaagtccaacggttatgagtgaatttaaattgaagtccaagaaaccgcctcgcgcaacggacccagaaatttccaacggccacctctcttctttccttggaattcgcaccgtcggtagtgcgcctatttaagggagttttgggaatacattttggagtccgtcgtttgtgagaaacttcctgcctccaaaccttcttcatcttctccgctcccacacaaaccctaggttcgcctgccccggcttcttctccggcgatctcccgcggcaatggatctcgacaagtccacctccagccgcgcgtccttgaagaaattgcaagaggaaggcgctctccccggtcgcgggaccatggagagggaaacgggaggtactgaacctgaacccgtcctgggccacatggttgtggttgaggactacattctttgtggttttcttcccccgccttccgagttttttcttctcatcttgaacttctatggtctttctctgcttcatttgaaccccaactccatagccttccttagcattttctctcatctctgcgaggcctacattggggtagagccgtttctcgacctcttccgcttttactatgagttgcgctggacggaacctaaaaaggtgtctggatgtgtcggtttccgacttcgggatggcctgaagtcgcgatacatccccttccagtgcccctcatctcgcagcaaatggcgtgggaggtggttctatcttcagatagaagatttggatccagtcttcattgttcctgaggagcaaccagacaagatttcatcttggaccgccaaacctgccttgaccccatccctccaatctttcatcgatatcattgatgacctctgagtacaggggttgtcgggatatgaagtcgctgccgacttcattgttagacggctccagccgctccaggctcgagcccatccaacctttgactactctgggccggaggacgcgacccgggtttctcctcggggtatttttcttgtattttgggttcctctctttttatgctcattcttcctgacttgtccaaacttggttctcgatctgcaggtctgagcggcgcaaccgtggaacaccgtgttgcctaggtgatgattagcggtcccacgacggcgagcaacgtccccaccacaaaggtgatgtcaagatgaaccccgcacctgctccttggctgttgagcgcgccatcgaacgacattgtacagcactacacccgccgcgccaggcgccatgcccgctgctcctgtgtccgcgtccgcgtctgctcctggctcctcctcatgctcgtcttgctcgtcgtgcgctcacggccttcgcctccgtcgtctacctcgtgttcaagcccaggcagttggactacacgctccagggcgcgaaccttctcatcggcctctcggcgttgcgccaccgctgcgcctccaggtcggccagctgctgcgccgcctcttcgccgcctcctgcctgtccgcgccgttccacgccgaccgcccccgcccaccgtcagccgcaccgccgtgcgcgccgaccgcgccgtcccctgccttccccgcaccgccatgcgccatgccatgctgcgccgcctcggccgcctccatggccgggcggcacttgtcttctccatctcagccatcgccagcgccgcctcctccgcgtgccacgcctcctccagctgccgcccatccccgtcgtccacgcttgtcagcttgtggatgagagagagagaggagaagaggaagagggaagatgacaggtggacccccagcatttttttaataagaaaatgctgactggattgtcactcgtacgccacgtaggcaaaaccgctctggattgggtcgagggggtaatttgtccggtattgaaagttaagggtgaacgatgtctggtttttgggtttaggggggtaattcggacgaccacgatagttcaggggggtaattcgtactttttcctttctctttcgacaacaatgacaatactcacagagtagggcgtagcggcaatatagaggaacaattcttcattaggttggggagcaacaagtacagggggatttgacaagtagcgcttgagtgcgatgaacgccttttcggcttcttgtgcccatacaaatttgtcttgcttttttagcagtgcgaagaaaggttgtcctcgttctcccatcctagagacgaacctacttagcaccgccatacatccggttagcttctgtacgttcttgagccttgtgggcgacttcatgttctcgattgccttgatcttctcgggatttgcttctatttctctgccagagacgaggaatccgagcagtttgcccgacggtaccccgaacgtgcacttctcaggattgtgcatgaggcgatatcgtctgaggttgtcgaaggtttcccgtagatcgtcaatcaatgaatcgcatgtcttggttttgacaacgatgtcattgacgtaggcctcaacatagttacccaactgatcgctaagtgccccttggaccgtgcgctggaaagtgttccctgcggttatgagtccaaacggcattttgacgtagcagaatacaccgaacggtgtgatgaatgctgtcttcttatcacagcctgaatttccgtttcaggatttataaattatttaataaattattaatcgaatttatattaactgttcattaatttacaagtgaagttaaatgtgggaaataaaatttccttaatttaaagcatggatggatttaatttatattaaattctccatgattaattatactctctgaaattttctcggaattttcggagctcaattcctaatgttaataatacaaagaacagtttagcaattatttaaataataaattaatcagtaaatgatctggatattattatattaaatactttgagtgtccatgtatattcaagatttttcttggaattgtttgagcattgaaagtatttttaacaattgaaagatcatctcattggttaatttatttggaaaagtaataaaagtcctcctcctcagcttgggccgaatccagcccattgcctccccttctctctcccttcctctcagcccgcatagaagtctgcttttcgtccctgtcgctacagtgctccttcttctacctccagacagagcccgagctctccagcccgtgcacagtgccgccgcctcctcccaccaatccggccacatcgttgctcctttctccaaattagttgtgggaatggaatcctctcaatctcctcttccttttccccaagaaatccccaaaagtttatatggaaatccttttcaatttcgcggctcaacctttcctttttccggcgaagatctaaactttcccgagtttttcctgtcgttgtgggctcgatcccggccttccatggctataaataggaccccctagtcctcctctttcgtttgcccctctcccgtggtctcccgtgccccgtagcctctccgccgccgcctccgtcgtcgccgccggtcgccgtcaccaccgttaggtgcgcgggagggtggagaagctcggccgctccctccccgctgtcgccggtcaccggagccccgtcgccgccgtcgaccgaagccgcgccgccgctagacctcgtcgccggccgtcgtcgttcgtcgtttggttcgagggtgagtaccgttgggttcgtctcatcgtcctctacgtgttcatgtcctccaaagtcgcagccgaccatccaatctccggcgaggtcgccatcttggtccggccattgatgaggtcatcatgacgtcatcatcatttttctttttcctgtttttctaatagattaaatcttcggaaattcataactaaatcatcgtaactcggttttgagtggttcaagttgctaaattcatctaaaatcatgatctacatgttaaaaatatccacatgtactgtttatgcttgtttttgtactgtttatttggtttctattagtctttttcttcgttttgcgtgttagcttgtcgtttccgtcgttgcgaaggttcgtgagtgcgttgggagtgttcagaagattaattgaagaccgattattgcaaggcaagtcacacagatcccaaacaaccctttgagcatgttgatcccgtttaaagctattgtttctattcaactattgcatttattttcgaatgtcattgggtggaattaacctattgtttgttatagcccttttgttcttgattactttattccttgataccttgggttattataacttgactagttgggctttatatattggttcagctagatattagttatgattgcttagccatacttagaaacattagcacactattgggataacttatgactcactattatttaatgatggcttaatgatagttcacgatggtcaatcgtgattggttaattaattacttgccaactaaaacttgataatggtgggttgtgagcacatggttttgagagtcgtgctcatggcaattaaggaccggttcgcgagctactgttgtgaaacattaaccgtgccaaccacaagccagcgtgggcaacggctttaccttttgtatagcatggttcattgcggagcaccagactgagaagtggcggagataagcccacgggggtcgctggggagtccatgccttgttttataagggggtgattatgatccaggaatggtgcactgtggtgagttgtgttgtgcagagggtattgtcacagcctctattcgggtactttccagtatcacgacgcatggtagacatgatgttgaggctgtgtcttgtgggtacagtggtatacctctggccagagtaaaactattcgaatagccgtgcccgcggttatgggcgggttgagcaatgtttttcgtgattagtctcacgcctctcacaataattattgatgttatacctggtaataatttgcttagctcctggtttggagttagatctgtacagtcgggtatggttgttcaggatggttgggcctgtgcagcatgtgtgtgctgttcagtgttgattaaaatttctgattaattactccactgttttacttctcttaaatgttttgctaaatgctacttttgcaaatgagcctatattatgccatcctttggtatccttgtgcacttgcatatttgctgtgtggcttgttgagtatgtcatatgctcattcttgcaataatcaatcaacctcagttgaagaaaaaggatccagaaggagaagacgtttggcttataccccagttgagctgcctgtgggagtggagctgaagccatcgctagaccgttaattccgctgctgtttttcttttcttttgtaagtatgtaacgttattattatgatggatttgtatattaaattgtcagtttgtgtacctcggctgattcctggacgaggattttatgcacaaattagttcggaaattattagtgaatttccgggcgtgacacttctcctcatcctctttcgccatgctgatttggtggtagccagagtaagcaccaaggaagcttaacagctcacaaccagctgttgagtccaccagttggtctattcgagaaagagggaagtgatccttggggcacgccttgttgaggtcggtgaagtcgacgcacatcctccactttccgttggccttccgcaccttgactaggttggctagccactttgatggtgtacctctctgatgaaaccagccttaagaagtttatcgagctcttcccgtatggtctgcttccaatctggtgcaaatctccgcagtttttgctttactggcttggcatcgggtcgcaccataagtttgtgctcaatcacctccctagggaccccggcatgtcggacggctgccaagcgaatacgtccgcattgtcgcggaggaaggtgatgagcgcgagttcctatttctcgttcagtgatgccccgatcttgaccgtcttgtcggggttggcactggagagtgggacgattttgattgcgccgtctggtttcggcgtcttagttgttttgatcactttcttgggtggctcggctgtggcgggtgggctgggagtgtgctcgaccatgttgaggctccacttgtcgtattggactgccagctttgcgttcccttggatagtgattgttcccttcggcatgggcatcttgagtacctgatacgcgtagtgcgatgcggccatgaacttcgtgagtgccgttcttccaatgatggcgttgtatgctgtgtcgaactcagcaacatcaaatgttatctactccgttcggaagttgcttgcttggccgaaagtcaccgggagcgtaatcttgcccaatggcttggacgaggattgaggggtgattccatggaagggttgatcggtaggtgtcaactcgcttcgtggaattcccattgcgtccaaagtgctggcgaagagaagattgatggagctaccgccatcgacgatgactcgcgctactttgatattccgaatagtgggctcgaccacgatcggatatcgtcctggtataacagcagccttggggtggtcttcatctgagaattcgatcttctgttcaaaccacttcatcttgggtgcagccccctgccatatcgaacaaacctcacgctccacttttttgtattctcgctttgaagagtacgctgtggaacctccgaagatgtgtgagacatgaagatcggaatctgagtacacggagtccgagtcctgagtagttgtctcagttgccttctcgactacacgtactcgcttgctcttctccaaagccagctgcctttccaacgattttttgaagatgaggcactcctccagagaatgtctgtccgacttgtgtatggggcaccatattctctttgtatcactgccctgtgggtctgggtgtttgggcgggcgctcgtattcagatgcaaggacttctgcttgagctttcctcttcccactcttgccgcttttcttcttgcttgattcgggtgcgtccttggctggcttcttctctcctcccgcctttggtttgtcgtttttgcgtctcagcgcgtcgtctgcgtgggcacatcgatcgacaacctcgaacagccttcgagtagtagtgattcgccttgttgccaactcctaggtagtatagcaatctctaacacctgttttgaaagcgcggatcacaaaagcatcggtgataccgggatcgtatttctgcactcattaaagcgccggacatagtccctcaaagattcaccctgattctgtgttaacgcgtgtaaatcgtcttcgatcgcgtggcgcttgtaagttccctggaagttcgcgacgaattgttgccacaaatctgcccatgaagagatcgagtaaggtgggaggtgcatcagccacgaacgtgcagaacctttcaacgccgttggcaaatagtttgctaacgcgttgtcgtctgccccaacagcatatactaccgtggagtagacttggaggaattcctcagggtcagtacttccatcgtacttctctattgctccgggtcggaatctttcgggccatcggacatcacgtagagaacggttgaaagctctacacccagcgctgggggcagcgggttgtcggcgatcgtgtgtcctccgtggacgtctatcggatgacgtagacgaagatgatgatgatgatgacgatgatggctcactcggctccggcgtgcgattccgagggcgacgttcaggttctcgagaattctgtcgtcgtccaccattgttgtcctggcgccggtcaccattatcatcttcttcatgtcgatgtccccgaccattatcttctggtgtccgctgttcgcggttatcgcgatcgcggcggttatgacgatcacggtgatgttggtcctcgttcgagcggcctcctcgctcctcgttctcgcgatgtcgtgaggaaacacgatgtcgggaacgattctcattgtctcgcgcgcattgtgcttctcggcggccgttcagatggttgcggagatcgccggtgccacgaggtggaggggtagctcgtgcaggcgacgtccgctgctccggtggttcaccgtcggcaccgccaaccgtcggtcgttccggttgtgctctggtagcagcctcctcgaatgtgttactgagattggccaccgattcccgtagtcattccgttcatcgcgcgaggtcatcgttaagcacggggtcatagggagcttctctcaatattgcattgacggtgccgagatgttgggctggcgtggccgtctggttctccgcctctgcattagcctgtgtagacgtgctagttccatcgatggaaaatacgtcgcgtggtgtactggaagatgatgagccatagtcttcaagcaagtgaaggactgatggttcgcggggatcgatatcgattactccaacgaaactatccgaagtcaacgtcgctccttgttccttgtctgtctcctcgagagaggttcctgactgttggaccttgggaagcgtcgtcttcatggcgcggagaaagaccttgcagcttgagaagtcgtgattcttcgtcttgtgaataggacaatagacatcacaagttggagaagtacgttggattccacgctatttgcaagtatggatttcggcttgtgcgttgagaaaaacccagcaagcttgcaagttgtgcttcctggacttgtgaataggacaccaggacttggtgacctcggaagttgtcctcgtcggctcgcagtccttgtcagaaggacaaggcttggtcgcgctaggaatcttctcggggtcatatgacgtcgatgttccgttctccgccacggcgggaggatccttcgacatgggaccgtccgggtttgtagccatggcgttctcgtttccggttattaatggaccagccgagattggcaccgtggtgtaaaccgggaaaacgatttcgccgacttgagtccacaccagcattgttgaagtagggattctttggatggggccggtgttggctctgttgttgacgaagctcgatgtcatagtagtagaatcttgagcaccaagttcccctacctggcgcgccactgtcgacgggggatacccgtagaccggatatagagggtactggggtacgctggtacgaggatctatgtaatgcgacatcaaggaaacaagagacaaagattatactggttcaggccccttagcaggtaatagccctaatccagttgatatgggattatatggaaagaactcggcggtaccgacgagatcgtagtcaagttgattcgactagatcacccagcgacttggcccctgtaatctccgacttcgtaagctatggtcgttgtgtaggctctgagatttgatgccttaagttcccccggggggtcccttttatatcgcaggtcaaacggtctccaagtaggactcggagacaccggaccctgcacgacatagtaacgacccagtcctatacaggtagtaacctttccattggcagacttcgtgatggatttccttaacgtgttcagagaatgtccgtatatgcaccgatatactgtattgccgtatagcatacatccaagggtagagggtataccttatccgtaaccctgacaaatatatatccaagcgaattcttaaagtgaatttcatctcaactaaactgtatagcaataataaaattaaaatagccttcacccgttgcaacgcacgggcattttttctagtttatttaaaaatatgtagtaaaaggatttcaaaaattgagtaaaaagtttaaatttgaattgaaatatttgaattttgatgtatgaaatttttccatttgagatgaaaattttgaattgtgtgctaaaagtttctttaaatttgagtttgatgttatagaaaatactcctccgtccctaaatataagaaaaatgcatatgttgtagaggaacaaaatttgctaatatacttatttttttaataatttatgtatatatacatatatcaaacggaattacaaaaatatactcgtcccctgtcccgtggagcgcgacgatcccataactccaaaacacgggaccgacggtaccgcggaaaggatatgcaggaccgcgacggtcccgcaggttcaaaatgcaaaggcaaccagcgatttttaacgttgtgtagcactgtttttaaactgttcttactgttttgacactgttcacgcgacggtcccgtaggctcaacgcggtccatgaacagtgtctaaacagtgttgaacagtagcaaacagtcacgaaacaatatcaaacggtgctgatgcagtaaataaatcgttggctgcctcgctccggcgttttgaaaccgtgcgaccgtcgcggtcccacgcgaacgttgcgggaccgttgtgcccctgcgtttccgtcccacggaacggatatatttttttgtaaatctatctcatccaggtatataaacataaattattaaaaatataagtatatttgtaattttttttcgtgttgtagaggttaaaaaaacgcacgccacttaacctcctggcgcgtctgcggtaattaggattctcgaatataagttggctccacacctcttcaaagaagcggcccagtcacgtgtccgatacccagggacctatcgcaatcgtttggattggcctactgtactgggttaaggagtcttctgatctttgtgcacgtccccatactctaattttaccatgaaggaaacctaattacacccaataaataatataccatttaccattattgcaattctctgaatataagagaagtcccgaaacaaatttggtgggaaaagaagaccgaattattccaagctcccaacagtatgttgcgacgaacaccgcagcgcaggcacgcaaaagagactacagcagcaaaacgcgacagctaaaacggcagtaacactaacagcagattgacttcattaacagcaggttgacatcgagctcaagcgtagctttcggcgatgtcggcgaggcaccgcgccagctcgtcgggcctcgagagcatcacgaggtggtccgccgcatcgatctccttcacctcatccaccgggctgttcccgatcatccaccgctggaacccctccggtatggcgaggtcctggtttacgaccacgtacaccttccgcaccgagccgtagcgcccctcggtgaacggctgctgcttttgcaggtcctccacgaacatcgagctcaccctcagcagagatcccgcgagagtgacgtcctgcagccggacaaaacgattgattagttttgtcatccagtatacgctaatacgctatgcaggctcgaaaagtcgaaatgaaataattgcacgtgcttgtttctattataaaaccagtcccaaaaatcgacatcggtagctaaatgcggaaaaaaacgccatagaagatccaaacatgatgacgacaccgagacacaatatttggtaacggagttcagctgtggcctacatctctgggtactgattacgggtgctcctccccgatccagcgtatcagagttacaatgactcacagccggacgccgccggcagccgctctctctccctatgctaagtcgctatacagttacaacaggtacgtccttctatttacgagagatcctaatatagaatccgactaatactttaattctaatacctattacaacttcaagttctaaactgtaaccgactacatacacaaattcgacacaaactctaggagcatatacaacttttttttcctagaggatatataaaacttgtttgtgataagaagcgactagctggtgcttggccgagtccggtagtgaatggacaatgatggatcatagactggtctatcaaatctttatctttacctttatctttacctattataaaaatttaagatgtttttgccgtagatttcgtacgtcgtcgcagtagtgcacgttttatttatccggccgactcctcttttatccgactccgtctccttatagcatacgtacgatttttttatccgactccgtccccgcaccaatcagtgaaaacaaaataaaaataaagatgaggcacacgcaagttgctagcttcaggtaatatctgtcgttccttttttttatatagaatccaagtaaatcaagtattgctttactcggatagaaaaatcagaatcataggctgagtaaatcaagcctattctttacattacatctttatctttacatattataaaaatttaaggtgttttagccaaaaaattttgtatgtcgcccccaaattggaaacagcgcaaaaaagcaaaaaaaatcagatcggagatggaaaaaaaaatcggatcagagatggaaaagaaaaggggagcagccaagcaccccccccccaaccctcgctttgcttctccaaatcccaaatcatcgcatcgcaatccaacacaaaaacaaaatcccaatcggaatcatcacaaaatatcaacgagataaaatatcaacacaaaaagatgaggagaggagagggaaggtcgagccagaggcgccgctgctccttgccgaaccaccacctcgccgcctcgctgttgtggaggtgccgagctcgggaggatcctgagccgccgctgccactagggagccgtcgacgcgtcgttgcgccgtcgttgagccggggatccgccgcaccgccgctgcgccggagatcaaccgcgccgccggaagccgtctacccgccggatcttgagaggagcggggcggcggcggcacccagacgaggaggaaagggagcgccggtggaggtgagggagagcgccgatgggggagaggaagcggcgccactgcgccacacggtggggagaggagagacaaggggagggtgggaggcgcgttggcccgtagtagggggagaagggaggagttagggttagggttttataaatttggaaccgatccgagccgtccatcaaatgaacggcttagattgatcccaagttgggtcgtctcatgggccgcatgcgcgcgatccgcacaggaaggaataagtttactttagatcctttatctttacatcgagtttaaatcacatccctaaaccacaaatattttaagtattttctattttcagaaatagcattagtaccattttagttgcttaaaattgctgaaaaattatgaatgtttttctgacttccatcctcgggccgtagcacagttgggctgcgggcgcttcaccggctgtgtgcgcgaatgaactttctttctttctatctttcgttttataggaatatattttcttcaagggctcataacacggaaaactggaccctaatcagctaatatcttataattgttataattttagtttacccattgcaacgcaccggtattttttctagcaattaataaaaaacaaagaagacgataggtatgtgccaacaaaaataatttcagcttgcagtacacatgctaccaatgaatctgaattgtcgtgtttttttatggctctgcaattttttcttttatagtacagtccatggcacgagtaccattttgctggtgtagacattttgggtgtgtttagatggtagagaatttgggaagttgagagaaatttgatagtttggagaaaaaggtgatagtttatgtgtgtagaaaagtttctgatgtgatgtgatgtgatggaaagttgggaatttgggtgtaactaaacaaggcctttgactagctaagcgatatgcactagccgttcctatcgttctctaagagaaaaatgtggcctgagggctacatgtagctagctgatactatcatgctacatgctgatttgattcaaggatccaccaaacaatcatcaatccctttctggtcccctcttggctaaggctatattcttaggagcttgttcccaacttactattctcgtttttcacgtgcacgctttttaatctgttaaatgatgtttttttacaaaaatttctatacgaaagttgcttaaaataatcatattgatccattttttaaaaaaattagcaattacttaattaatcacgtgctaatggataattccgttttccgtgcatactgtttgggtcgggaaccggctggattgaacacagcctaagagcaagtacaatagcaggctataagccagctataacaatatatcgagaagaaaagggaagagagaggagaaagcgggctacagatttgtagcaagctgcaacacggactcaagacgttgcgtgtgtatgagaggtgggaccggatattaatggtgtagtatatttttgtatgtaactattatatgaatggactattagattagctatgaataatttgaagctaacatttggctatactattaaacttgctctaagaaagttttatactccgtaattcaaaaatataagatataaccacccttaatccaaaaaccaagaaacaattattatcacctcattatttgaatcatcctaataaatacaatgcatgcacccagtagaatatatgcatgcacatctaagaaaaataggtgtgtcttatattttggaataatgggagtagcagagacaaccatgagcttatagttaatataatagttaatatgtcctccctccagttgtaaatattgttgacgtattgggatagaaccaaactatgcaactttttgacattttagtctctgcctattcataaaggacctacttgctcctacatgcatgcatcctattactccatagtgctacatctctcgaacctggcatgcacagaagcttagtgacaggttcataccacctactccaattagcacaccgccacatttaatatgggtaataaatcatttcttggtacgtgggattatgtttaaatcgtcaataaaattagaacaagagggagtatagtagataaactataagattgtctttatatttttatctcttctctctttctctcacttatcctatcttactataaagttatcctccactaactctttaagcttaacatgcaaagatgccacatcatcatccactaacaagatgccacatcatcatccactaattaataagatgccacatcatcatctactaacaatcatcacatttaaacatcatgcaaacatgctatatctttataatttttataatttaagagcttttcaaatacaaatatgttaaattatcatctaacataattcacataatatttcaatgtatatctttattatgttttatgatatcctatatacttatatagttcatcctcactttactttattagtgtttaaatgattaatctatggtccaaattatctttctctttttttcctctaactaagtcatatcacatcaattgtttttagcctttagataattaatctacggtccaaactattttcctacttttcttctttcatataaagtcataccaccttactttttatgtttgaatcaccattctacatactatttaaatttaaataatcataaactacattaatttacttaatctgatgttatctagctatcttacacgttatttttttattattatcatactaaattttcacaacaatgcgcggggtttcacctagtatatttaatgcatttgtcttagagtatgcgaatagctagctcttatatgagaaccaaatacttttattttttttatttatttctcactctttcacataagtttataattagtttatagctacatgcaaaaaaaaataatcctcatccttcccatttccaaagtttctcgaggcattaaaatccacctccatagacgtggtgaaaacaagcgcgtacttacctctggcgagcacagctgcatcagcctttcttgggcgatctgcggcccgaacaacatggaagtggggagcttgccctctgcatcctgcggcttaaactccgtgtccatccagtccagccacttcccctcgatgaactttgagagagcaaagcaagacttgagagtaaaattcatgacaaaacagaagtggatcgatcacagtttgagggtcaattctacatctacaaatgctaggtaaaaagctgtattatttggggagtttctgacaactgaaaattctataagaagctacagctggttgaatctccccaaacaagccctgagctagcatttcgagagcccctcggctgatcagcaaatcttagcaggagaaataaattaagcagctatttgataggcaaaaaaaaaaagaatggactcaccttttcgagcacgtgcgacggccgggacgtgtggtccggcatgaaggcgcagaggaacacggcggcggcgatcttgtccgggaacagctcggcggccagcgcgacgttgatgccgccgaggctgtggccgacgaggaccaccttctcccctggagggagggagccgaggaggcccagcagcggcgcggtgtagtcgcggaacgtcggcacctcgcgcagcggccgcgggtcgacgcccgacgcgccgaggtccggcgcggtgacgcggtacccggccgaccggagccgcgtcgccaccttgaaataggtccagccgccgatgcacgcgccgtggaccaggacgaggtgcttgcaagctaccttgccgtccgccatgggtggtacaggaggtgtatcacgtatggttacgtagtccagcctcccgcgagtcgacggggcgacctctacgatcggcctaggaatatatagaccccccatggggtcatatactgccgaaagttcaaactggtggtatgaaaatgagattttacaacctctcattcaaatttcagattagggaatagggatggtagtgggatgacccatatgcacgggtaataattgactcgctttagttcattcaataattggcgcactttagttcatttaaagtggagtatatatataaaattttacttcctcaaattatttcagctcattaagattaattttaaaaaagcttatgataaagttaaatggtcttttggacaacaaacgttgagaatgaaaggcttttctcctaaatggtgtgagtggatagcttcttttattcaatgtggtcatgttggtataaaagttaatgatcaaattggtaacaattttcaaatttacaaaagtcataggcaaggggatcttttatctccaattttttttaatatagtagctgatatgtttgctttattaattaagagggctaaagaggcgggacttttgaatggggtaattcctcaacttgttgatgatggtttgtctgtcttgcaatatgcagatggtaccatcatctttttggagcatgacttgcaacaggcaaagaatatgaaattgattttatctgtatttgaaaagttgtctggcttaaaaataaattttcacaagagtgaattattttgttttggtcaggcaaaggagtgttaaaatcaatattctaatatctttggttgtaagttaagttcttttcctgttaaatatataggaactccaatacattttaggaagctttcaaatgaagagtggaaagtttctgaagaaagaattgagaaaaagcttagtagttcgaaaggcaatcatctgtcagttggtggtagattggttttgattaattctgtatttttgagtttagccatgtttatggtatctttttttacataccaaaaggggttcttcaaaaagttgattattatagatcgcggttcttttggcaaggggataatcataagaaaagtacaggctcactaggtgggatattatttgccaacccgagcaccaagggggagggggggtctttggatacataatttggaaattcagaataaatattttttaagtaaatggttgtttaagttaattaatgaggaagggggttggcaagacttaataaagagaaagtatctttataataagtctataacccaagttgacaagaaacaagaattggtctggacttatgaaagtcaaaagtactttcttaaatacgggttcttggattgtcaatgatgggaaacaaattagattttggaaaaataaatggctaggcaacttggctttcaaggataaatatctatctttatatgctattgtccgaaggaaatcgtcttctattgccactgtcatggaatctgttccgcttaatgtttctttcaaaagagctttagttggtcagaatcttgttaattggtatgagttgtgtgcttctattgtacatgtccagttgaatatttcttctaatagctttagatgaaattatcatcagaattgtaagttctcggtaaggtcaatgtacctagctttaattaataatggatatatcgagaggaataagtatgtttggaagcttaagatgccacttaagattaagatcttcatgtggtacgtgcttaaaggggttgtgttaactaaggataatttggcgaggcggaattggaatgacagcttgaggtgttgtttttgtatgaagaatgagtctattcaacatctatttatggattgtcattttgcaaagttcatatggagagtaattcagttctcttttggttttaaccttcctactagtatatctcatattttttatgggtggcttttcggggtagataagaaaaagagtaaactaatacttgttggagcttctgccatttattttgcaatatggttgagtagaaatgatatgatatttgataaatcaccatcaatttcctatatacaggtaattttcagggtaactcattggctccggttttgggcacaattacaaaggtgtgatgaagatggagactatctgaaagttgcatgtcgcaagttggagaccacagttatgcaactttttgccaattatggatggagattcataaatagactacaatgaatgtgttatccttattttagattgggtttttctttatcctgtttggtgtgttctatttgtttggaactacactcttttctggagtgctactatgtaataattggttgtagctctttttgagtaaaggccaggatattatattccattatctaaaaaaatttcaccagctcatttagtttgagttattttcagcaactcaaatttatagcttccttgttttctgttagcacgtttcctgaaatgctacaaactgtgtttcatacaaaaagtttctatataaatatttcttttaaaaaaaatcaaataaacctatttttaaagtttataataatttgtcatggttatagatactacatacctaatagtagttgattaaactcgacagagcccaccacataccatgtcttatatggaaacaaacctcgtatatagaaggagttgcggataaggaaggacaagaagagttctacatgaaaacgacacagactactcagatcgtatccatatttatctccctagttttacttggacaagggaacctatgggtataaatacaagctcctagggtataaatacaagccccctagaaggagagatgacacacccaccatagacgccacaaagccaccagccaatacaaaccaacacactaccagatatcgacatcagagattagcatagacaaacccaatccaatgcatgcggaggctgataagagggatctagcactatctctgatctcaacgagttcatgctcaaggaggaagactaccctgtcatcgactacgagttggttatctagccgccaagtcgacgacagctagatagtttatccagatgaataaagagcaacaccggcttcagccaacgggatgcagggctattacctgtcaaataaggggcccgaacatgtataaaaatccctgtctccatctcttttacctcaatctcgcatataccttggtaccaacaatccccataccatccaaacaccctagtcgcaataccaaacgtcgacataattaatattcaattaattatatgctattgacttctctaatttcacgtgctgacaaaaaattccaccaaattggaacatgtctttaaccccttaaactatttatttactcattttacactctgaactattgaaaacaattcatattactcttaattctatttctctattttgttttccctatataagtcgcattttacatcaaaatttggcacgatgatgatagatgtattgcacttacgcttgaatatttttttttatgatttcctttatgactgtttacattggtggaagcgcttaaaattgattgaaacatcataaaagttcaaacaaacattgatgagaaaattttaaagtatttttgaactttgataatggtgtcatgtatgtagaaacatgtagattaaatacatcttatataaataaaaaatataaatgttattacagagtaatatgaatcatttttaataatttaggggtaaaataagacaaataaataatttatgggattttaccagtgttaagtgatcaccgaggaaacaaaataatatttttagaattaaatgaaagagtatttaggctacaacgcctgctgctccaggcttctcacaacggagacctgagccacccgcttgaccattctctccagtgccccatcttgcagtatgccgacgacagtctcatcatcttgccggcagagcaacaacaacttgtggttcttaaagctatccttggtcctttctctgaagccaccgggctaaaaattaacttccacaaaagcaccttcctccccattaacgttcagcatgacgaggcagttcagttggcggggattcttggttgcccctagcttccttcccccaaccttacttaggcctccctctctctggtaccaagttttgtcttgcggactttcaacctctcatcactaggattgacaagcagcttgccggttggcgcggtcaccttctatcttccgatggtcggcttgcactcatcaattcggtgctctcagccctcccatcatacatgatgggggccatccttcttcctaaaagagtgattgccgctattgacaagcgccgaagggccttcttctggatgggggaagaaaactgtcacagcggcaattgcaaaattgcatgggacaaagtttgctctccgaaagaaaaaggtggtgctgggataaaaaatctcgagatagaacagatgtcttctctagaaatttctcctcaaaatgcacaagggtgattctgtgccgtggatcgactgctttcacgatcactatggatggtccgccttgcgtgacctaggcgatctttcgtggcttgacacgatcatctggaaggacatcatcacgggccttacacactttcgcagtgtttcgaaatccatcattggagatggtcggtccacttccttctggtttgataattggattggcggtgacgccctctttcaactattccctgccttgttctcacatgcaactcgccctaacatttctgtcgcggaagccctagccactcctgaattgctccttcatcttcggccccgaatgtcgacgatggccacacacgaattggccaatatccaagccctggtatgccacctagtctagacccagagacgaaaggcagatgcaccttgtccacaaatcgccccctcacagcaaaaacaacctacgacttaagcttcttagggttaccagatgaccctttcgctaagcccatttgggacaaccaagctcaagtcaaatgcaagatcttcctttggactacacacaagaggcgcatcttcaccaatgagagacgagctcaacgtggattagcagcatccgcacgttgtccattttgctcctctgatgaagatgtggagcatctcttcctacgctgtgccgaagtggcaacaatctggcacacctttgacctggacgaacaacagatcgcctccctgccgcagcttgaaggtgtctgggacatccctccacccggacaacccgccactccacgagtctggcgcactatcatgcttgccgtcatgtggaatatttggaaaggacgcaacaacaaggtcttcaattccgttgacgaacccgccacgttagttctccggtgttgtgctagcgacattgatctttggtcccacagatgtaaaaatgccgagagcaaacaacagctccgcaactgggcctcatacctctctgtaattaactcttaatttaattatccccctctcatcccctgtaacccctctcctgcaaatctttcttcatttcaataaaagttcaggctggtgccttaaacacccgctgtagtttccctcaaaaaatgtatttaggctaactattagcgtacatcgtctttgggcccatccctgcttcaaattgatggtatgaaaatgaatttttaaaacgtcttgtatgcgaacttattatctatcctactttcctacataagaaacttatcatccataccacaatggtatggctcacctcattttcgtgggtccgctataaaagacattgttttattactagaagctaaaacaatactttgtgctttaccaacggaaccagagccaacccccaacccaaggatatgagcttcacaagaatcacaaccgaaaaaaacttactaaatggatgaaaatcgtatctacctttaatttgtgctccaacattatcaatattatttaaagagagattaaacataagaatcttccctatcacacatcaagggactcataacgttctgatcctttgcactcaaaagactagctcgattagtgagaaatgtcgctaccattaagtcgtgctccccatcatgaaaatcaaatgtgaagttaaacaaaaatattatgatgtagtacgacaataagtaggtcccactattggtgctttacatcttggatattttttatcttgatattctaggtaggcctcgatatacatatgatgcaagtcaaagagataataaaaagaaagaaaaagtgttgcatagggtaggagaaaagatgtaacgttcatttttccttctttttcatgtgctcaataaatttgccaacggtcttccctggcctggcaaaggataaggaaagaaaaggataatcctggcgaacagaaagggattgctttccagaatcaatctatctatacctaataaaaaaatacgtaaggcttccagttgttattttcgtccgtcgccccgatatggttgccaaaatccgttttaatccgcttaataagtcaggtcggacattttccaatctactcccaaacctcggttgatatagaatatgtatcctctcatgtaaccaccaataacaagtagcaggttgcccacttggttagtggagaaaatcttgaacctacccaccagtgtttgaattccaccatcctctcctttttacacctattattactttgcctctccttgctcggaataagtctactatgcctcccaacatctcaaatccactttgcctctccttgctcggaataagtctactatgcctcccacatctcaaatcctagactagattgcttggataagtctactatgcgtcccaacatctcaaaacctagattgctcggaataagtctacttgcctcccatttgaaaattaaacatatatttttttttattttgtcatccatctcaaatcctactcggaataagtctactttgcctctcactgtttaatttgaaaattaaacataattattttttttctttttgtcatctaaaaaacacgacatattagagtctacaccatctatttgcacctctttcttcaacagatatttagtgatttactttgcctctactagctagattgctcggaaataagtctacttgcctcccacatctcaaatactacttagaataagtctactttgcctcccacttttaaatttgaaaattaaacataattattttttcttttcatcatccgcaaaacacgacatattagagttcgcgccatctatttgcacctctttcttcaacagatatttagtgattctgaaaacttataatgaaccagttttaaatttgaaaattaaacataattatttttttcttttcatcatctgcaaaacacgacatattagagtccgcaccatctatcgtccacgcatgagccgtgaaaatgattcgtctccacgcaagtccatgttcaattttagaaattatatcaagcacttgccatgcatccgatggctgaaaaatcaaaagttttgcatttctttcttcaatagatatttagtgattctgaaatcttataatgaaccattttttaatttgaaaattaaacatattttttcttttcgtcatctgcaaaacacgacatattagagtcctcaccatctatcgtccacgcatgagccgtgaaaacgattcatctccacgcaagtccatgtttgattttagaaattatatcaggcgcttgccatgcaagagttgagagaaagcgcgtgttataaaaatatgagtatatcaatatgcagtagtgtttcttatcagtcttgattatcattaacccaatgaataatttatctattttggaacattattatatatatgttaactgtgtatttatagcatttaacctttcattatacctgtagcgaagcacgggcattttgctagttaacttattaaaggaatagaaaaagaagcctccacgttcgctctcatggcctagaaattctcacattaatcgaagaaaaagaaaaaacagagtctatataggaatctacctatactacttaaaagttcaaaatatttccatcgtcgtaaaaaagaaaaaaaataagtcggactcaacaagcgagaaaaaagattctctcgtcagtaaaaataggaaaaaaatatttcgtagtaaaaacaacgtccgactcattaaaacagaaaaaaaaatctcgcccataaaatacatccgattccttaaaaaaggaaaaaaatatcgccagtaatgtaaacgaaaaaaaagtccaactcccgtagaaaggaaaaaaaacttctggcatccgactcccgtaaataaagggaaaaaacatgtcctactcaaaatcgagaaaaaaacacatatattataaaaaaaatcccgtttataaaagaaaccgatttgaaaaaactaaccgactagataaaaaactgaaaaaacacagattataaaaaaaacccgtttataaaataaaccggttcgaaaaaaaccacccgactagataaaaaaccgctccgaaataaaccatcagaaaaaacattgctaaaaaaaagatcgaaaaaaccatctgaattcacacgagaaaaaaccgccatatataaaaaatactaccccgaaaaaactgtctgacccaacgtgagaaaaatcccgcgtttataaaaaaattccgattcagtactgtgcaatgcgaaaaaaactgtctaatttcagaaaaaaaaaatccgatttcatgaaataagattcgtattgtttgtattgtccatcgtctaccatgtcgttttggtttttccatagcgtcgtcgaatgttcggacgtgcggatctaaaacaagtcttgcttaggcttggttttctcggaacaagatcaaattgatcgaggctttgggtcggataggattctcgatttttccatcatctacatggtttgtgttccacgattatattctcctgtattggagactctacatgtctctgtatgcaattaattgcatacatactactggtaagtatagctaatattcttgatagcttatcatataaaaataaaaataataaataaacatatttttaatttttattaagaagagtgcactgaggctctatttgtccgaaataaaccatcagaaaaaacattgctaaaaaaagatagaaaaaaccatccgaattcacacgagaaaaaaccgccatatataaaaaatactaccccgaaaaaactgacccaacgtgagaaaaatcccgcgtttataaaaaaattctgattcagtactgcgcaatgcgaaaaaaactgtctaatttcagaaaaaatccgatttcatgaaataagatttgtattgtttgtattgtccatcgtctaccatgtcgttttggtttttccatagcgttgtcgaatgttcggacgtgcggatctaaaacaagtcttgcttaggcttggttttcttggaacaagatcaaattgatcgaggctttgggtcggataggattctcgatttttccatcatctacatggtttgtgttccacaattatattctcctgtatttgagactctacatgtctctgtatgcaattatcagactactggtaagtatagctaatattcttgatagcttatcatataaaaataaaaataataaataaacatatttttaattgttattaagagaagagtgcactgaggctctatttgtttagacttgacaatacgagacaatgcaggatttgattgatcctactattattgcaagaatgagattgaaagattattttagattatatgtgtacaaccacgtaaataatccaatttgtttgggtaaaacatgcattgttaagtttgtcatagtcaagattggatcattatattaaagatgtttcaatttttcttataatatgacttagcaacaatgatcgatacgattattataattgacataattatggaatatagctgaaattcggaattaaaaataaggaatataggaagaaaagactagagtccatactggcataccatagaactaatggaaactcggaactagaaaaataagaaaactaaaaagtagaggttagagtccatatagtaatacaatttagctggaattcggaattagaaaaataacaaaactaaaagtagaggttagagaccatataaaaatacaatttaactgaaattcgaaattaaagataaggaatataggaagataagactatagtccataccggtatacaatataactaatggaaatttgggattagaaaaataagaaaattaaaagtagaggttagagtccatataaaaatacactttagaaataacgaaaattcaaaattttaaaaaataaggaatatggaatgaagtatatagagtccatataaaaatataatttaaaaataattaaattcgcaattagaaaaaataaatactgaaagataagtttagagtccaaatacaatttagacataatagaaactaggaattaaaataaggaatattggaagaagagtatagagtcatataggaatttataattaactaaaatttgaaataaaattaataaaattaaaagtagagtttagagcacatgtagaaacacattttacaaataaataaataaataaattataataaaaaggaatattggaacaatagtccataaagaaataatattgaaacatgagtccatataggaatacaatctataaataatattaacataagtttagagtccataaagaaataaaattagaaataataaaaattcagaattaaaataataagaaatattagaaaaagagtctagagtccatataaaaatacaatttataaagaacggaaattcggaattaaaaataagaaatattggaagatgagtataggaatataatttagaaataactaaaattttgaattttgaataagaaatataggaataaaatttataaataatagaaattcatgattaaaaaaataaagaatgttggaagaggattttagagtacatatagaaatataatttagaaataactaaaattcgctattaaaaataattaataactgtcatttatatacaatacattacgaatattacacattggttagtttgatcaagttagtacaaaatttaaaattatgttgtcattttaatatatttgataataaaatatgaaatatgctattatatgagagaaaatataagaatgctagccgcgcaatttacgcgggccaccatgctagttgaatattagagagtcacccacaaggccacaagaggtacacctgctactggttccgtggcgtcgtggcactacaatcgtataataccatccacaaagtcgctcgcccaaccgtttatcagtagtagtgtctctgggggacataggacaagaataaaatttgcgaataacttattttttcaataatttacgtttatatacttgcatggaaaggttttgcaaaaatatacccgttccacgacggtcccgcatttccaaaacgctggaccgacggtcccgcgggatggccatgcagtaccgcaattgtcccatagctccaaaacgcggaaccgttgcggtcccagctccaaaacacaccaccgtgctaatcagcgattttgacattgttttgcactgttcatgagtcagtcccgcggatccaacgtgcggaaccggcccatcaacagtgccaaacagtgtccaaaaaagtaaataaatttgcttgctacacagtggcgcgttttggagccgcgagctacgggaccgtcacggtggcgcgcggctatcccgcaggaccgtcacggtcccacgtttctatcccacgggacgggtatatttttgcaactctttcccatgcatttatataaatgtaaataattggtaaaatagatatattcgtaaatttttttcggacaggatagtgcaatatatctgacaagtaatctgaatgggaaaaatcacaatttaaaagtgtcctcctaagatcctgcgggttgctgggcgaaagcccaaaaatcgtgagaatcatttgattacaataagttcctcatcttgaggccgagtatgaatttcgtttttgaactgcaacaccaaatataacatgtctctctctgaacttgcataatatttatattcggtttcggcaaacgtgacgctaagtcagcgtggaactcatgtggacctcacgtgtcagcgaccagcttgctccttctatctcctcatcttccaccttgccctcgcatcaccagctctccctaggcgggcaagcggcagggacaagggcggtgcgcatcaccgagctggactagctgctacactgaaagggacgacaggcggcagactagaaggaggcgggcttgtgtagtagaccaccttacgccccccccccccccacacacacacacatctctagcgtcgtggtcgatgggtgggatgggtgacgggattctgctgcgatgcccgacaatcgcgcgggagcaccaccgtgccaactgcgacaacaccggattgagatcaaatgcagtagctactaggactgcacggtaactactgcacacaatctgagccctctatgtcaaaatctaacggccaaaacggatttggcacagtaaaatcagaacagtacctttccacagtaaatcactacagtgttttgctacagtgctcggatatatctggaacgtccattttaaatcatgcgatgctagtttgactgcttattttgcagtcccactggctactgcacctgaatcggatccgacaacacccggttaggaggagtccacgccaccgtccgagctccaccgctagctatacaggggtactcggctccaagctccactttccaatcgctgccgtcggcttcttggctctgagcaacaccctccggctgccgctcccatctgtagttctttttcctttctttgatcttgatttttcattagggctaaatttgattgatataaaaatttgccttgccagtagtttcaataatttggtaacttcagtagcactcggagcttatttagagtggagccaatattttgagaatttttacggtataatataccggtagtacatactatatattgtcattataaacaattcaagggtgtaaattgatttatctactcacttaaatcaaatgttgtaaaaaatttaagggggtaaaatggtctttctatgtgctagataatctctcctactctagttatctagcatgggttaatatgtttatgtgcttgatggattggtctgaacaagagatttaattgtgtcatctattcaaccatatctagtcagtaatacgatgacacacagacaattaatattactatagcaatggagatataacacgaaatagctaaagatcattttctattttgtggcaaattcccaacgtatccttatttatactgacaacatatactagcagtattgtacctaaaagttctcatattttggtaacactaccttaccaaatttcaccaaattttggtagtatcaaaacaaacttatattttgatactaccaacatttaatagtagaggacaaaaacattccatctacccttaaagctgaaaattttcagaaaaacttatccgagtaacatatttgaagacgagcatgtagtaaactttgcttttgtcacgaggggcacccggcaacttaggatctggattatctgcacttatctccgtagctacagtaatatgagcacagcatggtgtaaacagtacatggtcactgtagcagaagtggcagcatgctcggcagcaaaccagcagttcaccttgcgcgttgatcagcggaagtactgtagcagttcgtctcaagctttgatctgaaatatgcatggcagagaatcccattccggcaagttaacatctcaagactaaattaggaggagcggttcaatggtccgcaaaagaatatttatctcttcatgtgtaaaacctcatttgtacagtcaaaatcccaaagctacaataggtaacttcgttgttgcagcgacaatgcttttatccaattttccctgccattttgttccaccgccgtcgtccatccaattgctgttcatgtgtttatttacacttcaagtattcaccaatcacctcatgccacttaaaaactctctaacatacggcctacatatttttgtacaaacatctaaatcatggtgatataattaagcagtgatgtaacactgctagtatagaaaccaaccgtccatttcttgatctttacaaacatcagaaacactatgaaaagtgataaactgtgcggtcagatggcatcactggccatcagcctgacctcctgtcatcctccccattgagagtgtgaagtagagcaagatcaacgtgcccacactagacctgcgaatcaaacaagatatgttaagggcttgaggtcatgtagtggatcacatcttataagcaagaagcccagaaccaaggtgaggtcttggatatgtttacaaagcaatcatttaatcttctttttaaagacagtatgcataataagatatctatcccataagagctctatttctcaagtcaattcaagatcacgccataagttgagaaaagaaaataatatgacaacattgattaattgtggttcaacattgatgcattgcatcatttgggttgtcaccgtgtactacggattgcagattttcgtgtacatagtctgtttataagaataactggcccgcacaacactgtcatttaaaaacaaacagataacaaattgagagcttaaaggcttaagaaatatagagtttagtctattacagctagaaatgttgacaaaatatgttaaacctgacaaataacagaaccctgacaaattaattctacgggctaggaaaattgttcatctgaagacaagctgaggtcgattggtacacaaagctagactgaaacagacacatcttaccaaactgcaagctattaagaacttttcaccaaatggaaaactaggcaggtacacagctcctaaccgctggccatgacactgacaaggcaacaaaataaagcgcacacggttggtctggaagggacccctattggtgttttaatcatatcttggcagcttcaagaatagctacaaagggcctatctagatgaaaggggaaaatgaccatattatgaaaaatatctctacatagggcacctagttcaaatgaaagacccaaggaattaattcctcggaaactcttataggatgatgcacttaaattcgttagaattttagatgataagaaacatccaatcaaatttatggaaaattttctttggacctatgatattgatgccgatcatagcatgcaatacccatgattttctctgtatatagtcaatcatctttgttacgtattattgtgtttctactttctaattcacataagatgcaatgtatccctgtaattttctattaacaacacagctgatgaaggctactgccttttatccttaatggaaaatcaaactcacagtgctgcgaaggcaaaaaggatcttcctcgggtcacgccaccctgggacccgtctgcctgttcgtcggcgctttgccccaccagctgttggtgttgaagggtggaactgctcctttgggctaccatcaacgtgcacaggcaccacctgcttctcatacacggccaacacacctgtgcatatacaatattgagttgtgcatacgtatctgagtacattgaggagataggacaagatgatatgtgttgcattactacgttttcaacacaataaacttatgatgatttctagcacatgcagtgctactatatttcagaagaactgcaactggaggcttctacagtaacagagctctgagctctgcagtagtgctgcacagatatggtgggttaattttttctctatgaatttttagcttttttttttgggagactgttgggccagtgtggttcatcaggtcatttatgtttgtatttctgacctatatccaagtattttgccctatggataacaatgtcaaactcataattaaacctggtttccactccttaatttattgcatagagatgttgtcgtcatgaatcatctagatgcaaggattgatccctctgacctttaaatttttatgctagccaattggtcgcaccctcttaagcaaattcacatgaaatggtagatgggaagcaggatttggggatcatttgcatcgggttgcaaaccctatgcaattggcaacgtgaccccttataaagttgtaccaagtattagcaatggtacagccagagatttggtgtactagttaatagtagtacagtgtggtgcctggcccatggcccatggggatagccaagtttcatgatagtcaagttggtggcaggtaacgttgggagtttgttcccaaggattgatgagaatgcagctatctcacgcaaagcatctgacacgacacacgattttaaggtatgcattcgaggatcccacgcaagctgacgcatgcgtggagcagtggacaaactgaatccagcacagggccatccgggcgataaattcagaacaccaaactaattattatgaacggaaattagagattacgagtataatttctaactgatactaccccggtagtggtaaaagggggaagaaattggactctgagatgttcctggaatcagaatttcagaatgagcgcagcatggtgatgaactgacctgtggtagaaggattggcgtctccgctcctctcccgctcgaggcccttcccagcgaaggaggactccatcttcttctacgatcgcacaaacaaggtcagaagaactaagattaccacacgcgaacaaaccgaattccagtcaagcgaggacgcttacgggctccgcttctgccccggccgtctccgcctcgcccccgatgtcgaccgccacgaactccggcgcggcgccccggtccgcttcccggcggacgaggtccatggccatacgcgtgccgaccgacgacgctacctcctcctccacgagactcagctgctgctgccgccacccaagggaaaaggcacgaactcacatatatcaggcacacacgggtggcagagtacggcaccgctgagtccgcgacccgcgtggaggagtcgagtcgtcccccgagacttgaaccggtcgctgctcttgactccaagcggctcccccgcagacgacggggcgaagcggcgtgggagacggggcgccgcggcggcggcgtggagctcggcgaggtgggggaagaggaagtgcgagggcggcttgggcttgggatttaagaacgcggcggggagacgaaacgaaacggccggacgatggaggatggggagggggggaccgctgccgctcaccaaaatcgggcgggcgaggcggcacgggaggtgtgagcgtgacacgtacacgtggcggctacgtgtgtgggtgtcgcgcgcgcggaaccggacaagaaaattac

SEQ ID NO: 21694 - DNA, 20997 bp, Oryza sativa
tcacccccccccccccccccttccttctgtccattcgaagcaagaggattgattatacggctcaccgctcacgcccgcacgcacgtacagcggacggagtacaggagaaaggagataaatgccgtgggtttatcgctttttgtttaagcaaagctcgatcattaaacttctcaagagctcaattagtactatattagcttatcttgaagctaacattatagatatataatagattagctataaaatttggctataatttttttcttctctctatctctcacttatatatttaatgtatttatcttgaagcttgtgttaagctagttcttacataagaaccaatactcttatttttttttgttgcctctcttcttcgtataagtttatagtagacttataacttactattatatttgctctgaaaagtgtgggttggatggtgggtgggccccgtgaggtgggttgggatgttttccgcacaattgttaatgtcgtgtttctagttcgaaagaagctcagaagctgtttcctcgtagtcatagggtgatgtggcaattgttccttttctttttctgtttcgcgcatcgagcagggtgagcattttagttgtgacgggaggtaatcaactcatgactacacaaacgttaaccagaaatgagatgggcgctcttccaacacccaccagcccattctcgggtgtcacgttcacttatggaaaaagtacaccgaaggtccctcaatttgtcatcgagttacaaaatcgtcccctaaacgcaaaaccagatatatgacatccctcaactcacaaaactgttcactttatgttcctcggtggttttatctccggttatatccaacgtgacggctgagtcaacgtgagacccacatgggccccacatgggccccatatgtaagggagaccatgtcaccgccctctctctttttttcccctcttctcccctcgtctatcctttttcctctgggcgtggatggcggctgacagggaaggagcgcggcggagaggagggccgtgcggcgccattgtcgtggctgcgcgttgttgtcggggtgaggcggcgacgcatggtggcgcgggcggcgtggcggagggcaaggccggttcggccggcggttggcgagggaagagcgcggtggataggagggccgagggccgatgacttggacacggtgagctccgccggctgcggtggagacggctacgaccatggcctctcgctcgctttcgccggtaggtggagccggctactagcgtggcgatggcggtgggcacattgaagaggatgagcggctcgatctaactgatggggatgccggtctcaatgttgagctgccccagggcgcccttgccggtgaagaagaacaggagcaccagcatccacacctaggtggtgcagcgcctgcggatctagggtgtcgacgacctcggccggatccccatccctcctttgccgccgccacttacgccgacaccctcctccacatcgccgctggtcgtcgctgctccgcgtgccggtcggggtgggtgggggagacgggatgggcgatctagcttctccccgccggctttcatcgtctatcctcctcaccggccagtgcccatcgtcggctttctcctcaccgtccgaacgggctcaccggcccctcccttgaccgagcccaatgagcggtggcggcggcaaagctcggtggccacatcggacacgcggaacatcttcttcacaaggaccggcattgcgagggcgtggccccgcgcgctcgcgcggccttcctccgaggtgagcattgcgtcgaacaccgccagggccttctcggacacgctcttgtcagcgtctacgagggcctcgattagtgttgggatgagccccgtggacgctaccctcgtcgcgacgcgcttgtcggagctcaccaggtgggtggtggcgaccatggcggccttggtgacctgcgggtagatcagagccttgatgatcacaaccagtacaacgttcagccttctgggcaagctcccgtgcttggcaattgcgacgagatcgagaacccatcgagctagacgaggccaagaccctggccgcttccttgtccaatggcatcatgcaaaccaatgccgcggcggcgagagactcgaacgccgcggccagcatgcgccccgtgccgacagacacgaagcatcgccggttccgctcgctgtccctcgcaagcgcccggaccctggcgaccgccccggtggcgcgctccgccgcgccgactcgtcgacgtcgaacaacagctcggaggcctggactgggatgcgctccacgccacctctccccatctgccgccggctgcatcgagaagagaggagaaaagaagaaataaaagaaaagagaaaaagaagagaagaaataagacaggatgatgtcagaaccatcgagggatctaaagtgaatggttttgtaagttaaaggatgtcatatatctggtattgcggttgagggacgattttgtaacctgatgacaagttgagggaccttcggtgtactttttccaagaaacagctcaatagtcaccaaaagtcttgagcctttgttactgggccaactttgtgttgtgctaatcactgggcctcaaattgtaggtctatccggagacagcttcctcactcgtcgtgtttggatgaattttttttattaaaatatttacaaaactaattttgtgtttcaaagggcaactagttttgtaaatttacaaaaataatttttaaattttacaaaatttacaaaactaatttttaaaaatcactctcaaatcaccctcccaaagagtggcgggcgactagttatgtaaatttttgaaacacaaattagttttgtaaatattttaataaaaaattagaaataaaaaaaattgtgtttggaccgggattataccattaattgcaggtgtaagccttttaacgatatacttgctccgtttctaaattaaatcaacttagtacattcaaattcgtaggactttacgtataaggttgctttattttaggattgatggtgtagtggtccctaacaatttgcctgtgtcatgaaccgtcaaaaactagacaaaactcaatgctcaaaaattgaatttaaacttttgatttcaaaataccgaaattccggttgaaaataatcgaggctgagaggctcgttcccctcacatgaggcagcgttatatttccagcgtaagagcaactccaacggaatcggtatccggctggccaagccaaattttggccatcgatgggaaaaaacagggtccaacggactggctatcacgctagctatcgcagtcggctggccaaatgactgggatcgctggccaaatttggtcagtcgggagcgctcgccatcctctccctcgcattgtctctctcttcacgtgctctctcctctgcgcgcggacacggcgcaggcggagtggttgaagccgaggcgccagtggttcggtagcggcgccggcaccgggcggccgagcagggcaacgccgacgccgcctcgcgtgcacggatttgccgccgccggtttctccaactagcaggagagcgtggggcacctgggagagcaactggaggacggaggcgagatgggaacggagcgagacggcatcatcgcggaggcggagcgcgtcgcggcaggcgagcgggatgcggtggagcgcgtcggcgctgtcctgctcgagcgcggccgcggcgtcgtcggcggccgagcggaggcgctcctcggcgtcggcgaggaagcggtcgagcagctccgacgggtggcgcgcgtccaccacttcgggtcgaacccctcctccccgaactccgacgcgtccaccaccaccattttcagcccccactcgctatgcctcctccgccgccgccaccgccgcggctcgtcgtggacttggacgagggagacaaggtggagtggctctgagtttgctggattgctactactcctttgctaggtgggaaaaagagaaagaagagggagaggaggaagaaaagcaacgactgacatgtggggaaccagtgtcatagacttaaaacagagtgggtagatggagaggctgttggagcgagtaactagtttaagtggccaaatcagatggagagttggctatatgggtatttggagagtccaatttagagagactattggagatgctctaacataggcttgtttggccaaaatgatgccttttggccaattacagcctttttccttttttcttaaacatttttccaatctttccaagtgtccaattccaaaggtatggaaatacgatatttcaaaaataaaaaactattcccaataaatatcattgtatttataggaatatttagattcttttagttacatatttgataacgaaaggacgtcaaccaaaatattatgattgggatagaatgttacattttacaattttacatgaatggaaaagcacggccacagccatccactatggtgcaaagtgctatgttcttccttcgtctagaaaaataatttctagggataaatatggagaagcaactgtttagattcatctccattagttagttttttttctaagataaagggtgtactacactacactctacagtctacacagaatagagcaaaaaacacagctgcatagctggtctgctcaaagcagagcagccaccgagctcttcatccgggtacagcaccatgcaatgcaccttcaagccctccgatgcattatgttcaccattcctcagtgatactccaaaccaccttattgggcgaacacaacacccgtcaaaaaactaggtgttctattctttccaaatcatccatatgattaggatgaccaccgcatcaaacacatatcatcgacctttggtaagaggacttgcatgctgccgcccaccagattactaggtcaaagtacccatctagttgcagcatgatctaccatcgtgtactgaagggatatgaggtgccaacaagtatcaaactttagaacagagtagacatcccgacagacttggccatcctctccgatccaaattgtctaaagttaaacacctccccctaacttctaaaaacatgaagagtttgcaacgccccgaagatttcatcttccaaaggaatttcttgagtttcccacgtatctattcctctataccctcccctgcaatgatccaatttgatcttgcaagacagcgattcaatcgccaccgtcctaatcctatcgtggttatggatagttggatttcgaaattatcttttgcatttgtagcttgccgcagtaactatatgaagctccgtgttcggattgagcgtaggccgcctaaacgacgcttgtcaacaggattgcagtcagtactcctcagagttgacacgggaattcacagtcaacctttgttaagtccgatgaaacttacgcaaaatctatgactcaacaacaaatctcgaagagcgtcattccctgtggaggtaggcaaagagggcggcggtctgtcaagtgatgtgcacgttaatagcagaggcttgtggatgagtcattgcggtaatgtcgtagcatcctatcgatctattccattactgttgtatggttgcggttattttcccaatttagcagcccctacctttagaaagtacggtcttggcctatgatgttctatctcagatgatgtaccaaggattttatttcacatgaactttgtctttaatgtttaacaaatttgctttgttttcttttaaaaaaagttatgcatcagttcagatacaatgcaacctcatctatatatcctatatagttggcatcaaaaactaaatatgcattgggccacatcacccacaaacaagagccattggatcattgcaccaaaaactaaacatacattgagccatatcttgaatcagaattaatgcgtaggttcaaatgaaaatatatgtattctctaacataattaatgcgtaggtgagttagtaaaggagagcacgtgtgaatgaaatatcttggattcaaatcctagctatgaaaaattatcaaaaataaatagttaggatgatagattaatatttaaagttttaatttggtatgtagaactaatgtaacacatggagtaatgacaataattatttatgactatgtgaagtgttgcaatatgatttttttgccacatccattttgtggcaatatcaaaatttattaccactaaataaaaactattgcaataacctattaccacgctatttattaccatggctagcaacaattttaaaatggtggcaacatgtatctattgccataattttagtattcatgccacgatttttttcgtggcgacaacttatttttctattagtgaaatttatagttgcattgcacatatgaatagttcgccgcgacttgtggggagtatcatctagtatcatatataccccaggccccatttcaacttgttgaagatgaaaattaagtagcgcatgcaaaacgagaaaactattagcacatgattaattgagttttaattattttaaacttgaaaaatataattatctaatattttaaagaaactttagagtgaatttcagaaaccccaggttttggggcacctataacacaaaaccccaggcattacgatttgttttgaagaaccctaagttttggggcaaaatgtttcaagaaaccccatgtttaagcttatatcatcgtttttgctaatatatttatggataataattgaaaaaaataatacgagatatttctgagtatatataaatgctagcctcattttaatgagcaaaggtcattggtagtataattgtttatatgtataaataataggttagtgtgtcattattaatgatgttctattgcgtttttatcaattgtgcaactaaagagtaaggaaaaagatatattacataggatcgggtgtgtatttggagcttactaatgtaaaaatatactaaaaatcatatataatatttaaattatgagtatttgagtaaatatggggtttcttgaaacatttaccctaaaacatggggtttctctaaacaaatattataacgtgggttttatgaaattcactcaaacttttatgtataaagttttagtgcaaaatacgtcgtttaaaaaacgtgctagcattaactgagataaaatctataacttcggcagtgtttagttcccttcaaacttttaaaaattctgtcacatcaaatatttggacacatgtatggagcattaaatatggaaaaaaacaattgcacagtttatatgtaaattgcgagacgaatcttttgagcctaattacgctataatttgacaatatgacgatacaataaatatttactaatgatagattaattaggcttaataaattcgtcgcagtttacaggtggaatttataatttgtttgttattagtgtgtctgtatacgtaaaacaaaattagcacacgaaccaaacacggccttcatcagaaaagaacatgtcccactcctgcagatgaactgacgaagtcaatggcactacgaggtagagttgcagacacgtctatagtagccggactctagcgtaggaaaaacacgcgttgacaggtgcaaaaacgcccatggccgtcgtcctgtgtgaacgtactatagaggaattgtctcataccggatgttttttgccctttccgcgtagccccgttcccgattcccattcccagctatagtactggtggctagcttttgagttgacagccaccgtttttaaccaacgcgcgagttctgaactttctgaaggcgatacctcacccacctacctatccgcggcctttgtcattgtttctttattctcgagtcgtccggagagtttgtattcgcgggaggccggtgcctggaatgcagccaatttttaagtccagttcccattccagctccgtctttctttcttctcctcctggatttctgccggctcgagatcttttcaacgctcttgagctagcggcggctttgtttaattcgtggtgagcaacgtcgtcgtcgacgacgaattcgatccggaggaagggttcgttgtccggcccagttcggccggccggatggcattgttgggcgtcctcgtcggggcggtgatcatcgtcgtcgccaccgcggccgccgtttcgggcagcgggctgccggtgcctggatacgacgggctcgccatcgggttctaccacgagacgtgcccacaggcggaggacctggtgctcgccgagatgagggagatcgtccaggaggacaggaccctcgcgccggcgctcctgcggttcatgctccacgactgcttcgtcagggtgcgtgcctcgcgtgctcgatcccttcctcagtttctcatcatgtcgcgtggcgtcgcggggacgaaccctcgtgcgtcgatgtcgcgtcgccgtggtgcgtgctgctgatcaatggacgatgggtttttgatgatatgtttgtgcttgcttggcttcgcgtggcgtgcaggggtgtgacgcgtccatcatgctgaaatcgcgggaaaaaatcggggagagggacgccaactcgagctacagcctccgcggctacgaacagatcgaaaggatcaaggccaagctggaagatgagtgcccgatgaccgtgtcgtgtgcggacatcatcgtcatggccgcgcgggacgccgtgttcctggtaatgacgccaactccctggctactttaattcgagatcagtagtataatccgatcgccgtgatctttattatcgttcatcccgacgtacgttgacgagcggcttcgttttaccagagcaacggcccacggtaccaggtggagaccggacgccgggacggcaaggtgtcctgtaccattgacgccgacaacgatctcccaccgcccggctccaacattgtcgacctcaagatctactttagtgtcaagaacctgggatggaaggacctcgtcgtcctatcaggtacgcaataccgcaaataccagcgtccagtagtacttttggtcagtgcgagcaaaagcacacacaatatccattcaccagcttcaatttctgctcgattttgcgcgtgattttgtgcgtgattttccgcagggagccacacgatagggagggcgcagtgcggctcgttcgcgcgcgacaggctgtacaactacagcggggaagggaggcaggacccgtcgctgaacacggcgtacgcgccggagctgaggaaggcgtgcgtggccggcgaccctttcgacaagacgtacgtggacatggacccggggagcccgtacacgttcgacctgagctactaccgggacgtgtacagaaacaggggcctcttcgtctccgaccaggccctcctcaatgacaagtggaccaagcagtacgtggagaggatggcgtccgcggattcgacggacgagtacttcagggactacgcggaggccatgaccaacatggggaggatcgaggtgctcaccggcgacaacggcgagatcaggaaggtgtgcggcgcgtacgttgactaggcaagggggagtagacggagccagcgcgcggttcgttgggtgcgagttggcgcaatcgcttcgatcgatcaatcgtcatgtggccgtggcaaacgtgggggctagccaaccacagtggagttgcgttattattctatatatcggtcgaggtggttggggcgttgacgctcaccgcccgctgaaattttctcacaactggaaagaaaaactgtaggtatatcaacacatagaatagtccttctctcttttttttcttcgttcaccctgttcttcacggtatggcatggtgcaaatatatatatacggcatcttttaaaagttctacgacaaatcatgtatgtgtatatgcgtgaacatggatgtatatagtacaacgtgaacatgtatgtgtcctgccttgtcatgatggcagctggcagtttagcacatgaccgcgctctgcgtgcaagaggaggacgaggattattcgccgtgacgaacgaacgggcacaggcgaattgtcccggtagacaaaaggggatccgtgatgaaacggcgggccagatgcattcaccggccggcccgaagtgcaccgtccttgggcattttttttaaaaaaaatggggcaaaaattttgtatatctctactattataaaaactagctgggtggcccacgcaattacacggctagcacccaaacaaaatcatatatcttttactatggttttactaaaaatttattaaatagctatctcattgtcttaagactttaaaagaccaaaccttatcattctcgtgtttctaactatatagttttaaaaattcacaccagttgctactccttacgtcatcttcttttttatttgcttactcgatctatcactatttctattcattcttcttggaacctttaaaaattggattttatagtttttagagtttattgtcacgatgggtttcgtttttataatttctagatgtcccgtcaaatgttgccattatactcctctacggcccgtccactgtttcttctctttattgtcattgagattttaaaaatcgaacataattatcgtttaggttcaattttttactttctagaagtccggctaaaccatcagcggctttgccattatactcctctacggctcgtccgctaccacccttctttattgtcattgaaattttaaaatcgaacataattatcattggtttttttttactttttggaagttccaaacctttaaaaattggacttgcagttttattttttataatttttagaagtctcatcaaacgatgccactatacccctctacaacccgtccgtcgcataatctttattgtcattgtgattctaaaaatctaacataactatcgttggaattcattttttattttctagaagtcccgtcaaccgtcggcggctctgtttctcctttttattgtcattgagattttaaaaatcgaatatgattatcaatggggtttattttttttttttactttctagaagtcccagcaactgccttacttgtttgcttcacagcctgcctgacgtccctccttttaatcgtcattaggattctatttggtgttttattaataatttttatatgtcgtatcaaccaccaccactctactcctttataaacctgttacttaatttatctcgtcatgtgttttagatggtattttctttcaatagtctttatttttatcacaaattttagttatttataaattttattccaaattgaagtattatttttctttttctaatttcagaatttattttttgagtaaatttcacataaatacaggtattttgaccaaattatcacaaaactacagatttaaggagttatatcacaaaactatatatttagcactaaatttatcacaaaaactatagattttagattaagtatcataaaaatgcatatttagtattgattatcacaaaactacaacttttggagtttaaatccctagcaacattgttatggtggagctataaacatcaatactttgtgattaaattgattctaaacctgtagttttgtgataatttagttactaaatatgtagttttctaacacttcatcttaaatgtgtagttttgtgataaatttggtgttaaatacgtagttttataatacaccgagttaaatctgtagttttgtgataatttggtcatagtatctgtagttttgtgaaatttactcttttaaaaaaatagttaataccatattgtgttcttttaatatttgtattttttattttcattttcagttatttcaaaattgtattcctacttgaactcacttttaatttctctaattttggatattattttatttttcattcgaaattttaattaatctcgtattaggttcttctttaaatattgcttatttttaattaaattgtattcctacttaactcttcttttattttcttttgctaatttcggatttatttttattttatttcaaattttaattaatctcgtattgggttcttatatggactcttcttttaatattctttatttttaattccaaatttcggctatttttaaattgtattcctacttggactctcctttccttttctaattttggattttactttatttttatttcaaattttgattaatctcgttttggattcttatatggaaacttctttcaatattgcttatttttaattccgaatttcagctatttttaaattgtattcctacttggactctccttttcttttctaattttggattttttttatttttatttcgaattttgattaatttcgtattgggttcttatatgaaaacttctttcaatattgttatttttaattccgaatttcagctatttttaaattgtattcctaattggactcttctttccttttctaattttggattttattttatttttatttcgaattttgattaatctcgtattgggttcttatatggaaacttctttcaatattacttatttttaattccgaatttcagctatttttagattgtattcctacttggactctccttttcttttttttttctttttctccgattaatgtgagaatttctagcctccacagcgaacgtggtgcctccttttcgagctgtcttaataatataatagatagatagattaaagatgtttttgtctgtgctttggtacgtcattcatgtatgagtaggtttttaagttcgtttgattttgaaaatgtatatccgtatttgagtcagtttttatgtttgttcgctttgggaaatacaaaaggagtcgtataaaaatctctttaaaaaacttgtatgctaactcaagacaatcgaactcctggctgcaactcataattttctaaacaaatataaatatccacgcgaatttccacagtgaatttcaccttaactaaactgtataacaataataagattaaaatagacttcacctgttgcaacgcacggacacttttctagtatattgataaagtacaaaggacactaatagttttgtacatgacttttgcaacgcccacaaaagaaagcatatcacaagacttctcccaaaatggtaaacactcatagactaaaagtccctgcctgtagtggcggaggacgaggaaaaaaaaggtgtggtagcaacaacacgacaaaaacaacataatactatgctttgatgcaacaaaaaatgtattgatctgttttaggattcaaattcccaaacgaaattttcaagatttttttttgaatttagctaaatatatccaaatttgatcaaaatttgttcaaaattcaaattattttttgaagatagaaattgccaaaccgatagattaaacctttatcttttggttgcgtcgtataactaactaacaactagcgcttatatagatagctaattacaagagtaaaaacaagataataagtataggttggttgcattgctttgtgtaactaactagcaacaaagtgaaaacaagaccatcaatgaagaagttaatcacgcattcatgcactttaccactggctaacggaattgaggtatggctaatgccatatctcgccataccggaagcttcaccactgcctgcctggacccaagtgatcaccttttcttttatttttgcagtcattgttgttaggccataccgctgttttgatagattcttgcattgcgctcacaccatagctccgaggagatgaggattaccaaagattttagagcctttgtcggttttgcaggctcggaaggttcatctatcccaattttgcagattgaggtgcaaccctatccatctctagaggtctgaccagattcgtcgtgagaacctgcagtggacaaggaggtggactgtcgtttcatgcgtcgtgtggcatagtgggcagatttgttggtttgcccagtctcttctctagagtctatcaacaatccatgctctgttctgcaatactatccatgcaaagaatttgtattttggcgacacccaacggtttccgctcttgggtatggccaagtaggccattaacagccggtttcttcagaggtttaagttcactttgactcccttaagaggggccggatttgattcgtatccctaaaccacaataccggatatctcgaccctcaaatattaaaaccggtacaatttgactccctgcgtagttttgaagggcagtttcgcttacgtggtggtattgacatggtcttccttccacgtggcgttgacatggcgcttatgtggcattataatttaaaaaatatgtgtaggacccatttgtcattcacacaaaaagaaatgtgggacatctctcttcccttcttcctcatccctctctctctctcccttctctctctttctctttctctcccttactcttctccttcggccagcaactagcggcggtggtgggcgagagggcaggcgaggcgcagcggtgatggtgcgggcatgggcacgggagcttgatcacaccaatgatgacacatgcattgggcgcggcagatggcacagcagcagagacgcctctccttcctcaagcatggcgtgagcacgtgccttcacacgccgtcctcaccgccgctgctccccgttgttgtcccgctgccgccgctccggagcgcgggggacaatgagggagtgcgaggtggtgaccagtggtggacggtggcagcgactggacggagctcagcggggagctctagggcggcggcgccgatggtgatgaggatggctctcactcgccccttctccccagtctccttttcttcttcgtggggacagcgagggagtgcggggcagcaacctatggtggacgacggtagcaacaggatggagctcgcccagggagctctagggcagcggcgccggtgatgacggggacggctctctctccctccttctccccagtcttcttttcttcttcggcgtcctttgccatcgccgctgtgggctcaccttcgagcctccttgcccaccgctgcaatggcgacgcgccactatccgccgaaaaagagaaagaaagagagaagggagagagagggggaggaagaagaaagagataaaggatgacacgtgtgcctcatattttttttgtgaataacaaatgattcacatatatatgtttttaactttaatgccacctaagcgccacatcaacgccacagaccaggtcaacactatcatgtggacgccacgtcagcgaaaccgtcctctaaaaccactgagggagttaaattgcaccagttttaatagttttttttggggggggtcgagatatccggtattacggttccaggatacgaatcggatttggtcactaattaagggagtcaaagtgaacttatttcttcttgggacgtggacgccttgtcttccagggcttgcaatgcgctacggccctagtgtattccattcctatatgtaagtagctttttgtgtaggggcccatatctcctaccggtcatgaacttcggcccattatgcttggaaatgattcatccgcaaaaacggggtgtttttctaacggaagcacaatagcgaccggcttgatttggcgctgtcatatgattctttgctatctacacacgatagcgtgtggcaccgagcttaatgcattgttatacgtcatagtccagttgtatgggtatcatggagagtttgggaaatcaggcggtactcaatcggctaatccatcgtacaagtttgctactgtgtatttgccgttctcgcacagtacgcatacctattttattctgctctcaaagtgtcttggaaaccaagaaatacgctagagttgtttacgcctggctatcctcgcactcccagcgatcttattacaattgatcacctttatacaatgaagtcaatcaacatcctctctgcttggtcatgttggttaatctagactagatgccctagtcctcaagttttagaagaagtcaacaatagtaattttggctaaaaactaactaataatatacttaattagtagtatcaaacaaacgataacattacatttgtatttgaaaataattttatatgcggttaaatttatagttattcgattttatcaaagtataacaatggatatcataccaaaaacattgcacacatttttttagtgacccgtacaagaaaaatgtgcaaagcttcatattgatataacaggggaaagtaggaagctataatcaagaaaaaaactaaaaccatgcttcacacctacaccaagctagattgcccattgcaaaaatattgcacaccttatatcgaaagaaagtactatcctcgtcccaatataaatgtaattatgggttttcgtatccaacgtttgaccgtccgtcttagttaagaaatttatgtaaaaattagaaaaaaaatagtcaccataagtattattcatgttttattatctaataacaataaaaatactaatcataattttttcaaataagataagacggacaatcaaatgttgaacatgaaaacccacaaatacacttatattgggatggaggtactactacctaacatacaaatggatagagatcactagccatgtgtcctattggaaaatttataggatacctatatgtattgttgcatgcattagtacaattggtactttatcatgattcttttggaatacagtttttggcaatattttcaaaagacctagtttaattccgacaaatattcttcaaaatcatctattgcgaaagagagaaaagcttttgtttcctattcatagtataacctactccatccgttccaaaataaaccaatctcgtgttattacatcatagtacgatgaatctaaagataaagtatgtccaaattcgttgtactaacataacgttagtttattttaggataaatgaactataataaaatctgaaaaaaattaggaatcaaagcagtagtttctacaactgctaactactacaagggaaaataaaaacaacagcatatctcagtgcccaattatgaaatttgtgtcaatgctagaatttagcaaccgttttacagaagttttgcgagatcaatttgatccccacagtaataacagagataaatctccaaacctccaaggaaacatttgaaacggagaacttatctccccatcagatccaggaaaaatctcgcagttcaaaacggtgccttctgttgctgacccgatctggcgacgcaactacagccagatacgcgcacgagcctgcgggaaggagagccacaagagccacaaggagagtccgtccgagggggagagagagaagcaaacgtagacggcgaggcaacgatccgaacccgaggtgaaagagattatcccctcaaacaagccaacggccccaccaccacacccctttaacattctccgcttccttcccttgcctcgccgcttcgttctcctctcgccgaatcaattcaccaaatcgaagagaaaaaaccgcaaaccagcaaccgattgcttcgttctcctctcgccgaatcaattcaccaaatcgaagagaaaaaaccgcaaaccagcaaccgattgcttggactaagcgcatcattattttcttttttttttctctcagagagagaagtagtagtaataaacgtaaccttttcctcctattttatttcacctaatcccaatctcctccccccttccttcctcggccagagaaaaaaaaaagagaaaaaagaggagaggcctcgcaactgcaaaccctcgctttctccgatcgaattgctcgcccgagcaccaccagttcgccgcccttcccaccaccagtcgcctccctcccccgcgcagggtatctcctccggccgccccagtggcgattccccccgagctcccccgcgcggcgccgtggccatgtcgctcacctgaggatacggtcggtgggctgtttcttgcaagagtctctcccccgagccccccaagagaaacagcccgggggacgccgagttgttgattcgatcgccggagttgcgccgaggtgaacctgttttttgtttttggtggtggttccgtctcggttaatctgctttaacttggaggcaaaggctcggtcttcgtctgaggaacgcgggggagcggtggtagcgtcgcgtgcacgggtcctcctcgaggtcggcttgatgcggagcggcgcgcaggctcctcgaggcggcggaggcggcggggccttctcgaagcggacgctgtccggctacatgaggatcatgtcgtcgggggcgtccacggccgcgtccagcctgctgtcggtgggcgcgtcgctggtgaactcgatcgccagccacgacgaggatgggagccgtgaccaggttatttcgcttgattttaaacaattcactgtgctcgttggtttttttgggctgtgttttactagcatagcaactgctagcttggcaataattgtagtacaacggaaaagcctttagatgtctcaccgtctcacgtgtgcattagtggtaactggtgcaaaatgagcaaagattaattatggctggagggcgcaatcagtttctgctcctgccaccaaggtgctcaccatatgtggcagtattagtatttattgttagtgttgatgcatttattttgagcaccatataacaatctgcctatgtttgaaatagatagtgcttttggtagttactagcaattgtccagcggaaagaaaaagtggtgagatgattagtgtgttaacattaacaatgctagctgcagatgttaatccattgagttatcatgaatatgaaaagcttcttttgagcttcggctataattctcctggccaaataattcctatttggacagcacattatgatacgacgctgcatattatatgccattcctagttcatccaaatggacaaatgttgtggcaggagtagggtcagtcaaatcgtccggatgtacataaaccggttggatctaagtaaaagatcccctttttagtagaagtaataattccttgcaaaggatccatgtctacaaaaactagcaaatacatgcagaagggtaacttttccttttgtttgcatcctcgggaaatattttcatataaaaatgtatttacacctgtcttacatgtaaaatgtggttgcaggtacaatgggctggatttgataaacttgaatgtgggggtgacatgctgcgacaggttttacttctagcttacagatctggtttccaagtatgggatgttgaacatgctaatgatgtaagacagctagaatccagacatgatggtacagtttctttcatgcaactcctaaagaaaccaattgcctctacaaacagtgaagacaaatttgcagatgaacggccactgttagctcttgcttgtgacggaactagcacaggaagtctaatcagcaatgatggcaatggccctgttcccaatggagccaatggtactctccataatattggccatgagaatcatcctactgtacttcggttttattcattaagggtccatgattacgtgcatacaataaagttcagatcaactgtttattccatacggtgcagttctagagttgtagctgtatctcaggctaatcaggtatgccatactccacgcttttaacttggtgtttggatcatgaataatcctttatggaaaacaaaaatgcttcttgcagatacattgttttgatgctgcaacactggagagagaatacacaatccttaccagtcatatagttccaccaatttcaagttatggaccacttgcactgggtcctagatggattgcatattctgggaatccagtcccagttccggatacaggccgtgttacccctcagcttcttaatctatctcccctagttccacaacctggttcaaatggcagtgttgtggcatactatgcaaaagaatcaagcaagcaactggcttctggcattataacacttggtgatgttggatataagaagttgtccaagtattgttcagacttaattccaagtagtaacaatgttataaaccaaaggaattctggcttcaaagcaaatggggcaacaataaacgggcatacagacagcgaatatgctggaatggtacagatttcatctcagtatatgttggttaccagctttggatactctattgtgatgtttctatatgctaaccatattaacaaccaaccaattgaaggccattgagaaacccatctgactagttgagtaatcatctgatggtgcagttggtgttgttcctgtctgattgcaccattcagccctaactcgctgtctcgctgtgcataaaaatgaaattgtttgtcattttattttgcaaacaacgaactttgagttagtcttgatgattccaccaaaaagattctgttttgttaaaggcataatgagaattactgttaacaacttatccctcaatgcaacatgaatttaagttttccccttctgcttaaacctagcaaaagcaggtgttgtcgtaggataaatgaaaagttaattcatcctgtggtcgtacttttgtcttggtggaattcagatatagagtaaactgacgatggtggatgtcaaaacttatcctgattaagttggttagtgatagcgcttatttgtgaccaaaggagttgttttatatattaaaaagttgccaggagtattatttcaagatagttttgtgcatatgccactgatatgccatatctcactgacaattggtacttataggatggagtgaactttcagtgaggattttatccgtactcatatttgtcttgccagcttcatggaaccgtgacatttacaatgttccctttccaatgacaggttattgttcgagatattgtctctaaatcaatggtggttcagttcagggcacatactagccccatttcagcactctgttttgatcccagtggaactttgttggtgacagcttcaattcacggtcgaaatatcaatgttttccgcattctgccttcttcgcatgggagttcatcagaagctggtcca

SEQ ID NO: 21695 - DNA, 1130 bp, Oryza sativa
tacccatgaattcagaaccccagagtccgcacatcctcaaatacaaagcacttccctagttagatgtaggttagacttcccgttcgagaaactctaccttctacctgccctcaatttatgcacgattaatgaatgccacctgggtggaagcgagaggtggaaatggaaggtcttagttcggaggtgggatctctacctgatagttgcattgccattcatgatgatcccctggcattcgtccattcagccattcaccattcacccattcaactggaattttggttaatgccggaattgtgtccacaaattgtggatggatagttggttggctggctggatggctggctggatggctggctggatggatggtgaatggctggcggcggttcggttgctttgaagcatttgttgctatctaaattccatttaaggtcgtaccttatcgcccagcatcatcttattctctatttgtattccctccatctttcagatacggatgtagccttggatgtgcccgtgcccaatgaagaggaagagcgcaacatgaaacgtaagtacaaaagtaccggacacccacccagatcccaatagaatccgccaaatcctgcgggaaattgtaatcccattcaccagctcctacatttaattaacaagagaactattgtatttatctaacacctggattatctccacctttcatttgatccctatttatagattacgctgcgttgctaacgggccgcacctcctatttcctcaagggtgaggaaatgaagtccatgtacaccacctacaatccgcagaatgtggtggccaccgcccgtttcctgttccacaagaagaatctatactactccttctacacctcatcgcgaatcggtcgtccgcgtgccattcaattcgttgatgatgcgggtgtaatcctggaggagcatcaactggagaccaccttggcgggcactctcagtgtctatcagaatgccacgggcaagatctgcggtgtctggcgacgagttccacgtgattacaagcgcatcctgcgcgacgatcgtctccatgttgtcctcctctggggcaacaaacagcaggccgagttggctctggccggaaaggtggccaaatacacggcc

SEQ ID NO: 21696 - DNA, 4783 bp, Oryza sativa
ctcatagcctagcaggaacacgattggatgatcaaatataactatgaaagcatcaatttttttggaatatgatttttgatgattgtttccatgatttaattaatattacgaattatgtactcgaagccaacctctctacaaataatttgtttagctagactacactgggcaataattaagtacaatgagattatataatcatacatataatgcttataatgcctatccacttgccataattatcattgttttcatgctatattagttagaaaccatagtttatgataatcttttaaaataaatggctaattttatcaggttatgtcattcgattatttataactaatttgcagttaaagaaccatattaacacaactaaattaaattgtttgtatttttacatatgtagattcaaattagtgttgtatatttgctaagtaatatttgaaactataaaatatgatttgaatttttaaatgttgttatggaatttataattacatgtcaaatgtcatctgccacattgtagcttgcactaaaatatagccaacataattcatcaaagtaaaatcacaccaaaataagtgataattacataatttgttttagtcaaacgaatgatgaaaacatagatcaaaagtcaatagtgtaaaaactggaggtaatataaatattttgtggcaaaaagagcagggccggctctacatattttagggccctaggccaactccatgacatgggcccttaggcatacactctctctatatatacacatatgcactttgaatttttaaagtatacttttaaagcattcatccgctaatcacgctgaaaataaatattgataatatcctctatatatgttgctaaaaataccaaaagagcattaaaatggaattactacggttaccttgaaatcttgactaaggatcaagctccagggacttcattaataatacttgacaaaagataagatgacagacatccatttgcttctcataaaaaaatactccttcggacatttcttgatgcaaaatcattaatgatggtatcaagatcaatattgtccaagacatttttctcaatgcaacacatagccaagccatttaatctttcttgtaacatggttgatctcaaatagtttttcaataactttaattttgagaagcttctttcagctgaggctactatcacaggcacagttaaaaggataaatgctttttaggtaacattgcaaacctaaacgtatagatgaaactgatctttaattagtatttactagttactactgactgattaatactttgctagttcaattcaatggagtatggacaatatggttgcagcacagcagtacgcaagtacctgtaaattgaaacctgcagacactctggaagtaggcagattcacattgtgtcagcggtcgccggtcggacgatgtccagggcaaacagtcgacagacaaaggcacaaagctgtgaagggctgaatgctgaagggatcgccggcggcccagcgtggggtgaacttgcagaggcgccgtggagggcgcagggcgatggaggcggattggcggagactgccgccggtagaggagaggagacgagaagactggaactcggacggtcgcgtatgcccgacgattcgatcagaaacttgtatacatgtatatggtatacctaatacatacctaggtcttctgggcccctacttttcctgggccctaggccatcgcacttcttgccgtagcccagagccggccctgaaaaagaggagatacaagtgcacgtgagggagagaggagagggagggattacattctgtttataatctaatctaatctaatggtctaaaacaatgagcccaccaatttaaatgaaaaaaattgagggctagatgtttctaatctattagaatgccacttggtggtttagaagcgtttacagaaatgccacattggcatgagaacgcttgtagtatgtttaatggacttgttcaagataaagtggtataattcaaatatcataaaatttggtgttatatatgaaaaatgtcatgtttaagagtgccatatgttaattttggcagtgcagttggatgctgaaagccgacagagagaaaattaaatcaaagatgaccttttgttagggatcgatgtggaagaacatgactgtattactgtaatagaagtttattaaataatcttaacatcttagagatatttcattctagagatcttatgtctccagttggttgtaggtagattggacgtccagtatttctatgctaacatggccctccgctattgcaaggaaccctaggaagattgattaatttagttttctaaatttgattttggttccatttgccctttgggcttgcttaactgatggtatcacctgctgcagcactgtctgtactgttagagaagtgcaagaatgtcgaggtcaatgtacagcaagaagaccaacaaaggagtattcctcttctcttgtacctcactagtcaaagtgacaaaaatgggagcactcctcttcactttgctgcatcgttgaaaactagtattgaaggtttcacatcgagattatgtgaacattttcgcccgaaacaaagcccaacaacattgcttcttggactcaatgaatctgctatatatcagccagacaacagaggatcatatcctatacttgttgctgcctccaatgggatactcaaggttgtcataaccttgctcaaaaggtatccagattgtgccactttgcgtgacatccaaggaagaactttcttccatgttgccgtggagaagaagcggcgtaatatcgttgcatatgtgtgtgaaaggccaggattttctcctatcttgaatatgcaggacagccatggggatactgctctacaccttgctgtcaaagccggtgttttttcaattttcagctcgttgttccggaataggtaggtttgcctgaatttatcaaatgaggatggtttgacacctcgtgatctttcgtggattatgatacctgcgaggttgtactctaaaaaggtaatcgttctctgccttttctgaccataattatcccatataatacactacagaggccgagtttagttccaaacttattctttaaacttccagcttttccatcacatcgaaactttcctacatacacaaactttcaacttttccgtcacatcgttccaatttcaatcaaacttccaattttagcgtgaactaaacacacctagagttgatgatactatacctatttaactaggctaccacatgttaatctttcagaacccacgatatatgataagtcaactattagcactttctggaggtactgttggttacagtcgccaggaccacttcttcgaaaaatacagcaagaaaagagacgaagtaatcgattcaaacgatatgacaagtgcggcacaggttctcggcatttcttcagcgcttatagcaaccgtgacatttgcagctgcattcacgttgcctggaggttacagagcagatgaccacactgatggtggtacaccaacacttgctgggagctacccttttgacgcgttcattatctcgaacagcctagcattcatttgctctttgctagctaccgtgagtctgctctactctgggatacaatcgagggacatctccatccggcgcaggtactacgcgttctctatgctcttgatgcagagttcaactacgagcttcactgttgccttcgccatgggaatgtacctggtgctagctcctgttactcttaatgcagcagtgtctgtctgcatcatagcatttgtttctctgctacctggaaatatggaaatcggggtatccctagctatcgcaaacacattgaggattagattgggaatttgggcagcgatgtcccaagcaaggccagttctcctgttcacgtggaaaagagtttggtcctgcataattatctttggattgcctggattgatgaagattcatagaaccaaaatggcttgattggcgtgtcacctttttttctgcattgatgtactttcttaatatatcctttattcggagtgttagaagtacatttacacaacatcgtgtatgacagctttgctgttacccctctgcattttaacgtagaatatacctacgatcttaggcagaagatgaaagaggggaattcagagtgtggcaaataagttacagtgtatttactactccatatatactgtaagttttcataaatgtgtgactgaaacttttttatgttccactgttttgaatgaaaaacaaatgtttataatattatctaatcaagatttttttttcattttattggccagccagctaattattatttatgtgcttgatatcacgttcctccaatcgtttgatgatagaaatttgctccaatttaacaaaaagtaccaaatcattttcgatcgttggatctaacaatgcccatcctgcccagctaaatccaacgatccagtatcgtgaggtactagtacctcgaggtactttttgcaagaccagagcaaatctcttattgctaatcatgagacctgtatgtccggactaatataattaagggttaattggatacatgccattataatttttgcgatatgcatgacaacacaatatatgatagttaagggcatgtacaacaataactataatgaattaatgatatgcatgacaatacaatatttattattactagcttggatgagagagggggaatagagaaggatggcttagtcacaacacatatatgagaaagta

SEQ ID NO: 21697 - DNA, 9692 bp, Oryza sativa
gagattattgattttgatattgggagattattggcaaagtggttttggagatgattgaatttttaggtgatgaacaggagattgctgacagtgtggactggtcagaccgggcagtggttgccggtcacatcggctgtacgtgtgcagtcagaccagccagcccgcggtctgaccaggccacattgtgttaatttcggttttaggttgtttctttggatatctagtggataaatcatgtttatgacttctagatggatactttgcgtatgtaatactgttgtgtgctaacaatgagttaagttggagagagcttgtgcttggatatggtttctttgttgatgcatgtgtaggtgagtcttgatgccttgggagagcgttgccggtgatggatgatgagtcaacttgggagaagatgacatccgaatgatcaggatatcatgcgggatgctaggctaaaaatcaataaatgtgcgtatgggatgcagagttgaatttggagggagaccgaattcggtacaattacagtttgtaagtttgtttcttgtacgggaaggtttccttcgggattaggagttattgtataaggttggttaattcgatgctttaggctacctacctagggtatgaatagtgagggaggcctcccggtatcgtttttgagagagttgagtttagagaaaagttagggtttagagtttcattgagatttttgtgaggagtgttgttgttgcattttgaaaacacagagagaagtaataaattttcaatctatttcgagagatcttcgatttgtatttgctcgggttctgcggtccaaccggcgggacacatgccatcagactggcaggaatacgatggtcagaccggtggcaacgacaggtgacagcggtgtgttaggcggtcagaccgaagctactacactgctcagaccgaaggtcatcgagcggtcggttcggcgcatctactctagtcgaaccgatcgccatcgaattgatacaacttttaattccgccaaaagttttgctttttagtactacaaccattcacctcctttggttggcttggtatttactgttcaatcctacaagtggtatcggaaccttgttttttccattagatttttatcgatctagagttttagccatggctaacatgcttacaactaagccacatgttttcgatggattggattttccttattggtgtgaaaagacgatggaatcttacattatggctcaagattacgatatttggaaaaatcttgctaatgctgatgagattcctgatcaaattaatattgttgctttaaagattgagtttgaatataattgtaaagcatgtaatatttttctcagtggaatttctcgttttgactttggttgtgtttctcatcctcaaactactcgtgagatttggattgttttacctaactttcatcaaggtacttcaaatatcaaggaacttcataaagatcttttcaaaaatgattacataaaatttgcgatgaaacctggtgagactttggatgattatcttgctagatttaacaaagttttgagtaatcttaaatctattgatacatcttatgatactaattactcacaatatgaggtttctcgttactttttaaatggccttgatatttctatttggtagatgaaagttatatctattcaggagtctattgatatgtctactttgattttagattcactttacactaaacttaaaacccatgagaggaatattcttttttgtaaagttgactttaaatctagtgttttggtttctccttcgacttccttggatattggtgcttcttcgtcaaattctaccgctcttgcttctataaatgtcatatccgatgatcaacacgagcaactcgaggaggacttggctttggctattgttggtatttattacgagcacaaaataatctacaggcgcacatataccgttgtagctttcacccaacagtattccagggtattgtatccacaggaaacgtgtgtgaacaatctaataacagaattcatccaatgacaacaattaaatagtaggccaaagatagagatgattcctatgggttaattatctaaattaagtttaggtaaaactctatcaatcgctttcggcacaggtttacccctagtctaccaaggagactctggcctacaactctatgttgtacttgaacatggaggattacaaaggatggacagggttatcaccacctgctgtctacctctacaacccgtgtagcacacagcaaataaaggtaacctctagcttagacatcatgtccacgctattaattactaccctaatctcggatccacatagaagattaaggtactctacctaagagtgatgaacccgtaatgatgagaatatatcttgcataaataataaaagtaaataccaaggagatcacaaatacttatcatctccagccctcctccggaacacccctggatgaatgtcgacatctccggtgctcctccgaaccaccccctcccccgagagaacttcgacatttgacacactcctttcagagcttccccacactcccttccaatattctaattctactagagagtagcctaaatgtataagtgagttgtactccacttgttgtgttgtgccttgagagtaaatggagaactcattttataagacaactatgacggttactagggcgataaccatccacaaccatcattgggagagcatcgtagtcccccacgtggcagcagatggcgaggggagccgatgtcagttcagctgaactaggagttcgatcgacccttggatctaacatcttcagtcgcgtagacctgaatgcactcctagggtcggtgggaacctccctaccaaagttgggcctaagaggccacaatggtggttcgatcgaactcctagataggttgttttcagccgcactggtctaaatggcctcctggggtcggtgggaacctccctgccaaggttgagcccgaaaggccacaacagtggtttggctgaaccatttttggcccttctcggccaccccttttgtcaggtcactgtccagtgggcccccatgacagtgcacgagggttttgctacggtttgtgggccctccaaatccatgtactcgcgtctgattagccggaggtttgttttattgcatggcggatggttttcgtccataattcacctacatacaaatattcagcaagacttgtgaaaatggtcagtaataaccactatctctaagtttgatattccattttatattctttcatttgtttttatgcgtgcattgattattggatttgctacttaaggaccgtcaacaacacctcacacttatcctttactcatctttgagtaaagctcatggatataaaaaatagagcaaggacttcctgatctcctatttcctgtactctctcctctttttctacagtttgtatgtttgctgctgtgggagggagattcacttcacacgcagtaggatggatgcgtgcgtgcatgtgcaatgcatgtgaaagagcatgtagcctagtgattgcagtgacctgagtagcggtcgtgagttcaaatcttcataggctaagtttctaatttaaaaatgttgtatatatcggtcgtatttgaacataaagaccgataaaaaaaattactcttctctaaaaaaataaaaaaagtaatgcttaggcaagcggggtggggggtgagtgcctgtttggttgatgccctcgttagcatgccggagaaatttgcatgcgtgataggcatataagatgcggataaattgcctggccaggcagcctgacaccttgcttgtttggttgtgcacctctgcctgggaggaaaaaaaacatgattaggatctagattggatctgctaactcacatactagttgaatgacaaatcttggctttttaccgcccctccaaagaattcaacgtaatacccagttttttttaacaacttgcatacatcaataagaaaaaaagaacagaaaaacacatgaaaaaattaatccccaaatccacgcatctatcataaccttcaacgattcctcccagctagttgccaattgattcaatgaaacaaaccgttgaagccttcagtgtcttgcatccggcgtgggcgtgtggctttagcgcatgcttctgtgaaatcattgtcatgattaatatttgtgatgaacaattggctattcaaatgatttaatcaaagaattggtttgagagtttgtgtgaatgttggtatgagtgcgtgtgactaatgtgggtcaggttgtgatatctgtgtccagaaacggttgttttgtctgattgtgtgcaggtgacttgaggtcagccctagtcaatggtgaggaccgggactatgctcagggaggagcagaggtctattgcggtcgggataccatgtgagaaggtgactagagtctggactcttggaggtcaactttggtcaacggtggggatcgggactagactcaaggaggagttgaggtccagacagtcaaggataccgggtgacgaagttggatacaagatggcatacggtggatagacatcgtgtgggagagatcttcgcaatgggcttcatgaggtatgcgtgcaagtgccggtattcgcgaagggaattgtaaagttggagtagtatatggtgctacagtacacgaggtactgtagcatgcaggtatgcatgcatgtacggtgctgtgcatgtatgtgtgatcgatacatgcatggtgaagcatgtatgtgtgcatgaatggttggccgagcagcaggagagcggctcggtgggcctcggtggctgttggcggcatgccaagtcggcccaggagaagcaagggcccagctggcagcgagtcggagacggtcacgcgtggacgtcagcttgggagcgaatccgttttagatttctggtgcggccggttgtttgctgcacgtttggaaattgtaaaacgtatggaaactgaaggatggagtcctattgtgtataggagttctacacctactttgagtaggggatttttgtggtataaatagagagggagcgtgaggtttcctgtatcgctttagagagcaatagagttgagttttggttttgggtttcgagtttagtcgaaatttttgtaaggagtgctgttgttgcagtttgtaaacacagagagaagtaataaagtcgtcatccactttaagagttcttagatttgtgtttcaccgggtttcggcggtctaaccggcaactcaccggtggtcagaccggcggcattgcggcggtcagaccggcgggagcgaggcggtcagaccggcggcggcgacaggtgcggcaagcgacttcggcggtcagaccggagattcaacaccggtcagaccggcggcatccacttggtcagaccggcagatcaatctcggtcagaccgacttccgtcaatttcgagggtaacttttatttccgctaaaagttttcgatttttgggtataccatccattcaccccccccccctctggttggcttagttcttgtggttcgatcctacaagtggtatcagagccttgttttcttctttggatttttattgatctagagtttttgccatggctagtccctctaggttttcaactaagcctcatgttttcgatggaacggatttttctcattggtgtagtaggatgcaatcttacattatggctgaagattatgatatttggagaaaagtttctcatgcttatgtgattcctgaagctattaatactgctgctgaaaaaactgcttttgaacaaaattgcaaagctcgcaacattcttttgagcggtatttctcgttcggattatgatcgtgttgctcatcttcaaactgctcatgagatttgggttgctttgagtaattttcatcaaggaacaaataacattaaagagcttcgtcgagatctttttaaaaaggagtacattaaatttgagatgaaacctggagaagcttttgatgactatctttataggtttaataaaattttgagtgatcttagatctgttgattcttcttatgatgctaattatccacaatctgagatttctcgtcactttttgaatggtctcgacatatctatttgggagatgaaagttacatctattcaggagtctgttaacatgtctactttaactttggattcactttatacaaaattgaaaacacatgagatgaatgttctttctcgaaaagttgattctaagtcgaatgctttgatttcttcttcttcctctttggatgttgatgcttcttcatctaagtcgtcttttcttgctgtttttaatgccacatccgatgatcaactcgaacaaatcgaggaggaggatttggctttagttgctaacagaattgctcgagctatgaataatgccaggaacaggaaaagaggtggtccaaatcgttgctttgagtgtggttcaattgatcatcttcgttcgcattgtcctaagcttgggagaggcaaaagagaagacaaagatggtgagaagaccaacaacaataagtccaacaacaacaagtcaaagggttcataccaagggaggaagatggagaatcttaggaaggcttttcaacaagtttgcgccgccttcgagccactaagtgatgtagatggtgaaagtggagatgatgataagggaaataacgtctccgatgtttgcttcatggcgcgtggtgaatctgacatagagtatgaagataatgaggtgaatgcttttgaggaagctattaatattttgagtgcaaaaaataaaaagtgtgagaagatgtataaaaaacaggaatttatcattgaatctcttaaatctgaaattgataggttaaaatctcttattcctaatgatgatgattgcgaaaattgtgagattttaatgaatgagatttcaaaaattagagatgttaatgctgcacatgatttgaaaaatagatcttctcttgcttgtagttttgctttgcacacacgcactttggatgagttgtttttaactaaaaagttgttgcaaaaatatcaaattgcttttcatgctagtttgatgtttaacatgatttctgctaaaaagttaaaacaacctcatgatgttttggattgctcaacatgtaatttgaataagttgaaattgaaagatgctttaggtcgtgttgagtacatggaagatgttgtgaaaaacaatgaagtgctttcttgccctaaatgtcgtaaaaacaaaggtgtcatgatagattgtgaaaattgtgctaatttggaaaaagtggtttcttatttgaaaaatttttgctaaggttttctgattgtaaaaagaacctcaacatgattttggatcaatcaaaggttagtacacataaccatggtttaggttttaatccttatgctcataattctagacatcctcctgttgtgttaggtgctgatgctacaagtggtgagattttggttaaacctgatactaacaaaactgtgtttaaatctgctggtatcatgtctactatgagtgcatcttcttcaaaatccaatgttgtgcatgtaaaatctcctgttgttgctcatgttgctaaatctactagtgctaccaatgtgtctaatcatcgtgaaaattatacttgttctttttgtggcaaagatggagatattgttggtttttgtttcagattagctcataaacagaaaaaggagagagagattgcttttgcaaaatcaaagtggcaaaaatctggttttccctcgaggaaaccgatcagaccgcagtgggtcccgcggtcagaccggctgaacagcctcggtcagaccgaccaccggtcagaccggtggtgaagcctcggttagaccggcccccagtcagaccggccactgtacctcggtcagaccggcctcggaggaatttttctgaaaattctaaaattgattttgcacatggatatatgcctattgaatcttctggtcgtgtgtctcagtactggattcctaaatttttattatcatctaaccccagtactgaggcttcgacttctgcttgtgtgtaggctttggtggcaaggagaacgtgtagatcatggattccggttgttcgcggcacatgaccggtgataaaaattggctctcctccctaaagaaggcatctaagactgaatcgattatctttggcgatgctgctacaagtgccgttctcgctacaggtatggttaaggtaaatgaaaaatttgaattgaagaatgtagctttggttgaggacttaaagtacaatttactttcagtttcacaaattgttgatgaaaattttgaagttcactttaagaaaactggaagtaaagtttttgattcttgtggtgattctgtgttgaatatttctcgctatggaagagtgtttaaagctgattttgaaaatcctgtttcacctgtgataacatgtttggttgttaagtttgataaagatgtgatgttttggcatcgtagacttggacatgttggttttgatcatctcactaggttaagtggtttggatcttgttcgtggtttgcctaaacttaagaaagatcttgatttggtttgtacaccgtgtcgtcatgctaagatggtttctacttcacatgctcctattgtttctgtgatgacggatgcaccgggacaactattacatatggacactattggtccggatagagtgcaatctgttggaggaaagtggtatgtgttggttatagttgatgatttttctcgatattcttgggttttctttatagcaactaaggatgaagcttttcaacacttttgtggtttgtttcttcgattggatcttgaatttcctggttcttgaaaagaattcgaaatgataatggtggagagtttaaaaatgcttcttttgaacaattttgcaacgaaagaggccttgaacatgaattttcttctcctcgtgttcctcaacaaaacggtgttgttgaaagaaaaaattgtgttttggttgagatggctagaacgatgttggatgaatataaaactcctagaaaattttaggctgaggcaattaacactgcttgttatatttcaaatcgggttttcctgagatctaaacttggaaaaacttcttatgaacttcaatttggacatcaacccaaagtttcacatttgcgtgtttttggttacaagtgctttgtcttgaaatctggaaatttggattattttgaggcacgttctactgatggattgtttcttggttaccccgcacacactcgtggctatcgtgtacttattttggggactaacaaaattgttgagacttgcgaagtttcttttgatgaggctagtccaggtactagactcgatattgcaggtacactgtcacaggttcagggggaggatggtcgtatttttgaagatgagagcgacgacgactacgacgacgaggttggctcggccggtcagaccgggcgccaggccggtcagaccgccggcacacctccggtcagaccggctcatgaggagcggttagaccggccagggtcgtcgggttccggtactgttgatgctgatcgagatagacctccagagattactacttcgactagtactgatacagaacgtggatcaacttcagaagtggctactcctttgcacatttaacgacgacatccaccggaacaaattattggtaatattggtgagcgg

SEQ ID NO: 21698 - DNA, 12155 bp, Oryza sativa
tgcttcttttgaacccaaagatgtgtcacatgcattaactgatgaatcgtggattaacgccatgcatgaagaacttgaaaattttgagagaaacaaagtttggactttagttgaaccaccttctggacataatattattggaaccaagtaggttttcaaaaataaacaaaatgaggatggtttgattgtgagaaataaagctagacttgttgctcaaggttttactctagttgagggtttggattttgatgaaatttttgctcctgttgctagaattgaggcaattagacttttgttggcttttactgcttcaaaaggttttaaattgtatcaaatggatgtgaaaagtgcttttctaaatggttttatacaggaggaagtttatgtcaaataaccaccaggttttgaaaatcctgattttcccaatcatgtttttaaattgtctaaagctttgtatggtttgaaacaaggtcataggacatggtatgataggcttaagaactttttgcttgcgaaaggttttacaatgggaaaagttgacaaaacgctttttgttcttaagcatggtgataatcaacttttcgttcagatttatgtggatgatatcatctttggttgtttgactcatgctttggttgtagattttgctgagactatgcgcagggaattagagatgagcatgatgggtgagttatcgtactttttgggattgcaaattaagcaaacacctcaaggtacttttgtgcatcaaacgaagtatacgaaggatcttttgagacggttcaagatggagaattgcaagccaatttcaacaccaattggttctacagctgtgttggatcctgatgaagatggtgaagctattgatcaaaaggagtatagaagtatgattggttctttgttgtatctaactgcttctaggccagacatacaatttgctgtgtgcttgtgtgcgcgctttcaagcttctcctcgtgcttcacatcgtcaagcgatcaagcgaataatgaggtatttgaatcatacacttgagtttggaatttggtattctacttcatcttctatatgcttaagtggatattccgatgctaattttggaggttgtagaattgataggaaaagtactagtggaacatgtcattttcttggtacatcattgattgcatggtcttctaggaaacaatctagtgttgctcaatcaactgctgaatctgaatatgttgctgctgctagttgttgttcacagattctttggcttttatctactttgaaagattatggtcttacttttgagaaaatacctctcttttgtgataatactagtgctatcaatattgctaagaatcctgttcaacactcacgcacaaagcacattaatattcgttttcactttttgagggatcatgttgagaagggagatgttgaattgcagtttttggacagaaagttgcaaattgctgatattttcactaaacctttggattctaatcgctttgcttttcttcgtggtgaattggaaataattcatccttttggcatggtttgacagggagtttgtacctcatggttttatcaagcaacaatatgacaatgagaaaaattaagaaaagagagctttatttatgcatatggtattttcttgtgcatgctaccaatactttgaaggtttatttatctctagcatagcttgtatgtattctagtcttttcatgagatttagattttgcttttaagggatgatgcatgacatctaaattctacttgaattaagaaaatatgcaatgttgatgctagcatatggtttgttttataaatgctctatatatatgctttattgacttgttattcctcaaatagctttaattgctcattgtgaaatagagaataaaaatatgaaaaaaatgaataccgaatccttggaaacagtcttgacgacgaggacgtattcgatgtgagcaaaataatgggtgccgaatccctggaaacagtcttgacgacaggcacgtacccggaataaaaagagaaaaaatatgagcaaaaaggctcaagataagaaaagttcaaaaattctcttggttattttgtgctcaaggttatttgagaaagagtgataaatgcaataggtatatgtgtttagtgtttattcttcaacctatgtgcttgttaagatgttgcattataaatcgtctgaaatcatgaatttttgattgttgattcaagcttaattgtaaaatgtttggttcatggttatactttaatgcaatgcatgcttgttatattatatatgggtttatcttctttttattgcaacacatgacttgatatgctatatgtatgctaatctcttgaatattaatgaacataattcctatgcttgatgaaatcattgtcaaaagggggagaagtaattgtgaaaatttttgtgcaaatttttggagaagcaaggtgaaattttggagaagttgttgagaagagcatgtttttagttcaattgggaatttctttcttttaaaaagggggagaagttttcttttggatttttgagcacgatgtgtacatttgtacgaagtgtgcttttaccactttcgtttttatttttccaaacaccaaaacattttttataagtttgccaatgtgttcatcaagggggagattgtgaaatcattgtcatgattaatatctgtgatgaacaattggctatgcaaatgatttaatcaaagaattggtttgagagtttgtgtgaatattggtgtgagtgcatgtgactaatgtgggtcaggttgtgatatctgtgcccagaaacagttgttttgtctgattgtgtgcaggtgacttgaggtcagccttggtcaatggtaaggaccgagactatgctcacggaggagcagaggtctattgcggtcgggataccatgtgagaaggtgactagagtctggattcttggaggtcaactttggtcaacggtggggattgggactagactcagggaggagttgaggtccagacggtcaaggataccgggtgacgaagttggatacaagatggcatacggtggatggatatcgtgtgggagagatcttcgcaacgggcttcatgaggtgtgtgtgcaagtaccggtattcgcgaagggaattgtaaagttggggtagtatatggtgctacagtacacgaggtactgtagcctgcaggtatgcatgcatgtacggtgctgtacaggtatgtgtgatcgatacatgcatggtgaagcatgtatgtgtgcatgactggttggccgagcagcacgagagcggctcggtgggcttcggtggctgttggcggcatgccaagtcggcctaggagaagcaagggtccagctggcagcgagtcggagatggtcacgcgtggacgtcagcttgggagcgaatccgttttggatttctggtgcggccagttgtttgctgcacgtttggaaattgtaaaacgtatggaaactgaaggatggagtcctattgtgtattattgtgtataggagttttacacctactttgagtaggggatttttgtggtataaatagagagggagcgtgatgcttcctgtatcgctttagagagcaatagagttgagttttggtttagggtttcaagttttgtcaaaatttttgtaaggagtgctgttgttgcactttgtaaacacagagagaagtaataaagtcgtcatccactttaagagttcttcgatttgtgtttcaccgggtttcggccgtctaaccggcaactcaccggtggtcagaccggcggcattgcggcggtcagaccggcgggagcgaggcggtcagactggcggcggcgacaggtgtggaaagcgactttggcagtcagaccggagattcaacaccggtcagaccggcggcatccactcggtcagaccggtagatcaatctcggtcagaccgacttccgtcgatttcgagggtaacttttatttccgctaaaaattttcggtttttgggtataacaactattcacccttctctggttggcttagtttttgtgattcgatcctacagcttccttcacatgcttcattccgacgactacagcaaggaagcaaagcagcaggatgaagggatctggcgaaggcagatgattcacatacaaaaatgatggtggcgagatggcggcggcttcgacttctcgggatagctacagcgagaacaacggcagtagcttctcgagacagctgcggcggctgcccgcacggcaacaacgcggcggcggctgctcgcgacggctgcggcgacaacgcctgcagcagctttgtctggcgacggcttcgtgcacgcgtgcagtcgaatggaatcccctcgttcttcctgcgtggaagacggattacagtagcaaactgaaatcgtggatgcgcccggaccttagccgaccaattatctatctatctatcgatctatacttatacttatactaattggacactttctacgagctctcacgttatagaaaaaactatccgtctattaaaggaatcatgtaatcatagccgtacatcttatatccaatctggtttaacactgtgggccaccttttaatggccatctaatgtacgtaacgtcgtcgccgatcgtatctctaacgaaagaagagacggggattctatcgcgatcacacctgcgaccatctgggaaaacttttatcagcgatggtacgtagatcgatgctccagtcgtccttcatggcttcatcgttattgctgtaatggatttagagatcactgcaacgttgtgaattgttggtagatcaattaggttcgcaccctttttttctttcgtagtaattttcttcaactcaatctatctggtaaatcgatctccgtcacatgtgcaaacgaaagcaaaatgatcagaatctaaagaggtggcctgatagcaggtttgcaggccgcggcaggcagtaatgaccccaacgatgaggcaggcatgtaccttccgttttcttattctgatactaattcgctctccttccgtcagcatcattatttcatttgaaattttttggtaagcattatttcattttattttattatatctagaaaaatcaattaattggtgaatggttattgcacaagtatgttcatgatctttatttttttatgattttttttatcaatttgccacattaaattctttcactattatcgatcgtaatatactatactagattagctatatgtatatgcgcacattctttttcctggaacaaccttgcaccatagccattgtcagttgtgttgtgagataatttttttgaatactacggattaggtgtttaaattattaattattcgagtaaacacatgcaattttttctggtgtctctttggctaaactatctatttgtacatttaactaggctccctgaaagttagcaaatattgttatagccttccggtgactatggagttcaattataaagatttacatccataaaaaagttgatgccatgtacaattaaaaaaaattcaaatcgataaaaaataattaaatgcaattgaatacattaaaacaaaattacatattaggtacaacttatctattacaatttctagactcataatttaataattatataaaacacaaataatgaaattagaaaaaggactcagttgggtgtgtttgccatagcttcggcttcagctccatctctcctgaagttagagtccaatcaagcttcactaaaaatgggattggagctggttgaagtagtctaacaaaatgaactagcgacataaagctgggttttcgcaactccactcctgacttaactcctgaagataaatttaggaattgaagccctaccaatagacccttatcaattctaaatctaaataattcttaaaacatgggaatgccataatttagactacacattttacaattattaatttttaatttggagctgttaatcgaaccaacagttttgttcttaaatacttacaaagtaggttccatacatttactaccgactctttagttcctttccaaaatttaatagtttctaatttcataattaagaaatatggttctatttcatactttcaactaagtaatttcatcgtaaattaatatcagcatgtagccatcaatgcaaagcaacttttttaccaagtctttacaatttataagatattttatatatatggttaaaatttaatatttatgtcatgtcaaccatagcccgtgtaacaaacgggttagcgactagtccaggctaatgacacgcgggaggacatctggccaggcattggagtacatctggccaggcatgggagcaagagctccaggaaggtgtgacatcccggctcagggcttaataaaattattagaatactcatattaacaagtaccaaccaaacagaccctaatagcacgatattattttctcccaccggccgatccgcagagagtattctccatgttacgtgtattagtattttgttcgtcaattcctattttattcacgtgatgcatgatatttgactgtttatctacagaggcccgcgatacaatgtacatacatacatataatcaaattcacctttcaacgtacggacatttctatttgtcataaaacaaaattgcaatgtcatcgataacccgaccttagctcagttggtagagcggaggactgtagtttgatgcggattaatccttaggtcgctggttcgaatccggcaggtcggaagtttatttctttattttttttgttgtgcgaattattttatgtacctcacgaaaagaaaaaagcaagctatttttgtaatatttttcctgcacttcttttcgtgacatgacttttaagagcaagcccagtgtgtttggctgcttcgctgctgtagcagatattcgcaattgcttcgacactcattttggaagagccgatttgactctcctcgatagactaggatttgcttgcccaaacctcattgccaaataaatacgccttttctttttctaaccaaacaagaataatgattattcgtcaccatctgatgattaattattcttgtactttagttacacctatataaagctcaattcccatgacagtttttgtcttattttgttaacctccactgatccaatgcttaattaaaataagctttaccggtcaaataaatgattcataaatagaaagacatgacgattgaaaccagtgacacatcctgaaccttattaattttttattggatacatgtcatcataaattttacggtttaaaaatatgacattactattcatatatttagaattatgccattacaattttacataaattcaagatatgccactacatacctgttcatcgtattttctaatattttaggaccaaattgcccctatcctccttccactaatttcttgttccttccttcctactctctccagtggggcttggcgttcgtctcgctggcgattgagctcaacgtccccctcttcagtgctacttgtcgctttgtccacattcgcctcccactctccggcactaagagaacgacgaaatctacggccacgaggaggcacaagggcagtgagctcagaggcagggagatctagggcgacgggatcgtgacagggagacgcaggggcagcacgtgtccctctcgctagcggtggagcttggtgtccctctcactggtggcggagcttggttcttgttgtccctctcaccggtggcggagctaattggcgtccctctgtccggtgctcctcatcgctctgcccacatcctcctccctctctccatcgtgaagagtacgacgtggcctacggtggtgtggaggcacagtggcagcggagagacggggggtggtgggctcggcggcaagacatggtggggtggtgtgctcatcgaaggagagatgctggggcatgggctcctcctcctccccttgcctacagttgccatgacgatggggaccgtgttttccttgaaccagatcttacatgttgagaacgacaattgtgcactcaagttcctgtgccacttatgtgatggcaagcgaggggaggaggaggccgacgtaggtcaaaggtggaggtggaagaggtggctatggtggccagaaaaaaaatgcactgaaaaagatatggaaagaaaaaaaaacagaaaaaagaaaaaaaaaagaaaaccgtgcgccaaaaaaaaaaaaacccgcgtgtcgcctgcgttccccgctccgcgcgcgaaagtgtctagtggcacgtgtcctctaagtgcttaacacttgcaagttaaacatgaattgtattgattttgtgtttgtttgctgattaccagttgcaagttaaggattattgtattaaaaaatatgtgttgccactgctgaaaatgccaatgaaaatgcacttgtatgttttatgtacgagaatttacatcttactttgcttttaagcaacacacattactatgacaaaattcttcaattaatcttttaagctttgtaaagatgtacatttgtatattgcactatcacatcataaaggtactgcatgcgcagttgcagtgcaattagatatttcacattattgaaatatttactttgaagacaaataaatcttattgatggttctatgtccttacgagaaactggatactatgcaaacaactagaattgcaggtcgcatgtacattttaactgagcacaccttagctttacatagtgactacaatcgtgtgggataatattaggacaatgctgctggtagccttataactgtcctcagtcagggtaaactatattgacaattcactcagcaagcctaaacccataagctttgttgcttataaattttttatcctattacgtctttatattctaaactgaccacttttttgctggtttagtattcatagagttacatcacgtcattgtgtttgctagtgatgatctgaacgttccatgaaaaccatagggtactctttgtggcaatactattttggccacaggagcaccttcaaatgtttgggcgtcaataatgtgcacctgcaacatagaaacatgaaaaaaacaaattcaaattcaaatttgaatctgtgtgtcattcatacagaaaatggcgtgcgcatgtgatatgatgtaacaagcacttgcctgtgatgtattagacctctcgtcatgtacaaaagaaattatccacccatcatcttcgtgtgagccaccaactcttggaacaaatgctgctccagagaagaattgatcttctccaaacccgtgatattctgtctttattagatcttcagatgtctggttcatgacatgaatgcagtgagttaataatataagataaagattggttggagtactgtagcaagtccatttccaatgtacctctgcaattacattatctgcctcttcaagacaaagttttgcaaggcctccatatttcaggattactataaaatacagaaagaactatcaatcaaggtgtgatgcacaatcatatttcttgtgaaatatacttctaatccatgccatggacctccagatttgataaattacataaaaactgttttctttaactaatacctttctcattaacgccgtaagagctttccaaagaatccaccacttgtgcataggcataactatgatgcaagcctgtgtagtggtcattgatcacagggaattccatggaaaactcagttccacttaaatattgccctgaaacagcctttgtcttcgtgtttaatctccactggtataatcgagagaaaaattcttcattaattccttgtttcacagaacacttagaaggatcagagagcaaatcatttttgtttaggctgatccgagggcctggaatgatggagtcagccgcacgaaagcccctgataacaacctattttaccaagataaaaaaatgagattcatactggatatgcttggtaatgatggatagttgggtaaaatcagaattactatgctaatgcaactacaagtatatggaacaagctttacaaaactataaaaatactatacctcatcaccctcttcaaagcagttgataaaatggaacatgcagaatggttcaacgtcaaaccacataactgattctgcatcaccataacggggcataactcctattcttgcatagctgtccttctcaaacttgatcaacctgttccaggggattgcgttcttatggtttgcaggtttaagccaagaatctctttaataaaataaacttgagtgaaatacttactgattgcctctgataagtctactgatgtcgatggtaagaggtatgtccattattatgttgtacctgcattagtagaataaaatgtgtaaattgaacttttgctttactggagactgataattaagtagaatatgttgaaatagattgtagtttagtcattaaactacagcgaagaggctctgattggtacccggacatacttaacagtaactcctatgtcatggcagagtatacatctgtccagtttgaggtcaactttatgttttagttgagttccatcagctgtcatgaaataaaacttcaattggggtcaaactttaaatttaaccttgatagagaggacagaagtaaattctaactatacaattaaatacctgagacaactccgaccattaggaaaggcctctttgcatctgaaccaaaaatgactagctctcctgatccaggagcaacctacatccatttgaaccaagtgatttaaagcgatttaaatgataaaacaaaatagcactaaaacatgattttactcagaatgtgaagtcatgtgatgtatcatactttgcagttgttcataactatatatctatagtgtatgatgttcaaataaaaaaaatattctacattatttatttatatgtatttagttgtggtgagctcctcatatgtttgtctttgcagttaaatggcaaagatgtgccatatagcgaaaccacttgctattctgcaataggcttccatcctacgtgctacacatctcattgcgtgacaatatagtccataggcaataatgtgccatatttttggctcgataatcttcttattgaataaaatttccagagcacagatgtaattgaaacaatctgatgattctatttgaagtgcctgggcacctgactttgcacatgtgtttttccaataaccctatatatatctataaagtgtatcccactaagtgtgtagttaatgttaattctttcttctctcataaagccacataaccttaattatttttagcctttagatcattcattaagggtgcaaattgcatctcttctctctaaaagacatcatatttataacctttagataattgatcaatgtacaaaatatgtaagcatatgaaataaaatcgtatagtacgtaagaaaattttaccatatctcctattttaacacacaattcacccgcagcgttgctgcggggtacccatctagttatatcttctgcctataaatgcttcaattactgattcctattgctcatgtagcttacagaaaatgaccagccatacctttgggtgagctgtgaaaggccttttccattccccattaatgtcccagctatcacccgtgtcgagattctgaatgctgatttcctgaggcaggtggttctcagaaacagcatacacctttccagcatgctcaaatacattggtgttgctgatgttcttgttcactttgccaaacctcatctgcattgcatataatttatccatttcagattgtctgaaaaaaaataacatatagtttattaggcttgtgaagtgttatttttacatagttgagaatgtaggccgcgacgatggctgcagagtcgcccatgatggcagggaggaaacatggcttctgtctggttttctcaatctttaatgtttcagattgcacatatcgatttgcataggagactgaccaagtatctgaactgttctttgtgaagtagatggcatggagcatgccctcgccttcaacccatatttcgctggattttccgaagattgagacggtcgaatggagggctccaaacagtggattggaacctgttgagattttccaccattagcttattattatggtcagcaattctcatgtactgcacacagttatacttatttgttgatactgta

SEQ ID NO: 21699 - DNA, 23787 bp, Oryza sativa
  unsure (1)..(23787): unsure at all n locations
tgcttcagcgaatttgtgatgatggacaccaggcgttgcggaaggtggatcacatggcatggaaccatggatggatagttcgtcccttatcctgtctctttttttttttttctggaaaacagaggatagtactggatttgagtatgaacataaatagtgagggaatatgaattcatatatggaggaaatatatgtcaagctaaaagggaattgccctggtctcccggcaaaaaaaatagagaacatcactgatcacgaatacttattagtgtgatatactatcacgcaagtaattatcatatgactattcgagcgatatgtccatatgaaatcagattagcaacttaacaagcacatttagccgtgtatatgatatgtactgagatttttcttaaaaaaggaaaataggccactagagcgcaggggtttccagcacaccttaaacaggagaccacaacttagtacgaaactaacactaaggcctggtttagtttccataacaaaaagctaacaaacactaaacgaatcttttaagactaattacgctatgatctgacaatgtggtgctacattaaacatttactaatgatggattaattagacttaataaattcgtctcgcaatttcctggcagaatctataatttatttattttgttattaaactacgtttaatactttaaatatgtgtccgtatatcccatgttaactaaggttgtgtttagttcagcgcaaagtttggattttggttgaaattggagatgatgtgactgaaaagttgtgtatgtatgacaggttgatgtgatggaaaatgactgaagtttggatccaaactttggatctaaacacagcctaaacccaaaatttcccagatttgagtgctgaaaagatgtactccctccgtcccaaaaaaaagacaaaccctggtttccgtgtccaacgtttgaccgtccgtcttatttgaaaaaaattatgaaaaaaattaaaaaaataagtcacgcataaagcattaatcatgttttatcatctaacaacaatgaaaatactaattataaaaaattttcatataagacggacagtcaaatgttgtcacgaaaacccactgtttgtctttttttttgattgagggagtatctactgacagagaagctaggcttggtaggcgacgagattcaacatggtatgttctgctgcaagcagtaacctttgtcaattcttggaacgcatcactctccagtcttacacgttttgcccttaattagtccatcatatcacttcactacacatatgttctgactgcagctgtgcattctatctactctctccgtcctagaatgtagctatttttaggattcaaacttgtcccaaaagaagctatttctaggtagatgagaggctgttatacctgttttacccctgcaccccacagcactgacacaccacatatccccagtctatggaggagacgaggagataggcaccagacttctttggtttgaattttaaaagttagtcccattttttattctggatatgcaggtgttaggggaataggagctgtggaaggaatgctgcgtgtccttgtgccagcatattcatgattccgtcaaagaagggcactatggtcataacacccaaaaccttaatccatccaaacaacctagaaatagctacattcttgattctgagacggaggtagtaggatgttttatgaacgtacggttgagttggcatgttaaatttgttgttatcttctaggtgcacgaatattggtaggagatgaatcattcgggaatcggatgtatctcttgtgcaaattctggactaatctaatcgtgtagagtatactcttgtgtgccttcttagccaatggatgtcagggatgaattagcagaacacacaacatgagtacatcagatcgatcaaaataatgattcataaatttctgcactaatctaattgtttaaaatatatacttgattgtggtggcaatcaaattccggttcagctattagaaaggttaaacaatgaaaagctatgattttaaaatgggtggtgatagtagcacaacaatttcaatatttgaaaccgaacaattgggttctcgacatacatgtgcattagacccaccactatttatacatagaaaaatatttgtacataaattttaattggacataactacacagctagtgctaccactccatctataagaggcaccatccacctatacttcaaatacatttttttcttaaactactcatccgatctatgatccgattacaccgttgtgttcgtaacaattaaatctttacaacaagatctcacatgattatattttgatgaaaaatcacaaaatacttttataatatgtctaaattacttttagattttacttagttacttcttagatatataaaagtaaattcagtaaaacctaaaagtaatttacatatattatagaagtaacttagaacaaaaaggtaactttagcatgtcatttgaagtaaatccgtagtagagataaaaatatgactctatctagaaattaaattaaccagcacaaattatggaattaactaaaataataataaaagtaatcaccccagagcattatgaatgtataggaagtattttaatcaaatctaaaagtaacttttaactcgccgacgacattctgccctttccaccggagggtttctgctccatcaaaaaactgcagaactaaatcttcttgctcacaaatccaaaagaaacttctgctcactccttttgtgtcctacatcaccgtctacttaaatagagtctctgtagcaacctccacactaactactctcctggtcgcacggccttgcatgcatgcggatcaacaagccatgcatggagaaaattcaaatgcctcaccaagcagaacacgcagcgcagtaatccgaattttcaaaaaaatgaagaataatcaagtttctgcagcggtggattagtggatcttttctcaccatccgttagtgagttgaaccccgaaaccttgatgtgagatggacaggtgtccggtggttacaataggagtagctactcctgggagtagtatataggcttcctatatatatatgtatatgtacatacatatatatatatatgataatttgttcaatgaaaaaaggcattaattaaagttactttctttttgttataataatatatgtaaattacttttaggctttactgaatttacttttatatgtgtaagaagtaacttagtgaaatctaaaagtaatttagacatatcataaaagtaatttttgatttttcatcaaaatataataatgtgatatcttgttgtaaagatttaattattacgaacacaatggtgtaatcggattgtaaatcggatgagtaatttaagagaaaattttatttaaagtatagatgataggaatatttcccctacatgctcaatggattaatagcaaccaaaactcctaaagtactagcacgtgggtgtctccggttaagactaattggagaggcctctccaattaaaattaaatttaccgtatgtcatttttttatttttcataggacactgaaaataattcattctgaacagaaaaggagctagttgcggtactctgaagataagttcagcccaaagaacagagcatgacagtaaaatgatgaaactgattccagaatagcaggagacgctattgtttatctattgtccctttatgccgaagacatttgcaaaataaaatcccatgcaaattatttttctcaatcatatgtcattcacatgaagaacgaagtagttaccagaagattccaatttttctaataattccatgtgaactagacagctcttggttaagttcatctgttcatatgctgacttgtcaaaaaagggtgacaactgaatgacaatcctgctgcttaacaaaattaagtaagcaaacatgcttgtagagtatcttgttaaactttgtagattagtactgctagttgaaacaactagatgatgttcatggagaagcagaagtggaaagcttgcaaagcagttgagatgggttaacgtttctcaggtccgttgaggatgaatgtatctttttctctctcacactctcctctacaacccttctcgctgatggtgcctgagaggccaccgtgtttcttagttgtttggacagtttgctgggcagctactttgtaggtctagcggtgtctggtcacacgcacagtggtgttgtcagcatgtggtggtgtgtttgtttttcttttcattcctaattacagattcacagtattataggcttatattttttttctactatattaatatgagataggagtatcacactgtccgataccgtttgtttcgaaaaagaagagcttgcaaagagaggaggtaaacaacatgttgcaaagctaatgtgataggatgctaattaaggtgagagaacggaaaccggtggacagaccacctgatgatcttttttctatatgcttgtgtatttagtctgctcctagttttccaagggtttatggctctttagtaggaaaaggttggtttttttcttctatgttaatgcctaaatataaaagtaggcctttttatgttgcaaaaatcgtgtttttgtaagatggaaatcctagcggatcggtgtggtatatgaatgtgggtactctttttgtttggctttcttccaaaagctaggtcattatgcaatataatgatcttacttttaaaaaagttgaaacaactaaggatggaagtatcccagatagaccgagtatcttctctagcatagttagtactaatgtattatgaaaaccaattataccaaattgccaaccaaggttctcttttgagaacaaccagagacctgcattattgtcattatcttccttcctagaacatggcattgtgctacatggttagtagattgcacatggcggcaatgccatttgccgccattgaaggtccacagcaagataaggttactatcttttcagaaatagtttttcactaacactaataaatgggtcaacagctcccaacatcttctgagaacatggaaagactattgattttaaaattgtcccaaccatttccatatatgatgagattaatgggtacaaatgcatacataattaacttaaaagacaaccgaaagcaatggcggattcagtatggaggctggggaaaaggaaaccacccagtggatctccaatgagaacagggaaggacagctagaggaagaaggcaatgagtcccctcctacctcaagcttcatccctcagtgaaaatcgtaaatgcatttccaattaacctgacattccaaaccttcttttaaaatatatattttagcaggatactagatgccaaaattaaagagaaaaggaaaaatctatatctatgcctaataattaaaagataagtaaggtttccgggttttttcgtacgttgtttagttttccatgtcctacgtgcgtgtaaaaataagtaaggattgtgtttttcttttcatctgtcgtatgcacgtgtattatgtcgtccgactcttctctagatcagtttcctaatttgcacagctaggtccagttgcccaacatcagacacaaataaacacaataatcagttttggcccaatgtgtgaaatggtcggcctgtgtgctacaatttgcattgaacactgtatgccgtcatccggcaaaactttctatgctttctactaaaagcaaaacctttgtgcctttcgtaaaaaaagaaaagaaaaaagaaaggcaattagtccactcgaagtctcgaacccccaagctacatttgccagtaaatcatatatacatttccaattaagtcaacattcaaaaccaattttttttgaaaaatataaatctttttaagcagtgtccaacatgccaaaattaaagagaaaagaaaaggaataagataaaaaaaaatcatagagagagatatgggtctctaatcgttggatctctttgtaccacaacgttgtgcacatagcaattaatccaatgcacagaatcaaactgccaaatcgtgaaactgactgagatctcgccgcagagctgggagaaacgccaaaagaacatgaagagaagcaaaagcaaaactgctgccagaacagcacgacgagtctctttttatgatcttaataatactccctaagtttctcaatataagtcattttagcattttccatattcatattgatgttaataaatctagaaatatgaatgtggaaaatactagaatgacttaaattgtgaaacggaggaagtaattagtaatagtccctagtctctagtcatagttaaaggtttgcctagttaaagcgatgcaaagctttaagcagcagtagctctcactctataggaatataggatccagcagatcattcgatcgagtgaattcgctagtcgctacggttcaaatgttcaatgaaataaaataacgcaaaataaaaggcactgtgttatgttttatttttcgcttggatcgtgtcactacttcagttaaatataaaagcagtgacatgtcatctttgaaaaataatcatagtaggcaattttatttggataataatatccacgacacagaagtacagaactcacactgccaacgacacttaggctcagttcggcaccccacccaaacatcagtacgaaaacggaacaatctattagcacatgattaattaagtattagattttttttaaaaaatagattaatttgattttttaaagcaactttcgtatagaaattttttgaaaaaaaacacatcgtttagcagtttgaaaagcgtgcgcgcggaaaacgaatgagaggggttaggaacattaggtgccaaagacacccttacacatatccaaaatatttagtctgactcagattggataatatgtattcccttcgtaaaaaaaccaattgagtgctaggctgcaacaaaagacatactctatgtctagattcattatactagaatatgttatatcgtagtacttgattgccttttttttttggacctgcttcgttccaatataagcttagttttaggggtaagaggagaaattaagagcgaggaaaaattacctaggtgtcccctaataaataaaagatgataggaagtgagtaggtagttacgggtagaatgaagagaaatttaaggtagatgtgattgatgagataaatagtactttctcgatttcatattataagtcatttgaatttttactaagattaaataaaaaattagcaacatctaaaatatcaaattagttttgttaaatctaacattgaatatattttaagaatatatttgtttcggggttaaaaatactaatctatttttctataaatttgatcaaacttaaaaaaattcaactagaaaaaaaaacaacttataatataaagcaaatatagtagtgtaagattgtacttattctgggacagaattttgagcctaaaaatgtaccccctccatccaaaaatataaatatatagtactggatgtgacgtttcatagtatgtcaagatacattatactagaaaatgtatgatccagtcctaaatttttatatttttgggacggaaggagggagtatttattttaacaataatccgctcattaaacgaaaaccgagagattgtattatctgcgtatgctgtaggacatgcgcgttcacagctcacaagacgcccaaattgtgtgaacaaacaaacagcggaactcatctgccacctatacttcctgcttgttctagccgcctatttcctgcttgttttatccaacttgtttgggtttgaataaaaaaagtgcgtctacatcaaactggcaaagtacacgctacctcgttgaattttgctttgaccgaagccagcttaagctgaataaaatagaaaatatgcaacgtgtcccaaatttgtaccaaggccgacaaacttggtttctatgcctcataatgggtttgtggcgtgacaacttaaaaaaaaaacaaagaaaagtttgacaacatcacaaacattctataattagcatgtcggtattatctcatttatatgtatataagttagctaaaaattggtgaacaaatactaagtttagaatttaaacccatatatagagagcgaagtacataatcatgtggctgccatctatctagtgcttattagtttttaacttatagactcgatcttaatcaagctatttacttgacgattaactttaccacaactcaaaataccaatgtgtgatatgccatataaaataaagaattgttagtcacaagtgaaatactttggctaaatatatagtagcatctccaacagcttctccaaacgcctctctaagctaaattttagccactctagtaaaaaaaactccaacagcctctccaactggatggccaagccatctggccggccaaaatactccctcccctagcaaaatttggccagccaaagtcactggctaatggtgggccccacgaaaacacgcactgcgaggggagatggatcgcggcgacggcgagggaggggcgaaaaaggccggagaggagcgaggcggctcgatggcgaggacgcgaaggctcacggtgagggcgcgacggcttgacggtgaggtggatctacgatgagggcgtgacggcgagggaggagagaggaaggccggcgaggagtagatcctgtcattgcccgtcgtcgtctggcgggatggtggcggcagtgatggccccgagctccgccgctgtccccccccccaagccgttgacgccttctgccttcctgcgctgcctccgctgattacggactccattgcgtcgccttcctgcctccccgcacccgcctgcgcccaatgtcgacgggaaggaaggaaaggggaagaaggaaagagaaggaagagggggaaagagaggaagaagaggagaggagaggctgacatgttggtctgttgttattttggagaggattaatagagagtttgttggagtgagtatctcgtttggctaggcaaatcagataaagagttagctatatggatatttagagagtacaatttagagagactattaaagatgctctaagggaatgacatgtagggcaatatgctacaaagtacgattgcctcaatcttctcatctcaacaggataacatcattttttacactgccacgtcactacccacccgacacttaattttttatcccaaccagctcaacaatatatccatcccacggttaaaaacttttttctgtgctaatcccatggctaaaattggctaattatccacacattatccacaaatccagtgcaacaaaaaccccaaaaaccgcacgcacaagacccgggggtgcgtgtagctcctcaaccatataaaactccacgcatccaacgacctcgatcccctgattactctctcctctgttctgctctgctgttcgtcgcccagcctagattagggatgatcagggattagattagtgacagaggcccgattaaacaagtgatcaaactcactgttaatttgtttaatcactgctgattgatgctgctgctgctgctgtgatttttttagggctaaagagtccaagacgagaggtatctttcttgaacaattggttctgttgactcgcactgcactctctctctctctgtactcttcttatagctgttgctttctttctctcttttttcagagattcagagttgtcgtgtgtgtataaacagatttggagttgttgcgaaatttcttggggaggagaggaggaagagtgtgactctgaatctctgtctctgaaactcagagagggagagagagagagagagagagagagagagagagagagagagagagagagaagatggcaggagggttcggcggcggcggcggcgaggcgatcgccgggagggcggagcagtacgaggggaagatcaccggatacttcatcctcgcctgcatcgtcggctccttcggcgggtcactcttcggctacgatcttggagtctccagttgagtatcctgcatcttagttcttgtgtgttcttgctagtgatgttcatctgttcagttcttggaatttacattttcttttcgtgtccatgaaagatctgttctgaggttctgaggtttttgtctctgaattttctgaactttctttccaaaagtttggtccattatcactgaacatctatcgaaagaatcatttccaaatttgaaaaaggaaaattaggagcctggattattctgttcgaggttttgttaattgtctcgatcgagggtaaatgatgactgaaaaagaattcgttgtcgatgcaaaaaggagtgtgttaatgatggcgtctccatcttgattctccgtgaaaatgtttattttggggacgcaattatttgacacggctgcagagctgtccggggtaattaggaagctattgttagccacttaacgtgcagtgtctgtcctctcattttcagtagagatatcttctctcatgaaaagcatttaaaccccaagaacactctaaaacgtttttatacaacaccataagaaaaacatttctttttggtgaaataacaatgtaaaagccaacgccaattctgcaaaatctttatagtttgcaactatcggaacaatctttgcaaaatatgcattccatgatgcttctcaattatcaaacgaacaatctttgcagaagtgcaatctttgttctttgaagttactgaacaatctttgcaaaaatgcagtcttgatgctttacagttattgagcaatctctgcaaaggcgcaaactttatgctttgcaattgcagaacaatctttggaaaatgcaaacttgatgcttttcaattatcgaccgaacagtcttcacttctttacataagtgcagtcatctgctttgaatttgttgaaccgtcttgccaaaaatgcagtcttgatgcttcatagtacaatctttgcagaagcgcactttgcaaaaattacagtcttttcaagaacgcaaaccttgatgctttccaatatttgaacaatccttgcaaaactgcaatgctatccaatcgatctctctttctcaaaaaaaaaaaaaatcaaaaatcaaaatgtgcaggtggtgtaacagccatggacgacttcctgatcaaattctttaatctttcatttctgtccaacaatctttttcaagaacgcaaaccttgatgttttccaatctttgtacaacacttgcaaaactgcaatgttatcgaagaagaaatcaacaagaaaactaaccaatctctctctctctctctctttcttaaaaaaaatcaaaatattctggtggtgtgacggccatggacgacttcctgatcaagttctttatgcttttttttttaacatgcaaaaggattgcatggcagtataatctgatcaagttctttatgcttccaactctttctaacaatattttcaagaatgcaaaccttgattctttacaatatttgaacaactgcgatctttttgctctgcaagactgcaactgcaatgttatcgaagaagaaatcagcaagaaaaaaaaaaccaatcgatctctctctctctcaatgtgcaggtggtgtgacggccatggacgatttcttgatcaagttcttcccggaggtgtacgcgcggaagagcgcgcacctgcacgagacggactactgcaagtacgacaaccaggtgctgaccctcttcacctcctccctctacttcgccggcctcgtctccaccttcgccgcctcccacctcaccaggcgccgcggccgccgcgccaccatcatggtcggcgccgtcagcttcttcctcggcggcgccgtcaacgccgccgccgccaacgtcgccatgctcatcgccggccgcctcctcctcggcgtcggcatcggcttcggcaaccaggccgtccccctctacctctccgagatcgccccctacaacatccgcggcgccgtcaaccagctcttccagctcaccacctgcctcggcatcctcgtcgccgacgtcatcaactacttcaccgacaagatccacccgtgggggtggaggctgtcgctggggctcgccatgggccccgccaccgcgatcttcgtcggcgcgctgttcttgccggagacgcccaacagcctcgtcgagatggggcggctggaggaggcgaggcgggtgctggagaaggtgagggggacgaggaaggtggacgccgagttcgaggatttgagggaggcgagcgaggcggcgagggcggtgcgcggcacgttcaggagcctgctcgccgcgcgcaaccggccgcagctcatcattggggcgctcgggatcccggcgttccagcagctgtccgggatgaactccatactcttctactcgccggtcatcttccagagcctcggcttcggcaactccgccgcgctctactcctccatcatcacgggatccatgctcgtcgtcggcgcgctcgtctccatggtcgtcgtcgaccgcctcggccgcagattcctcttcatcgaggccggcatccagatgatctcctccatggtcagtacactacacagacgtttcttgatttttctttgacggtgctcggaggactgacgccggcaaggtgtttgtggaaatgcttaggtggtggtggcggtgatcctggcgctcaagttcgggcacggcgaggagctatcgaagggcgtgggcacggtgctggtggtggcgatctgcctgttcgtggtggcctacgggtggtcgtgggggccgctggggtggctggtgccgagcgagctgttcccgctggagatgaggtcggcggggcagagcgtggtggtgtgcgtcaacctgttctggacggcggcggtggcgcagtgcttcctcgccgccatgtgccacctccggtggggggtgttcatcctcttcgccgcgctcatcgtcgtcatgtccatcttcgtcatcctcctcctgccggagaccaagcaggtgcccatcgaggagatctggatgctcttcgacaagcactggtattggaagcgcatcgtcaggaaggaccccaagtatcagggccaccaccaccaccagatggccgccatgccaaccgccgccgccaagtccggctcgtcggaggtttagatgatgatgataatgaattgatgatggtttaataaggttttagtgggtggtgattaagacttgatcttgaattgttcatgtggcagtagcttttttgatcttcgattgatgcaaaagaagaggtcagagggttaatgcatgtgtgtgctcgtgtgtctatagttttagtttcatgttcttcagaattcgattcagtgtagtggtgggctgattaatggatcttgatgatgcacaaggaatgcagtgttctgaattcttgaaattattctcaatataacttgtagatttgtgtagagttctggttttgctagttggctagagctaagtactacctctgttttaggttataagactttttaacattgcttacattcatatagatgttaatgaatctagacacacatatatgtctaatttattaacatatatgctatgaaacgganaaaggagncactttctccgtatcgtggcatatatgttaataaatctaggcagtgtctctgcccccagctgaaagcctgaaacactgcctatgtggctttcgataaaaagccgggtgttgaccttttctctaaaaaacctgtagatttgctttgatgtttttgcaaggtgtgttgcagataattcttcattttgcaggaacgatttgcttctaaaacgattatagtgtgacagagaccatcgtggcaccaatatttctcttgtaattaacagttttacctaggtcatttgtgactgatgcgatgctgacaccacagttgagctagatcagtggataaagtagatattatctgaacatcatttgtgcctgatgcaatgctgacactatagttgagctacacctcaccagcagaactaaattaaaatgataaatgctatctgagcatcaacaaaaaattaaagattagcagtcgctttcatccgtcaaatggtcatgggacgatttaaataggacaggccggaaactctgaacatttcagagtcaaacgatcacatgcatatgtctgactcatcagttcttcatccataccatagttggagtcaacagtcagtgcagcttatctctaggctctagcgatcttgccatgctcattgcttctccttataaaattctgaaacatcgcaatccccaattctcgccgttctttgcgcctttcaggaaactgaaaattcagagttggcatcagcgtcatacctctggtggaatttgaagtgtacgtgaagattttcctgctactatctgtagctctctgtcatcattttgggctgaccttttgcactatttttaagttttgtgtttataaagatttgtactctgtccgtttcaaaatatgaaaatttttaggatacaaaatttgtaccacaatataaatatttatgggaacaatttaattccaatacacagaaatctattaattttcaacaaatgggattcttaggaagggaatataaataattcaaaatgtacaatttgaccaccaaagtcacaagggagaatcttttccctctactttaattagtttatgtacttcggaacggataggctatctgtcatcaagaaatgtatgtgtttcggtttgaccttttctaagtgatcacatagtttagtcagtgctacttatctgttgctaattatttatcttgccattgcttgaagtaatacgatacactagtaaaatatactacagtatccaagagttcacctgtttctgaaaagcctattgtctacagactggaagcatcagacttttctcatgaaacagacgtgaagacttgcgtagcatcagcgacttgaaatcaccattttataattccagaactgaacaagatcacacagtgctgcaactgaaactgactgccctgaacaatggtaaattggtaatttctcatgcacataagtactctctccattccaaaatacagtacttctatcgacttagctatttttctacctacttctttatctcaatcaattgttcgtctaacatttaatttctcaatcgctttttcatttcaacacatcacaatttagcctctctacttaattctcgtgaaaaactttaaaagtgcttatattttaggacagaaaaggtacatgaataaattacagaaacaccagtaaccgacaatacaaacatttcagtaccttaaatcgtattttctggcgtagtactacttttcaacatgtattcatgtttcacacaaaattaaagactgtcacatcagagtttgaacgactgaacatcgagtgctagactctggtgttgatgaatgcatctgaattgcaaatggtgaagcatttgataaaatgaacttacaaggtccaagcctgaagatcctgaggcatccagggttttcattatcctgcagattatatatatactgggtgctattagggataaagcggtcgaaaactatatcattttttattatttttgaggagcggtattggtacggttaggaattttctgtgtttgtgaatttaactattctttgatgacttcaaaaaaaatgcaaataaaaaatagaaaacctaaattttacatatacctataaacagaagcaatcagaaacaatatcattttttattactgtttatggaaactgtatgggtaggaatttccatatggtttgcacccttaggtgccatgccagttcactttgtggcactctgctgaacagcctgctcgtataaaactgcaattgaatatgttccacgatgtatgcagttgctggaatcttataaggattaaggattaacatattaggggctggaaatggattaaatttagtcaagtggaaacatcttgtggtcatgggggtgacaggggtgtgcattgggtacccctgagactgactctaggggtgtgtattgggtacccctaagactaactctacaacacaatttaagctaaaagtacatgatggtatctaatgggaaatcaatatatgtttcgattattaatttgtgatgaacaatgatatatgagataactggttttgatatttatgatatgagtaaattgcacagtagtataagaacttgccaggtgggtgcaatttagtgcaaaaacttaaaaaatatgcaaactggtacatgaacttggcaatcaagtgcattttggtcaaaacgctgttacatacatatgattcaacctattttgtttgttctattataagcataactactagattattggtcctgagtataattgaatatgtttgactagtagaatcgctcggaaatcatgttacaacaatttttttgcccctagtgtaacaacttgaaaaatgatcatgaatacaattaacgatcattatatttttggtttcaaatcgacaggttatttattattgtaagcaagcaaatacaatacatctagaccattattatttgacaatcattatacttattagattattggcaacgacgactgctcttttttttactacgtggcttaaaaaaggtgtggtgtctaatattgattctttaaccaaaatgcacgtactagccaagttgttgcacctaaatgatcatttttcaagttgttacactagatcgtacctacctaccaaatttatataccatggacacaatttactcttatgatatttagcgaagtggtgctagctatgtgggaccaaattgactaggccagtcagaccagccaacccgaaagcctgatggactctgtgttggtgtagctgtcaggttgtttatttggatactcgtggttatgaatcctagatgatttatatacgtgtatcggtgatttatatacggtgtatgctaatgttgagtcaagttgctgccccctgcccccccaaccatcaccaatgcatgcaaaaataagggtctgttcagattatagccaaaataaactttactaaattttggcaatgccaaaattttagcaagataataatattgccaaaactttgataagattttttatgtatttatcaaatttgacaacaaactaaacgtagacattttttttggcaattttttttaaaaaaattgtatcgttcgttgaaaatggtatcaaagtgaataagccctaaatctagctaagttggcaactaagaaccacagcaacaaaaaacataactgtcaaagatagttcactttcacacttacgattgccaagttccaaacatcatttgacatttcagtttaaacatcgttgcgcttacatgattccagtacatttcaaccaagcatcattcatactcaaatgtaacacaaatatgtcatttcttgggcaagtcacattgttcagattgcagaacggtattcaggagtaaggtgggcagaagccagccacagagcaccagcaaacacacacctttacttacaccttggaaaatgcaccctgtcgacatagcctcccgacatcgccgtctgaacattcctccggaacttttgtgggtcatctcggaggacagccgcagcatcatggttcaagggatcctcgtcattgggttgctgcaggtaatgtagcaaagataattgttacatgagaaaacacagtgcaaatggtgagttctatcccacaaagacaacaatttcacgtgagatttaaaatagtaatatggcaagtagcagactagtttagacatatctgcatgtaaaggttcaatctggtttaatcatgtgccacttcatatttacaataggaaataaactactaagccattattgctgatagaaaataaaagattgatcagttcctaaaacaaatacttacaatgaaaagaaggttcaaaccatatacaatggtattgatattcaagacaggcttccagtcttcacgcaggatattcaggcagacatttccgtccaagtcaatattagggtgataaacctacaaggtcaaatgatcaatatattaccgataaagcccttcccttggcataagccggtctggctgattgcgttgtgtaacaaaaattcattttcttctaatatattgatgtgcaattcttttgcgcgttcgcgaaaaaaaaaaccgataaagaaaggagtaggctacagttaatagaatctatgttaccttagtcgtgcacttgaccttgggcggctcgtgagggtaagtaggaggaacttgtaaagtgaaaacaaaagctccacccctatgaacgaaaagacattggatgttagaatacttcaatttgaaataatctgaaaaaagtaacaccttgtgtatattgaaaacacacaaatgatttatttccaattaccatcacttctgttttttagggcaaatatgtcatccatattgttcataatgtttttacagcaaaggagagggaacaaaaagaaacatctaatgaaaaaatgaaagcaatctacaacagattattattagctacttttatttgtatttgaaaattttaaaagaatggaacaaccctttgtcccttctacatcaagagaaatcgtcaggtgtgatgtaaaatatgagctaatcctcctaaaccatatttatcaacaaacatgtctccaagtacatcaaaagttaaatgcgtgcgatttaaagatgtcaagaagcatccaatgcctcgtaacactctacatgtggcaactttcaacagtaaaaagttttatagtagtttaaatgttcagtcaaaattgaagtacagaaaaactaaattgatataagagcatgtgtaatagaacagctaagagatttaatgggcttaaaagaaacatctagaatatacttacacatagtatccttcgtcaggccgaagagtaatctcaatgttcatcagatcatcctttccattaggaaaagtaatgttggttttctttggaagattaagctcagcaatgtctgtaagatacaatatcaatagtcagcgagatccatatttggaaaaactatactaacgaaaaaggaactatttccatcacataaaaagatccaaagacagtgagagtcatgcctattatgttaatatttaaataggagcctggacaaaaagataggtttctagcaatagtgtaatcaacatatctaaacatcattatggaattatttcagaagcgaattatatgtgtgccacatgttcaatttgagttgaaataacgttaattagattttagttgaaaatgcagatttagtaaaaattaaaattggacatttggatctttctctttattaacacatactaagtagaagtcatgatgttgtcatggttgtcacatgtagcagcatgttcttgtgtgggccagcaagatactatcagcccactcacccacagcccaccctttgtctcaagcccaccaacatcctgtttagtactggctagtgcccactactcccaagtcacaccacgctgcatgtcctatccctaaccgcctcattcgccccctccaactccccacaaggtccatatttctatagaagagcggccaataaagctaagtacacgctcaaccaatatggtgacaaaagtacaacatagtttgtacattcacggacatttcatatatagataatagttagcatttagatccttgtttaatgcatgttcatttgtatgacacagttctagagatgtaaatacataaattagcaagaaagagaagttcaatctagcactaatcagcacacattgaatagtataatatcagaaagctagaaaccaaataacacaagtaatacaataaaaaaaaacttctgcaaaaacaaacctttatggagacgtaattctcctggactttgcttcttagcaggaggtctcccatttgtatttgccgcctcttccttcttctgtccctttatcttaaagaggttcaacatcttctgtgaaacaagagagaaaagcttatagaatgaagtattaaaaagaatgtgtctttttgacaatataaacaacactaacatatatatattaacagaagaaaagcatccacttgaaataaaggatcattttacatgcaaataagtacaaattaatgatgaaccagagagcaactgttcagtcagttatctcagtttctttaatcattgtaatagggaaacctgccaacctcttcaggcctgaatgcctttagcagccatcaggcatcccacatcaatttctcttacccaatatattaaatcagtaagtgggccataattcattccttgaccctattaataggcagaatctcttaaagacagtcaaaatttttgtaaattatgtgagacacaatcatatcatcgtaccgttgaacagtaaaaagcaccatgataaactccatgatagaaaaaaaaagagaaacacctaccaccacaggacataacatatactatacattgacaacctgaatttctttctttttttttaaaaaaaaaggcaatgcacagcttcattctgttgaataatcgatagcaagtactaagtactacccctaaaatcatgagttaatacactgaattcgcagtatacaaatttcaacaaatatactaatccatagaggtgtcgatacattacacaatgagatgaagggtttggataaacaatggccattggttcaaaagggtacatgtattaaaaaaaaccacaaataggctaaacatatgaaaatttccggaggttttggtaccacctcctagacacatgataaaaaagagaggggataagagaagaaacatgaggcttatagtgacttctcttataaacatatagtacaacttagctaaatctatagttggctagggaaatcaatactttgtaaacaaattaacttattatgtcaaaaccttcttaaaagcttacctaaactaatagatcatacacaaaatttattaaacaatcaaaagtcatgcaaagcgcgactatgtgggtagttacagagtgaattataaaatctatgcactaaaaaaggttttccttaagcctccatcgtttccaagaggatgctcgtttttaccaacaaggtgacaaaaacacaacaaaagtaacagcaaggactaaccctaacaagatactagttaaactcccgactccagccaaaaaagctgcggcataaaaaaaaggtttttcaaaatcaagaatcagcctatcatcagcaaaggaatttaactttggataatcggctaaaattccaccaaacgatcagcattactacaattctcctacatccccaactattcatatgcccaattcccagtgcgccccccaaacctgaaaacctagatttccacggaaacacccagcagatgaatccagcgaccacaacggaaaacgaaagcttcatcgaaattgaacccaaaaaaaaaacaactagaacaagaacaatagcagattaaaattaaccctcctcccctcatggtttctttacccatgatcaaccggcaaaataaaaatataagggaagaatctttccgcaagaaaggagacgcaccgtacgaagcgccggtcgccggtggacgacgacgaggaggagggaagagcccgccggagtgattcgtcggcggcggcggtggcggcggaacacccgagcagagcaaagctgctgcctttttgtgctgtttgcgggagagagagagagtttgggccttttgggctgtatacaggaaaactatataaaaagatagataaatcaaaaggagaagaattcggaatattacgccgactcgcttttgatttcaagatgcgacctaatttcgcacgtcttttcagtttttcacctaatcacggacacgacacgacgttactatttcgcgatgtgattaaagagatttaatttaaaggtgtgatttttacgtctctatgatatattcggcttctgttcttgatcgtccgtataattggagatggactcggaactcatgttcggactatggcttggaagtctattacatttcgaatcaaagtatgttggtgatttattactgatcggtggtaatacgcgagatgtgtttaaaatttgagatgtgtttaattttcgtaccatttgcacctttgcgggcccaactaatgcacgcatgcccctgtcttgctaacgcaacttagattatagtatgcatttattatacaaatttcacgtggaactgcttaattttatgatataatagtatagaattacttggtgagcacattttgttgtactgtgtgtatataaagaaacggatcaatcgaggactttttttgtctgtatttaacccaatatggcgaaatcttgaacataaagccatggtttaggttgtttagtatcttggtccacccttgtgtatacgctagcattttcttctagacatatttaatttattttttaaaaccgcaaacctctcgatctttctaaggaaaaaagtctgataatacttttatgcaatgggagacccgatcaaatacccttagctcacactacacaccaccaactgccctaattctttaacgttctgatgcatatgtcctcctcctctacgattccattttccctactgatatgttttagtgtctcaccctctatgatctcttactcctccctctctgtagaaacatgcgaccgtcaaattctccaaacacttttgttaatctttcagcgatgtttagggacatataagagaagggacaattgcattcttaccttgttttcaactccaatacgatgattttaccccttcttttccaaccttgtgatttgccataatttcttttaaaagataaagcttgcattttcccctcattctattaagagaacttttctcaggccttttgtgattttgccactattttcacatcaagaattcttacttgaatttcacatatttagttaaaaatatgggcaagaaaaaacttggcatgagatacgggtagattagactaagatcctgctcctaatttgttagatttagttttcacatggaaataaacataattgcccaacgaacatctggcattcatgtaacatcctagaatgagcggctgcgatcaaaccaagagagtggtgaagtaaagagttaagggcaacgtgtaaaagactaaggtgatgtgctcgaagtactgctagagcttatgctccagcgcacacaacaagcatgcttgcagatcatgccatgctgaatcctgtcgcctaccaagcctagcttatcgatgagacgatgaacagatatattaggactcgacatttttttcagtactcaattttagtactttccattgtgtgttgtaatatcctgcaatgcttggtagctaccttgaaccatcctacgtctaatatccagttcagggaatgcatgctttgctcagttaaagtgatctctagtcctgcctcctgcatctattaagtaggctcttataattgtcaaagatattgcctttaaacctattcttatttgggtgattttttccttttgcaatttcgtagtattactatacagatatacttacaatgtacttgttgtaggattgaacactagcaaccaagtctaccagaagaggaggggagtgtgggtgaatggtaggaacaccaaaaaccaaaatatttagcggaaataaaagttacccacaaattcgatcgagatccggtcagactaacatgttcacaccggtctgactacacctttgctgccggtttaaccggtgttgtctagccgatttgaccagtacattggtcgctgtcgcaacctcttgatgccgccggtctgaccgctgc

SEQ ID NO: 21700 - DNA, 15037 bp, Oryza sativa
  unsure (1)..(15037): unsure at all n locations
tcgatgaaactcttgaaagtatatctaatttgttctatcaagttgagttctctcttaactagaattaaaagctcgaagaaaaccctaacttttgtgtcccaaaaaaatcgttatacccaatatgtctctagccacaacccttctactatttatacctaaaacattcatgcccctaaccatgaatcctactagaactggaactgctaatcacataggaaacccaacaaacgagggaaacaacttaacatccccatacaacttcacatttcaatcttttcaaacttggactcaaatccaaatttgacttcactttctatttgcacacaacaccacatgtataccatatggaaagattcacctccacgtgcattgttgtctagcctgagcatccccgcgtgatatttttgactctttggacctcaacttctcctaagcctagtcccgatccatcaccggctataatctcatggtctcaagcaacaccagcacacgaataacaaagaaactccatattcaagtacaatatcgcaccaacttgactcaatcaacacacaatagtatcacatacgaatagaaatcatctaaaagtcataaacatgaagcaatctagaaattccacgaaatcaacccgaaaccagctccctcctagagtctgccggtcttaccggcgacacccgcccagtctaaccgaccaccagagctaacaaccgaaaacactattcattgtattttcacaaacacttacatttgaaaattgtttatcacatagaataaattatccctgttcagaccgttgagccacctggtcagaccggccacatatacctatagtctgactggccacccagagccaacaacttctgaaaacactatttaccgtattttcaaccaacacttacatttgacaaatgttcatcacttcgaattaaatcatcacatgattttgcacttgctactatatttaaagttgaaaacatacatgtagtatgtttaaattcacaggatattatttatatcactatcctctcctagtgacatgacgttgtgtaggtgcgtgagtatattaaagcacaatgcttacacgctagcacgaaaaacatttgcgttttccattacacgctagcacataactgctggttccttgtgtatcggtagtgattggtaatcactgctatttcattggctgtagctcttgagcagagaccgaaatgtttcattccattatctaaaaaaaatcactgttatttcagaatggtttccggcccaaacaatgttgtaaatcggcagtgatgttgtcgtgttgagcatcagtaccgattaaaaaacccacagcaaggccgtcttatgagtggtgctaaattatatactactagatctacatgttatagacacatgaggacccacatgtcatagaaaacgagtggcgacacatcttaaaagtggcaagaagtgaaatgtccctcaattttgcgatctttttttttactttttttaccttttttcatttttaatttttagaaataaattggaataattttttttagaaataaaccctttcaaaatctaaacctttcagtcacaccacctgggctagtgtggcaaaacaacaatgtcataccagtctgaatagcatggcaactttatttgcccatgtcaatctgctggcgttgcaaccttcgttgtgggtgaggtgacagtattattttgtgacggggtgacgtcgctaaaagattcagattttaaaaataagttttagaatggtttaaataaaacaatcaaaaagtaaaaaattaataatggtttaaatgaaacaatcaaaaagtccaaaattaataaaaattcaattttgtatgtctttataccacacaaatctcacatataaaatgatgcgcgtcgtacattttggtgattccactgttctgacaaatgttctggaaatggttagcttttgatgttctcaaaatattttgtgaactagttgtcactttatcagtgttaacgattttttttaaaaaaagacaaataactcaatcttgcagcggctctttaccgccgccaaacaacattacaatcatgtgctcttactaaccatgtagcgcaataataatgcagcttttgttgttctcaaaagagaaccttgttggcacttgttaatttggtaccctaggcttccataggaatatgacaaatcattatctaaaaaaaagaaaatgacaaatcagcagatgagcagatgagcttctccaagagctgtgtagttgacatagtattattataaattctggcatattctgagaactactttgttcttcgggtagatgacatatgaatgacaaaatgatttgcatgggatttaatctattttgcagatgtcatctgcataaaagggcaagagatggccatagcatatcctgctattctggaagcagtttcgttattttatcttcatgccctgttcattgggctgaacaacttgctagctccttttatgttgggaaggaattattttgtgaacccctgtcaaataaaaatagtatgccggttgtgtaaactactggattagagctatctttacttgagataaaacttagagcaattttacggtccttgaggaggtaccatgaggtaccattttttctattataaatttggtacctcttaaaaaaaaagtacctagtactacgagataccagattttacactaaatttttggtacctcatggcacctcctcaagaaccgtagaattgcttattgctctaaaacttagtagtactcaggacaacctcgatgtacgttccgcgacaactatcatgtcactatcagcaagagcaccttgccggcatggtttaatctcacacctgccgcagctgtggggatgaggatgacccaccatgacgaacatcatcttggctttgctaaaactgaatgaaagaaacatttgcactagaaaataggcccaatcttcagcgggttcatatcatttgctgtgtaatagatcaagtattttcagctcaatcagtcacagctgttcataacttctcataggcattcggcaatttagtagcaagcttgctgagcaggttctcgatgtctcctaggcttatactccctccgtttcaaaatgttttgacaccgttgactttttagcatatgtttgactgttcatcttatttaaattttttttatgaaatatgtaaaactatatgtgtacatgaaagtatatttaacaatgaatcaaatgatatgaaaagaataaataattacttaaatttttttgaataagacgaatggtcaaacacgtacttaaaaagtcaacggtgtcaaatattttgaaacggagggagtaatagatagagtaggctgtgttgaccatgtctaagctagtcctagctcttgccatacttcttcctactaatatctttccattcaatttgaaaaattaatctcattaacttattaacacacagattctcctataatgtagttctcctcttttaccaatgttcgtgcacaaggacgataatgcgaggaggttagatccactgtgcatgtaacatcctagaatgcggctgtgactagaacgaatgtgtggtgaattgatggactaagggctgtgattagaatgaatgcgtgatgccctcaaagagttagtactcagtatcttaactccgttttatatcagcattgcatttttcgtcaaggccaacacacactcttattcccatctacaacaagtttaactccttgctctgtgcaacaaactatctatcatatggttattacttgagataagagtgtacttagtagtacacaggataacctcgatacgttccacgatagctatcatgccactgtcagcaacagcaccttgctggtatggtttaatctcacacctgccgcagctgcgggatgaggacgatccacaacgacgaacatcatctcggctttactaaaacagaggaaaagacacttgggactagaaaataggcccaatcttcagcaggttcatatcaacttccatgcagcatatgaagtacttcctgctcaatcagtcacagttgttcataacttcatacaggcattcggcagtttagtactagcaagcttactgagcaggttctggatgtctcctaggcctatcatagatagagtaggctgttttgaccatgtctaattaagtcctggctcttgccatacttcccatttactccttattactccctccattactaattgatctacattttacctgtgtgcaccaaggccaagaaaatacaataattctctcatgctacatttactttagcaataaacttgatgcatgcacaatctccactattttctagccaatagcaaatcaaagcacttgtatgcatggatgcatgtatcaatgctcatttacccaatgcacaaataacgaatagacataataaatgaacacaaatatgaagatcatttaggaatattttttaaaaaatgatatgtagatcaattaggaatggagggagtaacacacaccgattctcctataatgtagttctcttttaccaattttcgtgcacatgggcgataatgcgaggaggttaggtcaattattcatgtaacatcctagaatgcaaggctgtgattattacgaatgtgtggtaaattgatgatctaaggccatcgtgtcaaagagtggcgtgatgccctcaaagagttgctggagctcctactctagaacacgtaggggaaatgctagcagagcatgccatgttgaatcctgtcgcctaccaagcctaacttctctacgaggaaatacattaggattttagtttttttagcaatcgatctcagtattggcttttttttagcaaggctcgctagctataagctccgggaatgcaagctttagtcatttaaacaatttaatctctagtcccacgccaccatcctgcagctattcagtaggctctcataattgttgatgatgttgccttcatagctatatatattatatgtttttttaccgtccaacactgtacagtggtaccaactctcaaccgttggtataaccggatccaacgactagcggaggtatcacgataccacttgatctttgagatggtaccgcataactgaagaaaagtggaagggtaagaatatattttcgtgttggatggatggattggctgtatgaatggatgatgtgttcttactttctcattggttcacatacattattccccaacagggttatccggctagggcagatttatgctgagcgcaatagcttgcagggtgacaccgtacaccgccgatgacacatcactggacctggcagggtgttgtgcgcttcgtcccctcctttggtcactcgatctccgccacacactaccgagctgctgcaggaggatgccccatcgagggagataggggatgctgccaccactatctgacagggtcaccaggcttgtgtcgccgttgtcctttgagagctcaccctgctgccactggctttgaggtggagggaagggtagcggcgttaccgccgattagggacgaggttagcaataccaaagcgaaatccgggagcagggtgcttcgcctatttcatcgctgatttcgaggggaaagtcggtagctcattattcagtcagcatggtttgtttatagtccacaagcaaatagaacctcaggaacttccggggggggggggggggggggggaagannaccnngncnnnnntccccnctataaaagaaattatttgctaaaatttgaactacccaaatcttgaatcattgtcccataaagtgaacgcctataactaaaatcagccagcatttgttggactaggagataatccgtgaaaaagatcaaaactagcgcactcatataacatcctagaatacacagctgccgtgacaacagatgtgtgatgaagtggtgtactaagagcatcgtgaaaaaatagcatgatgcaggcacagagttgatggagctcatgctccatgatgtaggattgaacacaagaacctggcctaccagaggaggacaaatgatagtaacaacaaaaaccaaaacttttagtagaaataaaaattaccctcaaatttgacaaagttctcagcgtagccggtctgaccgccatgtccacaccggtttgaccacaacctcaatacgttctgtgacaactaccatgtcactgtcctacaacaccttgccagcacggtttaatcctacacctgccgcagctgcggtaaaggacgtccacaacgaacatcttcttggctttactaaaaatgaatgaaaaagacatttgggactataaaataggaccaatcttgttcacaataggtccataaacttactataaagatatctctgtcaaaactgaaacaggagaattcaacttttttctcaaaactgaagaactttccctcaacattgaaccctcccatgcttcaacctcttgagcctgttcacgcaactgttgtgcctcgggtgtgttcttttcatgaagttgggaacttcttccttccacacgcaaaacggggtggttcattagcatatgattaataaaattattagttaaaaacttaaaatatagattactacgattatttaaaacatctttcatacaaattttttttttcaaaaaaacatactccctccattacaaaatataaggcacaaccacccttaacccaaaggccaaaaaacaattattatcatcgtgtagtttgaatcatcctaataaatataatgcatgcgtccaatagagttagagaatgtgagaatgaaggatttaaaaaagtagtaatttaatggagaatatctcatagttaatggtatgcatgcatgtatgccttatattatggaacatgtaaaaaaagtggttgtgtcttatattatggaatggagggagtaccatttagcagtctaggaaatgtgcatgcagaaaacgagggagtagcactcggaaaggctgatggacgggtgatcgctcccccacccgcccaccctctcccctatactactagatgtactcctctctcttctcccccttcctcctccccttctcctctttctactacagtagaccacacaattttttaaaaaaaacaaaaattagaaaaatttatgtatagaaatactatatataaaaaatttgaattcaaattcaaatttgaataggatatgtaaacttttgacttataaactttgggtctataaactttaggtgtataaactttagatgtatagaaatactatatatagaaaatatttgaattcaaattcaaatttaaatcagatataattcaaattcaaatttgaatcgggtctataaactttaggtctataaactttagatgtatagaaatactatatatgaaaaatatttcaattcaaattcaaatttgaatcggatatttgaattcaaattcaaattttaaacgggtatataaacttttgacttataaactttaggtctataaactttaggtgtataaactttagatgtacagaaatactatatataaaaaaatatttgaattcaaattcaaatttgaatcggatatataaacttttgacttataaacttttggtcagatgtgtaaactttaggtgtatgaatttactaaaatagaaaaagtaatgcggtgccaaaaaagaaaaccaggtggagggagggaggggggaggtggggagcgaatctaatagctaccccatccccacggcgatcgatggcctattaggcgtacccagtagcacttagcaaagtggggggaagaacatagccgaagtattgttagctaaatcaatcgcagctgttcataccttgatctccggtactttgtactgctagtattatattagcaatattaccgatatgaggagttggtttatatgatcatattactactttaataactttatgattagggtaattttaccatttagccttttttttttccttgcgttactcaggtccatcggtcgatgacaggacagcgaattcttccgccgctgccgtccgttcgatcgttccccgtcgcctcctcatctccattcgttatcgtcagaatcgtttaatttgtcgatggtttcgtcgtcatgcgaggtccacaagcgccctctgcttggtgccgattgcggcggtggcgaccactccggcagccacgccgacgatgggctttggtccggccgcacacatcgttttcgcactaatgcagcaatctatgaaaaatcacagatgttaaacgcaatttgtaatgtcacaagtatgtccgtttcactgccagaagaatcaaaagattgggctagctaatcaaagcaccataacagaattcgggggatctcagtaagctcattttgttctgctcctttgcaagctgaagtctggggacaaagatcaggtacgagaaggcatcggcgtcttgtagagagggactgaattggcgctgtagtcgtccggaggagaggcgcatgagacggctgcggcgatcggggtagtgtggatgatggaggttgcgccttgaccagaacgccataacggcccagaagtgctagggattccaataatcggcaaaactattcagttttaccattccatgctgatatttttatggacgattatatccctttttgtttctactaccattaattaagatggtagcataaagctatctggcccattcgagggaaatagatctatggtttagattaatttctattaccagtagatcagagcaccgtagagaaactttcataatttagtagcaagcatactgagcaggttctggatgtctcctaggcctataatagatagagtaggctatattgaccatatctaagtctgggctctttccatacttccttatattaacgtgaacttttgctctggctatttaaatcaatttgtggatcaagtaattgttcaccacatgatcataactgcaatgagagagcactttgtatctgtctgcaatttgtatatttttgtttaccttttagaaggatttctgcacatgttctcaaatggattcagcaccgcaccaggaaacatttaaataggattagaacatttgggccgtgacaaatgtatgaagcatgagtttgtcgtagatggaaacaggaagcagcctctccctgggttgtcctcgggcgggcagctcggcggaaaaccctatccacttccgctgcccaccctttccggctctctctgtctcgccgccgccagacaaccgtgcagggagccaggatggtggcagcggggctaaaacacagcgacacgcagtctctggtgcgagggaggagggcagagtacgtgttagaataaatgggctaggcccaatttatttctattaaaatctcaagggcccataataaatgttaaagataataataccaccttgggaattaaaagcgtagtatctcaacttaaaaggcagttatcggaggctccccgttgaccggttaaagtgggggtcggatagccacacgcgcgcgcgccgagccgagccgaggctgtggcccggctctctctcgatccttttgcaacggttaaaaattcactccacgagattacttctgtaacgggcgagcgattcaatactgattgatcgtgtcgttacagaagcgaatcctcctcgtgcgctattaggacgagacagagaccgacgatcagcctctccacgaattctccattgtttgttctgatcgcttgcatgtacaagtgattgggacgagcagggcctccagaaccacaccctctcctgagatctgcacgggtaggcgggtgatcaggtttttggggagtgcttccgcacgactgctcgcttcttcgtcgtcgttcggttctatctgcattgcgcaatgtctactggtggtggcacacctggagcagcaggtgcggcaggaggtggtgcgctaggagcaggaggtggtgcgccgatcgacaacaccaacggaggcaattctgcctcacattccagcggagggactttcacagggtataacatccttctgttacctttcattttgttaaaactgtcagtcgcaatattattgcgttgcctcaatgttgatgcttattttaccttaagcatgctgatagttatatttagttttatcactagatcgcttcacattgtgcatgtcatgtttattgtcttaacattttggattaaaatatgccgatttatggccatatttccaacagtacggtgagctggtagcctcatgggcgcttgctgatgagcgacggttggggtccgacaccgctatggccgaattcagtgctcctacggttggatcgggccgcgcagtccagcgggctgcagcaggaggccggctctgcgagctgcaacaggaggccgacgagggcgcggcatgactggcggtagctggaggccgacgagggctgggcaatggccagatctgatcggtgcggtcagatccgtcccctcccagccactaagcatggcaggagctaggagcccgttgacggtgtgtgtgtgtgcgatgtttcacgtggaggcatgcagaggctggccggtgggggtcatcggtacaatattgtccaggccggccatcctccgtcagcacatgtgtaaacctagcccgacgctttagtcatcgttttccctcctgggggtgttatcgagtcatctctctccctctggtagggccgcctggcgaaaaccatgtgttggttctcccaagggcctcgacagacggcagcggtagtgctcaccattgctcttctccttagagacgtcgtcttggaggccctcttgctaaaacttttcttaggcagctagtgcgagctctctcttgaagttttatcctctcggggcaacactctagctaatgcaagttgatcatattggtgggcctagcggggcagagcggatccattcttctatttcaccctctccccctcaatcccaaaggagagttgagttcagtgctcggttgccagggcttggtttcaagcggtttccgttgtagcttccttgttgtctagcggcggccggtcacgcttagcggtggctgattcggtgcgagccttctcattggctctatgttggagctatcggtgtgttgtggttagagttttgtttttttttctttgtaatttttcctactttattgatggaataatcgtgtgctaatagttcaaaaaagagtttgccttcgatcagtttttcggataccaacaaaaaaaacatgtaatttggtccgagcctttgtacctcttacttatgaacgttgctcaacatgttttcacaatattatgtccaatggaaggcattgttcatgcaaagcactgattccaacaataactcgatcttgtgaaatacgagttcttcggccggctcatgatacacatgaaaatccttacggcagacaaactacagattcagggatgggataacaacgagatttgccccgtctatagtttagaacctgagacttctcatgacctcctcatggagtgttcctttgcaaatgtggaacaaacttagacgtactccacatgtcttccccctcccttttctcaggaaacatgttaggttggtgggaaacttgcagaaaagaaatgataaaggaccaaaggagcaatttcgatggcctcttcatctacacggcttggggcatctggctacaaaggaatggtagaatctttaatgggaagtacagtactgtgtctcaggtttttgattccatcatagacatgtgcaaagagttcgatgaagcccatgtttatttgatgagtctacaacgcattatgctgttagttgctttgcatttcctaaaactcttgtgcctttattagaggtagtcttcccctttcctttgtcctaaagaagaattaggacctctccgttcttcctagaggtccttctaagggaccgttcaaagccttgaggccatatgctgtaaaaattgtgttttctccccctacttaactgaaattggcagagctcctgcccttttcccacaaagaaaaaagggtgaatagccaaagtggtcctccaagtttcatctgagactcagtttagtcattgatgtttcaatctatccatattagtccttcaagtttttattttagttcaaacttatccttgaaccaacaactctcttcataaatgacacttatacccctcatcattcacatatacaagagaaaaattgcatgcttgattttttttatagataatacatagtatattttgtaaaacgaaaaaaaattatgtactaacaagtgtatacgatagcaattgcttaagttttatgtgcacatattgaaataatgggaagtacatctgtaatgttgtttattcatgttggctttctcttttctagtatatagatgtatacaaattaagggcaaaaaggatattttctaatagaaatattgactagaaatagccatatggcatattaagtggacctaaggatgatttcaagccaaaacaaatatttgaaggacctatgtggacaaaatgaaacatgaaggaccaaattgagccttcgctaaaacttgagggactaaattagctattcacccaagaaaaaaaagaggaaaaatgtaaaattctagaacagagttgttacgtggcacaaagaaacatgagcaaaacactagctagattgtcaatgatttagtgtagcatgaatgagaaaggaaaaaagaggaggaaaagagaaacaggtcgatcattcctaacatgtacatatacattatacaatagtaaactttttttatgaaggggaaattttttcttcatctcagaaaatttactgtaagaccacttctgacctcttcatagctaggatgcgaacatcctataattattaaggccctgtatattccctggtacaattttacaccctatcatatcgaatgtttggacgcatatatagagtattaaatatagacgaaaaaaagctaattacacagattgcgtgtaaattgcgatacaaatcttttaacctaattgcgccataatttgacaatgtagtgctaaagtaatgtcacgtcctgataaattcatgctgaaataaaaatcattctctaaaaggaataatagaattaattaaaattcgaaaagaaattgacaaacactaaaatacgtacaagaaaaattcgaatgtggcccagagaatttttgttaaattctccttggtctaaaaggagctctcaaactttacttgaattttcatagcaatggaattatttattaagcaacaacaacaattcagaaagtttattaaaaagaaaactaaaaataatcctcctccctcttttgggccgagtccagcccaaagtccttctctcgtccctctcttttccctttttctcccgggctgcccctcccctcggcccagctccctcctcttctcctcctgggccgcctcggcttcgcacggcccaagccgagccgagcggtgccctcctgccgtgccgcgcacgtgcgcgcgcgctgatcgcgcgcccgaccggtgggtcccacccacccagtcgtctccttcctcccgttcggcatcctctctctcttctctcccgtgaaaacctagtcattccctctctcaaatccgcgcgattcaaaccttggattccaaaatttattgggggaaattaatcccctttccctcctctctctttccccttgattcccccttgattcgtgcttttaatcaccgagaacggacgcatcttccctggccgctttccatggccgccagccgccattcccgcctccgttccgccctctcccgtggccagatccctccccgcgcctatacaatggaatccccatccttcgttctcccgttttagcctcctcccgcgtctccccgtggccaccccgcctctccccgccttctccttctctcactccggcgccggccgacctccagccgcacctcccgccacgaccgtgcgctgtccggttgcggcgtcgccaccctcagcgtcgaaggtgcatcctcttccccagcgtcgcctccgtttcgcggggaaaccaccggagacgcgtcctcgcgggtaaacagtgatgttgccgccactgcaccacctccggcagccccttcccctgtgcccgagcaccgacctacgtcgccgtctcctccgtcgacgtcgctgcatcgtcctctcctccggctgctcctctgtttcgcccggaaaccgctgcaagctgccgcacgtcgcctccacgccatccacgccggagtcccttcggccacccctttctcctcgcctgtgcgacggtcggccgcacctccaccaccttcggcatcacagcggcaaggtcgtccttggcctcgcctcccctcgtcgcctccctgccggtctttgtcatcgtcctctcgtcgttcccagttgcgctcgtcgtcggccctcccttcgtcaagccgtcctcgttcgttgtccgcgtccatcaagtgagccactgcagccccatcatcgtccttgtcctcggctctgcgtcgtcaagccctgcgccggtcgtgtctcgcctccgtctaaggatcgccgccgaagtcgtcccctcgccgttcgtctccgtcaccgccgagctgcctccgccgtgcccgttcgtcgtcgtcgttcccacgcctcgtcgcgtggtggtaaggatccgtcctctcgctgcccccgtcctcgtccttttggtgtcgcccgtgcctgttgtgcggttatcgaccccggtaccgtgtaccggtgtcggtagtcgttcgtgtgtgcgtgtggtgaccgtgttagtgtgcccgcccggtagccgcgtggtttccacgtgtgcagctcccgtggtgtttagtggagtccgtttgtcgaacacttgcctgggttttgacacacgggatccgcttccgtcgatccgtggaccgtctctgtgtactcgatctaccgtggccctttaggttgacatgtggggtccgcatgtcaacggcgcagccttcctgtcttttccaggctagcgcttacacatgttttataattgcaaaacctaattataataatccgtaaatctccatata

SEQ ID NO: 21701 - DNA, 1448 bp, Oryza sativa
tttttatgtattgttattgcttctttatagggtttagctttgcttgtgtgcttcgcgtagctcctgtcgttccggaggttcccaaagcgtggttcgtggtcgtcgccgaaggatcggaaggccgttctctctaagcaaggcaagtcacatcatccttgagcatattgaatcccagtttataaaattattttgatttgaattattgcattactgctttatttaaattcccgcgttatcactgttttatttagcattacctattaattcttgttatagccttatcattgcaattgttattatcaccttgcttaccctaggcaaataaaaccctaactagtgggtactctattcatggttccactagtataaatttaggtagatgcttcgctgattaattaggcaacatttggtggtttcataacttcagactttggaaattctcatatcacttagacactatggaatggttggcttatggtggaattggacgtacacctctcttcctctttcaaaacccctaaaacctattttccggtggggtttgggtgcatgccagttatgggaagtagcaccccagccaatataaggataaagctcgggcctttgttgcaaagcactaccgtactaaccacatgtctaatgggtaaggcttaactcggtgctcagtctagtcctgaacaaaaggacacggatagagatggatgaagtcgttgcgacgatagatatctctgaggcaaatgaaggctacgcgagctgcggctcggtaatcgagatgtctaggcaaatgaaggctacatgggccgatgtccattagtcgagatgccatggcactggactagtatgccggtggtctcacccctatgtgtgtggcgcaaccggtctagatcctgttgctaggggctcaatcctggcctgcctgtctgggataccagccgatacttttgttcacggctaggatgggtaaagggttatgtcacattttttatgatgggttccaattgcaatggaatgcagagtaaaggcgtatcttataggtaaagatgtacacctctgatcagagtataatttattcgaatagccgtgccctcggatatgggcaagcctagcaatgtacccaagttagtggtttaattcttaaaatttgcttaacaactaaaatatggaatggttggcctgggttggcttgggacgagctgggacctaggtcgggttgccagttcggtccgaatcattgtaggccttgggttaaggcaggttcgtgagggttcacggccttgattaataatattgtgtagctctaggatcgtgtttacaaaatagctttgagcaactaagtgtcttttaaatgctctttactgcaaaacccaaccctattattgttactccttgtaccccttgcattaatcatgtatctcccggtgtaacttgctgaatactgtggttgtact

SEQ ID NO: 21702 - DNA, 15165 bp, Oryza sativa
ctggcagcacttcagatagcttctgaattttagtgtgaagctagagggaccgagtgccatgttgatgcagaccagaaatgtatgaagtagccatcagcaagaacgtcatcaggcatccattcacatcgtctggtaatgtcgggcgatctgcttcacctgcattggtgctcagaaactggtattttcatgtgcatcacagagtgtggttttcacctaggaaagataaacgattctaggctgcaaggcaatggaatgtatggctaatattttcctgatacatcccagtcccacttgatagggatgtgtacaagggcaacggcacaagaaagctttatgaaaaacatgcgttgtaacgagaagtcactgctaaaaaacccttataggaccggctttataggtgccggttatgagcctttttccacatccacggaataaaaaaaataaaaaaccaacacctttaagcatattggtatatataagatttaacagttatgttttataatcagaatgtttcagtacatgtatttgtggccagggtatcacctgttaaatctatacatacctataagcacgtatttatttcgtagaaacgatatgagaacttcactatgcaaatatttacatgtcatgcctatcatgcacttgtatcacctcagtatatattttgctaagttcaataaaagtttccgttatcttaaaaaaatacaaaacttgcaaaccacaaaatggatggatcgggaatttttagttttccccctctgattatatctgtggcgagttctacccttttcattcataactggattattttttatatatctccaagggtcagaacctctctcaaattattgggttcatcaattacacaaaggaagaagacactaactagaacgaaatttacagggatataacaaaaaagtataattagtactgaactatgaccgggacagccgaaatcaaacgaagagaatagaaacacttgtatgtatcatgacaaattagacttgcaaaatttctccacctcttgacggtgcctcttaatagacatacaggacaaaataattcaaaacgaaataattttatcagatattgactggagcgttgtatagctggtttgggaactgcgtggtatagatgggaattttgtgctctgcttgcagtatagttgagcgtagaggtatggaagaaggaagatgaagtatgttcagaaaatcgagccgtctgtgttcggatatgggaagttgggaactaaactcctcgcacggaaaacggagtgatccattagcacgtgattaattaaatatttgctaattttttttcaaaaatagatcaatatgattttttaaacaactttcgtataaaaactttttgtaaaaaatgcaccgtttagtagtttgaaaaacgtgcgcgcggaaaacgagggagaggggttggaaaaatgggattgcaaacacagccggcttgtggtatacttaccaatagccgaacaattgaacacgccggccggccaaacagatcagaatacacagaggaattgaacagtgtatttgaaccatgaaacaaagctgatattgggtaggcacatatcaaaccagaagaatacagacaatatgtgaatatttttccttacttatactaaaaaatcacttggttggggttcgctccaaatagcaaaaaaatggcatgtattgtgctagttcctgtcgcctctcaagcctatagtgtaagagtggcaaatgatggctgttcttcccatggttgtatctgagagagacatatataatacattgacctattaatagttcctgtcatgtgtactgtttgctggcatgggatattccaacattcccaccaagagagtttatattggtggcattatgatgtgtttttgtagatattgtattatatgatgtgcacaaaatggataccaaggagaggtttcttggacaccattaaagaaggcaagcagactcaagctacaaaggttcaggtgataggtgctagcagatataacaaagacaaaaaatacaagagtatgtgttaaatcaacctagacggccaaaatgaaagaaaagacagagagaaatagtgaaataccctccggtgagcggcggcggcctcctcttctcctttttttttttgactggaaatactgccaggacattgcctcgcagtgtgattttataaaagggataaaaaagttatttacaaattacaagagaccgagaaggaaacaaaatgattatactgtttgtaaccagtcaaaaactgtacgtttaaggggatcctttattctgcacatatgcagaagaacatcggccttgaataaagccctccaagaactgaatgagggaagctcatttcgaaagattttctcatttctttgcttccaaatgtgccaagcagcaataaagaaaatatccaaaaaaaacccttctggttgaactgaatgtgggccaaaaccaccatctgaaagaaattgagaccagagttccacacaattcccaaatactgccagcactgctgactgaaggggaagaagaacaaaagatgctctcttgtctctctgatattattcagccataactcacaagtgagatcatcattctcctttgcacagtgccgtcgatcaagcatatcacttgtgttgagtctatctctaaacaagagccaagcaaaaacttttatcttcattacacatcttgttttccagatccaaacaaaaggtcttggcacttgcacatttgagaaagtgagcttataaaacctcttggttgtgtacttgtcagagttccagatgaaagaccaatcatcacccttgtcattctgcaaagagagagaggacaattcctcctctagaatgatgaattctccataggcttgggtgttcagaggcagcaaaaagcaatcctcaagaggaatagagcacatttgattaacagagagggatctatccaaagcaaccatacacaaagctgggaatgcagtgcacctaatcttgtcattccaaaaatcatcccagaaaagagctgaggatcctgtcctgatgaagcgttttgaaattcccctgaagatatcagacagagccactatatctctccaccaaaaagagactttattccaaactaaatggggcactttggagtcataataagaattccagatcagttgaacccatggcagatcctgccctttgtaaaatttgaccaggtgtttaagcagaagtgttgtgttttgaattcttaagactcctaggccacctttttcctttggtctacacaccaaatcccaagaagcaagagatcttctagttgagtttgggttgtttcccctccagagacagtttttccttgcagtatcaatagctttaaccactgaaacaggcaactacaaagaacacatataatatgttgggattgaggaaatcacagagttgatcaaagtgagtttgcctccatgtggcaaaaattgtgggctagctgtcaatcttctctcaaccctgtctaccaatggtgcaaagtccactacccatggtctagttgtccccataggcaaacccaggtaagtaaaaggcattgtacctatgatacactcaagtataccagcaaaaagctcagcattctcatgagacagattgattgggtagaaataggacttatggtaattaattttgaggccagtagaatgtgcaaaagagttcaacaaagccttaaaacaaaaaacctctctctgtgatgctttgaggagaataaagtgtcatctgcatactagattacttggaaacccctttcatcaagttcattaattggcttgaacaacaaacctagggagcaagctttgttaactattctctgtagtaattcagcacaagaacaaagagcaagggtgaaagtgtatctccttgcctaacccctctcatgcatttaaaagaatttctaggtaccccattgagcagaactgaagaatgtgccgaagaaaaaatcatctgtacccactgcagccacttatcatgaaaacccatacttttcataatggatatcaaggcagagtgctctatagaatcaaaagccttttcaaagtcaagctttaacaagattatttctctctttgactgttgacattgatgcatatactcaaaagaccatgctaaacaatcttgaattggtttgcccttaatgaagccatattgattctcatgaaccagcttaggcattacactctgcaacctatctgccatcaatttggttaatacctttaaactgatacctatcagtgagattggcctataatcattaactgtttctggagaggacttttttggcactaaggttatgaaggatttgtttatcagctatagatcagtataacaagcatggaagtgtgctgctaacctgtaaaagtcatgtgatatgatgggctaaccttagtgtgcctcctcttctccttgatggccagatctagcaggtgtggctggagggtgacgacagtggagaggacgatcgagaatgttgttgatgttgagcctggtttgtttgtgctggtcataccttgaaagtgcaataaatggctgaaggattgtgatctttgatgtggttctggtgttgttgatgagttgttgaataagtgtaaatagcctattcttgatttgtgatgtagttgttctcatctttgacatattgatatgaatattattgtgttcttgttcctggtctataaatgtggatggggaattggggcgggagcaaatatggatgaggaatttggtgccgtgggtgtgaatattgcgggcagcttgacgcatttgttcgatgaaattgagctggcctttttttatttttggttcgtaggaacactttttttttttatgattggggattaatcaagaggacctatattgagcacactaaaaggctggtggcacattagcatcctcgcatgaaccggtatataagcattatgaattgtaattcgaagattaggcatcaattaaacaaaagtttttttttcaggcgtgttcagaatctcgttgctggatggtgaggagccctcttccatatgcttgagggcagcggcgattgcatctgccatcccctaagcaaccatccctttttcccacttgctgctgaagcaccaccaacacctggctggtgacaatgtacatagaggaaattatctgttacgtgatttttttttaacgattcacaccaaacagcgcgaagatttattgaatagagaaggagaaaaattacaaggttagagccttgggaggcaatagctaggaaagaagaaaaaaatatccatcacccacgcactgacagcacctaaacacagccttagagaaggctagcaccggaccaaccgccgctagtctaacaaaggaactacaaccgagatgacccaaaaaccaaccctaacattggaaaccctaggggtgaaaacggatcggataatatcccatccgatccgatctactctgaatccttccgaaacaaggatatggtatgggcttatccgatacggatacggatgcggatgcggattatctgacagttttgtcggattatccgataagaagtttgtcggataatccgaaattatcaacatatataaccactctatctattgcatataacataagttggtacatccaatgccctaattcatcaactatcatagaatttttagtctaaggcttttattgtctcatgtcacactcaagtagctatattttttatattatgggcatcaatcatgtattcatattctttagcacttaatcatataattattacgattggtcatttattgagtattgtattattgttccatggattgttaactcgatgtcgcattgattgcatatacatgtaacatccgataaatttaatccatttctaaaccgattccgcaccgactccgaaccatttccgacatccgaaacaatccgctccgcatccgtacactatcctcacctgctctgaattcgcttaaaaaatattgtttaggatatgttatgaccactatccgtccgaatccgttccattttcactcctaggaaacccgaacacctctagccacatctttgggattgagggagagagggtaagagaaaagatggaaccactctccccctaggccctctgacatggcccacttgcacaagctagaacgccgacacgagaggacatgacatctcgagtgagcttgcactatatgcttgggaggttttgacaagaggattgccaagacgacatctccagggagaggagcaacgaaggactggccgccgctatccgtcaaggtctcaaagagaaccaagagtgggttttcacccggcagtcccactagaggaaaaggggatgacatgacaatgtcctcgagagggaaaatgatgctcgaaaacgccgccattgccggcccagccaagaccatattaggttttcacccgtttcctgctacctgctaatccacagttgatgctccaatgctccaccaccatctaaccttcgttgacgcgtgggcactactgcaccggcgtcccctaccagcacgccgagctggcctctatcactgccggtcacgcctccgctgctcgtagcaccgccagactcacaccgcctcaactccaccactgccaagtccagggactcccacacctaggctagccgcattggcctccgctaccgccggccgcacctcctcatgccacgccgccaccgctccgccccaatgtagccgccgtcagttcgctgcaccggctgtgcttcggtcagatacggccgaaggtggcccgtggggccagctccggtaatggctgtcgcctcctcgccaagagggcttgctgccaccactccctgtcacgggtgctgcctcccagcaagatcagcatccgccacagcaagatgaccaccatcgccaatcctgtcgttgtcatggccaacccctgctgccgtcgtcacttcgccctccacaacacctcaccggtgccactcacgggccaccggatctggccatgggcgccaaatccagcagccgccatagtcaaactgatgtcgcccgagctccataccaccacccaccacagcagccgggtcgcgccgctgcccaccggcctctcgccggagggacagctctagtgcaccggtgtccccgctgttgcatccttcgggtgagagagagcctcgccgccgccgtccttgcagacgcatggcttgccggtgggtcgctcaggcggcagcgaggtggagggtggagggagagcgtggtgacggcggtgggttttggggcgccgtccgtgtcgcccagggacgggagcgcacagaagggagcggagtcaaaccatctaagttattccctgttgcgtgattgactgctcctgattttgcttcacggtgtcctagtgataacttttggtacacatcatagcagataactttctgatgctcctctcaaacatatagtgcacacactaatatttggttacaacttttgctccttctccatgattctactagcaaacaatctttgttcttcgtcatgattctaccagcaaactggcttgtttcttcttgacatactacttcctttcattgtgtgatttttgacaccacagtcaccataattaacaggccgaccaccctatcagtatctcactggtcctttaattttcaatttttagtgaccacatgactagcttttgtggttgttgcactcggtccaatgcatggctgttagttcacatccattctatttgcatgtcttccataggccgtgtttagttacatgtaaaacaaaattgatgtatacagacacacatttaaagtattaaatgtagactaataacaaaaagattctgcctgtaaaaagcgaaacgaatctattaagcctaattaatctgtcattagtaaatgtttactgtagtaacacattgtcaaatcatggtgtaattaggctcaaaagattcgttttgtaatttacatgcaaactatgcaattgtttttttcatccacatttaatactccatgtatgtgtacaaacatttgatgtgatggaatttttggaagtttgaagggaactaaacacggccatagtttcaaattttctttcagacctgtgggatcaggatggcatcgatcataggagatctaaatgatcgttttcttttttcaaaacaagagaacaaacacgcagaaaaaatgaaaacaaatgacattgaaaatcgttctaatatgcacatcaaggatgcaagcaggctgctacactaccgcaatagtctgtgctatagtatagtatcatgaacagtaaagtcagcaaaccatttcaaacaacaatcattagaacttctgttagcgcactcaacaagacacaagaacacacacaagaattggcaatctcctctccaatatattctcaaatccaacaggattgagccaccgccaccatcgccaccaattgccaagatcgactctgttcttgagtttcttcagttatatacagttaagtctctctctcacccactcctctcttgccagctgtgacagcaacacaacagctacacgcaactattacatggcccaatctggcccagtatacaatgggttcttctttcttgcgcgtcttggatatatccggcccactcttgtatcagcatctccttcttcttcagtgaactgttcaccgtcatcgacaatgcttggcttcgtcatcccttcaggttcactgacaatcccctttccttgacaattggcttgtccccaagccaatgcagcagggaaccttgtttataaatcctccaagtcctcccaggttgcttcatctggcaccgaatgagaccattgaaccaaaacttgatggactggagaattacctttcatgtaagtacaggaatccaggagacgagctgggaattgcaggtcttggttagggccaggcaggtcggacaacactggtggttggaaatccttagcacccttgagctgagaaacatggaatacaggatgtatagtactggatttaggaagctgcaacctgtaagccactgaacccaacttctcgaaaacatgaaaggtccaaaatacttaaatgacagtttatgattcgccctgggagctactaaagattggacatatggttgtaacttgaggtagacccaatcacccactgcaaaagaccgaaaacttctcttcttgtctgccatgtgtttcatcttttgctgtgctctattgagatgttgtttgataagagcttgcatgagatttctttccttgagccatacagccaggtcaggtatagcgcaatcagctgaactgatgccgaaatgtctaggaggatgaccatacaaaacatcaaaaggtgatgatgacagggaagaatgataactagttttataccagaattctgccaaatgaagccaagaaaaccacttagtaggagtagcatgaacaaaacttttgagatagatttccaaacattggttaactctttcagtttgcccatctgattgtgggtgataggctgtgctcatgtgcaattgtgttccagctcccttgaatagctgctcccataactggctagtgaaaactctatccctatctgaaataatggtctgaggcaagccatgtaacttgtagacattgaccatgaatagctttgctacatcaattgcagtatagggatgagatagaggaaggaaatgggcatacttggaaaatttgtccacaatgaccagaatacaatcatatctgaaggatcgaggaagtccttcaatgaagtccatggaaatgatttgccatgccccttctggcacaggtaaaggttgcaatagtcctgggtaccgatttctatcaggtttagcttgtagacagatttgacactgatgcacaaaatcttttgccatcttcttcattcctaaccaggcaaacaatcttttaagttttctgtatgtcactggaaaacctgaatgcccacccataggactagagtgcatctcttgcagcaacttgagttgtaactcaggattgtgtccaatccatattcttcccttatatttaattaaaccatcatgcaaggagtactgaggactagattcaggattaatagccagagctgttatcaattttgttgagtactcatctccttcatatccttttatgacatcttgtatccatagtggagtacaactggaaatcagggctaattcaccatcttcttgatatttcctggagagtgcatcagctgctgcattactagtcccctttctatagtagatcttataattgagacccaatagcttagtaaatgccttatgttgccagggtgtatgaagtcactgatctgataaatgcataagactatgatggtctgtcaatatgatgaattcccttaattgaaaataagatctccagtggtgcacagcaagaaggatagccatgcactctttctcatatgtggataaaccccttgttcttggacccaatgctttactgacataagccagaggatggctgttttgtgacaatactggcccaatacctgattcagatgcatctgtttcaactatgaatggttcattgaaatttggtagggctaggactggtgctgtcactagtgcctgtttgagtttctggaatgctgcatcagtgtcggcagtccactggtatggtacccctttccttagtaactgagttaatggtttgctaataatgccaaaaccttgcacaaatttcctgtaatacccagccaaacccaaaaatccccttagcttcttaggagtggatggtactgcctagtttaagacttcctgtaccttgtctggatcagttgataccccagcagcactgattacatgccccaaataagttaactgttgttgtgcaaagtagcactttgataatttcaccttccaattgtgttccctgagcagtgaaaggacttgatctatatgtgacagatgagtttctaggtctgggctatagatgagaatgtcatcaaaaaatacaagtgcaaattttcttagtactaatttcaatgtatcattcatagcaccttggaaagtagctagggctccagttaacccaaaggacatcaccttatactcataatgccctgtatgagtctgaaatgcagtcttgtattcttcaccagccttcattcttatttggtgatagcctgcccttaaatttagctttgtgaaccattttgcaccagctaactcatcaagagttcatctatcactggcattggataagatccctttactgtgatagcattaagctgtctgtagtcaatgaccaatctccaagtaccatccttcttcctaaccaaaagagctggtgatgaaaatgcactttggcttggttgaataactcctgtttgaagcatctcctggatttgagcttcaatctcatccttaagtgcaggattgaacctgtaaggtctcaaattaacaggtttagaaccaggaattaaaggaatactatgatcacagtatctctgtggtggcagtccttttggttcctcaaatacatccttaaacttttgcagcagtggtaaaatgagctcagaagtgggtactatctgttcttcttcattcatgaatagttgtaccatgtacatgagggctccttccttagccatgcctaagcattgatgtaatgaaactagttgacagtgattagtttgggagacaataccttggagcttgatagactgatcatttgattggaattccatccatttgtgaacccaatcaatgtgcattggactgaatttctccaaccagtccatacccaatattacatcataagtacccaggggcaacagtctgaagttacttttgaaagtataaccttgcatccacaggattagacaactgagttactcctgataactgtaatccaacttgggtgtccaggaaggagtgagtactgccagagtccactaacatgagtaattttgttccctgaattcttccccttaatctgagagagttagctgattcagtgcccaacaatgcctgttgtgatattgccattagagttcccttttcaggttcagttgcaacctgctaatcttcctgcacagttactagttcagagtcatcatggatagcttccaacaattcttgcacaaaatgtatctgaactgaagtggcacatttatgatcccttccccatctttcaccacaaacaaagcagagacccttagattttctataggccttaagagctgaaattctctcttcctttgccttgttggcatcactgttcctcctgtcttcaggtgaataagatgttccagttctaggggtattaggagcagagacaggattgttaattctagtaacatgtttatagcctgggttaacttccactctacggatgccacttggtttagtaccaacaagagcttcctcctgtaacaatgctattgcacaagcagagtccatatctgaaggtctctgaactaaaaccacacccctgatttcatccttgagtccctcaacaaaacttgtcacaaagtaaacaggtttcagagtgccatcataagcaataagctggtgcatcaaactgtcaaacttctctacatactcttctacagtaccagtttgctgcacatggaaccactggcgaattaggccttcctgtctgtctctagtgaatcgtgaacagactaaatcacacaaagtgagccaagagattcctgtgatttgtgatctaatggattgtaactagaaagctgcatttccttcaaaatttagagtggctaccttaacccagtgctgcgaaggaataccataaacatcaaaatactgctcacagtcacacttccacatttggggattttcaccatcaaattttgggcaggtcatcgggggcaaacagctactcagatcaaatgtgctggtgtgtggcattttggcggaattcaaatcgagatgagatggatgagtaaaagatggatccctcttaccaaccaaccaggaggtgtcttgacttggtgacccctggagcggaattcctgatggaatttcttcatacttcttcgtgatactgctctccaacagatcaaccttcttgttgagatcttggaacgtaccccccaattcatccaccttcttctccaccagtgggatgcgtacctctaggttcttcttgagttccatcagatctgcacgcgagcgctcctcggcttccaccctccgcttctcattctcctcaatcgtcttgagcaagaggtcgagcttgccgtcttgcgccatcagctgcgccgcttgtttggtgatgtagcgcggccgctccagatagcagggcgctccagattagcttactcctcacactccactctgatccgattaacccgaagaaggcaagttgctttttcgcggggtcgattccgaagaactaaccccaatccttctctggattttgcaatcagatcagagattccaggagcgagagcgctctgataccagaattgttagcgcactcaacaagaacacaagaacacacacaagaattggcaatctcctctcccatatattctcaaatccaacaggattgagccaccgccgccatcgccaccaattgccaagatcgactctgttcttgagtttcttcagttatatacagttaagtctctctctctctcacccactcctctcttgccagctgtgacagcaacacaacagctacacgcaactattacatggcccaatctggcccaatatacaatgggttcttctttcttgcgcgtcttgaatagacccggcccactcttgtatcagcatctcctccttcttcagtgaactatttaccgtcatcgacaatgcttggcttcgtcatcccttcaggttcactgacaacttcccaatttcaaatccctgtgatgtgcaccttgaaacagaggttctagatgtagccccgattttttttccaagaaacacgaaaagtaacggatgaaattgttggaatctaacgaaatttcaatgtgacatgcacttaatttttttaaaaaataaactaacctgtagaactgcaaaaaacttcaatctgatcgttggatcaaaatctaaagagtaaattttagaaaagcccaagttttatggtcagaattgcagaaaaccacatgcttaaagcttcacaaaaccccacccttatgcaatttgagcatgaaattacttaaattttgaaatattttaattgttaaatcactaagattgatagtgtaatccattactaccttaaaaattttgtttgagatatgctgaaatttatcaagatttcaattaaggtggggttttatgaaacactgagaccataaaatatgtggttatgtgccacacgttataatatcaattttttcctcaactttgaccaaaaacccggtgttttttgaaatttacttaaatctgaaagcaatataacatcattgaaaaaaatgccaaaactcatttggtatgaagacagaattgagaaatggaattgaggatgaatttgctaaacttcatgaatcaaatcatgttccaaaagtgcattgcatacaaatgcaccgtatctctcactggcttgttccccctcaaaccctaaaaagaacgatctttttgctcttttctttcccattgtttatatctcctatctctctgccttttatacaatagagtacatctctacacaatactcaagatatgatacgagagagatggacttggatgagttgcagtcgtagtactgtctgtaacttatgcaatcatagcagctaccatttgatctgaatcggacggcacagattagtcaaagcactgtaccaaaagtgctatagaataaaatattacaatggttgatactgtagatgtcaatctggaccgttaataatcaaaaggaacggctgaaaatacatgcagtcctaagtctgatctcaatccgagagggagctaatctcaatttgagagggatggtataaaattagtacattgaattattggtgtatgtattgaggaagttggttctagtaatattttgtggattccgtaagaccttgttggttaatctctctaagggagggattggaggggatttaccacacctattgtggtgtggaattattccccctcaataccctctaaaccgaacaatgtctaaaggattattggtgtatgtattgaggaag

SEQ ID NO: 21703 - DNA, 2482 bp, Oryza sativa
taacagtgggacctgcatataagtagctgacatttgtaatatctctttgtagctataaaaagaggaccaagaccacatggaaaaggggttggattctttgaaggcggactacaacatcaagaagcaccgttgctgactaaaacattcagaagcacccttattgacaacaacatcgagaaagagtccatattgttagtctctcctggaaatcatgagagtagtaaccagaaccaagagagaacacatccacaccttgtaatcctcgataatctcagatatagtcaagaacaaaacagcagggtgttatgcttcctcatggcccgaacgtatttacatcatttggctttttgcatttatcgtattttctgaaaacggacctcgaacacccgcaccctagccaaatctctaggggaaggggctccttatttccccgcttaaggacctcgggctctgacacatggtgagagagaagattttcttgacttcaattccaccacatctcacatatccaagcataaactttggtttgtttggatgaggattcattttttttaacgaaagataagaatttgtgtgttcgtcaaaagaaatgtaggatgtaataaggaaatgatttgtcacttgccaaacaaaatgttgtactcctgattttctccttaaaatcaattggttgcacgataaaagccatgttgagctggacgctaaacatttaacgttactaagatctccactaacgctcgcacattcagcaaattaatttagcattgactactattacaagtttataacgaggcgttagctagacactaatagggcgggctcacactattagtatttttagtaagatggctagtacttgcttaaatccacacacatgtgatatcacgggagagaacaacttttcattgttcttttaatctcttttagaagaaatcttctctcaaatatttatttttttcttcttgaaatgaggaatatatgtcgttattcaatacatcagtctcgacttaaaaagttaatcccttctattctgaccaaacgtacagaactaattcttgcacatgcactggtggagaaaccatctttcgtcggtcggccgatttccacaatagtcccggatgcaataaaaaccggggctaaagatgatctttagtcccggttcaaaagggaaacgggcatatttgatctttagtcccggtttgtgttaccaaccaggactaaagatcatctttagtcccggttcgaatgctgtcaggacctgtcaggcccccccgggaaagatcttaactttagtcccggttggtaataccaaccgggactaatgatcccggtgatctttagccccggttggtgctaccaaccgggactaaagtcccacccctatatatatgtcttcttcctcctccagctgcccgagcaagcttcaaaattacttcaaaaaagaggggaggtcatgccaaaatttctattgaatttattttggtgattacatacaaattggaggtgcctaaaaggtttgcaacttcatcctccaatgttttttttgtcatactacatttgcacctatgttttgcacacttttttttgtctccaaaatttagttgtaagttgatgagagagaaaatgtgtgtggggaagaaagaatatatagaaatttagttcatttgctaaacaaggttttataaaatagttgagaaggaaaactctagtgaaagttaatcttaaataatagaaaacaaactaaaatgaaaattaaaagaagtaaaacacattaaaattagtttaaaactttacaaatagtttttaagaattatttggtgtaatattttatgatttttgtgtgaataaagatatcttataattattgtatgactgtcattattgtaagaataattatttgtgtgcggtttttttgactcatgtagatggatcggcaatggatgtacgctgaccggcggtccaaagagtttattgacggcgtgcactattttttgagagtggccgaagctaacaggcaaaggggttttatttgttgtccatgcaataagtgtaagaatcagaaggagtattctgcatccaggactattcatttccacttgtttgagtcggggttcatgccaagctataattgttggacatcccacggagagcaaggtgttgaaatggaagaagatgaagtggaagacgacaatattccggactttgctcagtatgttggatttgaagaaaatcaaacgggcgaggaggaaatagctgctgatggtaacgacgttgcggatgatcttggtcagatgttgcaggacgccagggaggactgcgaaagtgaaaaggaggcccataaattggacaagatgttggaggaccacagaacttcgttgtacccaggttgcgagcaggggcacaaaaagttggataccactctggagttgttgcaatggaaggcaaaaaatggggttagtgacaaggcatttggcgatttatt

SEQ ID NO: 21704 - DNA, 3710 bp, Oryza sativa
atcctatatcgcggtgaggagtatgagaacctagaagcatgccctgtttgcaaagcactacgatacaagattagacgggacgatccaggagaagttgacgggcagctaataaagaagagaattctgctaaggtgatgtggtatttccctataataccacggctaaggcgtttgttcaggaacaaggggaatgctagaatgttgcgatggcacgccgaagagcgtcaacaggacgggatgctgagacaccccgccgatggttcgcagtggcgaaacatcgacagaaaatttaaagaatttggaaaggacgcacgaaacatacggtttggtttgagtacggatggcatgaatccttttggagagatgagcagcggccatagcacttggcccgttacgatgtgtatctacaacctcccccctggctatgcatgaagaggaagtacataatgatgccgattattattcaaggccccaagcaacctggtaacgacatcgacgtgtacctaagaccactggtcgaagatcttaaacagttgtggaagaaggaaggtgtccccgtgtgagacgaggacaaacaggaggagtttaacctacgagcgctgctgttcgtaaccatcaacgattggcctgcacttagcaacctatccggacagtccaacaaggggtacaaggcttgcactcactgtatggatgaaacagaaagtacgtatcttaagcactgtaggaaggttgtatacatgggtcatcgtcgattccttgcagcaaaccacccggtacggaagaaaggcaagcacttcgaacataaggccgaccaccgtacgaagcctaaacatcgcagcgggaaaacaatgtttgctatggttaaagatcttaaagtagtgttcggaaaggggcctggaagccagcatatagagagcgaagatggtcacgtggcgatgtggaaaaagaactctatattttgggagttaccatattgggaattcttggacgtacgccacgcaatcgacgtgatgcacctcactaagaacctttgcgtaaaccttcttggcttcctaggtgtatacggaaagtcgaaagatacactggaagcacgtaatgatctgaagtatatgaaacaacgcggcgaccttcacccggaaccaaaggagaaaggaagccattacttgagtccagccagctacactcttagcaaggcagagaaggaaagtatgtttgaatgcttggagagcataaaggtaccgtctggatactccacgaatatcaagcgaataataagcacgaaggagaagaagttcacaaacctaaagtctcatgactgtcacgtgttgatgacacaactgctaccagttgtaataaggggtatccttccagacaatgtccgggcaacaataacaaagatatgtgcattcatgaacgcaatttcgcagaaggtcatcgatccggatagattagaagcccttcagaatgaagtggtgcaatgtctcgtcagttttgagttgatatttccaccttcatttttcaatataatgacgcatctgctttgtcaccttgtgaaagagatccgtattctcgggcctatgtacctacacaacatgtttcctttcgagaggtacatgggcgttctgaagaagtatgttcgtaaccgtgctcgtccagaggcaagcatcgccaagggttatggaacagaggaggtcatcgaattttgcgtagaatttatcgaagaccttcgcccaatcggggtacctgaatcacgccatgaagggagactacggggaaagggaactctcggaaggaaagcaataacgacggtagacaacaatttattccgtaaagcccatttcactgttctgcaacactcttcattggtagctccttacatcgagcagcacttggctctagttcgcgctaggaacatcggtaagtccgatgcatggattacacggcatcacattgatactttccccgcgtggctacgacaacatctcatgggtaacgagtcgatcaaccaacaacttgccttcctggcgaggggaccgtctgggtcgatcgcgacattccagggatatgagatcaatgggtacacattctacacaagagcccaagacatgaagagcacgaaccaaaatagcgctgttcgtgtcgatgccatgggacacgatggaacaactgccacgtattacggtgccatcgaggacatatgggaacttgactatggtcctctcaaggttcctctgttccggtgccaatgggttaggttgactggtggaggcgtaatgattgatgacagtgggatgacaactgttgaccttaacaaggttggatactcggacgaaccttttgtccttgccaatgatgtaacgcaagtctttttcgtgaaggacatgtctagcaaaggaaagaagggcagagggcctgatgagcctaagcgtcaagtggttctcccaggcaaaagaaaaatcgtcggagttgaggacaagactgacgaggattacgatcagttggatgggcaaccccctttcacggtgacgattgaccctagcatcctcctatcaaatgaagacaccccttactcacgcagcgatcacaaggagggaacaatagtgaggagaaagtacgtgccgtaattattgtgtacacgatgtaaactattttggatgtattgattatccatataaatcaattgatgtatggcatatgttaattacgcacgattattagaggtttcaacaagtttaaatcatgtatatgctagttatatgtgatacttacaatttttaaaagttttaaatcacacaggtgacaatttcatatgtatgttaattagagtttttaacatttaatttactagcattcatatgctaattataattgactagaggatttttaaaagttttaaatcacgcaagtggcaatttcatatgttaattagagtttttaacatttaatttactatcattcatatgctaattataattgactggagaatttttaaaagtattaaatttaatatatttttaaaactatcattcatatattagagtttttcacaatttaatttactatctttcatatgctacttatatatgactattcgaatttttaaaaggttaaaatcatgcatgtggcatttacatatgttaattagagtttttagcatttaatttaatataattcctacgctaagtacatatgatgattacaatttttattaattttaaatcatgcagtatgtacatacatatcttaattagagtttttaccaatataataatatcattcatatatatgctaagtatatatgattattagaatttttattaattatatttgcttattacgatttatccacttaatttattacagccaaaaataatttttcgaagtaattgtcattaatctttgtactttaaataatgttaatgcattaacttctattttataaacacatatgtaagcgaaaatcatatgcagtgctataatctttagtcccggttcttaaccctaaccgggtttaaaaagaatttcgaaatagcgggaaaagatatttactcccggttgttgagaacaaccgggactaaagatatctttagtcccggttgttgagaacaaccggaagtgatatagtcccggttgttgagaacaaccgggagtaaagatccaggggtatatatattcccggtgcgccctcgtcttcttcaccaacacttaaac

SEQ ID NO: 21705 - DNA, 1487 bp, Oryza sativa
tgccgcgacaacgtgaacgagaacgagaacgatcgaacgaacgagagtgagaacgagaacgatcgaacgaagacaagcgagaacgagggaacgaacgtgaatgagaacaagcgaacgaacgtgaatgagaatgagcgaacgaacgtgaacgagctagggaacgtgaacgagcgaacgaacgaggatgatcgttaacgtgaaatgcaatatatatatatatatgtatatatatatatatatgtatatatatatatatatatatatatgttacttcgcatttatcctaatacatttttttgtatcttgcagaaaagacgtgttgtcggagtcgtccgtcaagcctgagtggaagagctagccctagaacgaattggagcaggcaagtgacgtaataatataaatgattgttatatttgtaatgcaattaattaagattattagacctgtaattagacttatcatataagattgtgtagtgttctaatattatttgagttttaatataagattattttattgcaaattagacttagtatgacattattgactacggaattggtgcgactcctagcaattgactattgtagtcttaattagacttagcatatacgcacgaaacacttagcatacattactattttagtcttagcatgtaatattatttgagttttaatataatattactttatttgtaattagacttggtatgtaattattgactacggaattggtgcgacaagtagcaattgactattgtagtcttaattagacttagcatatacgcacgaaacacttagcatatacatgactattttagtcttagcatgtaatattatttgagttttaatataagattattttatttgtaattagacttagtatataattatttactagctagggttgtataatatacgtcacctagacttagcttatatcacgatttgtaattagacttagcacgtaaggttgtgtagggttctaatgtacgacatttacacttagcatacatgacttagattgttaaaacataaatgtctcgtgacttagcagatgtttcttgtatcaacagatggctgaccgcgatgaggaacagatattgtacgatacaatcgcggagggaagcagccagtactggaatgaagaagaggggaacgaggatccaaaccagtacttgaacgaggaagggaacgtggagagggatgcggaggggaaccagcaggggcacgtggaaagggatgtggaggggaaccaggaggaggaggctagtggtagtcaaccctccgttggacagaagagggcacgcgggcaacgaggtgcagcgaagaagcttgagggtcggcacatcataacggaagtggaagaagatggacgtcctagtaccccggccgaagccgccaagaactatgtacgtcacagcggttgggttgtgcgggataacgtgcctgtcagtacggtgtactggcgaagaacaagggcacgcggag

SEQ ID NO: 21706 - DNA, 4032 bp, Oryza sativa
gagcttcaagggagatctgtaccagaagtatatactgaaggggcagacaccgaacttcgacacattcccaaagctaagggatcactgggacagttcgttgcatataagacaggtgaacaagggcaggcgatgatggaaagaaacaaagaaaatgccgccaagaagaagtaccatcaccacttggggtcaggaggctatagcgtcgcgatgccgaagtgggagcagatggaggctagcttgattgagaggggtatcgaaccggcaacagccaattggccggaacgatcgaagtcctggtactatgctcacggtggaacgctcaacccagctgatggctcactggtcttcggctatcagatacaagaggctgcgcgacgactaacagatgcagtggaagcctcctctcagggcacgttccaaccagacagagatagggacgagctgacactcgccctgcagactccagagcatccaggatgaactcgagggaaaggggtgattccttggaagattggtttcaaggaggacatccacacgtacaggagtcggatgaggagcaagagagataccgaggcgaagattgcagacctagagttccgggtatcgagctacgaactcaacatgcaagaggaggtggcaaggaaggttgatgaacgcatggctgcacatcggtcccatgatccccagccgaccattcctcctgcaatggtgagcccgtcaggaaaccgtagcagctgcgcctcaacggggcaggtaggatcacagagcatggacgccatgcaaacacaggacgaatcgacctgtcccgttgatgacatcactcagcggacaccatgtgagctgcatattcctttcaagaacttatcaataaaggtaagatttagccattccgctagttgctgcttatatatgttgattactaataaataatctctcacaacatgaaggtggcgtcgggcatggccatcccaacggacccttcaggtacttaccactgcaggccgattccagcaggatactccaaggtcgaagttgagttggtcgaaggcgcgtacgaggacctcgagctggattaccctgcaggagacggtgagacgcatctacgagacacatgccatgccattattctatggcgcaggcggtacatcatcctccctgggcgacaagcggcgtctcgtgcaccatctcctccggctccgccatctcctcctcaggatcctgcaccgtctcctcctcatgctccgccagcaccgtctccaccgcaggctccagcatcgactcctcctcaggatcctgcaccgactcctcctcgtgctcctacacctactcccccgcaagctcctcttccggcaccttcaaagtcaagggcccccccagctccaccgcttgcccacacaagggcaacaaagaaggcgaaagttgacgccgccaagaacaaggacccggggtacgattgcacgcaagaggagcttgacgcttacgttgcatcagaagtcaagagacaattcaagcctcgaagtccagaaaagaagattcctatagaccccagtgtcaggaacttcttcaggggtatgtctgcatctgtcaaggaggccatcaagctatcggactatgagcgaacgctgaagaaagcatcttctggaaagtccaaaccagtcccttagcttggagagcaaccaaaccaggagatcgagccgttggtgaccggtaaagaaatgacgatagaacaatttattactgacaccggtctaactacggatcaattgctaggagtcgcaccaatcgaaaaggcggaagtgaaatacatgtacgaactcggtaaaccgcttgtcaagcctgagctgctgcagtccctacccacacaaatgtacaagttccatcagctgtacatggagatgagcgccaccggtagagagatgatcggagcgaggatcagggacacggacttcttgcaaggagatgacattctctggatcaatttcaggggaatctacgaactataccagctggacgccctcgacgtctctattatgagttgctggattttgtaagtatatcgttcagttagatttcttactatacgtctcctttaattaattaggtccttgtatataagtagaccatagaaaataatatactcccttttatcgttgtagaatggagattcaaagggcccgacggcggagggtttttgatactggattcatcgaccctcggaaagtaaacgtcgcaatgctcgaccaatatccacaagaaacagaggacaatctcgtccatctcctaaaggcgcagcattacaagacgttcatactgttgccatacaacacagagttagtttaattttactgtcttcctacataccaaatttcattcccgtacgaacttgctaagtgtttcatatgtaatgcatcccacgcacattgcagattccactgggtgcttttactcatcgacctggaggcctgcaccgtcaacgtatatgactcaatggataaaaaagagtctacgtttgacaaggttttcgaacttatagacaagtaccgtcataagttcctttgttaattaagaaaatcttgttatgttaattgctactacgaatcatagctttaaactccatgtagggcttggtatcggttccgtcatttggtccgcggcaaatggagagaaagacttaggcggaagttcaaatttcctatgagtacacatgctctacatttatatttctccgattcaaatacatacaagtgtatattaattagatctctcgttgtttgtcatttatttgtagtgcgcaaagcaaaagcagggaactaacttatgcggctattacgtgtgcgagtattgccactgccttgcagaccaaatcatcaccacaagagagctcgatgtatgtacaaataaattcaaaatttcattacgtagcgatttcttgtttaattactaatcaattttatacattcatattgtttattcgcatgagggataacctgaccacacacaaggaatttatcgcggcggttcaagaacaactcatgggattcatcaacgaagaaatccttgatcccaagggtgaattctactacgacggaaacacaattcaccggtccttagcttctgagctagcagcgagtactactacgtcgaaatcgtagctagctaggacatataatggattgtaattaatacatgactacatatgtttctatatgcatgtgtacacattttctataatgtaaatatattttgttcatatatatatctatatacatatgcatttgcataatatatatatgtataaatacatatatattatgcatgtatatacatataatataatataatatatatatatacatatatatatgtatgcatatatatgtattgaaacatatatatgcatggtttatatatatatatatatatataaaccatgcagcaacaggggcatgaaaaaaaaaaaggtcagctcgatctttagtcccggttggtgttaccaaccgggactaaagatcgatctttactcccggttatttcacccgggactaaagatagcgatctttagtcccgaattggtactcccggtttagaaaccgggactaaaggggggttacgaaccgggactacaaagggtttctccaccagtgatgcatggtagccgtgtatcctatcttcatgtccattaattatctagaaccataatagcttctttgcatggacagtcgaacacaatgacatatattaagaaaatgaaagcatccggcttctgtgtaactagtagttcctctaccggcgtacgtgctttgtctgtagttcttgaataaatggaaattaaagaagaccacttgtgcttgatagtactactgttggtgtgtaaggggctgggataagcacgatgaaccctaaaaaaaaaaaagagagaaattacagaataaaatgcaaacctcatatcagcacggtaaaaaaaaaggaaaaacatgttaaacactgacgagtatgaacacacgaaaaagaatatgatgtgaataatacctg

SEQ ID NO: 21707 - DNA, 23167 bp, Oryza sativa
  unsure (1)..(23167): unsure at all n locations
atggttattattttagctaatgaaattaacttctagccttttcttctaattagagatgcatacatccattacacaaaaaatgttaaaaacgaaagtggcaaaaagaaaaatacatgaaaagttggcctagaaataaaaccaccttctgttgccgaatcataaccacttacgagaacctattgagtacgacatacagacaacaatgagttggtgaagcaatagtcgtagcaacaccctctagaaaggatgcaactcgcatcaccgtcaccaaatccaaccaatcaatgatatatcaaaagggtttcaagttggattgcaagcaaagtttctccatgacaacgctttcgggaagaaaatatttcctaggtcattaccattcctagtttcctacattgaaccggttaaggtcagatgtactcgctttccaggagtacgcattagcataaatccattatcgttagcgcattgattgatctatctggatatctatatcaggtatagttggctgctacaaagtagtccatgcatgcctcactacttttttttttgaggggggcactactatagaaatgcacaaagatgacggcactataggtgccgcaagtgttaaaattggcatctatcgatcttttcccacctccacaggctgaaaatatatttaaccggcacctttatgcaactataggtgtcggttctaaataaaaccgatacagatactatatatgccttttttttaaaaaaaataaactttaatatattatagttatcggttaaaacatatcataggtaccggttttttaaaaaattgacacccataaaaattgagccggatctcccctttttaatgcaaagggagatggagcttatccactcgcccctctctctctagccctacttccctcctcctatcctctccacggcttcctcctcctcatctctccactggccaagagatggtgacaacaggcgaagctgcgtcaggcgcaacgttgactcccacagcagatccagtgtcggcggcatcggtggcgggcgggttggcgccagcgatggatcttgcggcggatccggtggctacggtggctggtggggtggcgtcagctacagatcctacgacggatcaggaggcaacggtgtcagcattgggcagggcaggttcggaggcgactctgacggtgggctgtttgggttacatgaattggggatttttttttggatcaatttgtgctatgtggaattgtgttttgtgatttgtgttatttgtgcagtcttggtagatggatccatgatggtttgtgctgttttggggatgtttttggatctatggtggtgtgggtgtaatgaggagcggctcgatgtatcggcttagactgtattattgcagaactttgaccacgagaaaatggtgttagaaaaataacgtccgcttgatctactattgacatccccatctcttattgttgagaaattctagatctgtgtgaaaaaaaatgttctgtgcttaattgatgaaactatttcatgtagttggcctgttactaatcctttgtattactaaacgttcatcaattttatatcactactacaaaaacgtaaataggtgtcgccaccataggtgccggcacaccaaaaaccggcacctataatgcctttcccgcctatgcacccacccccacgcaccatatattcaaaaactggcacctttatgtctaaatatgtgccggtttttaaataaaaccgacacctaaaacctgtgttagagaaaggtgccggttctaaacctaaaactggcacctttaatcttctccctcccacactagtcgttggcgggccccacacataggtgccggttttaaggcaaaggtgccagttctcaacccaaaaccggcacctttatttcaatagtatttttcatgtccgatggtgggagtgccggtttttgtatgaagtgtcggtttcttttatagaaccggcacctatttacttaaaactgttatccattcactctctcccccttatccgttcactctccctctctctctctctcggcgcggcggcagcggcgcgtccccctcgcagcctgcccccctctcctcctcctcctcctcgtggcgccctccaagtcgtcgtcggctgtggcggcggcggcggccaaggtgcgggaggagggagaggtctcctcctgcgccgacgacgacgatgtgaggagggctcccgacggcgacgacggtgacgaggtgaggagggagaggtctcatccggcagcagcagcagtgaggagggctcgatggcgtccagcggcgaggaggtgtgcagcggtggtgtggtgcggcggcgctaggcagtgctaggcggcgaggaggaggcgagcggcggcggcagatccatcccacggtacccccattctcttatttctaatcgattgaattagtgcaaatagaagcacgtcctcaagaacaacacccattcatcagtaattagggagtactaatcctagttctagggacagttaactacaagtactccattcagcacatgaggcctctcctccattcagcacgtcctcactcgctgcctgcctgcctcctcaatctgtcatagttgcagcggactcctccgcatcccagacgtgtatctactactgaatttgtttttttttgtttttactttccgattgaaatcagttctatgaatgctctgaagttttcaatttcacaacatggtcgatgcacttcattatatctgaaatgagttaggaacttgctatcaaccccttgtttatggctgtaaaatttgcaaaagataatacttttggctggtaagtacaagtatttggtgatgtatatccttgctcattttcttaatctgcaaacgaaccaagtagatttgtttgatgtatatacttgataactttcttaagttacaaaaggagccaaactagctatgtcgttttatggctgtaaatgccatttttggttttgcttccatgatgagcaggtctagtcagtagaatttgtctgtgtatatctctaaccactttagttgtttgtgaatctatctatagtttggtggatgtgaattatctgcttggctgtgaatgccaagttgttcgttaaaatagcattctgaactcagaacaactctgaactagttgtgcactcccttgatttttagtttgtcgtacagaggtttttgttagtgcatgtgatatgtagagctattcctgaactaagatgtttagagattaattgtacataacacaaatctttgataattctgttctgttgcgtttctttggtttagaaactgtggatttcttgctctgtcctgcaaaaggaccacatttattttctccttcaatctggagcatcaccttatcctttccaggatgaccttcatagtatgatagggacgccgagttttgcaatcaacagtactatgcattttactgacaaatactcaaaagtactttacttcatttctaacaatgtactcaattagtgggagtatgtgatttttggcacgctggttttgcgcagagagcgggcgcgtgttcgccgcgggcctcaacgactttgggcagctcgggataggctcctccgtgactcatccgctggtactgcttcttgtgcatcatgcctccatgtgaaattttcatctacattgtgagtcagcctacttttgcacaggaggcaaaagctggctggacatatatcagaattgcaattttcactcctgtaaagtttcttttgtgtgcaaatcattttccagtgcaactgcaggttccaatttttgtaggtgtcatgtagatgattctcatatatgttcttctcaatatgaattttcttgttcctgttcgatgtctgctctaatttttgatgaacaacgatgtctgaatctgaatatttaaactaggcatattttgagttaggatatatatgcaaatgtttaggatttaaagataggaatttttgaacttacgaatttttagacttaccgaattttaacttaggcttgtatgtttttatttgttgagaatgtgaatgtgaatgaatgtcttgtatggatgtggggctgtagggatgaaatggggtttgtagagaattggggttgtatggatgaatttactgcattttttattttttttgtcccaacaaataggtgccggattttaggttagaaccggcacctattaggaccatatagggccggttttaacctaaaaaccggcacctatttgacagccacagggctctttggcttagaaccggcacctccgcatcttattaccagtatcatcagtgcagcctcctttgtgctggttcggaaaaccggcacctattagcgtttctgaaccgacacctattaccctttctgtagtagtgtataaatccagttggattgagaagccaagtccaatcaaaatgaatagctcatcaattaaaatcaaggttgtgatgaaatccttattttgcaacaacggagatcatagtaatgctaaaccagacatggcttttatcttgcaaaagaaaggtaactggattttgtagccctttaggaggccttcaagaagcagcactcatatcatcccaattggaactttggctgctccatcttgaagatggtttttgacgaaatatgctaactgaagttgatggaaacatggtgtacatagatggcagttttggctttcgcattgtgcaattatggtatatagaatagcagagctaggaaatttgtagttttaataccaaaaaacacttgtatacatatcaattctctctcgtgaagtcgggcccaacagattctgctttacggtctggtactgataacttcgtcgtacagattaaacagagaccaaaccaaaggtttgggaaaaatatcgaaagcatcgagtgagaaataaaacgtggtttgtgtcttgcacttgaacgaaccctcctgatgcctctcaaacatatggcacactgcacatattttttttacatatactgatatttggttacaacttctgttcatctcaatatcgctactaaaagaattaggttatgtgatgaggacatcgcaggtacacaggtacatcaacactacgtaaacaagaatgatggtttacgccatatatcacattaagaaaataaagatgacgtaaaccaagctgatagattacatctaaacaagaatgatcaagtataccatggttcaatcacgcgcaatcatgttaggataatacaataagaggtgaactaactatttgctcaacttaacccaaatattttaagttcggttcgaattggctgtggcagtgggcaattgcttacgttttatacccaaagacatcatcactacaccatgaaagatgggttacatcgagtatgacaagggtaaggcagaggcagacttagcccatacactacttgcggtgtctacgccaacaaggagacaatttacgctgcaggaggttaatttctatggcttgggcgatcctgccagtcaagagatgtggtgcatggcatagatcattgaaaatattgctaagtctagttttgaatgtaataatctccttctcaacatcattttctaatgagtagtttgagcctcttttactgaaggttgtactggagctgaagggctatgcacgaaccctagaaaactctttgcattctcatttgttttagccttggtcactggaacggattttttttattttttaaactttttattttttttattttaaaaatatatcaagccaaaacttatttcttgaatctaaaccttttgaccatgctagaccgcctagcatgacaatactgacacgctccacgcaatgggtgtgtcgagggaaaaccctcaatagcagggagtcgtgagacccccctttcgtgagttcggccgggggcggaggctcgtctctcaaaattcgcttgttcgtccctaagactaccagcgagcttacacatagtcggattatacaggttcaggccgcaatagagcgtaacaccctactcctgtgcttgggattatggatgaagttacaagggtttcttcacttcagagagcgcacttgcttcctctcttctgaagttcaggttttctgggaatcgaccccttgctctgtgggtagggtcctccatttatagctttaagggcataccacacgtgccgactctacctactctccacggggggaggggggaccccacttcacttctttgggcttcaaaacgtgccttctcccgaaagctaagcaataaccgattcttgagcggaacccggcgccgtcccccgtctgacacgggggacggcccggtcattccctcataaatgatcgatgacatgcaacagcccttcctcgagtgatgccctgatgtgacgggtcacacctacccccacttcgccggggacaagggcggcgtgatgatatgactgccctatccatcagatgtgatgaaaacgggccggtcacagaccggtcacatccgacggacaggggttagctaggcgcgccgcacgtctgccctgactgcattaaatgcagcgagggacagttggggcgctgcgcatttatggctgttcagcttgccgggcgagggcctcggggcgaaggcgcggtagagcccgaggcggtgacgtcataccccgaggctcccccctcccgctgcttctacgactcgcgtggcgcgtgagtggggccaaccggccaagccacgtggccggaggaaaagtaattctcctctacttcacatacccccgggcccatatctccgacagtagcccccggcgccatatcaggtattgatttcctaggatcgtcttgacatggcgcctcacgactcgtcaaactggggttgtgggcccgacagggaatctaaaaggatatcatcgcgtggctaggttggcgcacttatcacggcagtggtttgaccgcctttgactgcgctcatgatgaagatgcttggggcgcgataaccgggggggtcacttagaccgcgcctcgattctctcgcccgctacacttgcgacggaagcggtgacggtttgcccaacttgcgcttatggccgttgcacactccacctcgagtgtgccactgacaggcgcacaaaaggtggaagcggacacaacgggcgacgcaatgattgggcgcgggatgcggagagacaaacgcgggcgcgaagatcgtgaaggcagttatgggggcgcgaaacgaggaggcgaacgcggatgaggcgaggataaaagggggcggagaaggagactttgccttcttcctttcgccaatcgctcactcatcctttcgcttctcgagccctaacactctcgcctcctcacactatctcaaactcctcattctccaccatctctccgccggttgccatggcccaagacgccggggacgcagtgctcccttcctcccgcatcacggcagacaggcaccttagccttcctcgcaagatcatgccggaaggtgtcgtcgtgcgggcgggagagtcgcggccacggccgcgatatccggagcggttcgtacacctcttatccttcgccatggcgggcttgatcccgccgctctccagattcttccatgaagttctggatttctacgagattcacgccttgcatctcgcacctaatgccgtgatgacgctggccatcttcgcgcatttgtgcgagatgttcattggggtgcgaccgacgatgcggcttttccaggccttcttcatcccgcagctgctgcaaggcgtagtggtgggggaatgctacttccagccccgaccgggcacagcgggccagtacatcgagagccacctccacaagaaatgggaggattggaagaaggactagttctacaccgctttgccggaccatccgtgacttcaagttcccgctggccctcctgaaaggtctgccgcatggctggcgacgtgggagctgggcgaggaatatgacgcggtgtgggatcgcctcaagggcctgcggagcctgggcctcactggggcgatggtctttggcgattacttccgccgctgcatcgcacctcttcaggaacgatcccgtggagcgtgggaatacaccggtcccaatgaccccatgcggactcatgtgggcgagcgctgggactggggtgaggaagacgcgaagagggtgattcggcgggtgctgggcctggactctgccgagccaacactaatccccgacgggattcttcccctctgctgcgatcgcgaccgggagagcaagggcccgggagcaactccgggaggcggccgacatgattgtttcgagcttcgaggggtcggccccccggttcacctccggacatacctcggatgaggagagcggaagcggggacgatgacggcggcgacgactgggacgacattgttagcggcgccggtcatgggggcccgggcactccgtgatcgctcacgcttcttatttccttttgcgtgtgcctgtaacaaacacttcttgtatttaggccatcgtgccatcctgtcttgttctgcaattgaaaactctttaattcctttcactttttcgccttttctatcgatgcctgttacatagtgaaaagaaaaaaccaaggcagaaagggataattagacagcctgcgattgatatatcgtttgaccccgtccccccccctcgggcttgttccatcaagaaggtaaacccgcgttcggtccacgaaacctaagtaccgataagcaagaccattgccccgagggagccgcccagcgggactggccggaccgaggctgcgacgaccgggggtcggggacgaccatgtgtaggcccttccaatctcccggggttcggcacagcccggggcacggcccgcgttcgtgctccctttcggtggttctccggtcactttatagcatttaggttttagaacaaacgcggattatttcttgagttgggacaagccagactaaaaggggaaaaaagggtctttgcgaagaagtagaaagaaggttattgcttttaaaaggaaaacaggatacatagtggtagcccccggccagtcccatacataccgagggattgtgtgggtgctggcttgagctccaggaaaacaaaaaatctcgatttcatggatagaaacgacggaggtgctcgatattccaggggttgggcagctctgtgccgtcctccgtggttaaccgaacggaacctggtcagggcacgccgatcactttgtatggtccttcccacattggcgagagcttgctcagccctaggcgcgactgaacgcggcgtaggacgaggacgctaacttgtagtgatggggcccggacatggcgctgatggtagcgtcgcaggctttgttggtagcgggcggcgtgcaaggccgctcgccttctccgttcttcaagataatcgagatcgtcgcggcgaaggtcatcttggttggcctcgttgtacagagcgacacgaggcgaacccagggaaagctcggagggtaggaccgcttcggcgccgtacaccaggaaaaatggtgtttcccctgtggcacggcttggagtggttcgatttgcccacagcacggcgggcaactcctcaaaccatgaatccccgtgtttcttgaggacgttgtacgtcttggtcttgagtcctttgaggatttcggcgttggctcgctcgacttggccattgctcttggggtgggcgggtgaggcaaagcacaatttgatggccatgtcgtcacagtaatcgccaaacagctcactggtgaactgggtgccgttgtttgtaatgatacggttgggcactccgaatcgagacgtgatgcccctgatgaacttaagagcagaatgcttgtcgattttgacgactgggtaggcttcgggccacttagtgaatttgttgatggcgacgtacaagtgctgatacccgcctcgagctgcctttaacggtccaaggatatctagcccccagactgcgaaaggccaagataatggaatgacctgtaaggcctgggctggctggtgggtctgcttggcatggaacaggcatgccttgcaccgctggaccaattcttgggcgtcttgtaatgcagtcggccaataaaaaccttgccggaaggcttttccgaccaaagttcgtgaggccgagtgggctccgcactcaccctgatgggcgtcggctatgagctcaatgccctgctctcgaggaatgcacttcaggagtatctcgttggcgacacgccggtagagggccccctctacgaggacgtaccgcttggagatacgcgcgagcttttcagctttcgcgcagtcctcgggaagagtattgccatcgagatacgcccggatgtcggtcatccacacgacctgacgaggggggtcagggttgaccccctcgggccccgaggggcgcgggtcgccagaggttgggtcggagggcgcatcgttggggtccctcaaagggctgggtcgcgccgatggctgcgcgagcctttcttcaaaagtccctggggggagtggggctcgtgccgacgcaacacgcgacaactcgtcagcaactgtgttgtcgcgtcggggcacgtgccggagctctagtccgtcgaagtggcgttccatgcgccgtacctcccggacgtatgcttccatttgcgggtcggtgcactgatattctttagatacttgatttacgaccagctgggagtcgcctaagaccagaccaggagaaggcggatgcccattctggtcgccgccctcaatcctgcgaggagcccttcatgttctgccatgttgttcgtggctcggaagtcgagacgcacgacgtatttgaggacatccccgtttggcgaggttagcgtgactccgacacctgcaccttgaaggttgagggaaccgtcgaaatgcatcatccagtgcccgccacgaatatcggcgtttggatcctcttcttctccgggggagaagggggcattggatggaatcgattcgtccaccggggtccattccgcgatgaagtcagcaaggatttgactcttgattgcatgccgaggctcgaagtgcagatcgaactcagctagctcgatagcccatttcaccacccgtccagtaccctctctgttatgcaaaatttggccaagagggtacgatgtcactacggaaacccgatgcgcttgaaagtaatgccgcagcttcctcgaggccatcaagacggcataaagcattttctgggcctgcggataccgggttttcgcatctcaaagtgcctcgctgacgaagtagacgggccgctgcacctttcggcggggccggttcgtgctgttaggggctggtgactcggggcgcacctgttcggaggtcccgaggggatcccggactgcctcgggatcatcgagcctagggccacctgtcaaagtctgcactcctcccttgggggcctcggggccctcccggaggcaggaagctttggtcgctagactctcgggggacgaggggccatcgcaagtcggagggccctcccgttcgccttcctcatgctcaaccactagggcggcactcaccacatggggggtcgctgccaagtagagtagcaagggttcctccggccccggggctaccaagatgggaggggaagtgaggtaagctttcagctgattgagagcttgctcagtttcctccgtccatacaaacggcccggagcgcttgagtagtttgaacaggggcagcgccctctcacccagtctcgatataaaccgactcagggcggccatgcatccagtgacgcagtgcacatccctaagcttgctggggggggcgcatcctctctatcgcacgtattttctcaggatttgcttctatgcctcgggaagagactagaaaaccgagaagtttgcccgccggcacaccgaacacacacttatcggggttcagctttacgcgcgtggacctaagactatcaaaagtttcagccaggtcctgtagcaacgtgtcctggtggcgcgtctttactaccaggtcatcaacatacgcctctacattgcgccctatctgattacttaaagtaatacgagtcatgcgctgaaaagtagggcatgcattcttcaacccaaaaggcatggttgtataacaaaaagtgcccacaggagtaataaaagcaattttttcctcatcttccctagccatacaaatctgatggtacccagaatatgcatctagaaaacacaaaagttcgcaccccgcagcggtgtcgactatttggtctatgcgtggcagagggaagggatctttgggccatgccttgttgaggtcggtgtagtcgatgcacatccatagcttgccattggccttcgggacgaccaccgggttcgccagccattccgggtagatcacctcacgaatgaagtcagcctccaggagccgcgccacctcctccctgatgaaggcctgccgctccggggcttgacgccgtaccttctgccggacaggtcgcacatccggccgcacggcaaggaggtgctcgatcacctccctggggaccccgtgcatatctgacggtttccacgcgaaaacgtcagaatttgcccgcaggaaggagacgagcgtgccttcctatttggcgtgcaaagtcccgccaatcttggcggtcttggacgggtcgtcaccaagggggatttccttgacgggcacctcgtcaaccgaggtgaggtgcttcttggaagtgtgagacgcagatgcctcatgggcctgtggttccgtggccaccgccaggttgtctgcacgctgctctgcgtaggcgagggcaaccttgacatcaccaaagatggtgatgggaccagcaggacctggcattttcatctggaggtaggcgtaatgggtggcggccatgaactccaccaacgcaggtctgcccagaaccgcgttgtagggcagattgagatccgccacatcgaaatcgatccgctcggtgcggaagttggcggagtcaccgaaagtcaccggaagctctatgtggccaagcggccacgtgtgccccggagtaacgccaatgatcgggagcgatggctggagcttcatccccggggctttgagcgcgtcaaaggcagccggggagatgatgctcagactggccccgccatccaccagcacacttttcatcttgacgttgtggatggttgggtagaccaccagggccaacttcccccccgagcgagcaccgtgggatggtcattctggtcgaatgtgagcttcacctccgaccagcgcgccttccggactgcctcatgcgtggggacagcggccagaagctctcgcctcatggccttgaagcttcggcgagaggtgtgagcgcaagctcccccgtcaagcgtggcgacggtcccttgaggtatctggaaatccaaatcctcactatctccgccatcatcggcagggcccttgttcttggcctcctctcgatgttcaccggttaaggtcgtgggggctttgccctcccgtcgaccctgccgcttctcctcatcaggctttcagaatcgctcggccaaattcttgaccaagcggcagtcggcgagactgtggcggtaggtgttgtgcaccgagcaccacttgtccgccgaccggccatcaccggagggaacagtagggctcggcttgtcgccggcagcctttcctttgcgtggggcccgtgtgggcccgtccgctgcaaggacatgaccctcgtcatcggagcggactgatttccttttgcctctcctatctcgccgcttagagcggggggcagactcgggggtagccgcggccgccgcaccggtgccaggagagttccaggcccacgcctcctccttccaggccaccttgtccgcctgctcgaagagctcagcagtggtcttgggctccttggaggcgatcttctctagcatgcaattgtgtcgcacgccgttccggaacgcatatacaaccgcgtgggctggaatgcacggaatggtgttacggacctgacagaagcgctgtatgtacgaacggagggactcatcatccttccgccgtacagcgtgtaggtccgcctcttcccccgggcggggatatgtgccctggaagttcgtgatgaactgctggcacaggtcctcccaggagtgaatggagtcggggggcgggtcattaaccagccacgcgcctcacccttgagggccatgggaaagtaattcgccatgacccggtcgtcaccccctgcagccacgataaccgtggtatagatctggaggaacttggagggattgatgctaccatcatacttctccgtaaggttagggcgaaacttcgggggccatcggacattccggagactcgccacgaaggccctacaacctgtccccccaggggtgagtgtgggaggagggccgcctcgtgaggaagaatgtggcgctccagatgaggaggcaccttcccccatacgggcagctcggcgctcatcccagcgttgctcgatgttgattcgagcgtcctgcgtaccgtagaggctgtcatgacgcctccggcttccagaggcccccgacgatgttgggaccgtagaccgcctcaagatcgtggccgattgacgagcccttctcctcgctgacgaggagagggtgaccaaggtatgtgatgtaccggcggcagcggatcgaccacccgtggccaactaccgttgggcagcagtgaccaagttggccaagtcgtccagccagcgctgaacaggagtctccggctccgggtttactgggggatgccgtagaagtgcgcctgctgcttgaagcgcgccttggggcgaaccgccgtctccataatcgagacggcggcgtaccccgacgcgtcgcagcctccctccgccacagggaggagagagtcccgaaccacctgaacgagcggaattatccctccgcgaaggttcgcggcggggaggagttggagatccatggcgacggtgatgaggacctcggctctcgccggaatcctcactccctgatggggtggaggtgaacgccaccgcctcctcctccacttgtaggacctcgaccatggtcggcagagtcctgaaaaaacttgggacaaaagaaagcgaattcctcccgggacgcgcaaccgccccctacctggcgcgccagctgtcgagggaaaaccctcaatagcagggagtcgtgagacccccctttcgtgagttcggccgggggcggaggctcgtctctcaaaattcgcttgttcgtccctaagactaccagcgagcttacacgcagttggattatacaggttcaggccgcaacaagcataacaccctactcctgtgcttgggattatggatgaagttacaagggtttcttcacttcagagagcgcacttgcttcctctcttctgaagttcaggttttctgggaatcgaccccttgctctgtgggcagggtcctccttttatagctttaaggggataccacacgtgccgactctacatactctccacggggggagggtaggggaccccacttcacttctttgggctttataacgtgccttctcccagaagctaagcaataaccgattcttgagcgaaacccggcgccgtcccccgcatgacacgggggacgacccggtcattccctcataaatgatcgatgacatgcaaccgcccttcctcgagtgacacccagatgtgacgggtcacactaacccccactctgccggggacaagggcgacgtgatgatatgactgccctatccatcggatgtgatggaaacgggccggtcacagaccggtcacatccgacagacaggggttagctaggcgcgccgcacgtctgccctgactgcattaaatgcagcgagggacagttggggcgctgcgcatttatggctgttcagcctgcgctcccctctgccgcgtggcggccgggcgagggcctcggggcgaaggcgcggtagagcccgagggggtgacgtcataccccgaggcccccccctccccccgttgcttctacgactcgcgtggcgcgtgagtggggccaaccggccaagccacgtggccggaggaaaagtaattctcctctacttcacataccctcgggcccatatctctgacagggtgtggcatccttcagcgatggtagcgagggtgatgtggccaaatatcgttgtcacgccatctaaaccggtgtgaccaactaacgttgccacgccactcagaccaacgtgacagtgttgatttgttacgccagtggtttagattctaaaaataattttgggaagggtctattttttaaattataataaaaaaggctcaaaaaataaacaaaaattactaggttaacgtgattgagtcactgaagctaaatcacgttaactacaatttcaatgcctaacgtttattatgaacaaaaattataagctgatggtactttaatctatctatctatctattatctatcttctatctattatatactaaaagtccattaaactccctacaaacgctcttaagccgccacgtgtacccctacaaacgctcctaagtcgccacatggcactatataatcttaccgttgattttcacttaaattggtggacccgttattttacaccattagattagatctattatttaaaaaataattttctcatgtttataacatacaagtgctacatgatgcaaacgctacttcttgtctttccgtatgtacaaacgcacgtgactgaaaacaaaactataaaaccttcctattcttcgctagaagaaaaaaatgcacatgtatagaaaaagacagaaaaagacatacatccataaaaatcaatggtctttaaaatatgatttctacaatataaaaataaaatatataacttcacaaatataaataaatttagttaaatctatctattgttatatactaaaagtccattaaacttcctacaaacgctactaaaccgccacgtggcgttttaatagacgggaaacatctagccctcaattttcatttaaactagtggatccattattttgcaccattagattagattaaaacctcccttcctctcctctccttgcacgttttgtggacgaaattgcagaaaaccgcgcacactttaacaattggcacttaagtacatatattttggtagtgtagtttgacaaaaccacactatcaatgaatggattcacctgtgagatgacgtggttgttccacctaagatgaggacgtggcatcctgttaacttggactataaaagcatatgtttgattatttatcttactaataaaaatacgtaattaaaatacattgcggcaaatgacattggcatgtattaattaactccataacaatttgtcaaaaaaaaccgcatcaaactatatactttatggtatcaaatattacttaacaaatatagaacggtaatttgaactatgtaaaaatgcaaaccatataatttagttgtgttttttaagtagatccaatttaaattttaatttgtgtgaaattaacattctcaaaccattttggaatttttcgaaactgtttggtaggtatttcaatagtgtcgacgggtgatacccgcagaccggatatagagggtattggggtacgttggtacaaggatctacgtagtgtgacatcgagcaatcaaaagacaagaattatactggttcaggccccttgattggtaatagccctaatccagctgatatgggattatatggtggaaaacacaggttacaaagggaacgatggaacttgtcggatccggcgagattgtggttgagttgattcgactagctctcgaagacttggctcctcgtagactccggcttcgtaggctgtgtgggttgtgttggctctgagattcgatgtcctatgccctccccgggggtcccttttatatcgcagatctggaggtctccaagtaggactcggagatataagacccaatacgatacgtcgacgacccagttctgtccgagaaggattcttcccatctgtagatttcgtgaaaggtttccttagaatatgtaggaaatatccgcatgcgcgtgggtatgccacatcgatatgtaacgtatatcgaagggtaaagggtatgccgaacccgtaaccctgacaaatagtaataaatcctacattatacatagatgtaaagaaaattcaccaataatattttcaacaggtgaagtatatatcattggtttttttatattttctaataattatttaaatgatatgaaaatagtcagaatgtaacaaaaaataacatatttatttaagaatttcaaatatagttaataatggtccaacgacataagtcgataaaaaataactatttattttaaaagattataataaattagggttcctgactaatatatgatgaaaacatgagagacagtacattgggagaagggatgaatgaggcggagggggtggatgttgggcgctggtatacgtatgtacatacatacaatgcccctcgggctctatattggcacaatcgatgtttactgtatgttttcactccaatacatatccaaaatgacatatttggttaaggttggcttttgactctagctaccacaacaattataattttatatctttatttgtgattgatcaaaaaaggcagttctgccagttagaggaaacaatccaatccaagagtgccaaacgatcttctactacgtaagtgctctagaatatattctatggtactatttaaatgactttattagacagtatttaatgatcttttagtatatgggtacatagatatacttgccggtagctntgtacttttattccataccttccgggtataaaataaagtatgttttttataaatatttatagttttatttataaataaataaataaataaatcaagatcacattaactatattttactacatagaagttaacatggcaactaaataacaatggaaaattaattgtacatatgtattatgttatactaaatcattcattgcacgtaacaaaaatcaattaaacacgctctatagagctcataaatcaccgtataatatgttgtaaaattgtaataaatagtaattaaattgacgtatctattatttttaactattagatctattttttaaaaaaatcttaagttgccatgtgtcaccttctataaaaaaacaggaaaaaccatagaaattcttagaaaaaataaaacaccccgtcatcggctttcacttaaatcatttagaaaaatagaaaaataaaatcttcaccacctcctcaccctcccatgtacacaatactgtcgtccactccctattgttttatctcttaaattaaaagagaaacaataaataatgtttgatattttttagaaactaagtacaaacgcaaaaaactcacagcacgcacacactcaccccctattaatgcatacatgcatatacccctataagtacttctgagagattaggctgacctattttgacattgatgaagtcgccacacacctcgctgtcgactggtacgtcgcctaccattgaaagaattttttaagtctaagacttgtacccgagtgggcaagttccaccacacacatgcatatacccctatgagtacttctgagagattagactgacgtattttgacattgacgaagtctccacacacctcattgtcgacgggtacgtcacctaccattgaaagaatttgtcaagtctaggacttgcacccgagtgggcaagttccaccacaaagaacctaaccagttgagctacatttacttcgtattaatgttggatattaaaacaaccataatatttaagctacatttctggaatactcttatgaattttaaaccagtggaactattatttctaaccgttatatctatcttatataataaaaaaaagcgtgtattcatggtacatcacatttcaaaagtatttttgcgcaattatattttgtcgttattgtatgcacgttagcttgtgtggaagctctgacccactctacatgaaatgttcatagatggactggctgtcaaactacatctatcatattaggctacataaacctatacatttagtggaggttcatgttccacccaattaatcctcgaataaaccatgataatatatatgcaattaaaaaaatatcttacttttactttacacttactttttgttgacatgttttctaaagaaaataagtctaccttcttttcaaatgatgaaaaagattataaataattgtttatagatagtattacttaaatatgatataatataaagctaataggttaaaaaattataaaagcaattaatgccgactaaagcaatttatggagaaatcgtgatagatgttcttcggttaatatttcgcttttacaggtctcaaacttagtgtacgacgcatgcccgcgtattcacacgggctaccttcctagttactcctaatgttaataatcagcaattgcaatttctgacaatggcaacacactctgatcaattcgcagcttcaagtcacgattaattcagggaactgctgttgcaaatgttctaccttttcttaaatattatgcagattttaccatcaaaactcctgccacattgttcagaaattgcaggttatctttgtacttctctcacgaaaaaagcaccgtagcgcactacaattttcattcgtccgatcctctgcttgtatgcgtgccagcatactgtaacaaacccaatcggtcttatgacgctcggatatgagaaattcccaattcgtagtaagttggttctcaatgcctcctaagcctaccttgtatatatagagtgggtaatgtgttaaccacatctatgttctggtagactggcacttgccatatgcttcgcaatatcatggtgaacttcttctctggcaatataaaggcaatatatatgtgaatcgtgcaatagttcaccacagaatcataaataactgcagttcagatagcacatgcatctgtcttgcactcttgatacaaacacattgtatcttttcgcttgcctattgacgtcctccttgtaggacatatccacatgctctgatataaccattgattgttcagtacttcagtacaagtgaatggaacaggtgcattagctatatatggtcttaataaagagcctcggtactctctagtactatatatatatagtagaaagcaatttaaattgttgatctcatttcaacaaagagtttagacctatttgtactaactaccccagttagcagtagtagaaacgtaaagaagcattattatcaattaaataggtgtggatgggtataattatcatttagctatgattaaacctgtttttttctttttttttggcattttcgatggaatttgatcgatgctagcgcaatggatgaccacagatcgatctagctaggaaaaaataaatgataaagttacccctaatcactttattagtaaattacgtatgtacccttaataactaatggttcagattatttttacgggtagtataatactatcagtagagaataccggagcatcgcttcttaattaatagaggattaaaaataatatctaaatgggactagaatatttggggctgtaaagaatgcatgaaacatgagtttgggctagatcagtttttgtcgacaccaaacgaagtaatttggtcggtgccatgaactttgctcaatctttatttttctccactgtgcaggcaatctttttttttctcgaatatgcaggagatatgtgtatcgttatgttaagaataagaaagagagggtacaaccctaagtacgaaaccaaacacgcacacactaagtatctagtaacctatgctgcaaacccagccacaacagtgaaccaaaccatgatgtgagactaaccagagtaataaaaaggatagcccccgaaccccagccaatctattcatgatattatatgttcaattaaggtattgctcatgtgaagtactaattccaccaactcattataaaaaataattcattatcttgagcttgtgaaaaacaaagggaaagttctatagatgagattcgtaggattgaatcattatcatgtggcgcgaataacaatgtcgccaaagttgccaatgatttaataaagcatacgtggcgaatatatatcgagtgagcggtaaaagacgagtgaatgacaaatctattggcccacatttacatatatcaatatatatatatatatatattttaagtaaatttcgtaaaactacgtatactttgcatggtctatcacaaaactatatatctaaaaacttgtttcacaaaactacagattcagtgccttcgtttatcacaaaactacatggactttgtacaatatttcacaaaattacatatttaagaatttgtttcacaaaactatagatttaatatcttcatttatcccaaaactacaagtttagtgtcttcattatcacaaaactacaggttttagcattgacctgtagtttcgtgataatagaggcactaaatccgtagtcttgtgataaatgaagacactaaatgtgtagttctatgataaacgaatacactaaatttatagttttgtgaaacaagttcttaaatatttagttttgtgatagattaaacaaagtacctatagttttgtcataaacggagacactaaatctgtagttttgtgaacaagctattaatataaaatcaaaggtgtttttgattattattctgtgatgaacaattggcattggagattattggttttgttatttggaatttattcatgaagtggttttggagatgattggatttacaggtgaattacaggtgttgttattttatgtgaccggtcagaccgggcgtgtgctgacggtcagaccggcgcagcccgcggtctgaccggccgactctgtgtcggtttcagtttcgggttgtttgtttggatatccgtgattgtttcatgattatggattctagatggatactatacgtatgtaatactgttgtttgctactaataagtcaagttggagatagcttggtctcggaatatggttctttgtttatttcatgtgtaggtgactcgatgcctcgggagtgtatttgcggtgatggaccgggagtcggcttggggataaggcgacgtccgtgatggtcagagatcatgcaggatacttaggctagagttgatgcacgtggttggtgaaggggctgcaggaat

SEQ ID NO: 21708 - DNA, 11336 bp, Oryza sativa
cttcgatttgtgtttcaccgggtttcggtggtctaactggcgacacactagcggtcagactggcggcatcacagcggtcagaccggcgggtgaccttcggtcagacaagcgtcggcaacaagcaacaggagctgacctcggcggtcagaccggagatctaatcttggtcagaccgacggcaacctggcggtcagaccggcaggacaacttcggtcagaccgcgatccgtcgaattcgagggtaacttttatttccgctaaaagtttccggtttttgggtataccaactattcatccctctctggttggcttagttgttgtgtttcgatcctacaattaaatctgtagttttatgataacttgtgcaaaatacttgtagttttatgaaatttactcatattttttcaataatggaattgggttaagtattgcaatctgtaaggaattacaaaacgtccgcgacagagtcaagttcaaaattcaaatcattagataaacacaaaaagtttccctgtaaactaaattcaacgccctctaaagaactctattactgaagtgatccaatgttactgttttgctcgaaaatacagggggggatccgtgaatagggagctatcattgttcatatggtaaacaaacagcagtgtctgcatgagtgactatgtggcatgatctgcagataggttattctgagtttatgcacagcttgtacacaagctgaacaattgtgaagatcatagcgtgttaggtttaatcccacattaataattgatgatggagaagtacgacttaataggtgagggcagtcctcacccattagactgtattttgggttgtgtagtctcaggaactaaagtcgtggctctagttgggtttgtggtggagcaggtccaatgtgacctaggtgactcacggttgatgagccgggctgcgcattgtaatatagtgttgcatttcctgtcacctcccaaaccttaccatgtctatgaaactttctagacacgtacaccctaattgttttctttactcatgaccattatccaaaaaaatgaagaccttgcagtctattgaaacgctcgctcgaaccttaagattaattcagggagtcaagaatgctcatttgcacgcatgatttaaagaagagtctgcttggtggccttcctgcaacaattccttgggttattatatgtgttgtcatcatagatgtagacgtgtggttattttttaagttcatgaaattcctctgtttttatgggtatcttcttgtacttcatgaaccctgagtattatctatatgtaaaaattgtcctagtacaaattcactaaataaggttgtgtttagatccagaggtgaaaagttttggcgtgtcacattggatatatggacacacatttgaagtattaaacgtatactaataacaaaacaaattacagattccgtctgtaagctgcgagataaatttattaagcctgattaatccgtcattagcaaatatttactgtagcactacagtgtcagattatggagcaattaggcttaaaagatttatctcgtaatttacacgcaatctgtgtaatagttttctttctatatttaatactccatatatgtgtccaaacatttgttgtgatatggtgaaaaattttgacaggggatctaaacagaccctaagtaatattgtagcttcaaattaatgacaatggcaatgcactttcaacgttcacgtaatcaaattgatgcggtgcgccccaattgattattggccactcttaccatagaaaacttatttttcagcgtacttgcgatagcttgtgcagttttgatggatgggcagaagttttgatggatgggcagagggacaatttgctcacctctttttcatcgaaaaaacatgtagtaactggtatgtctggataatagttgatatccaaaataccaacagggatggactccccccatctcaaaatgtaactataatgtttgatttagcattgctgactatgattacaatgatgcccgagatcactattagtactttttggaaactttagcaggtgtagcattcggccgcttgcaaaactgtgttttgatcacctataaaaactgtttttctagtagtgtgtgatacaaattggtgagcacgtatcaaacggtgctcttttttcaatttttttcccaccagcatttcttcgaattcatttttttaatatctagtttacttatttatgtccttaagtaaataattatcatagcattcaaaataatccgtaatccattaatatctatcctcacttcaacaaggacactactgacagacatcatcaggaaaataggataatagccaatagttattttttcttcctataggctcacggccaatgtttgttgcctgatcaagcgtttgggctgtttgcgtgctgctgtcacgatgctgccgctggttcaagatagcctgcacaacgctgtcacaggaggaatgctgttgcagcctgaaaaatcacccgccaaggcttgattacggggattgatattgtgtcgaggtagatgtatggctacggttagtgagtcaatgagacgcacgactaacattctcccgatacatcccagtcctactgcagacggtttgcgaaagggcaatcgcaatgagaaagcgtgcatccttgtcggctcagtcgaacatttttatgctccctccgtttcaaaatatttgaccgttcgtcttattaaaaaaaattgaagtaattattaattcttttcatatcatttgattcattgttaaatatatttttatgtaggcatataattttacatatttcacaaaagtttttgaataagacgaacgtcaaacatgtgctaaaaagtcaatggtgtcaaatatttcgaaacggagggagtatataggaagttgtcaagttgttgaccacctttccagactgcactaattaatgtcaagttcattactggatgactattttcagtggaaaattcctttaacctttcgagcgggtctctagtagtttggggttcaatcgtgtattacatatcatctaaattgtgaggaaaacaaattaaaaattaaaataaattaataaaatatattaatttatgatatatcactctctaaacatgcaagttcaaaacttcacgcgtttcgaattatcaaaacatatgtatatattaatatgcttaatcattcatacgtatgtttggagggtttgtatcgtataaatatcatggtgctattctttggttatcattctaagtgtttaagttggccccctcatctctaaatcttccctctgccattgctggtccagtagttggattttactaaggacagtaggtatcaactagacatctatatcaactaggtacataaggcttccgcatatttttttcgttcgtctttttttcctgtccttttctccgtcctttttttcgccctttttcctcttttttttccatccaccttttttcttgccagttcttccttttttcatccactttttttcgctatttcgcatgtcttttttcatcgttttctcggtttttttcatcttttcttcgtcgctattttttacatcacattttttggcatgcggtaagaattcggttttttccgtcatcgtgatttaatctccaaccgccactcaggtcaaatcctagcgccaccgccacattgatctgcctccccttgcgttttctcctccaattagttacgaaaattcattctccactactctctcattattttccccttgatttcctcttacaattcggctttacttcaccggatttaatctctatttaacaggcgccctttttatctcaagttttgccaattgctccgattttaatatgaaaggaaagagaagatcaagtgaatcaaagaccctcaatcaattatagtgatgggatgatcaagaaagattcgactagattttgatgggaggatcggctcctgcatcgtacgggcacttccgtaggttgaagacgacagttagctgtgcgagctgggctacagctctacctgtgagctgagctgatgataacagactaggctaggctgaaaaggaagaaagtaatgggtttttagtgcaaaccaagtataatgtatagcaattaaaaacggttttatgcgttgcatcgcagaggcattttttatagtttaattacaatatctgattgtccaatattatatcgacagtaaaacactttaacgatttctaaagttcatgccaattttagaataatcagtggttgcgtgcaaatatagtgtcctttcagatgaaaatttgtatgttacagcctacaggaaatattttgcacatgcaaattaaacaatctaaattgttagtcttcaggtgcacccaacgataaaacacggtgacaattgagccgctaattgagcatatgatatatatcctaacgaaaatcgaccagcgaattgcggagttcttattattattacatttatcatacacagtgatgtccgtttgggactagggaatggctataggtacaataagactttgaacatgagaattctcctttttcctgaggaatacaatattgtgtcatatgcaagaaaagccaaccaccaacaatatgaatatgtgggataaagttcaaactaactagatcaaaactaataattaagatgtaactaggaaggtagcccgcgcatatgcgcgggcatgtgcgtaaattttttttacgaatgtccatgtgtggatggttttttatcaaaaatattctttcactttatcataaactaaaattaaactaattcgacgtgctttgaacgttggttacttgaaacatataaattgaactaaaattactttaaactgtgttgtttctaatacatgagaaaattttgtgtcgaaacaatagatgtgttccctatgaatgtccaattatttttgttagattctgtttgaaattttaaatatattcattttattagtcttgctaaaatgtttgaatatttctatttagaatgggtaataaacccaacaaaaacaaattttatactagataaatttcattttattttcatttctttttatctccatttttttggataaatccactttatgaagcatcttttgaaatgctttgatctctgtaagtcagaatgaaaatatatgtgggttgatcctacaacctgccatagggtaaaggcatcaattctaaattatctcgctccaattaagtaagaaaaaataaaatagatgtcatagtattttcttagcaaattaccactaaactggagtatcatgtaataattgcatatttctagattgttctattctatatgtcacaaattcacgatgtactataggaagttttacccaaaaaaatagatatggtcttttaattcctatatgtaattggcttatgtatagctgaggccacatcatggttgtttcattcttaagattccttggtgcaaccaatgtgcccagtacaatcggtttgttgttcaactggccacgtgacttcatagatcatatatataatttagaagctatgatcattttatgattatttatttatctcctgaagtgatcatttattgataaaagcatcaatatgaaaatgtatgggtaaatatttacctcctatatataagctgagaaaaagttgatagaaagtcgttagatgtctaacaggatataagtaatgggtcaaccagttttataaaaaattgagctgtgatattttgatttttagtgagcaattttagtattttcttttctttagggtaaaatttgctacaggatattaaaaaacatgtaattggccgagagacaccgtaagaacgcgtatctgttgtggcacaccgaaaaaattggtaattagctactggacgcccacgatattattttataatatccaaaggaaatgcagagagagacaataacaaaagtataacttttcccatacctactaagtctggcttgcaaacaccttcgatgcagcaacagcacccgccagcggtgaggtggctctctagagaggagggagggtgtcaaggagggcccatgcacctgggcttgtggctccatgtcatttccacacttgttgccgctacagtgtgagggctatgctggcgctgatgctccgccacacaccatgcttggggtgagcacaacgtggaccacctcttaattcatgtcgagtagggtgtcgcagagcgcaggctattgttgtcgatctcggagtcgtggcacgccacgctgccataccctccactgcccatgtcgtgactaccacggtgttagagcgatatgcgagccgcacatggcaggaaggggcaaaatcatactttcgtgattgtttctcttcccttttcctttggatataacaaaataatgccacgggtatctagcagctaattaccagttttttgcggtgtcccatagcagatatacgttcttgcagtgtcacttagctaattatactttttttgggatgtcctgttgtaaattttacctttattgagaagaggcttcaatatggatgtgggttcataatgtaatttttgttagcagttaaatatagtcaatatgggcattaagttattgttttcacttagaaaaataatagctggctagacctaataggtggagattcgtttgtggtcttttctttgctcataaaaataattttaattttaattatcatagagatataaaagctgtgaaaagtaatgttgcacactgcatgtgaacgggaatggaggaagggttgagatgtttcttttttttagaaaaatattgattgatttgatgatctaaaataatgtgttgatgtttaagtaaaaaaccgatggttggatgttatttttttcttagatttattaggtttttttttccaatttaagtgagacaagtagcagcttagcaaaatacccatagggaaggaaaggaaggagaggatgggaagatggtttgggatgttttttattaaaaaaaatagatacaataatgatgtaaaataatgtgtgtatcgatttaagtggaaaacaatggatggatgtttctctaatttaacattgtcataccacgatttagaaatatttataagatgtttaatgggctttaacacctatttttgagattattttcaataaagttaattttagttttaagtgtgacagggataaaaaacataaaggaacagggagcctactaattgatcactctagcgtggtggactgtataggggacgtgggtggttttggttttctaagatagatctaacaataataggttcaccgatttaaataaaaatcgacggagatttatctattttattagggtgccacgtggcgatttgagagtatttatagggtgccatgtcacggtttgggagtgtttgtaggatatttaatggatttttaagtgtaagatagatagatagtactacatacatatggtttttctctttatcttatatggtagaaaattatattttatatttttctcccgattatactatgtactttattttactttatcacacatattttttcttccgacgaacggaacgtaagctttattgtttttttttctgaatcatcgtattttaccttttatacagggaatgtattatatacacacctaatgattcgtaataggtccaccaatttaaaagaaaatcaactatagatatagatataatctaatggtctaaaatgatgggtccaccaattaaatgaaaatcaatagtgccacgtggcgtcataggagtgtttatagagtaccacgtggtggtttgagagcgtttttaggaagtttaatggacttttagtatataatagatagatgcccgacatattagaattcctcagcaataggaaaatataaattataaaatatatcatgagtagtttgatgcatatgttatattaatgttgtttttaatgctatagtaatttgttattaaacctatttgccaaagaaaaaaatgtatatgataattgattaaggaataattgccaaggaataccaatcaaatagtaagagggcttgtagatgcgtcgtgactatatttgaattttattatttgaattttattgttatagtatagaaaatcctaatttaaaaaggccatctattttgttttcgatggttttagcaccgtacttatacttactttttagggttttatagttcttttttatcgtgcttacagcatacatgtgcatgttccttttttttttcaagtgaacggtatatctcaatgtttttttttcttgatagctttttttcatcgtatacgtacgttagttgttttttttcaaacgttatcggtatatctttgtacgttcgtacttaatttctggtaatccgattctctggtatatataggaagcacaaaccaatagatataatctaatggtctaaaataatgggtccaccaatttaagtgaaaatcgacggtgggattgtagaatgacacatggcgatctaggagtatttgtaggagtgccacatggcagcgtaggagcgtttgtagaatgttttatgaacttttagtatataatagatagatagatatgaacaagagcgcaatgtctggaaactataggtaccaacttcaacgtcttaatttggagaacctgggcccctgcaaaatgtaagttcaacgcgtgacttgtcatccaaaatatagtttggatctctcatcgacttgctactagaggctggccgaacaatggggcttgcctccgccgtatgcaaacgagacaacaatccatctcttagccccactgtagatatatcaaaaggatatggagcctattcgccacctaggttacccacaactggacccgaaccattaggacatatgtcaaagcatccaaaattggacccgagcctatctgctgctgctagtcctacaccttgtgcggttgcactagcaccacataatgagaaatcaagagtacagatctatataacatcgtggcgcttttttgttctcggattccaaaccatcggatctaaatgtacaggccggtcgaagaccatgacaatgtacagtcattatattgtgcagttgctactgcgacaatgcttgatctcagaccctcctatgctaatgaaccattcaggagattgaaggtgtagctggcagcagtatgtgctggagatccctgtctggttcaaaatgatttaggttcctgcctgcttagttcctagttgcctcccatcccaacaatagtcgggcgatgctagtgaagagatctcaagaaaacttttatttgcatttctcttctgtgcttctggaaatcctatatattgcctttcatgtcagatgcatctcctatatgtcgtcccttgggctaccaaagcatgcacatttagggcccgctcagatcgatgatattttcaaccataccattatttggtaaaattaacaattgtatagctatatttagtttgttattaaatattgacaatgtatatgaaattttggtaatatattatgggctattcagattgatgctattttcaatcatagcacttttttttttggcaaagtccaaaaaaaagtatctacatttatttcattaccaaactttggtaaatacataaaaatcttagcaaaattttgacaatattgttaacttgccaaaagtttattttggctacaatctaaatagcccatattaaatcaatcctatcaaaattttgacaacgtagttaccaatttgcaaaaatttagtaaggtttattttggcaccaatctgaatagactcttatttcttcattattacactgtaaaaatagtacataatgaaagtggtaattaattagagagtgcatcatatgcgactaatatcctttggttatcatatagtaccatttgaattttgaaagccccagcagtagtagctgcaagctagataaaatagattatttctgtccatataaacgcattcttcatacttcgcactgataaaataactgcggatacttcgcaccgggctaacccaacccctagtgacaactcataagtatattatacacataacagaagaggcagctgagctcaacacaaatcacaagcaatatataatactacttctgaagctagaaactagaaatgccgcaagagccatgaagctaagcagctagctaatagttttatgaacatatgcaacgctttctcattcgcacgacaaattgagtttgggcttgggtagcaccgggagacgcgaattaagcaaaatgtgggatgaaagtatttttggacaatgtaggtggctgcgccctcatgtgccctcaggtttcaggatccagcatggcaaagttctgtacgagactgaagtattttgtcctacaatttattgagcttcacgagcaaatgagcactctgaaggctagcttgttcggatcattgggatttaatccccaacgggaacctatcagggagggattgagtggatccctctcccaaatcacccaaaccttctgggggatgaatcccttccgaccctctaaaccccactctgatacatgtgtttggtttggtccgatcctcttcaaaatgatggtaaagagttaagctagcactataatctttcgacataagaacagtgtgaaacacgcaagcaattccctgatttttttttctgacagaactaatgcgtaataactaagcatcatatctcatatacttcatagaattcattcttgaacctaaataaaagatgaatgtatcaacacattcatatatgaactgaacaacagaaagtacatgaagtttggccatactgtttatgtgtgctggtaagggtagaaagaccattctagtcttttcacgtctattgtgcacatttatatgcctctttaagcctatctcaatgcatagtgttttatccctaaatttccattcttctcagcaccttgacaaggtcccaaggcaaggtttgttccggtggtcatcggcgtgccagcggtgccctaccgctggcacggaaatcccatccaactcacgccaccacttaggtagcagcagcaagccctcctcatcgttcggtacgtcctcgagcagcagacttttggtttctcatcttcaaacaagaagcaagcagcaaggagcccgtgatcgccagttcatctcctcaagcagcaagcaaacaaacaaacgcaacttttttgtcactatacatatcgccgatgcttataatcatactctggtgttttggtaaatcgttaatatcaaacttgagccaccccactaatacagtgtaatgcacgggcattttgctagtgtgtgtatatatatacatatatacatatatatatatatatatatat

SEQ ID NO: 21709 - DNA, 29127 bp, Oryza sativa
atatacctggtcttataaaacatatgtgagatataatgtgatgttcagaaaatgttaatttctcataagtgtcaatgtgtgacagaatgccttcgatatagtaagaacattttctattcaatatataatgactatatagagactatctatatggatttatctattctttttgagggaaaaaatatattgacataagtatatgtgtattcatacgaagatatcttctgattgcaatatgcaaggccacggtacatatgaagtcagcttttgctcttttgtgtgcatgaatcttatttgtgttattaagttttcaagtcacatgctactatttgtactcaaatatatttaacaaccttatagttgaaacaagctacactagccacaaagaattcgattttcactaatgtggaataaactagacctttaaccataactttaatgctagaagagtacaatagttctttttaattttttatgtagtttagtaacttaatggtacttaagctagtgtggaatttgtacttattaactcacacttttgttgttttcgataacaacaataatattatgtgatcttactctcatgtacacaagcaccagtaggtccgtgaaaggatacaaaacggatccaactccaggtaattcaagtaaagtggaactggtttatgaaaagaaattttgtaatatgtcaatactctcttatagtactttcagctcaatcagtctaaaacatataggtactactcaataccagaggggaaggaatccaactagcggcaatattcaacatggttttgtgtgactgttatgtgaggatttgattttgtgatagttggtttctccattgttcttttggaatattatgtaattgttgttggaggatgtgacttcttaagaattggtctgtgctgaagttttagaatatgctacctcaatagcatccaaatgttagcatttccttttaaagttgtattttaattgccacaaatgttttatttaccaaatcaagtacttttgaaaggaagtcatcattattggtatcacaaactagtttatcaaatcacatacttaagggatacattatcatagaattgtggatttatgtgagaaaaaaccaccaaaatgtagtatgcattataataaaataagagataatatattctgtgccattgagtttgtcatggttctatgatttaccaccgaatttgtacacttccattatatgccatcaggttttgaaattctctcctacaatttgccattgctgtcagttactttgtccttttgaaaagacaaaatcacacataatcaaatgcacaagatttattgttgtcgcatttctcaggtagccgacctgattggttgctagtttatctccaatgaaaataacagaacaagatttcttctctacctctttgagtgtcaaggataaggcatacctcctacacaaggattcatggaatacggcaataccatatacttgattgtatacgagcaggtatcctttaattaaggaaatatggtagataatataaaaaagaaaattatcttcccggaatagaaggtgttagagacctattcagggaagataaggtctccttgggttattttgttttatctctgtgagtcctacttggagaagaagatgatctatgttatatatacaaggccttctcactcagggaggggcatcaagttacaaagccatagccaaagccatacccagaagtaatccaaaggaagccaacgccctattcgccaatagatcttgtcgggttgttctcgacaactacaagtcggcggattagtctagtcatcctattcctcattgtaaagtgactttcccacccataatacatataaactagagtagggttattactcatcttgagggcctagaccagtataaatctatgccccttgtcttcttcatccaatatcgcatatacgcttgttccaacgatccccatactctacagataccatcattttaattgttgatttgcgatagcatttatctctttgtacggcatacaatggattctcccatgataaactgaatggcatagaataaattctcgcaaacaaacatatgtaataagaaaaaagaacaagcttagatgcaagaacttgtttacgattgaaatttaggtatgcgatatatagtacttccaatcatatataagttcccatgtgagctcttgtttattagtgaaatttagacatgaggtatgcaatactttttatgattggaaatataggcataaaacaatcggcatgtgtcttgttttatcctaaatttaggcatgcgtctcatgcctaaatgagtcttgtttgtttttcatggataaaaaaaattggcgaggacatcaccacagtcctcattacccagatcgttggagtttcaactcaaaagtttgtatttcttataattagtgctttgggatcatttgacatcctgtcccaattaggatgtggtaaatgtagcccatgattagtaccaccttgctagtttagcaagagtggaaccaacttctaagggtgtgtccctccaaccatatcatctctgggttaatcattttacaaaacacgaggatggaactgtaagtggggtgctatatgtaagtggccctgcccattggatggtctgggctgcgcggttctagagagtgggctgttacatctgagtcatcatgccctggtaatctttgatgccaaatccttgcaaaggattactagaaccaatacctatacgcttaatatgtcatgacatacagagataccgtctattagtaaacttttcgaactgaaaatatgagtggaattgatagccttcgaaggagatctacaatacatattgtgtatatcgtacggcctaaaatatagatccttggcagggggatgtgatggcaccattgcgcgccgactactccatcatcatccccgcaaccatcttgtcagcaatggtgtgttcctcccaaatctgttgtggatggcgaaatatgaaattgattttggctcaattggggaatagttgggactccacaaggtatgtcataaatgccattatatatgctatcatgggcatttgtggccattgatctgtacttcttccattggttgttaatatttaaaagcagtaactttgtgacaacctttgcaagtgttctttcccttaatgagtaggttcattgggttttaagatatgcggagtataaatgctagcccaatttatcatcaatggatgataaacatgaactagatgtgaaaaacattaaaagatgtagccttttgttttcttgattgtgctatttcacggaagaccatgaatgatcgattaggtagtcacctccttctctgattgatataccatagtagtagcgggagatggagtttgcatgtcatattgggggcagcattggggaaagatattgcgaagcatagcgggaggtagatggagcttggcaagagtcctgacggcgcctaatcagttggccatggtgtccgatggcgcaacagagatcgagatttagttgttgtcgtctggtctccctcctcccccgttgcaaccggatttggctgtccctgggcaatgtgatttgctactcaaggacttgcgggatggagacatagcgagagaggatcaccacactcaggcctaggcttagggacggcggcggtggtatagtgatatggtggcaaccccctcctccctcatcttcttgtagctggcatcttagccgtaatcctcctctaaacctgcgcggtagtttctgcagacatgcagagcatagatcctcaccggatcataggggcacaatgcactcacgtagcactatgtgtatacggtacgcggcgaggtggcggtgacctccttctctatagggccactgccacatgcacgcctagatgtggtcaccaacgcctcgccaactactattctttgcgttttttattgaccaatgttctagaaatactctgtgcaaactatttcctaaaccaaatgtgtttgtagaatacacatattcataactataaaaatgggtaaatgacataacatatttcgatatattgtgctaaaaatgggcaaagcatttttagccaatagtgttggagtgataaatatgtgtgggacatatttggtaaaatataagatatagctacttgcattgtgtcatctagagttggtgagaacaaggataatgatcaatatactctagtttagtttgtctatggtaagggacgcctaactcattgtaatacgagaggagagtttgtagagaaaacaaatactggagtcatttgcaattcaccaaatccgttggcaagaacaatgtcatacacatatgatggtctttacaaaatcaaaaattacctaggaggcaaaaaaaatgtcattccaacgtgaaactatgtatgaactaggaactagattagctggggcaatgtagtttaggaaattactcaggcatggatggaaaactagtcctctagagatcatgttgcgcagtgtgaaccctgggaactggatggacttgagcaagcggtggaggtgcaacacctgtatggcctctatgtggtgcttggggttgtcgagtgccagcagtgcatcaaaccccatctgctgatagcatccctgcaaaaacaccaccccaagacgcagcactagtcggcagggatgagggtaggggtgtgtggggtgtgcgtatggaatctacgacaggggcaaggaaggcggagaggatggcagggaggaggtcaggatgcgggtcagggatgtcctccgcgcggaggttggtggaaggggcgaggcaataggtgtgaattgcctcaccgatctgtgttggcatcatctctaggatgaagaaatctaacatcatcttcaccgtcgccacagatctatctaccttcccctgcatccccaaaccaaatgtgagggagcagtttcaaaagtacgaaaatattcttgaaatgcaagcagttattgcctcttttcccgcccaagaaaatgatttgatcagcacaccattttcatgtaaagcatggtccacccgtggttttgatggaacacacaaccatgacaatataccttcatccttttcacccatgccaatacatattgattcataactcataagacggaaaaattacttaaccttttcttcatctctcctttcctcttcctgtactccaacagagtagatttagaaggaagctaagggtaaacacaaattgggcgaaagcaacttatgagaggaaataaaggaatccagtgagcatatgaaggtaggtcactcgtgtagaaattctagccacaacatatcgatgaatgatagtgagtttattaacatagcaatacaaactttctcaaatcgatgagcttgaatttgattcctcaaatttgtttgctcagggaaaacaagaagataattttgtggggacaacaaagaatggattccgagctagaatcctcaaatttgtctgatctaggtgtagaagagggattggaaaactctagccatggctaccaaggatgtacccgtggaggtggaaggtactcaaacaccaccttgaatctcctgaagatgaaaatgaagatgaagattaaatgattcacgcaaaacgaggtggtaataacatgtgattaattgagttttaattattacaaacttgaaaaatggattaatctgatattttagaacaactttcatatagaaatttttctcacgaaacgcaccgtttagcaatttggaaaacgtgccactttaatccaaaatttagtccccccatttcaggacattcgaacggggctgacaacaaaaggatgaacaatggaaatagaactcgacaagataacggtggaagtaaaacaaaggtgagtaacttcaggtctcatatatattttataagaccagaagtatatgctttcaatttcaagggggcaaaatggagttattttaatttatattaatgtcatttggtttggccaaggttcattactatataaaaagtgtgagagatgttcagaaaatgccaattttcttgtaagtatccacgtgtgacacagtgcctttcatatagcaataacttttttaattgaatatataatgactatatagagaataactctttgatttatcttttttttgaaaaatatattgacatatttatatgtgtactcatatgcagaaatcctctgattgtaatgtgcaaggtcatggtatgtatgaaatcagcttttgctgtttttatgtaatgaatcttatttgtatcattaagtttttaagtagcatgctaatatttgaactaaatatatttaacaaacttatagttgaaacaaactacactggccattaacaattcgattaatgtcgaataaactagacatttaaaccataactttaatgctaaaagagtaaaataatttaaaattttttgtatgcagtttacttagtggtacttaactcagtgtgaaatttgaactaatcaatacacaagtttgttgttctcgatacaaataatattttgtgatcttactttaatgtaaacaagcaataataggcttaggcacttgtgggatcaccgagattgggtctaggcatatggatggtggtggtgatataatgatctggtggcaaagccttcctcccacatcatcctgagtggtttccgcagacatgcagagtacagctcattccccgtggaagctgtaatgcggatgggcagcactgtaaagggtacgcgatcatctcctctgttgtgccgccaccgcacgcatgcctagatgtggttacagacacatcgtcggctgcctagtctacatgattttttttttaaaaaaaatatcaatgctatggaaatactctgtgcaaactttttactaaacgatatgtgtttttgtagaatacacatattcataactataaaatacttatattaatattagtgacataacctatttagatatattgtgctaaaaatgggtaaaacatttttagccaacagtgttggagaggtaactatatgtggagcatatttggtaaatataaggtatagctacttgcattgtgtcatctagattttgtgagagcaaggatagtatgaaagttatggagcgagaggtgtgctggatttggtgctaacaactgccaggctgacgggccattttatgataatgctacaatccaaccgttggctcacaaaaccagacacagattaatggatttcattggcataccgttttcatgtaagccatgagccgcctgtggttttgatagtacacataatcatgctagttaatctgctttgatccttatcacgcacatgtctatatatatcgattcataactcataagacaaaaatcactcaactttttcttcatctctcctttcctcttcctctattccaacagaactgatttagagggaagcagtgggtaaaaacaccttggtcgatagcaacttaccagaggaaacaaaggaatcgagtgggcataagaaggtaggtcactcgtgtagaaattctagttaaaccatatcgatgactgatagtgagcttattatcatagtgatccaaactttttcggatcgatgaatttgaatttgattcctcaattgtgtttgctcagggaaaacaacaatatagttttttagggacaacaaaggatgatcatgttgatcattcagagctagaatcttcaaagtttcttgatcctggaaataaagatgtaccataggaattgcaagctctggaactgcctaccaatgatgtacctgaggaagtggaagttgttgaaacaaaatccaataattttgtcaacaagacaacgaggtaacagtggaagtaaaacaaagattagaaactctttctctctctctctctctctctctctctatatatatatatatatatatatatatatatatagtaaatttgtttggtgctccatggtgcccgggcaccattgttaaaattgagtatatacctaattcaaatgagtatgaaactttttcaattacttagatattaacattagctactttactaactagttcaaagcaagtttgaactgaatttgaacttgtttttgttagattttgattctaggtatatagcatccatacatataattagttaggtatgtaatcatggattgtgaaataaagttaaatttgagttgttttgttgataggtataggtatgaatcgagttattataactaggtatatactcacaatttgaaaattttgaaaaatttgagtgattttgtgtatttgatatcatggtgcccgggcaccatggtgccccatatgagtgtcctatatatatatatatatatatatatatatatatatatatatatatatatatatatatatatatatatatatatatatataaaggcggagatagaggcatgaggttaggccgcgggctggcgatgtcctccgtgcataggttggtggcagggggtgaggttgtaggtgtgttgtacctcggcgatctgtaccagcatcatctttgggagagagaaatttgatgccatcttcgctatcgccgctgatctcacaactttccctcaatcccccaacccaaacgcgagggagcacttcaaaagcaaaatatattccggaaatgcgagcactttttgcttcactacttaccttcggaaacggattaaaaatgaaaggggccaatttatgcggttgtgtagaggagttgttagcccacagcccatactcatcttactaaccgttggctcacaaaaccgaacacagatttatggatataatcagcacaccgttttcatgtaagccatgacccgcttgtggttatttctcgtcatgccggtgacggaacgacggccaattttattaaagccacccgtgtatttgatagtacacataatcacactaatatactttcatccttatcatggataagagtctatatatattgattcataacacataatacagaaaaattactcaaccttttctttatctctcgtttcctcttcccctattccaactgatctattccaactgatcagatttagatcattcatgtcaaaattctagctacaccatatcgatgactgatagtgagcttattaacatagtgatccaaacttttttggatcgatgaatttgaatttgattcctcaatttcgttttctcaggtgaaacaacaagatagttttgtcgggacaacaaagaatggtcatgttgatcattccaagctagaatcctcaaattttcctgatctagggttagaagaggaactaaaaaactctagccatggctaccaaggatgtacctgatgaagtggaagttgttgaaaaaaagtccaataatttagtcaacaggagaacgaggaacaatggaaagagaacttgacaggatatcagtttggagcaaaacaaaggttgataactttatatctcatagaccagatgtatatacttccagtatctgggggacaaaatggatgattttaatttatattaatgcatatggtttggcccaggtttagtactacttgaaattggaaaaatgattagagtgttagtatcagattaattgtcatattagtgaagagtgagtgattttcaggaaatacaattttgtcgtaggtgtccatatatgacacaatggctttgatataacaagcacatttttattggatatctgtatgatttatcttttcttggaaaaatatattgacatatgtatatgtgtattcatatattcaacaaattgtaatgtgcaaggtcatggtatgtccaacagtccaagtggctttaccaatatgagtaaaccggtctgtgggaatcatttcattccagtgggcaagatgcatgtatgtgatctacataagcacatgatgacgatagatatcttgtatttccaaatataagcattgaaatctaccatttataatattgaatagatttggttggccttctctctttttgcaaccagatctgtccattgtcactaggggaggtgtcatcaaagtaactcggttaccttacagaaaacaactgaaagtatcaacgtcccttgcgcacactaaggtgccttcgactcttcctcttactagattttcactatggtggctatggaaggggtagggaatgcaaaatgactaatgccttatcttcaagcccatgcaaataaattgttataacatcgtgtcgaattgagtctgcatattggtttttagccattgtgtgtgtgcacctagggtggggaagaagaaggttgtgaggtgaatggtggcattgtgcgagatggtagaatggacagagggataggatggagtggctatgttattagaaagctaggcatgcgtgcaacatttactctctaatgctggacaaattcaattgaggtataggtgcaaaataatagaaatatagcgtaaccaatcccacatttctacacatgcgtgagcaccatttctgattgtgttaagacatttagtgcaacaaaaaaaatagatgtgcgtttttggagtttgacacactagatttaaccatagctttatttaggacaaatctcttttctattttcttcttgtttgatattttgtggtgatttcttttaactgttttatgtaaaaagtgtgtaacatacactagttaccaaatatagatctagaagttatgttgttgacacttataaaaatattttactcttttgttgaaaatatgttgtttacattttttttgagttgttctattaactggtattcaatatattgtattaggtatgtgccattgagggcggattctgatcgcataggtggatgtccacgtacactatctgccgttgatcatgtcgccaagattcgcgcgcacaacaggcagtatttcgtgataatttggccgtatactgcgatatacatatacatttcaatccccgtatagtacggattgtactttttaaattcgcaaaagccccctatcgagggaggaaaagctacctatgcctttttttcccgtccaagtctgcttccggacaggtcacgggctcttctctagcatcccacccatgtctctctgctgctcagcaccatctctgcattttcttccatagtagggcagatctggcttgttcttgttgtgttcctcgctatttctcccatggaggatttacgtcctactcggtccttcttacagttgatggctaatatgcagccccgtggatcctggtctgggaaggttagtctttactaatctatagtgttgcagacttgcagttgcaacaaacagtccttcgtcgcccctaccctctatcgatccgtgctttttttttttttttacgaaaatgctctgattttttctctccatcaaccagcttggaaggcgcatgttatttccaaggagtagggaaatgcccataccctccgggacagagctcaacactttctcctgatgaatttttaccagcatcgtgagttttctagtttttttcctggggttttatttttcaggtttgtttacccccttcctcagagattgtgttacctttacagtcctattgatctggaccccgtcccaagttctatggatgttctgccggatagcacaaaatactgctgaccaagatgcattgtaagcaactctattccgcaccaatctatttctcttggtacatttcgttgaaaaggttttattttttctacattccaggggagatgaggtgtacatgtgtgaccagtatgtagcaaacatggattctgaaacggcggaaaacacatctgattccgtgtgggcagacatcagcgggtactcatcttgttctgggcctagctaaaggtaataaatcagcactgacatctttcgtttaacctgtactccatgttcttaactttggttactgtagtgctatttgccttgttagccacgatagtagtaccatgaatggattcacttatttgtatgttttttttgggtataaaactagtctttttgcgcaaagatgttttggttacttgtatgtgctcttaactttggtaactatactgctattgaattcctgatgatgtgcttgttgacggtcattataggccaattttgaccgccaatatatctacattaaaggagaattagctatgcttataatgcatatttgttttagaataatatagttccacttatacttggagaataatgttgcatgaattgagcaaataaataatgaagaaatgaggagaactcactcctaagcaagcatatggataaggagggcccacatgttaggtgtaaccgtccagaaaccaccttaactgtcacaatcgactagaggacccacctgtctgtaccatgcccgaagctggaggcctgctgggctagcccaggggccgaaccctggtggcccccaatcagcctggccctccatgtggacgtccaggatgcactctcaatgacggttgtggggtaggaaggtcatttcgcctttcctaccatcgtcatgctgaccctataaaaggaggagcccatttcactctcaaaacactcaggcaagctcaagattcctcttcatactttattttagtagttttagtactaagtggagtagtatagaatagttctcgcagtcctcggagcttccagaagaatttcggtatggctttagtagctttcttattttcttctgtaagactctcggaaataataaagatactcttcttcttatattctcggtactttacttagtctgagtgctgctcttattttatatttgtgtagtcacaattgtgtgggtagcctaccagagaggtgcaatggtgtgggtttagtgtccgagttatcggttgctctatatcatctgcagaggagtagtatttattaatgtaagcatggtgcttagattactaaatatcactatctgggcatatatgctgcgggatagtagaggtgggctgctgatggtgatagctcagtacgggtattcttccacgttagtatatattcctaatacaaattcctagggagggtactcctccgtatttagccccggttggacagccatgacaggttgtcataagaaactcagcaaccaagggtggtctctcgaaacaccaggagggcactgttagggggtatttgccacataattgtatactagcaaatgtagactagagtttgagtgtatattagaagtataggaaatgagttcttcctatctcttcttccactcagttagaattatttatttgaggaaatccaaaggcttcgcttcgtgtcactccatccttatattaaattaacctctacttagattttgattaaagcaagtaatatatgtatgtatatattagcatggttctctcttttacaatcttcccttgggattaaataaatatgataccttcgaatacttccgggtgaaatgctacaatggtatatccatgcgcttgcggattacttctgtaaccataaatatatcaggactatttctgtgccattgctagaaatgaatatttctattaatgttgttaagaaataccaacagtgcctgtaattgtttttgggtttcaattttgtgtgagaatgagacagtagactactgattaagagcgatgtgcatggattagaggcgtttcaacagcacttggacaagtttctcagtttgattcactggatccatatgcatgtatcatttgactgaactaattgttgctgatgatgtgaacttggacaagtttctcagttcgatgcacgtgctaacgctacgacaatatttgataatgcaaaattaaaaaaaaatcaaaatattttatatatcttgaaagtataaaatgagataaattttaaagtcatgaaaaaaagttcagtttaaataacaaattttaaatcatgcagaaaaaaaatcaggtccagagatggatagcaccagtagctataccgtgttactctaaaatacaaaataaaataattttatctcctggatgtaaatctatatttttgtttcataacaccacatttttcacaattacaaagagggtcgcctcaagcaatcgaaacatcaatggtcactacatgcatcgctagaaagaacatcatcttgatgtaaactgctggacctgaatagattggcctctctaacagcaccaggatcagctccaacatcatcttaagctagaaataacttcgatttctgaaagctcaggaagacattagcatgaggcatgtttgcatggttccaactcctaaactcctgagaaaccaaatgccttaaaaaattttctcgtttagccacatcaaaaatctttcaagcaaattacatccaaataaaaagaagtaacagaaccggccatagaatttatgcattgcatcattattagtaattacaaagtcatcagcacacttcaatattcaacatgccagagaaaacacatctttattggattcatccaatagcactttttcatggatatgatgaagctatcgtttcattgtctggagctccaaaattggttggtgcatacaaaggagatactccacttaatatcaagcaattgacaaaattaacatattttcaaagttatggcacctcacaaaatggaaaattgaccttctgctgcagcctacataacacatatcagcagcacaacaattgcagttcaaagagtctacactgatgaataaaaattgatttggttgatagaaagaaccacccaagtactcaatacaaatagaaaattgcaataattgttcagtatttacagtgaaatctaaatctacaggaaataacagcctcgatctgccatggagaaacttttccaatatatttccactaagttaggcactcaggctagcaaaatgaatacaagattccaactaatcaatttctgaaataacatggtgtctagaaatgctaatcctaattttagtgctgttctacttactctggagagatcttggtcgatgtcaacgattatcatggccatgttggtggatggggacaaggctctttgaggcggtcttcctcctctcattggcaatgcaaacacagttctgcaccctccaactcctactctgagtgggcctcacaccgccggcagaattccattagtatataatataattcaatctgcattcaacaaagaccaagagttattgagccctcccaagtatttgcaataaaaatggaagataactgcatgaataattgtcactctaatatcaatttacaagttcacattatacctctttgtcgacaaggccgaggaactcttgatgctccttgctaacggactgcaatataaggaagtcagaaaaagataacatcacctgttgttttctcaacgcaatgttagcgctcctttcataatataagcattcttcctagagtaacaacagtattcatgctcttctctaattgaatatgcaaagaacactgatttttccttatcaaacaaaggatgctaccatataacatttaaaatgagtagaatcatcaatacaaatttatcaatttatgtgccaattatgatcatcaacaaataggcgattagcctaatgaaatactctacataccagcaaagattgccatctgctaaatccttactgaagcatactgaaaagccaaatctcctcctggataaaaggaaactatagatttagtcatatattttttcagattatcaagctaaaagagtgccataagagatggcaaacttcaattgtgaaggaatgcagtgtggaacagtaagcccataaaaaatttccagtgtgttctgataaccatttagaacaagtattccctctttcactactattgtcattattatcatacgctcctctcaatggccacttataaatactttcattgtttaattgtgtagaaggaacagaaccagaagaaccattgcaggttattccacttcatttaaaactctatgagcgtgttgcacaaattgattgaccctcttagtcaatatttcatttcatttgtttagcataatattgtttagtataatacaccattattataggataaggagtcaggggagcatgtaggatccaaagtcagcatgcccaataatggcgtaccatcgaacttgatacgatctataattggccagacttacgactacctccctcaaggtacgttattgtatgacatgtgtttagtatcatctatctataactttttgtcatcagtaatccctttctccctttttattttacagattatgtattaaccaaccaggatgttactgctcaagacattattctggtatcatctgaaaatgagacgctggtgaacatgggaggtttttctgtcaaaaaacatcacctatcgtgccttctcactaaagatgaatgggtgaacgacgacgtaagtacaactgcacatgagtatacaacgttaatatttatttaattgtcaagttcctaaatattttaaattgaatctataggtcatcagtgcgtacatacactgaataaaggaggcgcaatcaaagaccgataagaaagtgtattatgaaaacccctttatcattgccatgttacaacgagatgcggtctacataatagatgaacatatagacaactttattacaaatatagtgaagaactatctttttcatgaactggtaaagtttggctctctaaatttaataggatttaagtttgttattatatgcattattgtgtactaattcgatgacttgtttagatttttctaccaataaatagaggaaatattcattggtatttagctattctcaacccccaaaaaaaagtgatacatgtacttgattctctctgtgaggacttcgatcgtgttgacctccatatagcggtaagtgtatatggcatattcaatcttttgtttatttagattgcaattcatttttctattgctaatcgcaaatgtaataattgaatagatacaaggagtacaaaaacatcttgatatcattacacggcggcaggacttacctagccatgaatggatagatctaaatgtcgtgacatggctgatcatagaacaattacaagtcaaaattcaactagatgggtatactacaaatcatatctcttggaatattaaaataagatacatgatatattttttactggtgcattcttgttttatttttaattaatgtttacaaaattgtagttcttcttgtgggctcttcatgctcaaatttatggagttttttgctggagataaattttctcatcctgttacacaagtgaatttcttagcataataacaaaatattagatcatacattttatctaattttcctattaaacgaagttatgtttactatgcagaaagatattgaactttttaggtacaagttagccggtatattactgtgttggaaaacaaatatggcggccgaggcttccaatgttgaacaagtcgaagatacagacaatgaagatgatgttgtgatagtgggcagtcgtcaaagagaaagatgggacatgaaataatctaaagtacgctcggcaaccaacgatctcgaatatagttccctcctctcggtggtttcttgtaacaccctgaaaattcgaccaacaaaaatcaaaactctaaaaacatgggccttcaaaaactttttaaataaattgcatcatgccgattttattcgcccatttcattggaatttggtttcaaagtttatagatcacgaagaaggattggttggaaataaataaaatattatcgcaaccatattagtaacaattgaattctagtgcaacggaatcaaaaattagcccaattaaaaattcaaataaattaaataaattaaatatgggtaatattaatcttgggtgaatccattggttggaataacataaatattgagtaaacctcatttatgcaaaaattaggatttatagaatagaaattatataggaaataggctaaaattgggataaataggaaaatacactgtttattgcactctaggtgctcgacgaggtccctagccctacccccttctctgccgcgcgcgcctggccgccccgagccccgcgccaccgtcgccgtcgcgaccgtcgcgccctgtcgcctctgccgcgccgcgtgccgtcgccatcgccgcccgtcgccgtcgcgtccgtcgcgtcgccgcgccgccatcccatcgcctcgcgccccgcgccgcgccgcccgccgtcgcgtcgccgctgccgcctgtcgcgcgtcgccacgcgtcgtcgccgtcgccgtcgccgtcgctgtcgccgtcgctgtcgccgtcgctgtcgccgtcgccgtcgcgtcctgtcgtcgctccgagccgtgcgccgccgctgccgcgccgtcgccgtcgccatcccgctgccgcgccacgcgtgccgtcgtcgcctcgagccccgtcccgcgcgtcgcgtcgcccgttccgtcgccgcgcgcccgtcactcgccgcctcgcgccgccgtcgcgtcaccatttaaccgcccccctctcttccctctcccctttttccccctctctcccctataaaagccccaccattccccactctccccaccccattccctcctcctctcctctaccctctccaccgcgccgccgttgtgccgccgcagtcggtaagccgccgccctcccctcgttctgccgctgttgcctccggggagcaagagccgagagagagagggaggaagaaagaaaccggggggggagaaaaaaaagaaagaaaagaaagaaaagagagagagaaagaaaaagagagaaaaaggaagaaaaggaaagaaaggaaaagaaaaagaaagggggggaataaaataggaatttgagggagattaagaagtttagaaaatttagaataattagaatttaattataggttaattatagcctagaattgtaaaatgttaatgtgattataattatttttggtaatctctgtaagaggtcgattcgcggtaggaatttagatttatttaagaagtaaataattatgtcgaatttctatgaatgtacttccaaatcccaaaatgacttaggttaaatgacccaacaattcgaataaagtggttccgcaaactttgtagtcaatttagaaagatcgatttgcgttcgacttttatgtgagtcatttggattttatttgaattctaattgaattcaaatcatttcttcgcacgtaattttagagcccgagggagttgcggatccgagcgagggtcaagacccgcaggacttcgagcaaggcaagtcatcaccattctttgaacatgttgatcccaattgcgaaattattttatttacaaataagattgcatgcaatgatgaacatcctacttgtgattatgccatgtcttgattattgtttacctttaaatccatgtaaccataattacgtatgagtccttagtcaattatgacacatccttagaaatgctactctagattcatgcacgctcatattttatcaaatgctatatgcttgggaaattacctttgggaaggtaattgagatgcggcatgtggagacatgagcgccacattgccatgatgatgatgacatgatttgtgaaagtaggaatgaaattaaacacttgttttagactggggcagacggtggatttgggtggtatctgggaaaggctagtaccgtccccgatcaattaaggaccgagccatgaagttaagcatgaaacgacccccgtacaaccgcacttctcgtatgggtatagacctagcagattaaatagccgagcggaggcagtatccctgcatagatggttcacccctgagtgaggcaggtgcgctaccgtgggacagccgttgaggtagggccgagaggcgtgccctacatcggtgtcgccatgggtaggactgccatgagtgcgtgagagagagaacttaacctgaatcataatttaatatgtgtgagacgtctctttcccaggagcgccagaactcctctcactgctagaaatgtatgacgcctagagtgcatgagggctaaagttcatggagcgggtactgtcacaccctaaaaattcaaaatatataaattgttgtttaaatggaatttttagaaataattttaaaagtcttgaagagaagatctaatttttaattaataaattccaatataaaatggggccagataaaatttcattaaatactttgcttaattctataattcctagatttttctaggatttatttgagctaaggaagtatttttaataaatggaattgcatttaagaaataatttaaattgaaaaaggttttaaaaagtcttcttttggctttgggccaaaagtcggcccaaaacctctctctctctcctcggcccagccggcccagtccgccgcagccgcgcgcgccctcactgtcgctgacaggtgggtcccgcctgtcaggttcgtcttccccgagccgccgtcgcccggccgaaccctagcgcgccgccgccgccgttcccttccaaattcggccgctcctttccttctccggccgaatcaaaagaggggaaatgatccttgagatctcctctaccttttctcctttggaaacttcggctaaatcggtttggaaatcgatggattcgagttcgaatcggatcggcttttctctctccgagctcgagctttcgttctcgtcgccggccgccgtgggccttcgccgccgcctcctagcccctttaaaaggacccccggtgtctcctctacccgccgccaccctcgccttcgcctctcgtcgtcggaaacgctctagcgccgtgtgccctaacgccgccgtcgtcgccgtcgctccagccgtgcgccgccgtcgctccagccgtcgctgtcgctcgggaagaccgtcgtcgtggtcgccaagtcatcgccgtcctcgtccgccccttcgctgtcgccgaagatcgccggagcaccatcgccgccgtcgacccgaagaccgccgccgtttcttcgtcgtcgccgtcgccgtccgttgatcttccgccgctcttttggtcaccggtgagttcgccgcgtcgcgctctacccgttggtggcctccgttcgtgccgaagcgccgccgttcgccggcgagcgtgcgccgtccgagccgccgagccgccgccgccggtggtgacgtcaccgctgacgtcatcgtggccgtctgccgtgagccgccgtggacccgatcgatctcggccgtccgttttggatgggttgatctcggccgtccgttcgcgtgaaccgtcgcccgtgcgcccggtccaccgaaaccctagcccgctgacgcaataaatcccttttttccttttcaaaaataattcattattgcgtcataattcaattaaaatcaatttaagtgttttaatccgattaaatcttcaaaaattcataactaattcatcttagctccgatttagttggttcaagtctctaaatttttctaaaattgagatctacatattaaaaatatccacatgtactgttcatgcttgtttatgtgctgttttggtgattttgcttctttctgcttagattccgtcgtttccggagagtccgttttcgtcggagaagagtttgaagagttccaaggccagcaaggcaagtcacacagatcccaaacaaccctttgagcatgttgatcctatttaaagctattgtttctattcaactattgcatttattttcgaatgtcattgggcggaattaacctattgtttgttatagcccttttggttcttgtttaccttattccttgataccttgggttgttataacttgactagttgagctttatttattggttcaactagatattagatataattgcttagccctccttagaaacattagcacactattgggataacttatgactcactgttatttaatgatggcttaatgataattcacgatggtcaatcgtgattggttaattaattaatgtgccaactaaaacctgataatggtgggttgtgagcacatggttttgatggtcgtgctcatgacaattaaggaccggttcacgagtttcggttgtgaaacattaaccgtgccagccacacgccagcatgggcaacggctttaccttttgtatagcatggttcattgcggggcaccagactgagaagtggcagagataagcccacgggggtcgctggggagtccatgccttgattataagggggtgattatgatccaggaaaggtgcgctgtaatggattgtgttatgcaaggggtattgtcacaactcctttccgaggtaccgtggtggtattgaggcacatggtgacatgatgtggggttgtgtcttgtgggtacagtggtacacctctgatcagagtaaaactattcgaatagccgtgcccgtggttatgggcgggtctaacaatgtctttcgtgattagtctcacccttctcaccataatagaagatgctataactggtaataatttgattagctcctggtttggaatggtatattcctggtttggagatagaactgtgcagccgggatggttgttcaaaatggttgggcctatacaacagggtatgttgtatagcgttggattaatattgtttaattacttaactgttttattaaattctcaaatgtttgctaaatgctgcttttgcaaatgagccctatactatgccatcctttgttatcctgtgcacttgcatatttgctgcgtggcttgctgagtatgtcatatactcaccttgcaatcattcatcagaggaagagttctacagtgaagctgatggtgtggaggattaggtgtagccttggtcaagctgcccgtggagtggagccgtctgcgccgtttatcttattttccgctgcttagatctttattgaatgagaggaactatctacctctgtaatgacatttgattcgcttattaattagagtaataattgtactctattatcaatttgttattgtgtgcctcggctgattcctggacgagggttcacacacatgtaagcgtttggaattttggatagaaattccgggcgtgacaagttggtatcagagctcccttgaccctaggttatgccaaatggttacccatagaagccctctaaaaagattggaaaagtagaactgttctcctccctttctcttctaattaaaccaaactaatggcacatgcctttcataatctcttttaatggttctcactcaaaatttattccagtgttattagtactgtacatctattactgtactaatggctcatttaccagcaaaagttttacaatgttgttttatttaatcttgctgcaataaaataaatttagcatgatgattttataactttcttttatttcttttgaaacctgttgttcaaaagtacaaaaattgtaactttgtttccaactgtttcaacttatcttgcaagtttggtttactttatttacttaccttttactttgatttcctaactttattcaaattaatccaaaaacttgtgctattaattggataaatgtcttaactccctcctttcacttgtctttagatgccgcgctacaagcctgagtacttgtttggtgttgagtgttttgtccaggagttgtgtacgatgtcctttgtcattggatttgggactgcccctttttatgcccagattcctcatgatcgtcacgaagagaagtgccgagtcaaagtcaccttgaacagtaatagtgaagatatcccctcagtaatgttcgaagctggaggaagaaactacatccatgcatgtcaggaggtggcaaggatcgccataggagagctccgcgatcattatagtgatcagttggccgacactgagtatcgctaccatcctcgtcaaccccagggaagtgaccgtggcagttaccttgagactgaaggaattgagaatgatgctaccacaaggcatttggttgagatgctgtgggctatggatgaaagtcgtgcggagactgtgttagcggctcaagatcgtgaagaccggaatcgtggtaagatttgcaagttagaagacaaggtggatcgtttggagaaggaactagccacattgaagggagaagcaccaccgcagaaggccaggattcgtcttaccgcaaggaagagagctctatttgtccctcgctatcaattggcgccaaaggttcgtgtggtggagaaagaagttaccccagccttagcagatcctccggtcatcatcataagtgatgatgaagaagaagaatccaagcgcaaccattccaagattgagtgggtagctacccaagatgatgaagacgagccgaacgaaccttcaatcgacctccgatgctcggaagaactagagtgacttgttaagtcgttgtcttagatcgttgtgttagtttgcttgttttaagtttggttgtgtgtgcctcgcatgtgatttacatcagtggtgggatgtaagtgcatgtgtttgtttgcttttgagtgttaggaagttggtgagtttagtggtgtaagagtcttcagttttgtaataatgaaactcacttaagatcaataaaagttaaagtaattctctgtcctaagtagtttcccccggtttctcttcttgtgccctgtccatgccagatggtgaacactcgcagcaacgggaatggccccaacaaccccaataacaacaacaatggagagaatcccacacttacccaagttcttgttcaacagactcagttaatgaacatgatgatgcagcaactccagaatcagcaaaaccaaggaaataaccatgcacctccccagaacaagttagcagaatttcttcgtgtgaggccgcctattttctctagtaccactaatcctgttgaagctggcgattggctgcatgccatagagaagaagttggatttgcttcagtgcactgatcaggagaaggtctcatttgcatcacatcagttgcatggcccagcctctgaatggtgggatcacttccgccttaacaggactactgctgaacctatcacttggcttgaattcaccgctgctttccggaagacgcatataccatcgggagtggtgtctctcaagaagaaggaattcagatcgctcacccagggatctcgctctgttacggagtatttgcacgagttcaatcgtttggctcgttatgctccggaagatgtgcgcaatgatgaagagcgtcaggagaagttcttggaaggacttaatgatgagctttcttacccactcatgactggggattatcatgatttccagaagttagtggataaggctattcgtctggaagacaagtacaaccgcatggagcagaagaaacgccggattgctcaattcaagacacaacaggggaataatcagaagccgcgtcttactttaggaccccagaccatgccacatggaggttcttcatctgttgttcgtccgcagcgtcagttcttcaacaacaatgctggcaataacatccgtaatcaagctccacgccctgttgcagctccaacacagcaacaacctgccaagagggagcaaggcagcaagcccgtggtgtgtttcaactgtggagacccaggacattatgctgacaagtgtccgaagccctgacgcgtgaaggttgtccctgcccagaataactctgctgtaccagcatcaaaggcccgtgtcaatcatgtcgctgctgcagaagctcaagatgctccagatgtgattttgggtacgtttcttgttaactcagttcctgcaacagtgcttttcgattctggtgctacgcattcattcttatctatgagttttgcgggaaatcatgggatggaagtagaagatcttagacgtcctttgatggttagtaccccaagtaatcaagcactctctttgcaacgtagcccctctgtcagaatagaaattcaaggcgtaccatttctggccaatcttatcctgttagaatccaaagaccttgatgtcatcctagggatggactggttagccagacataaaggtgtgatagactgtgccaacagaaaagtaactctcaccagcaatgatggtcgagttgtaactgttcatgcattgtcttctgagtctttaaggtcaagactgaacccaataactttggaagagattcctatagtccgggagtatcccgatgtgttcccagataatttacctggtatgccgcctaaaagagatatagagttcagaatagatttggtacctggaacaactccgatccataagagaccttatagaatggcagccaatgagttggcagaagtcaagaggcaagtagatgatttgcttcagaaaggatacatcagaccgagttcatcaccatggggagctccggttatttttgtggaaaagaaagatcatacccagaggatgtgtgtggactatcgtgcattaaatgatgtgactatcaagaataagtacccgctacccagaattgatgatttgtttgatcagcttaaaggtgctactgttttctccaagatagatcttcgatcagggtatcaccagttaagaatcaaagaggaagatatacctaagacagcttttaccactaggtatgggttgttcgaatgtattgttatgtcttttggacttaccaatgcccctgctttcttcatgaacttgatgaataaggtgtttatggaatacctagacaagttcgtggtggtctttattgatgatattcttatctactctcgaaccaaagaagagcatgaagaacatcttcgccttgcattggagaagctacgagaacatgaactatatgctaagtttagcaagtgtgaattctggttgtctgaagtgaagttccttggtcacgtcatttcagccggtggagttgccgtcgatcctagtaatgtggaatccgtaaccaactggaaacaaccgaagacagtttcagagatccgcagtttcctaggcctcgcaggatattatcggaggtttatagagaatttttccaagattgctaagcctatgacacgactgcttcagaaagatgtgaggtacaagtggtcggaagaatgtgagcagagttttcaagagttgaagaatcgcttgatatcagctcctattttgattttgcctgatccaaagaagggtttccaggtgtattgtgatgcatccaaacttgggttaggttgtgtactgatgcaagatgggaaggtggttgcctatgcatctcgtcagttacgtccgtatgagaagaactaccctactcatgatcttgagttacctgcagtagttcatgcgttgaagatttggcgtcattatctcttcggtactcgtacagagatgtacaccgatcacaagagtttaaagtatatctttactcagccggatctgaacatgagacaaaggagatggttggaattaattaaggattatgacataggaattcattatcacccaggaagggctaatgttgtagcagacgctcttagcaggaaaggctattgcaatgctacggaaggacgacaattgccattagaattatgcaaggaatttgaaagattaaatttgggaattgtcagtagaggtttcgttgcagccttagaagcgaagcccactctaattgatcaagttagagaagcccaaattaatgatcctgatattcaagaaatcaagaagaatatgagaagaggaaaagctatcggtttcttggaggatgagcaaggaactgtatggttgggtgagagaatctgtgttcccgacaacaaagatttaaaagatgcaattctgaaagaagctcatgatactttatactccattcaccctggtagtaccaagatgtaccaagatctcaaggaaagattttggtgggcaagtatgaagcgtgaaatcgcagaatacgtagcagtatgtgatgtttgtcagcgagtcaaggcagaacatcagaaacccgcaggtttgctgcagcctttgaagattcctgaatggaagtgggaagaaatcggtatggattttatcactggtttacccagaacgtcatcaggccatgactctatttgggtaatagtcgatagacttaccaaagtggcacatttcattccggtaaagacaacttattccggaagtcgcttagcggaattgtatatggcaaggattgtgtgtttgcatggcgttcctaagaaaatagtgtctgatcgaggcagtcagtttacttcaaatttttggaagaaacttcaggaagagatgggttctaagctgaactttagtactgcttaccatccgcagacagacggacaaaccgaaagggtgaatcagattttggaagacatgttgagagcttgtgctttagatttcggtggaagttgggataagaatctaccctatgcagaattttcgtacaacaacagttatcaagctagtcttcagatggctccttacgaagcactgtatggtcggaagtgccgcactccgcttttgtgggatcaaacgggagaacgtcaggtttttgggacggatatcctaagggaagcagaagaaaaggtgaaaatcattcaagaaagattgcgtgtggcccagtctcgtcataagagttatgccgacaatcgccgcagagatttgagttttgaagaaggagattatgtgtatcttcgtgtcacgccttgtcacatcctgattttcgtttcaggatttataaattatttaataaattaataatagaatttatattaagtgttctttaatttacaagtgaagttaaatgtgggaaataaaatttcctaaatataaagcatggatggatttaatttttgttaaattctccatggttaattatactctctgaaattttctcggatttttcagagctcaattcctaaatgatacaaagaacagttcagtaattatttgatcattaatgatctaattatttttgttaagtgcttttcttgtttaaaatccttaaattataaattgttgtttaaaaggaataattagaaatgattttaaaagcctggaagagaagatctaattttaatttgctaaatctcaatataaaattgggctagataaaattttgttaaatactttgcttaattctataattcctagatttttctgggattatttgagctaaggaagtatttttaataaatggaattgccatttcatgaataattttaattgaaaaaggaattaaaagtctttttttggctttgggccgaaaaccggccccaaaccc

SEQ ID NO: 21710 - DNA, 6897 bp, Oryza sativa
ttcctggtttggagattagatctgtacagccgggtatggttgttcaggatggtcgggcctgtgcagcatgggtgtgtgttcagtgttgattaaaatttctgataaactactctactgttttatttctcttaaatattttgctaaacgctgcttttgcaaatgagcctatattatgccatcctttggtatccttgtgcacttgcatatttgctgtgtggcttgctgagtatgtcatatgctcaccttgcaataatcaatcaaccttagttgaagaaaaaggatccagaaggagaagacgtttggcttataccccagttgagctgcctgtgggagtggagccggagcttcgctagattttattttccgctgcagttttcttcatggtgaggactaagtgcctcttaagtaagtatttatcgttgtaattaatttgatgaatctgtatattaaattgtcagtttgtgtacctcggctgattcctggacgaggattttatgcacaaataagttcggaaattactagtgaaatttcgggcgtgacaagttggtatcagagccatctcgactgtaggataagccaaatggtcaaaccttaaggactatttttccgacaaaaaggatttgtgaaaatttctcctttcttccttatctagaattctttgcaaattgtttcattgtctactctcctctctcgttcaacttgagtagttctaaaactagttgtggaaactagaagacattgatgtggtcaacttatggaggtcagtcaagtggatcgaggaaggaccgaagtgccaagtggtcaagatggaatgaagtttgcatcctaccttagaacctatgccgccaaactatccttgaagaatagtcagtaggatagaacgtttgttgcttgcttgtgtgtaggtatggttgcattcccgtcattggtgtggttcaatgatgagtgtgtaactatactaggttgcttgcttaatcaacttaaacaatataatggtctacacacatcagatcagtgttaacctagttaaggtcttgtctttagtgtaacccctctccttctatcttctctaatttgcaatagatggtgaacactcgcgccagtggaagtggaaacaataacaatgaagggaacccaactcttgctcaagttctggctcaacagactcagttaatgaacatgatgatacagcagatgcagaaccagctcaaccaatggaacaacaatgctccaccgccgcagaacaagttagctgattttcttcgtgtgaggccacctaccttttctagcactaccaacccagtggaagcaggcgattggctacacgctattgagaagaagttggaactgctccagtgcacggatcaggagaaagttgttttcgcttcacatcagttgcaaggacctgcatcagaatggtgggatcatttccgaatgaacagagcagaaggacaaccaatcacttgggcggacttcacggaagcattcaagaagacacacatacctacaggagttgtttctttgaagaagcgtgagttcagggcattgaagcaaaaggatcaaaccgtggcagagtatcttcatgagttcaatcgtctggcacgttatgctccagaagatgtgcgtactgacgaggaaaggcaggagaagttcttggaaggtttaaaggatgaactgtcagttacgttgatctctcatgactatgctgattttcagcagttggttgacaaagcaattcgacttgaagacaagaagaacaggatggataaccgtaaaaggaaaatgactgttttccaggaggcacaaggtagtagccagaggcagcgtatcaagcaactccaaattggtgaatcttcttctgctggtcaaggacagtcgcaacagttgaatatcggtggtgagatcaaaacagagactaatgaaagcaatgaagttaacatcgagcaagctaatcagctggtgccagttcagcaggatcagtctcaagagaataacagtagtggacgggagcagcaggtatgtttcaactgttacaagccaggccactttgcaagagagtgtccgaagccgaagcatcagcggccgcaaggtcaggtcaacaacatgtcgtgtgctgagattcctgcgaccagagataaccatgtttcatatcaatcaagatgattgctaaccatgtctaccacgcggacaagattgctaacaacattgtcgtcacaggagccaatgcagtgccagttgcgtcttcaagagttgtgtcttcaagtgttacaactcagccaccagtttcaaagcagcagtagttttctttaaagccttagaatgattatcggagttatggaataagatagactgcagtttgcctattccctttttctttctagctgttccgaatctcgggacgagattctttgtaaggggggtagtttgtcacatcctgattttcgtttcaggatttataaattatttaataaattaatagtagaatttatattaagtgttctttaatttacaagtgaagttaaatgtgggaaataaaatatcctaaatataaagcatggatggatttaatttttgttaaattctccatggttaattatactctctgaaattttctcggatttttcagagctcaattcctaaatgatacaaagaacagttcagtaattatttgatcattaatgatctaattatttttgttaagtgcttttcttgtttaaaatccttaaattataaattgttgtttaaaaggaataattagaaatgattttaaaagcctggaagagaagatctaattttaatttgctaaatctcaatataaaattgggctagataaaattttgttaaatactttgcttaattctataattcttagatttttctgggatttatttgagctaaggaagtatttttaataaatggaattgcatttcatgaataatttaaattgaaaaaggttttaaaagtcttcttttggctttgggccgaaagccggcccaaaacctctctttctctctccctccccggcccagtcggcccagtcggcccagtccgccgagccgctgctctcctctctctctcagccgctgacaggtgggccccacttgtcagggtcgtcgtcttcgtcgcgccgctgccgcccgaaacactagccgagccactccgccgccgctttccaattcggccgcgtctttccttctccggtcgaattgatagaggggaaatgatcctcgggatctcctctaccttttctcttttggaaacatcggctaatttgttttggaagttcgtggaatcgagttcgattcggatcggcctctttcctccgaaccccgaagtttccatctcgtcgccggccgccgtgggcctttgccgccgcctcctagtcgctttaaaaggctccccggtgtctcctctacccgtcgccaccttcgccttcgcctctcgtcgtccgtagcgccctagcgccatgagacctagcgccgccgtcgccgctgtcgctccagccgtgcgccgccgccgtttcagccgtcgtcgttgctcgggaaggtcgtcatcgtggtcgtcaagtcgccgccgtcctcgtccgctccttcgccgccgccgaagaccgccggagccccgtcgccgccgttgacccgatctccgccgccgcttcttcctcatcgccggcgccgtccgttgcccttccgccgttgttttggtcaccggtgagttcgccgcgtcgccctctacccgttggtgccctccgttcgcgtcgccgcgccgtcgttcgccggcgagcatgcgcgcccgagtcgccgccggtggtgacgtcatcgctgacgtcatcgtccccgtctcccgtgagccggtcgtggaccgatcgatctcggccgtccgttttggatagggttgatctcggccgttcgtttccgtgaaccgttgccgtgcacccggtccaccgcaaaccctagccgctgacgcaataatcctccttttccttttcaaaaataattcattattgcgtcataattcaattaaaatccatataagtgttttaatccgatttaatctttaaaaattcatagctaattcatttgaactcagttttttgtggttcaagttgcaaaagttatataaaataaagatctacatattaaaattgtccataaattgaattaaatttatttaattctttttaaatgggctttaaatagatttaatcttgtaaaattcataataaattcatatgaagtcagaatgaggccgttcaagtctcataattcatctaaaattatgatctacatgtttgtttactttttatgtattgtttatttggtttttattagtcttttccttgttttgcgtgttagcttatcgtttccgtcgttgtgaaggttcgcgagtgcgtcggaagtgttcaagaagattaattgaagaccgattattgcaaggcaagtcacacagatcctaaacacaatcctttgagcatgttgatcctatatttaaattctatatttatttcaactgtgtatttattttcgaatgtcactgggtggtgtgaacttattcctttgttatggccaatttgcattgattattttattccttgataccttgggttattataacttgactagttgagctatatatattggatcagctagatattagatatgattgcttacccatgcttagaaacattagcacacaattgggataactaatgtttcactatcacttatggttatatttaatggtagctcacgatggtcaatcgtgattggttaattaattacttgccaactaaaacttgataatggtgggttgtgagcacatggttttgagagtcgtgctcatgacaattaaggaccggttcacgagctactattgtgaaacattaaccgtgccaaccacaagccagcgtgggcaacggctttatcttttgtataacatgattcattgcggagcaccagactgagaagtggcggagataagcccacgggggtcgctggggagtccatgccttgttttataagggggtgattatgatccaggaatggtgcactgtggtgagttgtgttgtgcaaagggtattgtcacagcctctattcgggtactttccagtatcgcgacacatggtagacatgatgttgaggccgtgtcttgtgggtacagtggtacacctctggccagagtaaaactattcgaatagccgtgcccgcggttatgggcgagttgagcaatgtttttcgtgattagtctcacacctctcacaataattatggatgttataactggtaataatttgcttagctcctggtttggaatggaaaattcctggtttggagattagatctgtacagccgggtatggttgttcaggatggtcgggcctgtgcagcatgggtgtgctgttcagtgttgattaaaatttctgattaactactctactgttttatttctcttaaatattttgctaaacgctgcttttgcaaatgagcctatattatgccatcctttggtatccttgtgcacttgcatatttgctgtgtggcttgctgagtatgtcatatgctcaccttgcaataatcaatcaacctcagttgaagaaaaaggatccagaaggagaagacgtttggcttataccccagttgagctgcctgtgggagtggagccggagcttcgctagattttattttccgctgcagttttcttcatggtgaggactaagtgcctcttaagtaagtatttatcattgtaattaatttgatgaatctgtatattaaattgtcagtttgtgtacctcggctgattcctggacgaggattttatgcacaaataagttcggaaattactagtgaaattccgggcgtgacacgcctcttcgaggagttcatcgttttcacaccaaaggaaaattggcaccgcgttttgtgggaccttataagattgtcagtagaagaggagaggttgcttatcagttggagttacctcaatctttggcaggagtccataatgtgttccatgtgtcgcaattgaagaagtgtttaagggtacctaccgaagaagctaatcttgaacagatagaagtccaagaggatctgacctatgttgagaaaccaatccgtattttggaaatagatgagagaagaaccagaaatcgagttatccgtttttgcaaagtccagtggagtaatcactcggaagaagaatcaacttgggaacgagaagatgaattgaagtcagctcatccgcatctgttcgccagttcttccgaatctcaaggacgagattctgtttaaggggggtaggtttgtcacaccctaaaaattcaaaatatataaattgttgtttaaatggaatttttagaaataattttaaaagtcttgaagataagatctaatttttaattaataaattccaatataaaatggggccagataaaatttcattaaatactttgcttaattctataattcctagatttttctgggatttatttgagctaaggaagtatttttaataaatggaattgcatttaagaaataatttaaattgaaaaaggttttaaaaagtcttcttttggctttgggccgaaagtcggcccaaaacccctctctctctctcctcggcccaaccggcccagtccgccgcagccgcgcgcgccctcgctgtcgctgacaggtgggtcccgcctgtcaggttcgtcttccccgagccgccgtcgcccggccgaaccctagctcgccgccgccgccgttcccttccaaattcggccgctcctttccttctccggccgaatcaaaagaggggaaatgatcctcgagatctcctctaccttttctgctttggaaacttcggctaaatcggtttgggaatcgatggattcgagttcgaatcggatcggcttttcttt

SEQ ID NO: 21711 - DNA, 5339 bp, Oryza sativa
ggtacacctctgatcagagtaaaactattcgaatagccgtgcccgcggttatgggcgggtctaacaatgtctttcgtgattagtctcacccttctcaccataatagaagatgctataactggtaataatttgattagctcctggtttggaatggtatattcctggtttggagatagaactgtgcagccgggatggttgttcagaatggttgggcctatacaacagggtatgttgtatagcgttggattaatattgtttaattacttaactgttttattaaattctcaaatgtttgctaaatgctgcttttgcaaatgagccctatactatgccatcctttgttatcctgtgcacttgcatatttgctgcgtggcttgctgagtatgtcatatactcaccttgcaatgattcatcagaggaagagttctacagtgaagctgatggtgtggaggattaggtgtagccttggtcaagctgcctgtggagtggagccgtctgcgccatttatcttattttccattgcttagatctttattgaatgagaggaactatctacctctgtaatgacatttgattcgcttattaattagagtaataattgtactctattatcaatttgttattgtgtgcctcggctgattcctggaggagggttcacacacatgtaagcgtttggaattttggatagaaattccgggcgtgacaggtactgccaatgcgaggttatcgaaaagctttgccgtgacgcgtctcatgtgttgggacgaggctcatgtgttgggtagtcacggagtgcgggtaaattatacatccactgcagtgtgagtaaactaaatctattcgaatagccgtgctcgcggttattgagcaccgggacgtgtattacacttggctagactctgaattcttaacttgtatgggatgggttattgcatgatgatttttatgttgttggagccacttcctgagaggcgggaaggtggacgtcctcagaaaaccatgacgactcaatggcgggaatttatccttgagatcacaatggatggtggacagaaccgtcgttattcaaatgtgaacactggtactaaaatttgatcagtcagtgctaggtcttaggcttatgaaaagaattacaaaacttgctttgcgcaaaagaaccatagccatcctttgaaatacccctatcatgtgcattgttgctgtggtggcttgcggagtacggttggtactcagccttgcaatatataaacctaatcagaggccggagatgaagcttcggaggatccctacgcgtactaccaggagggtgatgaagacgacggcgcttagtaggtcttagttacggtcgttgcctgtggcaaaggcgtgccgctgccttaagtccgctgccttatctacttctgcttttggaatgtattccggaccgctcggttagatgatctaagactatgcctacgggcttatgatgtaataattcgcactagactctcgtatatgtgcatttggtatttcagctatgaactcgtgtgtagcagactacttgatccagggaaatggtaccgtttacacgattgattcctgttataaatacgggggtccacatttctacgatgagtttacaggagttgataggcggccttttccagtacatacaacaaataaattgtgccgaaaccttggagtaagccacttctatataatgtatctaccctatagttcaaacatgcactaacttatttttttattgattgacaggaatatatgggtgcaaagttcatggccgcacaccataaaattaagtctcaaaacacttcaatcagtactaaaggatggaccacttgaccgtgattgcttcaacatggccatacgcaagttcatgtatgaaaacatccggtcgcttcacaaaaccagctaagcaataacaaagcattgcctggacttacaattttgggtaagtttttataatctacccaatattgattcttttgctcatattttaaacaattattgtacatcatatagactgctactggatttggtataagtccaatgttccataaggatatagatcttgcggggtcggttggtagctggtcgaaaatccattatgaagttgcaaaatgcaaattggtaagctagctatcctttgttcttatttgaatgtgtttttttatattatcttgacggttgactttttccatattcttataccagtatgtgctgttggaagctatatcttggtcatactggaccaagaaagcagaacactttatctactagaccctaatccactaaatccaatgtatcagaacaacccaactatgagatataccaaaaaattgttaaacgttaccaactattacaacagagccatgcgtgtggcatgtcctggctctaggtggactgaggatatcgacttgtggggccatatatatgtcacaaatccggtggctaactcgtaagttttcttgtataatcttgtttgatccaataaattatttttgtctaacgcatggtgcctaactattcaaatttcataggaatttgtcgggttgtctcgtgcatctgttcatgcgatcctggaaagatggagcacttcatttgccgtcttttaaggtcattccgactagcattggcatttagaatattatattatattttataatacagtcatttattttataaacatatgcatttgctagtcgattaattcctgttataaatacgggggtccacagagttggtatcagagccatacgactgtaggaaaagaccaaaaggcgccccgccccttttctagttggccaagggggaaattcccatttagtaatacttttaaaaataaaaaaacgctatgtttacaaaactctatacgattttcatcttactcttaactattttcttcacaaaacaagttttactcttagctgactttgggtttttcttaaaattagatggcagatcaggattcacccactacctaggagatgggtgtaccccgctcagagggatacgtcattgagctacatcggttgatgaggcgcctacggtaccccagatttccgatctaccgagttcgacagtgtggacccgtttgggaggcctgggtcgaggttcatacacgagttccttcaaagtcagactacagctttccgacacgccatcgtcgcgacttaccggagaccgcgatgcagggtgcagcccgggaggccttcctccgacttagctctattcaccgagctgagttagtgagtaccgagtttgctcaccacccgtttcgagaggagagcaactccgtctgcacagttcaggacacaccttgctgctacaacccgatagtgactctactgtcccgatgggctgaggcagtagacgacttctacgaggaggctctgttagagatcgacgaccagcagaggcgtgtgggaaagttagagagtgaggtgactgacctcacagtacatcagcttcagctagaggaggagcaccaggctgggggcagtgagatagactcactgaaggcacagcttcaggtccacggtgaccagtttcagcagctatctgatcagtacaatgatcgccgcgggatgatggatacactcgaggagcactgagagagagttaggagcacgtcagccagcttgaggagcagcttcaagcagctatagtcagcaccacaggagcttctacttccacagcagtggggcgtgaccgctacttcttcctcacccggccgtacccaccagcgttccacgctcttctgggagaggttggtatgctggctactgagtcagcaccttacttggtggacccgacagtgacacagccacctgccccagagattgtgcacactccactgatccctactccgtcaccgcagctgggttccagtatgaagactccgatccaggtcgactccgagacagaggggactgacaccgagccagagatagagccggacatcactgatcctttagaggacgagactcctgtcccccgcatcacctttatcggaggccctcgcaccctcagcactgcccgcaagagcgcacgacccccgggcaagaagcccaagccaaatccagaggccactacttccgagccgtggggactcgggtttgcccgtgccagcgaccaccctctacctgccccaggatcctgcggatggttggatgactagactggaggtctattgcagcttcgatctcgcttcagatggtttttggatagcatgcgagacacacacccccgctacctagattgacgagtagcttgatgattagtttgatgtatcttttggatgaactttatttggactgcgtatatgtgcagtcgattgcatcatgatttatgtactatctgtggaactctgtgatgttatttatgatattattactgttgtgttatgaatgagtttattccaccatgcttgcaaaataaagttcacaatcaaaacaactcctttaacgagataaaaccaaaagggctagttaggaaaataggatacttacctcatcggcgtacacagatggcaagccgacgtagggcgtcaaccagcaatgaagaaactcaagcacccgacctaaacaccctggccggagtcatggctacccaaacccaacttctacaagccatcacaaataatcaaggcaaccgtggaggatcaagctttggagaattcatgaggactaagccacccacgttcgccacagctgaagaacctatggatgctgaggattggttaaggatcattgagaagaagctgacccttgttcgagtacgtgaagccgataaagtgatctttgtggcgaaccaattggaaggaccaaccggagactggtgggacacatataaagaagcccgagaagaagatgctggagaaccaaaccgggaggaattcactacagccttccatgacaacttcgtgcctgccgctgtgatgcgaatgaagaagaatgagttcaggagactacggcaaggaaataccaccatacaagagtacctgaaccgtttcactcagctggcgcgttacgcgactggagatcttgccgatgacgaggaaaagatcgacaaattcatcgaaggcctgaacgacgagttgcgtgggcccatgattggataggaccacgatagtttccagagtttaatcaataaggtcgttagattggaaaacgaccggaaggttgtggagcacaatcgcaaaaggaggcgtgccatgaaccgcccgcctcaggccgcaccccaatgtcctaaaggaacaacctcctcagtatggaaaccaacagtggtgacaaccaatcgtcctgccgcatttagcaatttccacaggccgggaacca

SEQ ID NO: 21712 - DNA, 2571 bp, Oryza sativa
tgtcacagcctgaattttcgttttaggctttataaattatctaataaattattaatagaatttatattaaatgttctttaatttacaagtgaagttcaatgtgggaaataaaatttcctaaatataaagcatggatggatttaatttttattaaattctccatgattaattacactctctgaaattttctcggatttttcagagctcaattcctaaatgatacaaagaacagttcagtaattagttaatcaattaatgatctaattataattattttaagtgcttttcttgtttaaaaatccttaatttataaattgttgtctaaaaggaattattagaaatgatcttaaaagcctagaagagaagatctaatttttaatttgttaaatctcaatataaaagtgggctagataaaatttcattaaatactttacttgattctatagttcctagatttttctgggatttatttgagcaaaggaagtatttttaatcaatggaatatcatttcatgaataatttaaatagaaaaaggtttttaaaatctttcttttggttttgggccgaaagtcagcccaagtctctctctctccctctcctcggcctgcttgcatctggcccagccggcccagtccgccacgcccctccctcctctctctcagccgctaacaggcgggacccacctgtcggggtcgtcgtcctcctcgagccgcccagctgtcacaccctaaaaattcaaaatatataaattgttgtttaaatggaatttttagaatttattttaaaaaaaatcctagaaaagaagatctaattttaattaataaattccaatataaaatggggccagataaaatttcattaaatactttgcttaattttataattcctagatttttctgggatttatttgagctaaggaagtatttttaataaatggaattgcatttaagaaataatttaaattgaaaaaggttttaaaaagtcttcttttggctttgggccgaaagtcggcccaaaacccttctctctctcctcggcccagccggcccagtccgcagccgcagccgcccgcgcgagcgcgctgtcgctgacaggtgggtcccacctgtcaggctcgtcgtctacctccggccgccgccgcccgaaaccctagtttcgcgccaccgacgttcctttccaaatccggccgcccctttccgtttccggccgaattgatagaggggaaatgatcctcgggatctcctctaccttttctcttttggaaacatcggctaattcgttttggaagttcgtggaatcgagttcgattcggatcggcctctttcctccgaaccccgaagtttccatctcgtcgccggccgccgtgggccttcgccgccgcctcctagcccctttataagcttccccggtgtctcctctacccgccgccacccttgctatcgcctctcgccatcggaaacgccctagcgccgtgagacctagcgccgccgtcgccgccgtcgctccagccgtgcgccgccgtcgctccagccgtcgccatcgctcgggaaggtcatcatcgtggtcgccgtcgcgtctccgtcctcgtccgtcccttcgccaccgccgaagatcgccggagcactgtcgccgtcgtcaagccgaagagcgccgccatttcttcttcgtcgccgtcaccatccgttcctcttccgccgtcgctttggtcgccggtgagttcgccgtgccgtccgctacccgttggtgccctccgttcgtgccgaagtgccgccgttcgccggcgagcatgcgcgcccgagccgccgagccgccgccgccggtggtgacgtcatcgccgacgtcatcgtccccgtctcccgtgagccagtcgttgaccgatcgatctcggccgtccgttcgtgtgaaccgccgccgtgcgcccggtccaccacaaaccctagcccgctgacgcaataatcctccttttccttttcaaaaataattcattattgcgtcataattcaattaaaatcaaaataagtgttttaatccgattaaatcttcaaaaattcataactaattcatcttagctccgatttagttggttcaagtctctaaatttttctaaaattgagatctacatattaaaaatatccacatgtactgttcatacttgtttatgtgctgttttggtgattttgctcttttctgcttagattccgtcgtttccggagagtccgttttcgccggagaagagtttgaagagttccaaggccagcaaggcaagtcacacagatctcaaacaaccctttgagcatgttgatcctatttaaagctattgtttctattcaactattgcatttatttttgaaatgtcattgggtggaattaacctattgtttgttatagccctttttgatcttgattacttttgtcgcgtcccaaaacgactttaaaatacatcctcgaaattgtgcatagaataattaaaatccttgtgaaagcctcaacaattaaaaagtgcaaatttaaaagtcaaaacacgcttggcggaattttgtatatttcctaaaaagcctaaaatgcgtaaat

SEQ ID NO: 21713 - DNA, 7801 bp, Oryza sativa
cctttttccatattcttataccagtatgtgctgacggaagctatatcttggtcatactggaccaagaaagcagaacactttatctactagaccctaatccactaaatccaatgtatgagaacaacccaacatgacatataccaaaaaattgtaaacgttaccaactatttcaacggagccatgcgtgtggcatgtcctggctctaggtggactgaagatatcgacttgtggggccatatgtatgtcacaaatccggtggctaactcgtaagttttcttgtataatcttgtttgatcttataaattatttttgtctaacgcatggtgcctaactattcaaatttcataggaatttgtcgggttgtctcgtacatctgttcatgcgatcctggaaagatggagcacttcatttgccgtcttttaaggtcattccgactagcattggcatttagaatattatattttattttataatacagtcatttattttataaacatatgcatttgcaggatgttgatgagctaaggaaacaatttttgctacatatactgatgtatgagcaaaatgagtgcacaagcaacattcctagcggcgcacgagattttcttcactgtatcgcaaatgcaaaacattagaatagttattctttacctatggggtgtattttatacataacaaatgctttatttaaataatggaataactctacacttctctaacatatttttctgcccgcaacaaataatggaataactctatacttctctaacatatttttatgcgtatattgccttttatattgtgtagtgtgtacatagggtatattatatataattaagtcttgtaaagttttactgtgcccacgtaatatcatagtactgcaccttacatgaaatatattaaatgtactatatgatttaattaaagttcaaatgcacagatcatataaaaatattttttggtaacgtgaaatttttttaaagatacagttaaatataattgcaccgtagcgtttagcacgggcatattactagtactattggctgaactaattctaagtgccatacacatgatcctaaaaatggatatcatgcacttgggaaagtttctcattttgattcactgggtccatatacatgtatctatgattgaactcattctaattgccatacacttgggaaagtttctcattttgattaatgggatccatctacatgtatctattactgaactcattctaattgccattagagccattagacgtgatgtcgttatcacagagtattgtagacattaacatatgagcaatgcaggctgaagagacgatggtctgggacagacttgcttgtgaataatcccaaattcgctggagcaattgagcaagccataagaaacacatttacaacgtcgacaggaatcatctgtcaaccgcacgaggggcaactatttgattcgccggcagaagcctatcaattttacaacttgcatgcttgggagtcagggttaagtattcgtttagggcaaagccggaagatcgatccaatggagtgctatacatgcagggagtttgaatgccagctatctgtcggtgaacacaaatcattaagcataatagttttgtctttttttttatcgcgaatcctttcatggaatatgttcgtgttctgcataaaaaggtcaattaggcctagaggggagggggggtgaataggctaatttaaaaacttaagtaaagcggaagcagtaattttcagaactaggctgggaattttcggaacttccgaaaggattttcggaacttccgaaaatgcacagagcagcgcacacaaaaagaaatatctagatctagaagtctaccacatgtaatcaaaggcacatacaacaactagaccaatagcggcacatgcaagcaaagttagaggagagggatgaagagatatcaccaaggtgaagcttgcaaacttgttcccggagttcaaatccttgaggggattctactctccgttgaggagctcactaagagccaggtcttagctaatcctttcctcgagaggttacgctaagcactcctcctaccactaagaggtatctcttccctagcttgcggaggcgagatccggccttcataatcttctcccggctaaccacaagtagatcggtggctcgggagtgacacctggccgtctaggagtcctcaacctccaagagtaaaagatgatgcaaagaattcccggagatgatgcaagtgctcacaaatcttcacaaagaccacaagaagcacccacacaaactcgaatccacactctcacacacaccaaatccgaatcaaacacgggtggagagatgaatcgaggaagcaaggctcaaatgaactagagagagagcaagccaagggcacaaataattggaatgaaactagcagccctcacaagtgaggggaggtgggtatttatacccacagcacaaatctgcccgttggagtgcaataaaagtaattttcggaacttcggaaacaattttcggaacttccgaaaattccagatctgagaaataatcaaagtcaacgcacttttcggaacttccaaaaaacgttttcgcaacttccgaaaatttccagaacgcttatgtgtattttcggaactttcgaaaatcattttcggaacttccgagaatttccagagagctatcaaacggttctgtgtattttcggagcttctgaaaatttccagaacgctccaaaagagaaatgctttgaagaaaaattgattttgagcacacgcatcactccttgtatgtctatgcatcatcccccttaatagtacggctttcctacgacacaatgcgaggaaaaagatacaatataccatttgatcattgccgcattgcatcgcgatgtcgcattcacaggatatgcattgtattacaacacgttgaggacttaacaaccttcacatttgcttgaataaaaatgttagtcctctctaatcgcattgtaatcaattatcaaaatcattagggacctagatgcactttcaatctccccatttttggtgattgatgacaattcgattaaatcacaagagagaatgataataatagatgattttggtgcaaatgtttagtgaaatctccccctaagagtgtgcataaaagcaagtggagagctccccctaaatctttgcatccacattgaaactcacaaaagaacaagtatcatcacaatatatgcatgaaggatcatttcatcatatcaaaatcgcatctcaaacaaaataatcatttcatctcaacaccatcacaacatagagagaatagaccattgcaacaaatacatcatcatctcatcacaaccacaatatagaataaatgagacatgacatcacatttaaacataagacacaataatattgaaacaacccggaattttaagctatttaaaaaaataaaaattatgtgacatatatcattaattaatcagttaactagcaaaattgttggaaacaagaataagccactcaaaatttataacattcgcatccgttgaagtaaaacaaataaataatgtccaatataccaccacaatatactaataataataacatggaaatattatacgaacaaacatcactataaacagtcatcatgtatacataaacttacactaataatacaatacatcatatatttgaatatacggttgcacaggacatacatagcttgaccccttttatgcacaaaaggtaatatgtaaataaatgttgccgtcagacccatacacaaagtggtgtatattcaaccgttcactgagatacctagatcacctagatcagctaataccgtctggcacccctcacttaagtcgggttcgtcatccggctaattaacacaaagaagccgcacatctcatataaagaattaatctcaccaaagggacctcaattcaccagcagtattaattatccaccaatcacatagctccacataggaagcttcacacaagaccacaaagatagtagcacaactccatccactttggtcaagactctatctcaccttggtcaagcactcaaagcatgaccacagccatggcagcagatgcatgcatatgagctccaaccaattagtgaggagtgagcagcccaggagaggaggaggagagaagtagggagtgaggagcaaacaaatcagtgaaatgcaagattgcgccccatccattgcaagcaccaaatcttgaatcccctataattagtagccaaatagttcttggccaaatactcataccatcactatgtcggctaggaagaggagaagagaaatcagcaaggagggaatgtgatttacccaaggaagaggaaaggccaatgcatcggcgaggatgaacacgggagcacagccatggacgaacttgtcacctaggcaaaggtgaatccctcaatacttggctttcctttttttttagcacctagcaaccaagcatctgttccccctacacctgcaaatcaccattagagccatcactaaattgcacccatcactgcacaagtgctacagccagagagatgagagaaggggagagagagagggagggagagagagagagcacccacagccgcagccgtagctgcagcaaccaccaccgccacagcagtagccgcagcagagctgatccacactagcaatggtagatcggtagccatggcttggatgatttagctgggaaagggagaagtgccttaggaacagcagcaaggaagaagaagaagaggaattactgctgctgctgccttatctgttcgaggaaggagagattagagaaggaaaggggattaattgctggatgtacactactaggctacacaagatattaaattgaacctacgcattacctattactacacattatctggaagaaagtttgcacattaaaataaactctacagagcacattttattggtagatcatttgtatccctagtatttaaatttatcaaaacctcaacgtatatatataatataatgcaggaatgagtagaatgataattgggtcaatcggcagtgctacataatttcgattcaactacagaaactcaggcaagtctctcctttgatcatgttgatagatgataattctatttcaacttaaaaatctatttcataaaaatatttctcctagtattgcatccaaatatattttctagaataatgagattaactatgatgatatgattgacaaactgatgatgatggagatcattgggatactagtatggtgggtatggggagctcagggatgagatgattgatgatgagggcaggacagggctctccctacatacggtgtataaatataaggactaatcatcccctcactcgtatcaaagaaccgtatataccgtgtcgaccatatatccgtcttaagacgggctggacctagtaccttatcaagtttattatactccacatgggtacgtagtagtaggatgggagatgatataaaccccaggaatgccgatgaagtgcattccaggcctcatatagtagcgcggtggtgtggagagctgataggctcaacacaaacgtggagtatagtaaattgaagtagggaaaaagttttgtactcttagcgtggtgccgcatctagtgaagtgcgacagtcaaacgtgttaagactagctatgggtacagtgatacaagcctgcgcagtgctaaattaaatcgtgattcacgcctgtctcctggattggaggctacggggagttgttacaaactctattcaatgttacgagtgtactctagcttttataaatctccttttgaaaactcttttagaaaatagaaatatactttacttttgatgacaatgaaggtgatgatgttacgtaaggtatagtattatagtatatagatttatatattattattcatgcatatacattttattactaatgacttgctgagtacgaaagtgctcacccttgctatataacccctttgtacaggtttgatcccttgcaagagtgagctggattagagatggccttaatactcctagggacgaattaaaggtagctctaactattcctctgttgcgatctctgatggtggattattatttggcaaaataatggttgttaaataataatctacagtctggcacttttatcttcattgttaaaagtgtggggcgtcacaaatatccattacatcccatcatccataattaaacaataatgtcttacaaagcattaaactaacttaagaaacacacatgtctcatacaaataaaaagtcactaatgttcgaccaacataagggatagagatgatagatagtctccccctttggcatcaagacaccaaaaagagaggacgaagagacaaagactcaagcaaggggcgcctgaggaggatcctctggaggaggttgtgggggatagccatagccatggccataacaaaagaaatcaaagtcaggaagcaccccagcaaatggatcctctagctcttcctcctcgggctcatcgggctcggcctcgaaacccggaggggaaggagggatatcaatgtggtggtcctcatgataccgcgccttgaggtacttgacgtcactagccgttttcttcaccaaattccgtaatcggcggttctttttagcctccgcggagcaaagactaaaaatagtccgcaaaatgcggaataagggagacggctcatgacgagccatagaggaaggacgctcagaagcagaaggcggctgagaggatgtggaggggatgtcccgaggcacagacctgtgcttgggcaagcgcaaggaaagagcggtatgtggttcctcgcacacaaactgaaggtgagtgacatgttcaatcatccgaattatatgaggagcatagggaagccttctcttaaactgaagagaagccatgcggatttcctgccaaacaaatagaaagacatgaaagggacggcaggggggattgaacctgaggagcatagagcgggagaaatggttgatgttgctagcatcaccatcctttggagtcatggtccgcctgaggatgtggttgagatagatatgataaggcttgagcccttcagtagtccccaacttgccgccaggaagatacagagggtgcaagtcatgattgtgaggaatcacaatgtcatgcaagtgggtcatgtaccgcatccagttctcatcaaaaccccacagattggcaagctggtcataagagatagaataccacgagccctgagtcatccaatgaatgtcacgatcaccattaaaatagactatggcatagaattgagcaatgatctccttgcaccaagcctgctgaagggtcgtgaaattgcgaacccccatctcctcacaagcgccaatgacggcattgaggtcaggatcatccagggtcgccaaagcctcccaatctatccattgcatgggcagtgtaggattggaaggaggcaaaatgacagtttcataaaagtcttgctgaaaagaggtccagtacctgtcatcagaggcaatgcgcggcatgcaacgaggatcctgattccgctccacagccacaatgtcagacttttggtgccagtcacgaacaggtcggtgaggattgcgcgagggagcatgaagcatgagggggccgatgagccccgccggaggaggcgcagtggtgtgagcttggcgagaagagccctcgccagaggaagccaaaggctgctgcgaagacccttgatccccatgagtggagcccccaggagggatagaagaccccccgggaacattggctacctgaggg

SEQ ID NO: 21714 - DNA, 9601 bp, Oryza sativa
ccactccttgttattcttatactcattgttattcttgtcttgattgaaggatgcctcctcgcaagaaaacttctcgcaagtccaagcgctctagggatcggtctcccactccttccccatcctatcatgaggactcggaccgtgattggtccgggggaggagaagaggagaccggccctcaggtggccaatgttccccggggctcctctctcccacctcggcgctcaactcatggggatcaagggtcctcgaggcagctttgtgctttctctggcgagggctctcctcgctaagctcacaccactgcacctcctccggcggggctcatcggccctctcatgcttcatgctccctcgcgcaatcctcgccgagctgtacgtgactggcgccaaaagtctgacattgtggctgtggagcggaatcaggatcctcgttccatgccgtgctccgcctctgatggcaggttttggacctcttttcagcaagacttttatgaaactgtcattttgcctcgttccaatcctacagtgcccatgcaatggattgattgggaggctttggcgaccctcgatgatcctgacctcaatgccgtcattggcgcttgtgaggagatgggggttcgaaatttcatgacccttcagtaggcttgctgcaaagagatcattgctcaattctatgccacagtctattttaatggtgatcgtgacattcattggatgactcagggctcgtggtattctatctcttatgaccagcttgccaatctgtggggttttgatgagaactggatgcggtacatgacccacttgcatgacattgtgattcctcacaatcatgacttgcgccctctgtatcttcctggcggcaagttggggactactgaagggctcaagccttatcatatctatctcaaccgcatcctcaggcggaccttgactccaaaggacggcgatgctaaaaacatcaaccacttctccctctccatgctccttaggttcaatccccccagccgtccctttcatgtctttttatttgtttggcaggaaatccgcatggcttctcttcagtataagcgagggcttccctatgctcctcatataatgcggatgattgaacatgtcactcaccttcggtttgtgtgcgaggagccacataccgctctttccttgcgcttgcccaagcgcgggtctgtgcctcgggacatcccctccacatcctctcagccgccttctgctcctgagcgtccttcctctgtggctcgtcgtgagccgtctcccttattccgcattttgcggactctttttggcctttgctccgcggaggctaaaaagaaccgccgattgcggaatccggcgaagaaaacggctcatgacgtcaagtacctcaaggcgcggtatcatgaggaccaccatattgatatccctcctttccctccgggtttcgaggccgagcccgatgagcccgaggaggaagagctagaggatccatttgctggggtgcctcctgactttgatttctttggttatggccatggctatggctatcctcctccacctcctccagaggatcctcctcgggcgccccttgcttgagtctttgtctcctcgtcctctctttttggtgtcttgatgccaaagggggagactatctatcatctctatcctttatgttggtcgaacattagtggctttttatttgtatgagacatgcgtgtttcttaagttagtttaatgctttgtaagacattattgtttaattatggatgatgggatgtaatggatattattgtgtcttgtttaatgtgatgtcatgtctcatttattctatattgtggttgtgatgagatgaaatgattattatgcatgtgatgtgatgagcaaaatgtgagtctagttgtcttgtgagcttcaatgtggatgcaaagatttagggggagctctccacttgccttaatgcacacttctagggggagctttcactaaaactttgcaccaaaatcatctattaaatccattctctcttttgatctaatcgtattgtcatcaatcaccaaaagggggagattgaaagtgcatctaggcccctaatgattttaatgattgattacaatgcgattagagaggactaacatttttattcaagcaaatatgaatgttgttatgtcctcgacgtgttataatgcaatgcatatcccgtggatgcgacatcgtgcaatgcggcaatgatcaaatggtatattgtatcttttaccttgcattgtgtcataggaaagccgtactattaagggggatgatgcatagacatataaggagtgatgcgtgtgttcaaaatataattttcttggaagcatttctctatttggtttgttctggaagttttcggaagtattttcagaaattccgaaacacagaacgagttataagcttctggaaattttcggaagtattttcagaagtatttttggaagtttcgaaaatacacagaaccgtgtgagagctctctggaaattttcaaaagttccgaaaatgattttcggaagttccaaaaatacacaaaagcgttctggaaattttcagaagttccgaaaaatgcgttgacttcgattatttcccaggtctggaattttcggacgttccgaaaattgtttcggaagttccgaaaattacttttattgcactccaacgggaagatttgtgctgtgggtataaataaccacctcccctcacttgtgagggctgctggttccattccaattatttgtgcccttggcttgctctctctctagttcatttgagccttgcttcttcgattcatctctccacccgtctttgattcggatttggtgtgtgtgtgagagtgtggattcgagtttgtgtgggtgcttcttgtggtcttagtgaatatttgtgagcacttgcatcatctccgggagttctttgcatcatcttttactcttggagtttgaggactcctagacggctaggtgtcactaccgagccaccgatctacttgtggttggccgggagaagtttgtgaaggccggatctcgcctccgcaagggaagagatacctcttagtggaaggaggagtgcttagtgcaacctcttgaggaaagggttagctaagacccggctcttagtgagctcctcaacggagagtagaatcccctcaaagatttgaactcctggaacatgtttgcaagcttcaccttggtgatatctcttcatccctctcctctaactttgcttgcttgtgccgctattggtctagttgctgtatgtgcctttgtttacgtgtggtagacttctaaatctagatacttctttctgtgtgcgctgctctgtgcattttcggaagttccgaaaattcctggcctagttccgaaaattactgcttccgctttccttaagtttttaaattagcctattcaccccccccctctaggcctaattgaccttttcagaagccaaagagaagatgtacaagtgattggaggcaagaatcattcgaaaccaaggttggagggctcggccaggaattttcggaacttccgaaaataattccgaaaatttttggaacttccgaaaatttcagcccgagcactacaacttagatcccgcacaaatccaccaacaaaaacttgtgaaattgaatctacagggtctatggcactaggggaacaactccaccgaaggaaatcgcaagattaaactcgaggaatcgagggattcgattttaagatgggtacctcaagaacacgaagaacgcgaagaactcggtgaagaacaacaatgtagctgccaagaagacgcccaaccttgctcccacaaagttggagtggaggggagtgccggggaatcgctgaggaatcaccggggaggagtggatcgccggagaggggagggaggagaagaggaaaccgtggagaagaaagaggagagagagagagaaaagaggtccacggtcgggggtattagtatccctccgagaattttcggaaattccaaaaattttcggatagatccgaaaatttacataaacatttcgacggttctagaaattttccgaagttccgaaaaattttcggaagttccgaaaatatacagaagcgacgcaatggttctggaaattttcagaattatccgataactttcggaataattccgaaaaaacctggaaagctaacaaaaacccctttttgaaaggattcgcgccagaattttgatgaaaaacaattttgcaaactttttgaaatgcatttttcaagggaattcgcaccaggaattttgatgaaagcaatttgcaaacctttggataggagatggagtgaaaagaatggtcgaacatttaggccccatttgagcttatggctagcacgcaatcaaccacacaaaacaatagccacaagacaaatggatgatccaaagatcaaatgagagtgaattaccatgagacaagatgattcaccctcgaaagagggaatgtgcgcatctactgcaaattgtgttaggaccaacattcattgaaaaatgagatccccatacacatagattcaaaatatccacagaaatgtgacgagtgtccatccatgaattgaatgttcattttatcacaaggagaaaagtaacctatagtagaaataaaaaacaaatgcatgcaaaagatcaagccacgtttcgagaatccaagatatttagttcacttctcaactcacaaaacctagcttcatctagaggcttggtgaagatatccgccaattgtttgtcggttctcacatgttggatatctatgtcgcctctcgtggaattgtctctcaagaaatgatggcgaatatctatgtgtttggttcgggaatgttggacggggttattggctatcttaatggcgctcttattgtcacataggaatgggattttagacatatttaggccatagtctctcaaggtttgcttcatccaaagaagttaagcacaacaactctccgccgaaacatattccgcttcggcggtggatagggcgacggagttttgcttcttggaagaccaagaaacaagcgacctacccaagaattggcaagtacttcatgtgcttttcctatccactttgcacctggcataatccgcatcggcatagccaatgagatcaaacctcgctcccttaggataccaaagaccaatgttaggagtgtgcactaagtatctaagaattctcttcacggccacaaggtgacactccttcggagcggcttgaaatcttgcacacatgcacacactaagcataatatcgggcctagatgcacaaagataaaggagtgagccaatgatggaacggtataccttttggtcgacgtctttaccttgctcgttaaggtcgaggtggccatttgatggcatgggagtgtggattggcttcgcattctccattccaaacttcttgagcatgtccttcaaatactttgtttggcaaatgaaagttccttccttgagttgcttgatttgaaggccgaggaagaacttcaattcacccatcatggacatctcaaaacgcttggtcatcatcctactaaactcttcactaaaagacttgttagtagaaccaaatataatgtcatcgacatatatttggcacacaaaaatatcattattatgccttttagtaaaaagagttgaatcggctttcctgatctcaaagccattttttcacaagaaaattgcgaagacactcataccaagctctaggggcttgcttaagcccgtagagtgccttatggagcttgtacacgtggttgggatattttggatcctcgaagcccggtggttgctccacgtataccaactcgttcataggcccgttgagaaaggcgcttttgacatccatttgatatagcttaaaattgaggttagtagcaaaagcaagcaatatgcgaattgactcaagtctagctaccgtcgcaaaagtttcaccaaaatctaatccttcgatttgggtgaacccttgcgccactaacctcgccttgttccttattacgaccccggcctcgtcttgcttgttgcggaagattcactttgtgacaatcacattttgctgaagtcactccaccaaagtccacacttcattccgggtgaaattgttcaactcctcttgcatcgccatcacccaattcggatcattaagagcttcttccacccttagaggttcaagagaagacacaaacgagtaatgctcacaaaaatttgcaatacgagaacgagtggatactcccttgttgatgtctcctaagatgttgtcagtgggatgatctctttggatactttggtggattcttgggcgagctaagttgatcagtgagggtggcacttgcacgccttcttcaccttgatccaagcttgaggtagagggattgtcggcttgggttgatgtaggtggctccacttgtgttgaggaagaggctccttgttgtggctccctagggcgtacgtccctaagagccaaccttttgattgcttcactcgggtcctcctcttcacctaacacatgtgagtcaacttactctacttgagagccattagtttcgtcaaatgtcacatcacgtgcgatctcaacaataccggaggatttgttgaaaacgcggtatgcgcattcatttgacccatacccaagcaagaatccctcatccactttaggagcgaacttagaggatctagccttcttattaagaatgtaacacttactaccgaaaacacgaaagtaagagacatttggtttgttaccggtaagaagctcatagggagtctcttaagaaggcggtgaagataaatgcggttgatagcgtggcatgcggtgttgacggcttcggcccaaaaatggtccgatgtcttgtactcatccaacatggtcctcgccatctcaatgagagtcctattcttcctctcggctactccattttgttgaggtgaatatggagccaagaactcgtgcttgatgccttcttcatcaaggaaactctcgatgcacgtgttcttgaactccttgccattgtcgctacgaatgttcttgatcttgaggtcgaactcgttttatgctcttcttgcaaacttcttgaaaatggcttatgtctcactcttgtcatgcaaaaagaacacccacgtaaagcgtgaaaagtcatcaacaataacaagaccatatttgttacctccaatgcttagataagcaattggtccgaagaggtccatgtggagaagctccaatggtcttgtagtggtgtggacccccgtttttataacaggaatcaatcgtgtaaacagtaccatttctctggatcaagtagtctggtacacatgagttcatagctgaaataccaaatgctcatacacgagagtttagtgcgaattattacaacataagcccgcagacattgtcttaaatcatcagaccgagcggtccgaaatacaaccaaaagcagaattagataaggcagcggattttaggcagcgacatgccattgccacaggcaacgaccgtactaagacctactgagcgccatcgtcttcatctccctcctggtagtaggcatagggatcctccggagcttcatctcccgcttctgattaagtttatatttgcgagggtgagtaccaaccgtactcagcaagccaccacagcaacaatgcatatgaaaggggtatttcaaaggatggctatggttcttttgcgcaaagcaaattttgtaattcttttcacaagcataagacctagtattgactgatcaaattttaataccagtgtttgtatttaaacaatgacggttctgtccaccatccattgtgatcccaaggatagcttcccgccattgaatcgttatggttttctgaggacgctcactttcccccttctcaggaagtggctccaacagcataaaaattcatcatgcaacaacccatcccacacaagttaataatttagagactagccaagtgtaatacatgtcccggtgctcaataaccgcaagcacggctatttgaatagatttggtttactcacactgcagtggatatacactttacccacactccgcgactgcccaacacatgagccttgtctcaacacatgagacgcgtcacggcaaagcttttcgataaccccgcattggcagtacccgctccatgaacttttcatcctcatgcactctaggtgtacacagtttctagcagtgagaggagttctggcgcacccgggaagggaagttttacacccatgtaattaagctataactaggttcaactcaacacacgacagtcctagcaatggcgacaccattgtagaccccctgccatacacatgagaaaccactatgcatggatactgcctccgctcggctatttactccgctaggtctatccccattcgagaaatgtggttgtacgaagtcgtttcatgcttaacttcatggctcgatccttaattgaccggggacggtactagcctttcccagataccacccaaatccaccgtccgccccgatctaaaacataggtttttaattcctttcatgtcatcattatcatggcaatgtggtgttcatgtctccacatgccgcatctcaattaccttcccaaaggtaattgcccaagcatatagcgtttgataaacatgagtatgcaagattctaaagtagcatttctaagcaagtgtcatagttgactagggactcatacgtaatcgtggttacaaagatttaaggataaacaataatcaaggcatggcataatctcaagtaggatgttcatcattgcatgcaatcttatttataaataaaaattgatttcgcaattgggatcaacgtgatcaaagaatagtgatgacttgccttgctcgaggtcttgcgggtcttggccttcacccggatccgcggctccctcggtctctataattacgtgtgaggaaaacaatttgaattcatttagaattcaaacaaaatcgaaacaatgaccgaatgaaaaacgagcacgagagacgaactctacatcaagtatattattcgcgaagtggaattattcctctacctaaaatttttgtgtttcttaagaaattttgtgatttaaagtcataccctaagactttatctaattatctagtccttaattacatctagatcactaccgcgaattaatcccttatagagtttactaaaaataatctataacaatctataagaattcatctagtcatattctcattaatcctataattaaatgctagtattttaggtatttaattagtaagaattcatctaattatatttttattaatactataatttaattctactatttttaaatattttaaactttcccctaacttttcccttttattttccctctttttcctttttctttcttttctctcctctttttctttttctctcttttctctcttcttttctttctttttcctctcctcttttttttttctttttctcccggcccctttctccctctctccctcggctccttcttcctctctccctctttctacctaccaagaccagttggggaaaaggggaaaaggcggcggcggcacggcttaccggggcaacagcaac

SEQ ID NO: 21715 - DNA, 3436 bp, Oryza sativa
acggcgcggcaggcggaaccggcgcggtgcggcgacaacaacggctcggggcgcgaggcgcgcggcaggcggcagcggcgcggggacaggacgcacggcgtgggtgcacggggagggttagggctagaggacacgatcgaacacctaaagcgcaatgaacagtgaatttttttatttttccaattttggttgtttttcctatataaatttgattctactattcctaatttttgcatatatggactttactcaatatttgtgttatcccaactaatgaattcaccctagattaatattacccatattttatttttatataatttatttgaatttttaattgggattaattcttgttccattgcatttaaacctaattgatacaaatatggcctcgatgatattttatttatttctatccttatatagtctttattttaaattataatttatttctttaaccaaatctaatttcagggttaattcctaattaattttcctctatttgtgatcgatgaattccgaaatcaaaatccaataaaatcatcgaataaaatcggcatgatgcaatttatttaaaaagtttttgaaaatccgtatttttagagttttgattttgtcggtcgaattttcagggtgttacaagtggtcatcacattcttgacggagtgatgtgctccaatttgtttgccggcttgacacgcgctacacaccctatctttctcaaattgataatttgttagtccaaggatgtgatcgtgctttagaagcttgcgaagattcctcataccaacatgggctagcctccgatgccaaagccaccccgtgttggacttagccactaagcatgtctcatgtttggctttacttgaggaaaaatccacaaggtaaagctttcccttgagaacacccgtaaagactaccgaggaatcattccttctatagacggtcacatcaacatcggtaaaaagacaattgtaacccatagagcataattgagaaacggacaaaagattgtaatttagagattttaccaagagaacgttggcaatggaaagatcattggagattgcaatcttacccaatcccataacctttccctttccatcgtccccgaagactatgttctcttgagaagtgccatttgaatcaagagatgaaaacattgattcttctccggtcatgtgattggtacattcactatcaatcacccaactttttccaccggagacatattcctacaagagattaatttctagttttaggtacccatacttgcttgggtcctctcatgttagtaataagtgccttcggcacccaaagcactctcttgatagaaatattcttgccccttgggcctacatacttagcaataatacgaccactagcattcttcctaagaacataagatgcatcaaaagaacaatgtgaagcatgatcattagggaggatacttttggccttaacaaagttgctaagaccttggggcctcttgatcatcacactcttgtccaccttccttttggtggaggaacatacccaagaccctcatggttgaagttgtccctttgatagcctacgtactcctttagggccttactacccatgtggcacttaagtaggccattgtgaagaagtcccataagcttctcattttgcttttgcaaagcactcaatgaaatagagttagtagcacaagcttcaatatcaatatttttgcacctcacacatggtttattgcttgggacaattttggagcacgatgcctcgcttgggagagagacactactctttaaggtttcgaacttctcttcaagggagaggtaagctttgtccaagccatccactctctcttgaagttgagcgttcgccacctcaagattagcatgagactctttggtttgcttgtaaagccgtaccaaagcctcatttttctctctctccttagcaagttcactcttgagttcatgagaccgctctttctcacgaatgagcaaagcctcttgcctctccagggttgtatattggtcctcaattctcccaagcaactcactcaagtgtggtatggattccttggttatggacttgaacaactcatcatctataacctcatcctcaacctcatcctcctcattactaacaagatcagcattaaatgacttgagaggacaaggtaccttgggctcctttgccatgaggcaaatgggagcatcctcatcacttgagtaatcgaagagcctcggtggtgatgaaggcttgacggcgaacgtggcgactccttcttcatcacttgaacttgactcggagtcggagccgaagatcatcccaatatgagcttggccataatgttctcgcttgctatgcttgtgcttctccttcttctcatccttcttctcacccttcttctcacccttcttatcttccttgaggtgggaaccatccttgaggtgggggcactccgcaatgaagtgttcgggctctttgctcacgtagcacacccttgcggagtgtcttccacttgacttgttggagtagtgcttggaagagtttcccttgaagaagccgcttcgtctcataaacttgccaaacttcttgacgaaaagagccatctcttcatcatcgatctccgccttgctcttgctctcgtggttctcttcttcttcttcctttgccttcagtgccaagtcttccttcttgatgcttgcggttgagctttggttgatgtattggataacatccttggactcttgcacgagcatgtcatgggcaaggatatgcccgagcaaatcatgaggtgtgatatttttgtagtccggacgcttagagttccttggagtgattgcccgaaccatcttcttgaccacaacctcatcagtcatgtccttagagccaagtcccttgatctcattgacgatcttgctcaaccggtcgtacatgtcgcttgggctctctccatccaacatcacaaacctctcaaattgtcctttagaatctccaccttagactcacgaacactatccgtgccttcatgcaagttccgaagcatgtcccaaatcactttggcactcttaataccatccacacggttgaactcacttccactcaaggcgctaagtattgcattagcggcttgagcattcttgtgctcgttctcgtcgtcctccttggtgggatcttcgggattctgcaaaacatagcctttttcgactattctccaaatagatgggttaatagacttcaaatgcatcttcatcttatgcttccaagcggcatagtccgtaccattgaagtacggagctttgccattgtaggtactcacataagatgtagatgtggagggatagtcaaaaggaatcctagctcccttttcaccatcattaccatcccccgtttgacccgacatgatctctccaagcggttaagcctaattaggagatta

SEQ ID NO: 21716 - DNA, 5651 bp, Oryza sativa
  unsure (1)..(5651): unsure at all n locations
cttcggaaaatgcacagagcagcgccccaaaaaagaggtatctagatctaaaagtctaccacatgtaatcaaaggcacatacatcaactagaccaatagcggcccaagcaagcaaagttagaggagagggatgaagagatatccccaaggtgaagcttgcaacttgtttccggagtcaaatccttaagagattcttctctccgttgaggagctcactaagagccggatcttagctaaccctttcctcaagaggttgcactaagcactcctccttccactaagaggtatctcttcctttgcggaggcgagatccggccttcataaacttctcccggccaaccacaagtagatcgttggctcgggagtgacacctagccgtctaggagtcctcaacctccaagagtaaaagatgatgcaagtgctcacaaatattcacaaagaccacaagaagcacccacacaaactcgaatccacactctcacatacacaccaaatccgaatcaaacacgggtggagagatgaatcgaggaagcaaggctcaaatgaaccagagagagagagcaagccaagggcacaaataattggaatgaaaccagcagccctcacaagtggggggaggtgggtatttatacccacagcacaaatctgcccgttggagtgcaataaaagtaattttcggaacttccgaaaattccagatctgagaaataatcgaagtcaacgcacttttcggaacttccgaaaatttctaaaacgcttctttgtattttcggaactttcgaaaatcattttcagaacttccgagaatttccagagagctctcaaacggttctgtgtattttcggagcttccgaaagtttccagaacgcctaaacacggttctgtgtattttcggaacttccgaaaatttccagaacgctccaaaagaaaaatgcttcgaagaaaaattgattttaagcacacgcatcactccttatatgtctatgcatcatcccccttaataatacggctttcctacgacacaatgcgaggaaaaagatacaatataccatttgatcattgccgcattgcatcgcgatgtcgcattcacgggatatgcattgtattacaacactttgaggacttaacaaccttcacatttgcttgaataaaaatgttagtcctctctaatcgtattgtaatcaatcatcaaaattattaggggcctagatgcactatcactgcacctaatagcattctgcaatactgtgtcgtataggggaggccaaaggagcaccaaaggtccaccaccaaatgtgagtgctctgcacgttggagagtgctgaaaacagccacgggtagttgttacgttaaaaccgtagtgcatgagcataaccatcggctggttgaaagttgtgtcgagaagcatcacttcttctcccataaatccattgatcaggctgtcaaggagatgtatagatggccagaaggcccgaggcccgacggcccggcccacggcacgatgttttggcccggcccaagcatggcacggcccgttaggggtcgggcccgtgccggcctggcccgaccaccggcacgttgggctgacccggcacggccgggccggcacggcacgatgggccgtaggccaggcccgacacataaacagtagggagtaaaaatagacattatataccacggtcgaaagaatagggacgtaaaatagacttattttagctatatatatgccagcccaaagaggagggacggaaaatagacttactttcactatacatgtgtcacagcccaaagaggagggacggaaaatagacttattttcgctatatatagtcacagcctaaagatgagggactgaaaatagacttatctaaaaaaggcacgatgggccacccgcgcctttgggccggcccggcacggcccgacggctggtgggccgtgcctgggcgggaggcgtggcccatgagccggcacggcctagcacgaagtgccaatcgggccgtgccggcccgatggctagtgggccgtgcctgggccgggccgtgccgggcgggccttttggccatcgataaggagatgatccgccacctaagaaaaaaacaacgtcagcctgtcaaaagtgaactgtatactagaaagcattcatggatcgatgaacgctctactattgacaaagaattctgtgcgcaatgtatgtgctgagattgcacaggacaacctgcaagatgatgtaaaaaagaccatggaactattccaaaagctttcaaagtcagaccctgacttcaaattttcagtacagcttgatgaggagaacaagataaaatcattgatgtggtgcagtggccgaagtcggaggatgtatagccatttcggtgatgcagttacgtttgacactacacaccaaacaaacttctatgacatgacttttggtatttgctggtgttttgctgacaacgaagacaaagaaagctttgagtgggcattttcagagtttattaacctaatgggtggccctccgcccatgaccatcctgactggttcgttgatctgtcattgcctataattaaatttttatatttattttgggaaacctttgctgcacttctttggttatgtggtgctttttgttatgcagatcaagctcccgctatggcagctgcaataaggaaggtatatccccatccacagacagtgcacaggtggtgcaaatggcatgtactgaaggacacacaaacggggattgatcaagtgtacgtgaacgacaaggaattcaaaaatgagttccagaagatagtaaacgaaatgatgactattgaagagttcaatgaaggatggaacatcactaattttgagatacaatctctagaagaatcctttcctgagtcgtgcctttgaaagtaaggaaatgtgggctaagtcattctttaaggatacgttctgtgctaggatgacaagcacacaacgtagtgagtgcgcgaactttatggtaaaaatttttgtccctcgcaattctcctctgcatgattttgttgaactgtatgccaagctcgtccatcaaagggaggaggatgatgaccaacagcagaatgacaattcacatgtgcgagagggaaaataacaattttggtttctttttcatatatgcatgttttgatttttccagctactatttttttccatgcctcgaataggtacgtatcaagcctgcttttgggtacccaatagtgcggcatgtagcacagatctactacaatcgctgcatacaacctattcgtgtaagaggtttccaaatcaacctcttatatcataacatatgaggaagagtctggtctgtacaaagctacagatgtcaacacggaagaaattgggtcttggtgtcgtggtacttatttggtaacccacaataccgacaacggcacatacaactgcgagtgtgggctgcagactcattttggcatcggttattttttaagaactataagttattttttaattatgtatttcagacattatgtaggtgtttctataactatattaaattcaataattataacatcacacaaatttcttaatttaatttttaactacaattacaagatcttacatctacaagttaaattttaactacatattcaatccccgtaaaggggacagggatggggcaagtgtggtgtttgtgtggcattgggaaagggaggaggaggtcttgtgttctatttattcatcaccggagaagaaagggaggtgccttggggcttggacaacgccatcaatggcgtcgattcgctgaaaggaataaaaacttcgagtaacaagttctaatggcttgattgagtgtgaaactcaaaagggaaatgaaggggtggatctgtggagtaaaactcctctattaatttggagaaacggcttgaggaggagccgaatcaaggggcggcgctggctagggttcacggggagagagagatacgggggcaactggaggtggaagaagggcctaactggtggggtccaccagtcagcagctaagtgcgtgtccggcatcgtgggtcggcctggcccacgcgcgaacagaatgacggggcggcctggtgagcacgcggcgctgggacggggaagagggggcacagcccacagtgggagaaaagagggagggaagagctgaggctgggccgggccgagaaagggtgggaggagagggagagatggagtgggccagcgactggtgggaggcagagagagaggaagagatgggccggaaatggcctaaggagagggaggtatatttattttactttttcttttttaagaaaatttgagaaaggtttttgatgcattaaaattatttatttataatgctatgaaaatttgaaaagttttttgaagcatgaggaatttaacaaaaattcccatatgccaatttgagttgaaacttggtgatttttaattgttgaatgctatttttagcctttacaatttctagaaataatttagacgatgaaattttagggtgattttagggtgtgacaggtggcctgacgtcgatggctatgccggctaggtcgtagcagtttgggcggtgggaggcgaaggcatcgatggccaagttgacatggacatggcttggtgctactactgttgaggagaaagaatatgagggtaaaatagatattttgtagcttctctctgctcaaccgagtgaatgttatattttaatgcttacagtgtccaccagaagtcttctcaagcaaattcacgttcttgcaacgtctgccagtaaaggccatatgttttgagtgtcctatagtaaatttggcctattaataggtataaatattgactgaaaatttgtatacctacaaacactacttatagaaaataacataggcctatgaaatagtactaaattgactagaattgagttaagtatggatatctctctctgtgcgtgcaactgtagatacacattgtcgattaaaaaagtttacaataaaatcatgatctataaatgagcacgtatacatctgtaaataatattattaattacgttgttgacgtgtaaattaattagttgtatccctgaagcatatggacatttcatatgagcaatttatccagaaaagaatacatcaaatagaggagtaattgctttccctttgtaactgcatctagctagctcttgctcttattaaaattggctgcctgaatgtttcagccatatgctcaaccaatcatcgcactctcaagctaagagcaggtacaataatagactattagccagctgtaaacatattttaatgagataaaaaataagagagaagagcagcgggctacagatctgtagtcagctgtagcgcggcctcttagatgcaatgtgtgtatgacaggtgggaccatgcattaataatatagtaagcaactattgtatgaattagctattagattggctatagatgaattgtagctagtagtggactatactattaaacttgctctaaatgaatcagactgtgaccaatattattgtgcagatgcggtgtgggtggtcccagggggtgatgcccgactgtgttgccctggtggccaagtgtgccagtgtggtgtggggtggtctangggcactgttgcccaaccacagggatgcccatgctctcaccc

SEQ ID NO: 21717 - DNA, 15384 bp, Oryza sativa
ccaaggcccggccagcgcgggcaggcgctcgggctccgccgcatacatccatgcattagaactaattatagtgcttagccattaattagcctagatgcgtacatacacaattagattagtactaattatcatacttagtcattagctaatagcccaattttacttctatccatgataaaatgctatatgtatttgtgtttacttattaatttattttctatcgttagatttgtctaggttaaaaaaaatttctagatccgccactccagttattgcttagttcatatctatgcgagagatgagtagatttttattctctatagctatttctccctctacgacccttcttcctggcgatgtcaggagccagcgtgtgcttgtctgtttggagttgatgttggggcagtgtggttgtggctttgttctagagatctggtggcaatggattacatggatcatagaagattaattcctatggtgccgttatccttacatatgtttgtgtaaaagcttcagtggtaagagtgatgggttaccgctcctccaaatttatcaagaacagaggcacatgacattaagaatgtttccggaaagacaaacaaaaccatgtacaacaaaagagaggaacatatggaagaaatctatagattatgatagcttccatattgtgtgcatattgaggggtcatgtattgtattgacatgatgcatgtaaagaagaatattggcgagagaattatggaattgctcagaaataacaaaaataaaagaaaaatatataaacgacaggaatgatgtgggagaaagagacggacttttggcagttataaagtgaaccgaatggatggtgtgcaggactgcaggattagttagaaaagtaaaacgaatatgacttcaatacttcaaaggcagaaaaatacacaacggtatagacaccaagatcaacttgatattaaagttttaaaatttaaaatttagctacaactgataagcaaactagcacctacttattatatatcaactagaatggtagcccacgcacatgcgcagacaccttcttatataatgtgagtgaaattttattatgaatatttatgtgcggggttttttattaaaatatttttattatattccaaactaaaactaaacttattttgtattctttgaacgctgctatttttttataattactcttgcaacatataaattctaaaataaaattatttaatatcatacggttttgaattgataagaaaatattgtgtcaaaactatggaggtggttcctaatctcgaagaaaaggatgttgttgcttagagttttttctattaaaaaactaacaaatcgctagtctaatgctttgttcatttttaatattttctagtattttatttaatttaatagtaccacatagcatattaaaagcgtttgcagcatgtttagaatgagagagagaaagctgctaaacctagcgggtggagatctatttgtggtattttaatgtaaaaataatattgattttaatttaccatgaagttagctcgttggtacgtacttgacgaggaggtcctagatgtgtgtgtttttttaaaaaaacgatctaacctttgaaaataaaataatagatccaccgatttaaatgaaaatcgatgatcgtggattagagtgtcacttggcaatctaggagtgtttgtaaggtgtaattcggcggtttagaagtatttataggatgtttaatagacttataatagtctttttcttttgacatttctaagattttttttaatttaagaatgctatatagtagcttagaggtgtttataaaatgtttaatggattttaacaccgcatgggggtgtggaggggggagggagagaggtttggcattttttattaaaaaaatataacaacctaaaatacatcaatttaagtaaaaatcgatgatcggttgctttgtatttttttaaaaaaaaattagtactttctctaatttaatagcaccacgtagagatttcgaagctttggtaggattttaaagtgacgaggggagagctgtagtctatttgtgattttttcttttaccggtaaaagtaattttgattttagtcttcttaaaatagaaatatggaaggaacagatgggatgtacgtatagtacatacgtacgttcgttagtacgatccaaaactattacgtatgtttgtacattggttcagatgttggctccagatgtttttttttttacaaaatagatataaccatccaaaacaatgggtacaccaatttaagtaaaaatagatggttggatttctcttatttattaggtgccacggggcgactcgtgagcatttatagggtgttatttgacggtttgggagcgtttataggaagtttaacggacttttagcccatgcattcgcctaggcatgcatgtatcattgttaaatatttttctaagatatttgttagttttatattatgtaatacttaattcatctatgtacgcacttatctataatcttacagccttatcttttcacttattgttataccaatcagccaaaatttgaattttcaactttaaatttggagttgattttggagttttctcattgaagtttattattcaacctttgcttttagatcgctaataacacgcatataaaattattattcataaatcacttttcgtttgcaaatatgctacttggcttattccaggaataaaccaattgatggggttgttaatcttctttatcatttaaaaagatgacttagggggtgtttagatccagggactatagtagtgcctgtcacatcggatgtttggatactaatttagagttttaaacatagactacttacaaaactaattgcataaatgagagctaatctgcgagacaaattttttaagcctaattaatctataattagagaatgtttactgtagtatcacataggctaatcatggattagttaggctcaatagactcgtctcgcgaattagtccagggttatgaaatgagttttgtcattagtctgcgtttaagtaaaccaaaaatattttatctgtaagcaagtaagatcatcattgtttattaacggatagattatatgcaatatctggctactgatagattaagagagatccaattaaaggattcaccattttgagttatctatatttaaacataaatgtagtcttagcgaaccaaaatgaagtattacttctactacttattatttaaatcttattaactaattctttgtgtttcatattaatggttctacgaaattataagaatttctacaaatggttcaatttacactctatggatatttttctattttattttatacaaatattattttgagatcaaattttacgatacgataaatagtgatagtggtacaccctatgtgccaatttttttaaaaaaaagtaatcaaataatattgtatctataagcaagtaagattattattgtttattaatagatagattatatgcgatatcaggctacagatagattgagagaggttcaattaatggattcatcgttttgagttatctatatttaaatataaatgtattcatagcgaaccaaaatgatgtatatcttctactacttattatttaaatcatattaattgattctttgtgtttcatattaatggttctatgaaattataagaatttctacgaatggttgaatttacactgtatggttattttctattttctattttatatacaaatcttatttttagttcaaattttacgatatgataaatactgatagagttacaccctatgtgtcatttttttaaaaagagtaatccaataatattttatctataagcaagtaagattattgtttattaacggatagattatatgcgatatcaggctacggatagattgagagagatccaattaatggattcaccgttttgagttatctatatttaaacataaatgatgtgaccagaactcgaaactctaaatggactaaacgctaagagcagcaacacgactcaactatgtaacgcaaaactcaacaaagcaaaaaccgaaatgaacaatgcaatggcacaatatggctaggtaaatgatgcaattttttcggctattttctggttatgggtagataaaaactcaccgagcaacgaaagctctgataccacctgatgaaccctgagttcctctcaacactcaaggctgttgttggcccgatctttcagtgagttgtagataactacgatttgggagaagcgttgacgacccaactacaaccgtacgagacgttgtgttgcaccttagcggtcgatacacctctccgagggttgttgatcctgccggtgcaaatcaaccttattcctgcaagcaaatcgaagaaacaagcaagaacaagggtcatgctccacctggttgaggcgcaccccacttgggccccacttgggccagggtcccaaatgaagctacaagcccataggcccattacaggtggcgcagcaccttggtctatcaattgcggctcactgtgatggaatttcgcaatgaggctggatccgttggaaagaggactccgatagctttccatgaagtatgcacgggccgaaaacggagctcgtatgcagatttggcggccgtttgaaatcagtagtgcagcaggtggccgaatcggattccagcacttgatctcgatatcttcttgttcatccatgatatgagctatggatgcatctgtggttgctatggtcacatcaataaatgtagtcttagcgaacaaaatgatgtatttcttctactacttattatttaaatcttattaattaattctttgtgtttcatattgttctgatatatgctacatgctgttaattaggtgtttaatacttaagattttccctaaaattttgtcttgaatgaccaatagattgtccaaagtaacgtattcttttacttgttaaatatagttaatttgggtcttaaattatgcaacaaaatctgatgtacgtgcataaaaaataattatatgattttagatcgtatagtcatataattaatatgttttgaatctaatatatttaaaataaaagagacatgaagagaaggggaggagaggccaatacgtatgttagcgtggtgttagaactacacgtacaggttggaaggggtgaaacgtgggcctttcaattttttatttttctatggtagaaagtaatgggtccaccatatttaaagaaaaataaatttaatttattagagtgccacatggcagtttaggagcatttgtaggagtgccacgtgacgttttaggagcatttatagggtgtttaatggacttttagtatataataatagatcttattatttgttagtctacaccactcccttcgtttcaaaatataacaacttctaccattcaaatttatcttaaaatataataatttattcaccggcctatattcttcacttgaccaatagtaaccttcacaatcttcccccgtttaatttcatctattttttaatgtccatatcaagccttaaaatccttatattttattttaaaacgaaattagcaattgaaaagatcggtggatagcgacgaacttgtcaatcatgtcttaactatatatgcaagcgctagatatctcctgcttgtacggtgcaagaaaagtcactcgtatttatccagcgtccagtcattcctgagctcgatagcatcatcaattgctgatttgttactgtcgaacgacggggcaaaagttgaggtgcagcttcctccttcgagagacgacgagcctcatgtgtcttctccttgatgatgatgtgcaggtctttcttcacgtgtgaaaatagtgtcatagttactgatgaactttgctaactttactaaacggttggtatattgttacgccgtgcggtgagaggatgcgcacctgatgtttactaagtagataccaaaatataatagtttgattaaatttatagaaaaacatagcaataattttaacgctaaaattagttttagtaaatctagcattgaatatattttgataataggtgcgttttgtattatagatatagctaaatttttctagaaactttgttaaacttaaaaaagtttaataatctaatactatcttcgttttttaatatatgatgctgttactttttgacaaacgtttaaccatccttcttattcaaaattttttgtgtaaatataaaaaaaattaagtcatgcttaaaaacaacgataaatcaagtaacaataacataaataataattacataaactggtcaaatatattttgaaaattcaaagtatcatagattaaaaaatggagagagtaatataaaacgaggggagtactgctatatattcctattacttagtcaatatattgctatctttcccgacaataaaagagcaaacaatttattcatcttctacgatccatctataagtatctccagtaagcataccatgaaattagagcccctttcaatcaaacaatttatttagaaatttcataagattgaaatcccataatatcttttttctatttggtctttttaacaaagtattggagcttttaaatcatatgaattattttaatggctcattgcatatagtttttgaaggaaatttagtaagagctctaactggccttaggagaattttatttgtcaatctctcatccgatatctatgtttctcttgcagtacaactaaaaggttacgggtatttagattcagtggtgtaaagttttggcgtgtcacatcgggtattatataggatgttgcatggggtgttcggacactaataaaaaactaattataatatccatcattaaatcgcgagacgaatttattaagcctatttaatccgtcattagcacatgtttactatagcaccatattaacaaatcatggagcaattaggcttaaaagattcgtctcgcaaagtagttgtaatatgtgcaattagttatgtttttagcctatatttaatgcttcatgcatgtgttcaaacgttcgatatgacagggcagtgtaaaattttggggtgggatctaaacatgcctttattcatatgttttttcttttcccttatttcataatctaccgttttgcacttactttcctatcaaaatcctatgtttttctaactctttctgtttttccatccctatcattctaagggctgaaattaattgtcggcaatccataggatgagattcctcgaagctgatcatgctgagcccatgttgtcccacaacgaacagagggaggaaagagaaacgatagactatatgattcatttgttcaaaaattcgttccaatcacatcttctcgttatagcaccatgtaaggttgcgttcgctggttctggttatagcaccatgtaaaatttttttttaataagatgagtggtcaaacagtacaaatagaaactcaaaatcccttatattatgggacgagggagtacaaaatagttttcgcagacgaccctcatacaggattgcacggaacacgagaacgcccatatgtgtgatatagatttgctctgttctaacaaattaaaagtatctcaaagtaccagtacctcatggtatcaaatcgtttcctatcgttcgatctagctaagtaggatggatattgttagatccaacgatcggaaatgatttggtaccatgaagtaccggtacctcgaggtacttttcatcggaccgaagcaaatctctatgggataagttcggtctgaaggatacacaggctgtatcacaggcgacctatgacgtccgcttaaatttcagctactgcgcattattgtgatgtctgaattaattaattaattttttttagtgattttggatatacaacatgagaatccatgccgaatttctttacatagtaattaataacccaaaaattaaataaatagtaaatcaaagatttaatttataaaaataagaaggatgctatgtaaatgtacaacagcatccagatatggacgttgttccccggaacgtccagatcaggacactgtttgtaacagcttccatcccgttggagccgaacccaacctatggtagggaagcctccactcgcatctggctggttcttggggagaaagctaactatcggacgcccgatgctcctcagaaaatcggatggtcaaatgttgcagttgaccaacaagtaaaatattaagttatatatggtgaaaaaaaatcagcaactgaaacaattaaatattttatgaaacatggtgaagatacacgttgaaacatgtcgctgtcacatatgaaacaacaagtattaacggattgaaacatatatttttcctttatcaaaatatagtcatgcgatatcttgttgtaaagatttaattaaaacgaatacaatggtgtgatcggatcatatattggataagtaatttaagagaaaaatcattttgaaacttgctaaaataaatgcacatgtacatggatgaggtagagagagagagaggagtgagagtagtagcaggtagtattaggaattttgtgaaacacaataaagacgcacattgaaacatatcactatcatgtataaaacatttagttttaacggtttgaaacacatgtttttattttgatataatataatcatatgatatcttgtcgtaaagatttaattgcaacaaatacaacggtgtgatcggttcataggtcggataagtagtttagaagaaaaaatatttaaagggaaaaggaaagaaaaaaagaaaaaactggacatacatgttacagtaataggtttcgtctaatccatctgcccaggcatccgatatttccgattcgctcggacgcgcgatataaaacgtttcccggttcttggtcgggtcgttgtcctcaacgctgctcggcaaggaaggcctccgctgcgtctcgctcggtcagcatcagcgccctagccgcgaggttaatagttcatatccgatcctgcggtccgattcgacccatgcatcctaaatatttagcgcacttcttcaaattaaatggacagctcctgcaaatggcggaacaaacaattttgtttcattatgacatgacaattttgatttctctctatcctatgtgttgtcgtacgttttattacatttaatatgtccttagtttttatgttaatcgcgtgcgtactttcttcggtggttgacctggccttatacggctagatttttttttaagtaactgtgtgcacgccaagttaaacatatttcttactaagttgaaaaacaatagttgtagaagattgaaggggaaaaaattgcttgactagattagaaaaccaaaatgtaaaattttcaaatgaacagcgatcaaatttggtgatatttcaaaagggtggtgtaacggctccattttctaagccattaaaaactatttttataaaaagtctttattacgaaagttttgttctttgtatgagttaaggatataaatgtcctttccgttgaacccaaaatcctgattcaaacttttcatctgcagtcctgagacacaaaaattcgagtatcagcccaaacccatcaaaaatttctcaaatacttcctaacacctctcctcgcaaaattcaaatttgcatgaaaagcatccaatatatattttcctttaaaacccttcctttgatccaagtatgatatttcaattcaaacccaattttaaattttacaaaatgtccaggagttcaatccaacaattccatggaattttccaaatgtcattattgaaatcatgccaccctttcccacttttttccggccaaccatgcccccctctccttttatcttgtttgcccacttcccgctctatctcttcctcactgaagttcaccccccttcttccctctttcctcctcaaccacctaacctcatccctttccgctctcctttgcttccattcctcctagccatttccacgatcagtgccatacacttattttacaccacttctcctttgcgcctgcctccgcccaaagaaaaggtctcactaccaccgcttctaataagcctctgattaggctttagcttattggtttaggcttttaattggttttttttggcttatacgatttataagacgatagatttaaatttctaagtttaagggcgaagtcataactccttttttttgaaaataatagaatgaaacattccggtctttgctcaagagctacagccaattattacaaggttcacacaaaagcaaagtcataactctacctcatataaaccaaaaagaccttcttcaacctaacttttgccttaacagtgtaagagtggcttgtgactttaaaaaagctataagaaaaagttgtttatttgtttatacttagactttttagactcataaactagcttatatgcctaaacaaagagggcctaagctcgccgactctcttcgtcattgtttagtgcccgagcttgcctataacgctgccactacacattatttctcatcgcagtcccacctaactagcaataaattgagttttcattttacacaattaaggctccatttgaaggaccataaaaggagacgagtcattagcacacgattaattggatactaattattagaaacttaaaagttgattaatataatttttataaagaaacttatatattgaaaacttcgtgttgtttatagttcgcgaaaaatacttacaggaaacgagacattgcccaaccgataagccgagtagcgcacgattaattggatactaattattacaaacttaaaagttgattaatataatttttataaagaaacttatatattgaaaacttcctatcgatgtttcagtagttcgcgaaaaatacttacagtaaactgacattgcctaaccgagaagccgagtagaacgcagccctagctaagttcctttgcatttccaacactattcatacgagtatttcgcatttacaataggatcatttgggtagttccaggagaaaatttgagtgggtgggccaggtaaagaaagaaaaaaaataagtgcacgaggaactaaaaacaaggagagtgaaagaacgtgtaaaagttgatgtgccaacggacacagagcttgcacttgataacaacgatttactacgataaagtatagatgtttggagctgaagatatagagatagatgacctttgtgctgctagctatctgtctaatatccacatatatcaaatcgaccgttgtgctacgtccaattcatatctatctagcttcgtcacaaacagtggtagagcttccctagctacaatcagatcaggattctctgcattagaggtttcaagatgtttgacaccgttgactttttagtacgtgtttgaccattcgtcttattaaaaaaatttaagaaattatttattttttcatatcatttgatttattgttaaatatactttcatgtacacatatagttttatatatttcacaaattttttttaataagacgaacggtcaacatgtgctaaaaagtcaacggtgtcaaatattttgaaacggatggagtacaagaattgaataatatcgtgcactaggaggtttgcagccatccaatcaatatatcttacgatccaatcaaaaaaaatggggcaattgcttatttgaccctattttgaaagctaactaccaatttgaccaatttgaccctattttgttcagtttggttatttgaccccgcttttcaaatcgaaaggaaagctgaccctattccgttaagacgagttaacaccgtaactaagtggtaaaatgacaaaaatgcccctaatacatccatctatcctccaccactcattcttatccactctctctctactctctctctctctcaccagagcactgccgagaagcggcggctcggcggcgcgacgcggaagagcggcggtagctcggcgacgaggcggccctccaccggcggcggaggagcggcggcagttcggcgacgaggcggccctccgctggcggcggaggagcggcggcggcggctgcgcggagcagcggctcggcgacgcggaggggcggcgggaggagcggcggctcggccgacgatgcggaggaccgccactggcggcagatgcggagggctgcatacgagcggcggtggctcgatgacgaggcggccctccgctggtggcggaggagcggcgactgcggaggagcggcggctcggtgacgaggaggggcggcgagaggagcggcggctggacggtgcgacgcggagggccgccgttggtggcggatgcggagggctgcggaggagcggcgacagctcggcgacgaggcggctgtagacccccgattttggaaatcggaaatcttctgtgtttatccgtaccaatccctggatcagtagttggtacacacatacatagttggatcacaacatatcacgaatgaatttaggctaaaagagttaaatacttacattagggccaggtaggccaacaactatcagagaacaacagcggaagacaaaataatagaagggcccggttaacatgccacaggcagtcgactggggaacgagacctagaacaagaccacactccgatcatcttgtgggatacgcaagcgtaccgacaagggcttctcttcaacactctcctaaaagatatataaatagcaagggtgagtaccaaccgtactcagcaagccaccacaacaacaatgcatatgatagcgggtatttcaaggaatggcttcaggttcttttgcataaagctaattttacaattcttttcacaagcctaaaacctagcatagactgatcaaattttagtaccagtgttcactttaaacaacgacggttctgtccaccatccattgtgatcccaaggatagcttcccgccattgaatcgtcatggttttctgaggatgtccaccttccctcccctcgggatgtggctccgtcagcataaaattcatcatgcaatatcccatcccacacaagttaagaatttagagtctagccaagtgtaatacatgtcccggtgctcaataaccgcgagcacggctattcgaatagatttggtttactcacactgcagtggatgtacactttacccgtactccgcaacttgcccaacacatgagcctacgtcccaacgaatgagacttgccacggcaaagcctttcaataacctcactttggcagtatccgctccatgaacttaagccctcatgcactctagacgtacacggtttctagcagtgagaggagttctggcgctcccgagggggaaaactcacgcaagcctaacatcgcatcctgtagttgaacccaatccatgctgtcctcttttgggtatctccttgtagtcttgtagtcttgccaagtcagtctctagccatccgtatcgggtatccgccatttggccatccgtatcgggtatccgccagcagactgcttgttcgtccacacacctaagtgaaaccactatgcagggatactgcctccgctcggctatctactccgctaggtctatacccattcgagaagtacggctgtactgaggttgtttcatgcttaacttcatggctcggtccttaattgaccggggacggtactagccttttccagataccacccaaatcctccgtccgcccctgtcgaaaacagttgtttaattttatttctcctttcacaaatcatgtcatcaacatcatggcaatgtggcgctcatgtctccacatgccgcatttcaattaccttcccaaaggtaattgcccaagcatatagcgtttgataaatatgagtatgcatgattctagaatagcatttctaagcaattgtcataattgactagggactcatacgtagacatggttacaaagatttaagggtagacaataatcaaggcatggcataatcccaagtaggatgttcatcattgcatgcaattttatttataaacaaaataatttcgcaattgggatcaacatgttcaaggaatagtgatgacttgccttgctcaggataatccttagtattgatataatcttgatcaaccttcacctcctggaagttgcagacgttgcctcacgactaaccgatacacaaggtctataatacgcgagaaaaaccaatattcaaacaacaatcaaatatgcgcaacaaaatgtactattcgcgtctgctaatagattccaatcacgctaggggctaaggtttcttaatctttctattgtcaacgtggcctatttaggagttaaccaacatagcatttatgggatacatatatatttggctaatcggtggtttagtctatcaaatggcttatggaaggattatggctaagcatgcatctatctaaataggacggttatatactagaggttctgttgttagatggatttaggatcaatcaaataattacagtgaatcatttgtattatttattctattgatggaagctttactttaattatgaacatattttacttgccattataaattataaaagggctaataattatccatgctctatatgttaaattcgggaagtttataatattatagttacagattatctcttaatgaacaatccggagttacaattgaactatgaacatatgaggtcaagatttataattagtacttatctgctattcatctttgttatattctccccggtttaatatatgaaaaagataaattaattgtgtaactataatgggatgtacaatatatgtgtgcaacaacgtataaggttctggtcacctactgtacatgagcttatttagaaagtgtactacccaatgctccaagtgattcctaaatatattgtagtttaattatacattagctagtttctatgagtgatattgtatatgtgatgcgacaagtttaagcactggttctattgggttactaataagtggtaatcaatttaggcatatataagctattctatatggtattgcatcgattaatttacttagtgattcctccacatctagctctattattattctcctaaacaggttaaagattcatctatgtgtgtttatattttagttgcataatcataaggctacacttgatttaaataacctataagccatggatttaattatatggccatcgaatattaaataagtactagtattttcctatatatccattcatttgatacatcacataaaattagtttgtgtggttgttacagtggcaagatatgttagagacaaatattattacatctactctactgtacaatactaattttatttattaacatatttttaagttgactattatgcatcatcttgatattaattatttaatatttataaatatattttatcaaatagtgaattatatatcattgg

SEQ ID NO: 21718 - DNA, 668 bp, Oryza sativa
gcgcgcagcggcgaggcggccgcgggcgaaagcgacttagccgcccgcctcgcagctgccgaacacaccatcgccgatctgcagggcgcgctagactcgtccgccggggaggtcgaagccctccgcttggcaggcgaggtagggcccggcatgctttgggacgccgtctctcgcctagattgcgccggtcggcaagtgggcctctggagagggcggaccgtaaagtacgccgccaaccagggaggcctcgcccagcgcctctcgaagatggccggggctctccaacggctccccgaggagctcgagaagacaattaagtcatcctcgagggacctcgcccaaggagcggtggagctcgtcctggcgagttaccaggccagggaccccaatttctctccatggatggcgctggatgagttccctcctgggaccgaggacagcgcgcgcgcgcaggtccgggatgccgccgactatatcgtcgacagcttcgagggctcggcccctcggctgcgttcgcccccaactccgacgaggagggcaatgccggtggtacagacgacagtgacgacgaggccggcgacccgggcgcatcggattgagccccagactcccgccattcttcagttttttcttcttttctttcttctaaggccttcgggcctcttttt

SEQ ID NO: 21719 - DNA, 922 bp, Oryza sativa
cgcggacctcggtgaacttaacgcgcacgtagcacaggcgcggcacgtcgtaccgtatgtgcttgatgtgcgccgcgagcttgtcgtccacggggaacgcggcgtccgcgtggacggccgagtcgaagtagctgtccttctgcgtgccgaaccacacggccatcatcacctcgccgcggaactcccctttcttgtcgaagacggggtaccactgcggcgcgggcgagctgtcgggctggacgctcgccggcgcgtcggggaggatgcccaggtcaaggcgcgtgctgccgacgtagtcgtccttggcgaagccccggccccggacgagcacgtccaggaacggcgcgtgtatcctctcccgcgagaacgcgaacacgtcgtcccactcggggctcgccgtcttctcgacgtggcgcgtgatgcaggagtagcccccaagcctcagctccgcgaacgggtcgaattgcgccgctccacttgagcccccgcgccttgacgacgcgcacgtacaggtactccatcctctcgacgagctcgtacgccccgccaggcccggagcaggcgaggccaggcgtgatctccctgatcccgaactcattgttcggcggcagcatgccggcggggcgggcataagacctcggcagtacgtcgcccatgtcggcgaacactgccgccggtcgaacgagatatgctgggctggtctggtcacactagctggtcagtgagcaagttgcatttatatatgtgtgttcagcagtctggctggccaccaaccggccgcgcgcgtgacgtcgtgcgtggcgagcgaatgcgtggatttttgggatttggtgatcgacacagtcggggtgtgtgcttgctgacggacgattggtgatccaccagggttagttagagtaagtcccagagcaaacagacatga

SEQ ID NO: 21720 - DNA, 13933 bp, Oryza sativa
cccatctccagcatgtcgccgccgacgaatctcctcaccccgccgtcgccctttcctttccccccaccgccgatgaaactcctcaccccggcgtcgccccttcccttcccttcccccccaccgttcatcggcgacgatcccaccttcggccctaccggatccctctccaccaacggtagagaccctcatgccctaccggattgatttgataactacaagctccatccacacccagtgctccactcaggtttgatcccagttcgctgcctgctccactcctttgatccctgttccccccttttgtccagataatcgcacacttgggcaaactcaaccaaatttcgattttcagatatattgtcatatagtgttacacaatgagaattcctgctcacaactaaatagctggacgtgctcctattttcttgcaatgctatatgttagttttgagatgcagcggctaagcgagtagaatttgtgagctatctaagtaggatatgatttaattggtgcaaggttaatcacaatagcagacattttgtagattattattctctaccctctgagtaaaaaactgaaaatagatgtcttagcagattcttcagatgttcagcagaccactgtgcgtgaccccgctgattggaaacctcctgtgcgcatatcctgctgtttccagtccatgtcctcggttcatgacctgaattgaaggtaaaagcagtttaccaatatttttactccttaaaaaacaaaggtttttactctgccaattgatttattccgtgatataaatcagcctctattgaaacctatagtgctgaagttatgctttatgaatcagtactattttctaccgccaaccattgcaagtattcattatggtctttatcatggtttatggtttattatgaccactagcaatgcagcgtgcacaaatatatatatatatatatatatatatatatatactgattcctttagttgtctctcatatacaattaatggatatatctaaaaactgaacagtacggggcacaatgcagcaggaaaatggcttactgaatgaaaagtatgaacataaattcatataatgccaaaagcatatattcaagcctagctttcattaaaatacaaaagtactttcctctagaaaaacacgaaagtccttggatataacaatacacgtgcggtgtgtgtgaattaacatggtagatgtcatatcaattaactcatgtgtaatgttttgcgatttaaaaaagccacttctgcatggttgaagcttttgtgatcttatatgcaaagagaaaggtaaaatgaaaatatcaaccttgctcacattattcatgtttgtgttgatcctttttctaagtgtattttaatttgatctttgtgtcaggttataggaaacaccgtacctcttatgaacagttatgctacagaagtcctttttgggaatttgggttcaatcacacttggaattaatatgaaaatttattttgctataaaatatgaacattgcggccacaaagagtgttaattttcttccaattgattaaaggaaattctccatgaacccaagtttaaccactttgttcctttgctatagggtacagttatttaatttactaggtgaaaccccacgcattgttgcgagaatttagtatgataacaataaaaaaataacgtgtaagatagctaaataacatcagattaagtaaattaatgtgctttatgataatttaaatttaaatagtatgcagaatggtgattcaaacgtaaaaagtaaggtggtatgactttatggaagaagaaaagtagggagatagtttggaccgtagattaatcatctaaattctaaaaacaattgatatgatatgacttaattagaggaaaaactgaaaaatataattcgaaccatagattaatcatttaagcactaactaagtgaggatgagctatataagtttataggatatcataaaacataataaagatatacattggaacattatgtgaattatgttggataataatttaacatgtttgtatttgaaaagctcttaaattataaaaactataaagatatagcatgtttgcttgatgtttaaatgtgatgattgttagtggatgatgatgtaccatcttgttagtggatgataatgtggcatctttgcatgttaagcttaaggagttagtgggggataactttatagtaagatagaattagtgtacagtgaatgatactgtgtaaatgtttcatctttacatgagctaatttgtgtgtgtttttaaatgcatgcagtgtcttgtctcttcttgtacaatggtgaccacaaggttatatgttagtataggtccccacatgttcaatgtgaaaactcagcgaaattttatagacccaactgcaattaatcaatgaaccgaggtcaatacgagtcatatcatgctgatattagcggtgttaacgggacggaaaatacgatcgaagatgattatgtccgtcagcctgatgaaattgtcattggttatgcagacattgaagattcagtgaacgcactgattgaatatgtgaatatgtgttcccctcactcaatgatgagagatatacaacctccgcggaatatatgagcacacgggccattctctcaacagaaaatgatttcgtggataagctgaacaggaagatgatcgacaggtttcttggcgaggaaaagatttaccatagctttgattctgttgatgatgattcccaaaataactaccctttggactttcttaacacgataactctaaatggcctctctccacatgagctgaaagttaaggtcaactaccatgctattctcctccgcaaccttgatcctaacaatggattatgcaatggaacaagattaatgatcagggcattccaagacaatgcaattgatgctgaaatcgttggtggacatcatgcacgaaaaagggtgttcataccaaggatctctctgtctccttcagatgatatttccctttctttcaagtttaagagaaagcaatttccaatacgtctaagtttcgcaatgacaattaataaatcacagggacaaaccatcccgaatgtcggtatctatcttccagagcctgtattctcgcatgggcaactttatgttgcattatcaagaggggtgtcgagaaaaacgacaaagattttggcaaagcctaaaaaagaagtgcaccccacaggaaggagcacaagtcactatgatgttatatctttttcaatttgagttatcaaatgtcatcccatagcattagcatgggcatgtaatagaaaaataattataatatgaaaatgcactatattatataaaaaaaatatcacccactggtgatgcattataatgacgcagatatatacacacacgcacaccacatacagaaatgacgcttgtgagatgaataaatattgatatcaacgccattgtaaattattttgcgtgtcacggatatatgcattatatatcatattattatgcattatgacttaagacacagatatgcgcattatcatatatctttaatataatattattatgcattatgacatggggcacatatatatgcattatatatctgcatcaattggtatatcatattattatactttatgttaaatatatttgatgtacgaagtaaattgaattaaagctcaaatgtatagttcatatagtaatatttttttgctaacatgaaaattttaaaaattattaaagacaaatagagttacaccgggtatattactagtacgttgtgatatgacccgctaccgtatcttactcctacattcttatcatcagtttgctgctagatcctcgcgtgtttgttaacgaaccagatcttacacctacccgtaccggaatgcgtaaaggcaaagctatgcctgggaagttgggagtggagcagcgcacggctcgtcgcgtacgtacgtgctcgctcgagcgcgattgtgagacaacgtgacggagcaacgcgcgcgacgcgccacggtgtgcgctagctaccaactagtataccgcgctacgcgaacgcgggttcacggtaccgaaacgcggcgaggagcgcgtggcaggagtacgtagacacagcacgcagccacgcgcacacgtagtcgtgtacgtacgcgcgcgtaccggggaacgagcggtaggcgcggggtcggccgacacggcgaggcaagcgcgatctcgatccgtctctctctcaaccccctggtgcagtgccgtccttttcccggcattttctcccacgcccccccgcccccgcgcggccggggcgccatgcgttttgcctcgccaaggccacaccaccgaagccagccgtgcctcccgttcccagatccacgcgcgcaccgcgtgcaccgctgctctgactgcttcgcttgtctccttgcgtctagccgcgcgcgtttgtcagctccagcttccacacacacctgactactgtacctgacattaacctgcacgcccactttgcaacacaatcgttgttcagctgttcaccatgcctttgactgtttaacatcgatccatatatacgtagccagtgaagccggtgtacagttgagtacattgtacctgaggaggagtaattcagaaatgtcaaaggctgggggtctgtctgtggcgttctactaaaatactagttcagacatgtcaacgttacggtttaactagccagcgatggcaacactggaaccaacaaaataacaaacaacagtaaagtagtacggcttaagtatgccaacttggttacatcgaggatgtaaactgtgcttagtttatcagtttaggtgatatatatggaccagctccatgctagctaggagtagctagcaacaactagaacagtggatcgcactgcgtgtaataattgcaatgcacatgatcaagagatgttctgggaattaaccacggcttgcctacaaaattcacgtatctgtacttgtataacagcctcaagaaaggggacggatcgagacattcatgtgcggtcgaggagatgactctgcctcggttctcttcataaccaatagtacatggcatgcatgcatgccccattcttccttcacctataagattttatctctgttacgcgtgacatgaatgcttagtttaatacgtactgttagtacttctgcattactgtgattttctgcacgttgtatagtggaattactaagtcacaaagcatttaatttaaacccgatctgctaagatattttacctctagaaaaataatattagcaaagcattgacaaggacttcattctaagaaatgttatcaacgaattcaacttccagaatatatcatcatacgagtcaacttatctcaaaaatatcatcaccatcaggattccatccgttaactctactctgttagcccatttgaaaaatgcgatagggttaatggagagtaatggatggaatctgataacaatggtatgactcatatgatggtatttcctaaaagttacattcgtcaatagcttttcttaacatggagaatttgtcaatggcattttggattttctctagtaagatttacacattgaccctcttatatgatgcaataattctaatattatatccctttccaatcacaaatttcagctgctaaaacagtggagaaaatggtcaaaagttattgtaacccattccagaaacagagctgttaatgccaaaaaaaaaaacaaaggtgcatttgtcttacaacttgtcatatgaagaaactattctgaacataccccgatgtcgttctgcagttgtatatattgctccaatgtaaacctatcacacatggtcccttcctccctcagttctagcaaacccctcgaagcattgggtgagctccgagcagtacagtgcaagcctttctcacttctatctatttcgatcatatcatatatccagacccttccatgttctctagcttcttgtatatatatccacttgagtgaaccactactgctatctgctccatgcctagccaaagctctccgcaaactctcaatgggaagctaaagctcaacaccagcaccaccattctcctgttcatcgtcttcctcttcactctctgtatcatctcatgtgaagctcgtcacgatcacctccgtatcagtgacaagtactcgagcaagaagtcttccctggttcccaaggtcacagcagatatatgatcattgttatggaactattttttctcattcctgatttttttttctctgtatcacgcaggatgtggctggagacgatgttgttgggagcaagcagccgatcgatcaatcagtgggcaaggaggtgacgctgaatgcgaagatggaattggcggcatcatcaggtggagttcgaaatactggacccgctgttagggtttcgcaacagctgcttcgtcatcggaagcacgaggatgatcagggaattcacctggattatgctcaacctaaaacccatactccgtgccataactgatgacatgatataatgtcaatgctatccatccctctgattgtctagtaatctgtctagtataatcctatctagcctgtatgtttttctagctgtgcctcctagctagcactagaacacataatgcacgtacgtgtgcatgttttgatgagagccctcccccgctgtgagcctcactagctactagctagtaaaattatctacaaacactcatttgcaaactgacagactgagtgctagctatagcttggctacagggagttaattttgatatatagctcgaatggaacatgctaatcttatatactcccatctctttttccctcgatctcaaatttgattgatcattcctggtagtattgtttcatagcaagtggtcgtgtgatttgcagggagttcttctggctctctgaataaacggtttgaaggaaccaaggtatgtatatatgcaagcatttcagtctgagatctcacatatacacatagcaagctcccttcttaatccccatagcaaactgggtatctggccctcttcttaatccccttctgcaaaaataatgtaggtgaggtcggttgcgcgagagcgttcggtgctaggagctgagactaacagagagcaagtaggatcaaagccggcgaccactgcgtacaccgcggaaaccctagcagccatggactacccagttgcacacacagcaccagctgttcacaacaggtagccagttgcaaaaatgccaaatcgatagcatgttcggccttttcacataaattggccaaattttggaggcatatatcgagagaaaacagttcgctgttgatagtgtgatcactggtcagaagtatgtagcgtcagatctctccgatttacttagcccatcaagcatcaagcctgtgatgttgtatatataggattacaaaatatggaggcatgagtgaatcaaaacatgagtttgcaatgtgcatgcctcttgctgaaggtggttttcgttaccaattacatatgtgggatctatttcctgcactggtctcctcacaaaggacctgtttagggaagttcagccgcaacatctcctagaatcttcaggtcctccaaacatgcagtctatattcttacctagattatgagaatttgtaaatatagaatcgagatgaactagaagctagtaaccctagcttttccagattgtcaccaattgcttctcagaatcccacaaacagaatcaaaaagttgatcttacatatgtccctccatgcgaaacaaacgcgctcagcaggccggtcggcaccgcacagtatgatcttaacctttcttggttcagacgacagagctgctgatattttgtggttaatgatagagtactagagtctctgagatcaagttccctaggctcgtcattggctaataaataaacctagctccagaagaccgagactatttggagtaaatgtttcgtgaatgttgtgcacctggagcgcagtcaacagtttatgctgaagtcaagcaaaacgtgttgtacagagtacagtgcataataaaagggctttctaaaagttcagaactttcaagtttcaacaaacagtccctgcttattgagttccttttttcttagatggagctttgtacacgttccatcagtcaggctccagcctcttgcattcttcatgtttgatccagcagaccagcacaagctcttgaatcaacgatactagttccaaagcccccaaacaacatcacctcaaaagaacaattgtatggcaccattcagcaatcagaagaaaaaaacaaacttgtagccaggtgtctgattagaaacgcaaaactgagagtaaatcctagtatattgaaggcacgaactacaaaggtttttagtacatgcccacttgtgccaattatctcaattctcccaagaatgccccctgatccctgcatcaatcttaccaaaatagtgtaactaatgcgagaagtgcaactggaacagaaacgcctgctctaaaaaagacagacatcccaaccccagatccaagcaaaaacctattggtttacatccctggcgatgtctcatgtgttcatcaagatggtaaaaccacatggattcaaagtttctcttccgttgtacagttatcactaactacacttcaccacaaatggtttgaatgcatttaggaactgtgaggtccgcaccccaagcttgaggtcaacttctccaccacccagccagaagaaatccttatctaacttggtaatagcttcatcaatgataacctgtgtagaaactcattgtatcagatgccttgaaagcttcaaaatatatgtaccctctctttccagagaaacaagaaatacaagaactcaaaacatccacgcgtaaaatgcaatctatcagaagtgtaacttgataagacagtttgtcctactcagagttgaaaatgaaaccaaccatatatgtcaccagacataatgcagacagggttagaattcaagaaaggtttaacaggatttgtaaagtacagagttttatatatgagcgtgcaaaaacatgattatcccttatattcttgcaagatctccccatttgaagttgacccttatgacataaaacctaaagttagaggcaacatttataccggtatgtctgtttccattccaatgcatgtaacagcattgtgaacaaaccctgtaagcttgagtgactcctcttctggtgccagcctcactgcacaaacacaagtaaacaacatgagttaaagaatagaactggcataaaaagtaggtcttcagacacacctacaaatcttgaaatgcctaaaatataatagaggcaacattactgcaggatgctgaaatctacacacgatatactgcattcctttatctttgatcatggtcacacatttttccttaaagtgaaaaaaataccaccgtatgaaaaatattgttgtatgtaaaaaccatcagacaagatgcttgccttagttgttgatattaaaaccaattcacagcataccatgttgttcaggaattaaggttttctcccatcctgtgagaggtatattcctcctcatacttcagatatagcattccatggagaggtaccagaactaatcttataggttagaataggattgtgaactcatctttatatatgttcttgaccttctcttacgtttttttagaggtgtaggtatttgtgctagtcaagagatacatacctattcctctctactaacactaaaagtcttgccactgccaattatgaacttgtcttctgatcagttcaacaggtttatttttttacctcataaatagtagggaggtatatacctcactaaggatgggagaaaaccttcgagggatttcatggaagctttgaatgctgatgaccaataaaaggttatcggtggcatttgtagagattagatttgtttcaatatattattataaatcttactgttaaatctcttcttgggtatctgcttctcgtttagggaatagatgaagttcttgatgctgtctgcattaagccgtgccatatactgcaaatatatccgtgtgaagataaaatgtactaattaaatttgaagatagtgtgttgagatcaaacttacagtttacctgaacaacaacgacataatattttgaattctttggattgctgcagtcaacaacatctgcagcagcttgtgtattcacctaataggtaacttcaacatcagcattaacacaaaggcttcattatttacagatatgttggcataaacatgaaattgtggctctacggtcagataacaaaatattgcacatccctcctcccattaatgttgttttagccaaatataaaagagttaaatttcaataaataaaatactgcactgataggcagtgaagttcggtccatattgcatttctgaatctaaagttgagaagaatgtcaataagttcaatgcaactcaaaacttcatgtatagctgagcaaatattcctaagagtgctcaaaagcacaacatttcttgcttagcagtacacaccctcttctctacaaatgccatgaaaacagagaacattttgatgtcaaaatattgaagctgctctcgaccaagttgatccaactggttaaaaatattaatatataaagctgctcccatctatcaacagtccagctgaaaccaaatcacaaggagcagctctacagctatccttctctgctgtatacttcaacttaaaccatttctttcatagttcactacctagcaatttccaatttatcatgttaccaattaccacgtcatgctaacaaaaagtatcaagtcattatcttgtacctcaccgacgacaccattgtgtctaaaaccctaaaaagttactgataacacaaatccaaagagctatctccaagccgacgttacgcaggccaactgttcgacaaaatgccgcacgggaaggaaaagggaggcccgtaccatgacgatgctcttgcagagttgattgactgaatctgcgcggaggaggtcgcggcgctcctcaagagggcggtcgtagtagtcggcgggcacgcgccggaaggtgaagtcgagcacgccgcgcgcggtcaggatggaggagagccgcgcctccgtggcgcccgtctccgcctcgccccccgagggcgccggggagatagatagcgcccccaggcggtgctgctgcgcggcgagctcgaggtccgcgacgcgggggaggatccgcagctgccgcgcctcgagatcggccgcggcggcgtccatggtcgccgttgtctgtccttcctaggggactaatttgatggttttggggacttcgaggtccaaaggctcagctaatcccctgtttgatgccaaatcaactcacttgcaaaattaaaaagtcaaattgtaggactaagcttaatcaaccatttgcatcttttaatttttttaaaaaaaacaaagtgtacttttttaaggaaagggagcactttcagtttaaccttcgagagtgacggtgaacaagatataggcaataagataataaatctttctaatgatacagtcatcgaacaacaaatgttgttggcaatctagttaatgcacgtaatgttgtgactaatgagatattgaggtcaatctgaacttttctttgaacgagtagcagatgattgccaattttgctaaagataagttatggtcaatcaaggttaatcgtatttttgacactcatgacatatcacatggatttgtaatttaaaggtcgctattggacactcacaaagctcatattcatatatagcctattaaatcgtatttttcacgtaactataaccaccctctttattaaatatatttacatgttgagttgtgctaattagtttaaatttagagtaaatttcacaaaactacagatactatgaccaaattatcataaaactacacatttaacaccaaatatatctcaaaactatacatttaagatgaagtgtcacaaaactacatgtttagtaactaaattattataaaactataggtttagaaccaatttaatcacaaagtaataatgtttatagctccaccataacaatggtgctagggatttaaacttcaaaagttgtagttttgtgataagttcaatattaaatatgcatttttgtgatacttaacctaaaatctgcagttttatgataattttggtgctaaatgtgtagttttgtgatacaactccttaaatctgtagttttgtgataatttggtcaaaatatctgtagttttatgaaatttactcttaaatttataacaattcgataatagactaacatgataatataaagtttctgataattatgctaagtgatttacacggccatgagtagccatccttggtcaaattttctcataatagggaagttcaaaagtaaacatgttttgtttaggtttagacgtgtccttttaggctgaacgaaatggaatggaatgttgaatagcttaatgattcgaggaacacatgaatgaaaaatacacaatggtatttaatgaaaagaaacttggatgtagcatttaaaaatggtatttaatgaaaagaaactcggatgtagcatttaaaaaacacacacacaccatttataagttcgaagagcatgcatatttatgttcaattcctttacggaaaaagagcgcaccctatccttgttgttgatacacactctttgtccctcttagcgacccatagtcttcatagcccatgatttttataagattagtatatttgatcaccgctaaagtattgtaaggatttatgcatttaaaatgatcttgaatttatcatgtagatgttactttattgaaaattgttagttttccaccctgttttatagcatactaattagaacatacgtacttctttttttggtaatgtacttatgtatgtctagataaattttatgtattatactcgtgtaaatctatctaaactaaaatatgtttattttttaaacactcgtcccgagctatggatctatttgtaaataagttttacattgtaaccatttaaaaatactaaaaaaccatctttatgacctatttatataaaataaatattacaaagggtcattaatttgcatctctatctttatagcacatttgtttttgtcctttctgttaacatctgatgaatctttccaacctaagccacatgaagattctagatacctcctttctatttcattcaacggtaaatattggttctacatataaatccaacggtcatcttcgctcgacgatgtggctcatcttgggaacatcctgcgaaaaactttttacttatagagattggcgcaaggcgtatacgtagccttccaattaaaagtcagtaggtagcgctgtgatgtaagaatggatgaatatgtgaacaactataacaacagaaaagtctgttcaccagataagctgcaatgattaaaaaaaaaacagataagctgctatgacggagttgtgagggccgggtttgattccattcaccagtgtttatgtctgtgtgttcataaattagccaatgctcaatccaagccggatatccaacggggcaatgaagacatctcgtacatctcactgccagtcagcgactcctttttccgcgtgttcggcacacggactccacgtccactaaatttcgtgtactatgcgtgccgtgcgcagcggtgaacccgatctctgcatacactgtgccgtgcgctgccctacccgacgcagcggcgagacgaagaaatccagcgcgtgtgacgagtgacgacgtgatcaagctgtcgggggacggaccgggcaaccggccacatgaaaccgagacctcgttacggggcgatgaaacgcgcgcccgttcgtcctgtggtgtgggccggagcggtcgtctcccgcgcccaactggacacctgatgggttgttactggtcgatc

SEQ ID NO: 21721 - DNA, 1567 bp, Oryza sativa
attatctcgaatacgaataagaatcgaatatgatcggacacaaatacggaaacaaatttttctcggaacacgaaaaccaactcaacttctaatggaaacaaatatcaacatatataattagctcattttatataaaatgaggtataatttataaatattttttaaaatttaaataatattaatagtatggactagtgttaagagataaactactattaaaatctataaaggtatattgaaggttatagaattagaaagaaatggggtatgtctcatgggtcctgcggatatccgaatagcactgttcaccggatatccgaattattatccgtatccgacggaaaatctggtaccatattcgtattcgtatccgggagaaaatatccgtattcgtatccgtatccgaactatccgagaattatccgattcgaaaggtatccgtatccgtttttgtccagagcggacggaaactatccgctccgttttcatccctagtggccggtggtgcagccaccccgcagccggcaggcccacgcgcggtcacgggctcccggctccgcgcatctgccgcctttggtttggttggcacttggcaggttgggtcccaacactcatagcactggctactgcagctgcgcgcgcgagccgtggaggtaaaaaagatctcactgcgcgtctgcgccgcggctgtgccgtccggcgaccaggaatccgcttcttgggtgaagcggatcgatgtgccagtaggcctgcctggccacgcagaagaggcctgcatggatcacgtcaaccctgtcgcgctacgtacgttcgcgtcatgttggacagctgaagcctgaagaaggcgtcacgtattcacgtgaatgcttctggagggttccgccgtcttccaaattactactctaggagtagggaaaattttgttctagggtgtgttagttcacgttaaaattaaaagtttggttgaaattgaaacaatgtgtgatgaaaaagttagaagtttgtgtgtaagaaagttttgatgtgatggaaaagttgaaagtttgaagaaaaaatttggaactaagagcatgttcactttgatatcattttcaatcttaccagattttggtagagttgcgaaaaagtggctacatttagtttgctactaaattttagtaactatataagaaatcctatcaaaattattgccaaattttagtaaggttttttttggcgttaaagtgaacaggcgctaaactcggtcctaattggctttctttgtgctcacggtgaagtaggcttatcacgaggaatacagtactgttcggcggcctatatatacatgcagcgcctttgtatgacggtttaaaacacgtacatacgtgtggattaatcgacgtgatttcggtggtaatttcatcgtacacctacgttgttttacgatggtgacatggtgtataagtagggcctgtttactttgatgtcattttcaatcttactaaattttgataaagttgtcaaaaaaatagctacatttagtttgctgccaaattttggtaactatatggggatcctctagagtcga

SEQ ID NO: 21722 - DNA, 3961 bp, Oryza sativa
ttttgacaacttgccaaaattttggtaggatttcttatatagttacaaaaatttggcagcaaactaaatgtagccactttttgacaactttaccaaaatttggtaaggttgaaaatgacatcaaagtgaacaggccaaagaaatcctgccaaaattttggcaactatgccaaaatttggtaatgccaagatttggtaaggttttttttggcatcaaagtgaacatgcccgtagagttgaactttaaaatccaaaatcactaatatatatactagttgagcgtgtattaatttataaggaggcaaactctatacatatatatatatataggttctatatatgttgtgtctctgtttttccctccaactaaaaagaacaaaattgagagccaatctactgttatatgttgtctcttagtggaacagatgtaaattttaaaaaataattcacaccgaaatttccaacaaattaactgtcctaagtacattttgtcgtacaattgcttgcttacaattaaactacgagaacgtactgcaagcaaattacaaccacacccagacatagacacgccaaattcaatctaaaagagtatccattgcatgcaattccttggagaacaaaacctccattaattgaccaaatgatgacagaaactgattaactgaagaaacataaacaaatcaagtacagttaactcgctggattgatatctgaagcagttctacattcagaactaataacagagtaagtaaagactcgaccgatatgcatgcaggcactcaagaacgaacgatgtgttcgtgcatgcgtgctgcatgcatgcaaagctagcacgtcgttacaccgtacgcgcgttacgtagcttaagcacagatgaagccactagggacgttcttgccgcagtagttgacgaggaggctgagcttgacggggatgtcgagggtgatgccgagcacgttggccttgatggcggtgcagagtacagacggcggcctcaaggtcggcgaggccgccgaggacgccgcagcacggctcgtacggcggctggccgacctcggcgctgacgaggcccagcacgtcggcgcacgccgcgaacttgagcgcgttcttggggcacttggtgttgtaggacggcgtcgatggcgtcgtcgacggcgtcgaaggcgtcgggcagtacttgccgcaggcgctggccacggtgaagaagaggaccaggtttagagccacgaggaggaatgccctggaagccatggctacgctagctgaaagcgtacaagcacttgcgccgttgcacacagggctacgtaagtgatggtctgcaactagagagaggtgcgaaaactcagcagagtacgtgggtatttgtaggggagagaaccagaaccctagcaatctgttgttgtcaaaagactcctcctgacaaaccatattcgcagatcttccccaagattaatacattatgtgcatatatgattttttgtgagagtaacgtacttttttttaagaaatacattacaaatatagatgctcacagttcgtgcacacacatccctattaatacaaaaacacacccttctcatatgaacatatgtgaaagactgatccatcatatattgggattgacgaagtcaccacgagtgtctcactgttgatggtacattggctatcactaaaagaaaaaatagacgtaaatgtgatacttaaatccggatgagctggttccaactagagaaacctaaccagttaagctacgcttatttcacaataaaagaacatcctgaatgatcgatcatgcacatatattagatgcggatttgcgccagtgttgtagaaaacgggcttaccagtcatttactttagttgtttgtatatgtaggcaacccaagtaatataccgttcagtgtctaacgtgaccaccacatgtatttgattgagtgttatccatacaaaaatagtcactcatcttcagtgtgtccatgatcacggttaacacttacctttcaatatatgaactatgatgccgagtagtgagtaagagagatattcgatagaataacttgctaggcaatttcaacttaatatatacccgtcaaaccactcaaagacgacgatcaaatgtgttacatacctcagtgggtacttgaaccaaagcactacatttcacgatcatctcaattactcaaaacacttaatcatgcttagctagtccctagaaaaagcgaccagcctcacactttcatcgcaagctgttcataagcatcacaaatgcataaatatggataagagagcagcaagatacatataacataaccgggttcataaacccgtcatacaacacaaagatagcagcaaaagtctcataaattcatataagcaaaaccaaacccgtatttgccaaccattccacacagacaaccaaccagggcaagagccaagctaaactaccctcaacgccctcagtagggttcatcatatgtatttggatgagtgggatccaaatacatgtggtgatcacattggacactagacgatatattacccagtgtacctacaatgggcatgaactatttttttgacgcgatacatagtacaattatcatttatgagcataaaaactccatttttagcaattgattgaaccttctttttatcatctataaataatcgttcgtatattacacttgatcatttaaagtagcatatttatcttttatgatcttattaatttgtttagtgtttctatatgtttatttagtgtttccctccgtcccataatataagggattttaagttttttcttgcaacgtttgaccactcgttttattcaaaaaaatttgaaattattatttattttatttgtgacttactttattatttatagtactttaagcacaatttttcgttttttatatttgcaaaaaaaattgaataagacgagtgatgaaatgttgcaattaaaaactcaaaatcacttatattgtgggatggagggagtagtttttatttatccaatatgaaccaaactccatcactatttggtgtacaactatgagcatcaaaagctatattttgggttaatgtaagctatgaccattcaattgacatattaggcttatatagttttatgtttttaaatatccaaagaagctcataatattataaaatatatacatatatatgcataagccaaattttcgcacatataattctgattaatttttcatgtttcggttaattgttgagtggtaccctctctgtatgtatttcacatatataattccgattagtcgactgtatttcacaaaattgattattatacatcatatttttatgtatacagattgtttgcatagggccgggttatatattatatattatatatggaaattaaatgattttgatttataagtgtgggtgacaaataataacgagagcctaagagttggcctcaaattaaagttgttaataaattaatattgtttgcactaaaaagggcgcaccatatgcggttgtgtgaagtatatagtgggaaacaactatcttaaggaagaaaatatgtttcaattaagattacctctgaaggtaattaatataagtcagatatagcaatatatatctatgtggaaccaattttgttagtaactcacaaagatgctgatatacatgcatgcaagacaacaaaagaggcggatctggatttgaagaccagcatacatgaggggagcatatcttttttaagactgacaaatcatgcatgcatgtaataattcgcatttcaggacgcaccacctcctatacagcgaagtaagtacatgcaaaactatgccgagctaattgcaacttatgttgatagatattgacagcacgatatttgtcatgcatatgcggatgtgcataaaaccctcgcaacacacatctattgcatgccaacttataacccagccagtcacatactcacacag

SEQ ID NO: 21723 - DNA, 6379 bp, Oryza sativa
attatggagctaggcatggggcttaagccctagctgccccatgtctgattccgcctctgtacttacacgcatgtaaatatttttccctctgcttaattaatatataacaccagctaagtctagctcgtttttttctaaaaaaaaagtagctagctgttcaagaataccacacgcaaaagtacctctttgtgttgtaccacgaactgcattagtcataagtaaaacactcactttaagcaagctactccctctgtcccaaaaaaaaaagacaaaccctgaatttccgtgtccaacgtttgaccgtccgtcttatttgaaaaaattataaaaaaaattaaaaaaacaagtcacgcataaagtattaatcatgttttatcatctaacaacaatgaaaatactaattataaaaaaattgcatataagacggacagtcaaacgttggacacggaaacccatggtttatctttttttaggatggagggagtagctagcagctttcgatctgagatgaaatgtggacaatttaggccaaatccatagaaatgggcaagtggcattgtcagcgcgaagtgagagggacaagcggtacaatgggtaatgggtacccctccataaaaaaaacttaacttaggaggggatgagaccactccagtccaatgaatctggactacccctttgtccagattcagattcgttgtcttagaaggattccctcttaggttgagtttttttttgacagagggagtaagtttgatccccaccatttaaaccgcgctctctacaattaccaaaaaataatttatcattctactggaagtaattaaatgttaaatcacatataatttatgtatagaatccatcaaacgtactcgtaatgtcttaaaggtagtatattctttcctaaatagagtacacctaaaaatgattgctgcgaacattgggcaaaaatttgaagtggtttgtttccactggtcgctgagttgagtggaaaaatgacaggaattaattgggagctactgccatctacttaccgactaatacttcctccgttcatattataagacgttttagcattgaccacattcacatattatatatatatatatatatatatatatatatatatatatatatatatatatatatatatatatatatgcgcgcgcgcgtctagattcattaatatatatatgaatatagataatgctagaaagtcttataacttaaaacggagatagtcctagacaaccgaggctacgtgtgttaaattttgtaagaaacactgtacaaacataatgctcacagtatccctacattcacccctatgaaacacgtgcgcacacaacactctaaaagtctagatcagtatatcttaatatttgaggagtcaccatggacgccttgttgttgacatatacgtcgtctatcaccaaaagaataattaatcataaatacaagcacccgtgtaaaatctagtaattgagctcgggtatactgatttcgtcacaatgaacctaataagctgagttgtgctcactttacggtttatcagtgttgattactcctcatttggtaagaaaatatgggtcagtgacactggcaaaaagagttctattatcacaaaaaaattgatgaggacatcctccactattacccgctggcaaagacgcaaaagtcgggtggcgaccgtgtgagcctctgaataatcccaccttacttagcttggaaggagaaagccaccttaaaagagagagccaccatttccctattggactagtctttttgggagattgggtattttcccgagtgggtgtgactaagaactgttggggtccgagcaatcttaagttattgggtctcggccgaccctacctgagccggattgttatcaaaaatgatgttcgattcacattaagaaaaaaaatgtcattacgaatgaatttttggaaataaaagggaacccaaatcacatgcatggaggccagatcagatgcatgaccgtggacagtgatacgaaaggtgtgtgtatcttgagctggcaaagataaaactggcagtgagccagcgacaagggtcttgtccagctcgtggctgtggacagggcgcagtcaatgctgtgttgccccatggagtacatggactggaccatccgttctctctgcttttttctagaccccctggccgcctttctgcgcgctctgtgatcactggccgaagcacaactcatcaacgtcacatttgccggccggcagatggcccggatagcctgaacaacgaagtggcgcaacagaaactcagtggcccagaggaggagcacgaccagcgatcgacggggagatgtgtttggcactcacaaatccatgagattttgtgtacgtgcgttgctttgagggtgcttgcatatgtgactcttcttctgccttttggtacatgcagtatgagtttccttttacctgaaaccaacggcgggaataggagtaagcaacgacgctccagatcggcagagcatgcatcatcgtcatttccttttttccaagttgccaagaacaaacaagggctcgtgacagttgcattattgcagaacgggtctaacacaagaaaacaacatggcatacgacacagggttatgaatgactaactgttggagagatattctttttttgatcttgttggagagatattttaattgtacgtgtggctcatactgattcaaccattctcccacactgcagggtagggcctagcgtggaaatgtatgcgctgtagcgttattggcccttgggatatactagtactgattcactgaactactatgtctgcagctgtactatctagtgcaacacccagagcatatagcaatagcaggttataagtcaactataaccacgtatcaagaagaaaaaagaagagagagaagaaagcatgctataaatttgtagccagctttaacacggtgtatgagaggtggctggatattaatggtgtagtatatttttataactaactattacatgaatagactattaaattagctataaatgatttatagctaacatttgactatactagtattaaacttgctctcaggaggtagttcacactgaaaaaatgttagtttcctaagaggtgtgcttaattaatttgtatatactctcactaaggtgtactccctctgtcttaaaaaaacctaacctaacctagtacttaaatgggatataatctagtatagcgaatatggacatgtgtactagtctatatcccatctaagtactaggttaggttttttttaggacggagggagtagagcacaactaaaatcggaacatgttgagaactagttatactgtcctctctgtggtttagttttgagtgatttactgtatttaattgtctaccgcttccgttcacaaatatatacgagaggtgggagtatggttatagtatttctgtgagaactaaatgagggtggcaattcggtgggggtgtactagctagctactccctccatcttacattttggaacggaggaaataggctacaagttctttacacaatattcattgataaattttaatcgttatgggtatgttcactttgatgcaaaaaaaaccttcctaaattttggcattgccaaaattttggtaacttgctaaatgtaaccacttttttggcaactttaccaaaatttggtaaggttgaaaatgacatcaaagtgaacaggccctatatttgtgatcggtgggtactattaagtttggcactaagaacattctagtagcaccttttttttaaggaacaaaaaacaaactaaaggattactcatctttctctctatacatatatacacacacgcttgcgcgcgcaggcacacaaataacacatcacgctagagggtcgtaactccaaatacaccaaacccaaatctccctacgagataacagacttttactgacggagtaaaaccgtaaggattaacaaaatattgtttggattattctatcctcacgaccactaccaggtacgcgtcgacaggaataaaatgtgaggaatgcgagattaatttctttcacaatggaaggtcgatagaagctaggacaccaaatcttgacgagaactgaccatgaggacatcatcttaacaactgcatgccttgttggtgagccaataggagcaatcgtccggactagaaatgtttgatgtgtctagcctctattatttgtatcacattctaccattatgggatgtatttggtttgaggataaggtcagaccggacataacgataatggttttagggacatgggtatacaactataactaatccttaattgcaaatttaagaataattaaactaggatgtaaatatatgactcaatgattattacttgatatgttttaccgaattccctaataatcatagtaattgaaattaagactccaaactaggtaaagctatatatttattaatttcaagtcataaaattatttgattacgaaaaagaaaaactaaggctccaccaagtaaaatttcaagtaataagtaataaatgtagcatcttacaccaactatgtctatgtaaattcattgttttggaggttttttttttgcgaggacattgttttggagttattaaatgaagaaaaaaagtaaagaaataataaacatatttgaatggtctatatataatacaagacaagtgcatattagtaaacgtttattttgggtttttgaaatattaatatgaatagtaagatacaccgacagttccctaacttgtgaggtggtataacttacctcacttatcttgtgagttagtagttatcttgtctctagggtgcatatatcattaaatacaagacgtgtggttgtttgatgccaagttggatgtcatatttacctaatacgatgtgctcgaaagtaacacgggcaaggtaggcacttaagaaaaggaataaaaagcaaattatcccccttatatatatgttttgcgcgctttgttctttatgagggcttttttttagaaaaaaagaagtattacattatgtgtttctacgttaaaagagaccggtctgtatgtttgtcgaaaaatttttaccgaccgactggatgtcagtatagatatttttttccatctaaagtcggatgggaatgttaatttggacatggtgtagtgaccgccatggcgttcaacttggcattttggcaacgatcgaacagcccatgtaacatgtgtcaatgagatttacatcctcaaaataagatgagtagctcatttaagtaattaatttcgagatgagtaactaaattgcacacaccacacaaattaattgtggtatcatggtgtattttatttattctagagttcggaattgtttgtgatagtaaataaatttgcatgtgagtatatatatatcccattttgaaaccaactacaaagcatatagaaaattttaaagttgttcgatagtcattattaacaattgaacgtgttatttcataacctggacgaatgtatgggctctctctattacatattataagacattgatgtttgttttatattatttttgttttaagtttaactaagtctagaaaacatagaagcatctacaatacaaaactagttttagtaaatccatccttgaatatattttcaagagtacatttgtttcatgttagaatattattgattttttaaatgagctttttcaaactattcaagtgtgacttactacaaatcaaatgacttataatatggatggagagagtatgaacgattttgattctagagatgtagtaccgaaagctagagtattagcattactccctccgtttcatatatatatggtatatattttagttttgtcctaaagtcaactatttttatctttaactacggtatctaaaattttgtatagtttaacaacatacgagtacatattataaaagtatttttttaaaactaaaagcataaatcatataacgatgttaaacttctcacaaatttggcacgcgcggagctgtagtcgtgcacgcacacatatgtacacacacagcaaacaatcacaaacagaagtacatatatatctgaagttgcaaaccaaagctttattagaagttggtaccggcacacaagctagcaccggcccttacaacaaatgcgcacgtacggatagcgggaataagagtactacaaagaagacaaaggagagagtacagagagaatccaaactggtaccgtgatacgtacaaacagccagcatgcacgatcgatcatgcgttgcgttgcatgcaaagtacgtacgtaacgtagtagcaaataaacagagcagcaagcaaatcaaatcaagagtcgtcaaagccaaggggatcctctaga

SEQ ID NO: 21724 - DNA, 539 bp, Oryza sativa
taaaaacctgtgccttgtctcgttggctattaaaaaaggggtgaaaataataagaaatgcaaaatgtctgttgttaaacattatttcttgaaggggcacaacgttgaactatttgtttgtaaattaatctttgactgtacgaaatcattgtccactaacagtggtcaaattagcatatactaccaaccaccgccctatcaacacagtggtagattttgtttgtggaatatgactactcaccattaaaaaaaaagaaaatactgattggattgctacgtatacgtcacgtaggataaaaccgctctggattgaggtaaggggggtaatttgtccggaattaaaagttcagggtaaatgatgtctggttttcgagtttagggggtaattcgatcaaccacgatagtttagggggtaattcgtactttttcctataaaaaaataacgttactacgtgcaagatattttcttttatccttgtcatttactttaatataaaaaaaagagagtaaatttcataaaactgcaaatattttgtacag

SEQ ID NO: 21725 - DNA, 680 bp, Oryza sativa
agaacaaaaaaaatcatgcttgggctaaagtaatcattcaagtctttcagatctaaacagcacgtaagaaatgcagatagaggttggctgggtcagctgattggttttatacggtacaaaatatgaaaaactacttgcctggttgtatttggcaaggcgctctgatcggcagggtgctccagtcttgatctgaccctgtttcagaatgacaaagatatattcagccctcacattcagtacaagagtaacaactaatacaggatgccgtaaagttcactacagtgaatgtagagcacagaatcttaccgtggccaaaccaacagccaaatcagcaatgaaggtatcctcagtctcaccactgtggcaatgaaacacaagtcaatatacaaatggttggtagtcagaccaggtccaccaggaataaagacaggtaagcatatcagtatacctcctgtggctggtcatcacaccccagccagcacgctttgacatcttcacgggctcaatactctcagtgacagatccaatttggttaacctgttgaaagacaagggtgatatattcgcacatggaagataaactattaaacgtgaaggaaagaatcaatagaaccataccttcagcagaagagcattgcatgacttctcctggattgcctttgccaccctctgcataacata

SEQ ID NO: 21726 - DNA, 536 bp, Oryza sativa
aagtccaagttcaatcaccaccaagaagcctggaaccataatgcatactttgggcctgaatccgaggaaggcggagctacaatgaggtggacactgatgacagcagcagcatcgacttcctcaagttcctgagccaaataacgcgctagataattatgtgcagggcaaggactaacaggaggggcagagagagatgttccatgtcttcgacaaggactagaaaacaacttcatctttgccaccgagcctcgccacgttatgtccaatgcatcaagaaaggctcactgatgagaaggtcgacaatgatccgcgaggctgatggtgacaggcggatcactacaaggagtttgtacttaaattcagaaaaaaataaaagaagcaatttgattaaaacacatacaaaaattataaaatcattaaaactataaaaagaaacaagattccatgtagaatataaaatatcaagagtccatataaaagtataagttataaatatatggaatttggaataataaaagaagtattaaaagaagagt

SEQ ID NO: 21727 - DNA, 504 bp, Oryza sativa
gatgatggccgtgtggttcggcacgcagaaggacagctacttcgactcggccgtccacgcggacgccgcgttccccgtggacgacaagctcgcggcgcacatcaagcacatacggtacgacgtgccgcgcctgtgctacgtgcgcgttaagttcaccgaggtccgcgacatcgtcttcgcggacaaggcccgggtcggtgaggtgttcgtcaggtcgcgcatactgggacaggtgcacaggacgagaacgtccatggaccaccgctggaaagacgaggaaaatggtcacctgtttgtggccgccgcgccgttcaaggactacctcaacatgtccgtcgtgggcgtcaagaacggcaaggaggaggtcatcggccatgtcaacgttctgcttgacagcttcgaacgccggtgtgacgcccgcccgattagcccaagatggtacgcccaattgtccatccatctcatgtactagcaaagaacgacaaagtacctggtattaggcaa

SEQ ID NO: 21728 - DNA, 1138 bp, Oryza sativa
acgccgcatcgccgagcaacgcggcgtcgaaatgctcgacgccaccgggctcccacggcagccgcggcgaagcgtcaggcatctcgggcgcgtctcctcccccatcacgtaggctcactccatcaaaaacaaaaaaacaaacaaacaaacaaacaaaatcaagagaaacgcgcgaggaatcgatcgattagctcctggagcagttgggatttgggaaggatcaaacgcaatggggaaaaaattgggtaggaatttttgggggaaacggtggaggctgaggtgtgcggtcggggagaaccaggaggcctctgggggaaaatgcccgcgggagaatagcggcggtggcatggcatggtgcatggcgaggccgtggccgcccgagaggcggaggaggaggaggaggagagaggagagagagggaagcggccaggcgaggaaggcgaaggagtggcgtcgtcgcggggttcacgggtcgcggctgctttctagctgggccggtctggtgaatacgggttggaataagttcatttaaggtcccttaacttgtcaacaaatttgattttcgtccttcgatcgaaaaaccagatacaacgggtccctcaactatcaaaaccagtgcagatgatacgtggctaatttgactcggtcttcatctgacgtagcattgccgtagcgcttacgtggcaattcgatccgaaaaataataaatctcatgggacccacatgtcagtttcaacaaaagaatgaattaaaaaatggtggggcccatatggccccacatatcattgtcacccctcctcttcttcctcctctctcaccatctctcccctctcctccctccaggcgccacggggccacggggaggtccggcggcggcggccggcgacgtgggagaagggcagtgggcagggcgtcggcggcgagagcgctgggtcttcgctcacggcgtcggcgcgggggggctcgtggaggagatcggggccgcggcgccgcccgtctccgacgagctagagctcgtgcgagcgcagtgccgggagctgcacgactgccgacgagaagcagaggaggttcgaggtgtacaggagcaacgttgagcttgttgagaagttcaactccatgtgcaatggctacaagctgg

SEQ ID NO: 21729 - DNA, 1292 bp, Oryza sativa
ccgaccccctcggggggactaagaggagggcgaacacatcaccctcgggcccgacgtccctcgagggtgccaggccacgtgggcgattgtgtctgcctcaaacctctagtcatgatactcctgatcccatgtcaccgacagtagcccccggcgttatgccagggcgatcgccctctttaagggaagcggtcgggcgtgacgccactcctaaggcctggtgacaggtgggaccggtctccacaattgggcagaaacccaacggtcacaaatcacgcacatcggcaatggtaactcggctgtcaataatgagcggtctcttcaagactgccacattactcgagtagcacacgaatctggacatggcgattcgtttcgtctggagatatggtaacgtcgcttcggccggcgagcgtaactaacgcgcacacgatatgatctatctcgactgccacaaccgcatatccacctcatgcgccgcaagcgggcgaatgggatttagtggaagcgtgggcgcgagaaacgagggggcgaaatagtgggcgcgagaagcgaggagccgggcacagcgttggcaagagtataaaggcactgaggaagggatctgtttccttcctttcgccattattccccttgtcttcgccgcttgcgccctaactctttctttcctgtgccctaccttcgccacacgcgctcgctcttaatcttctcttcctccggcgccatggcacggggctccgctctgctcgatggtagcgtgctgccgccctcccgcatcgtgagcgagaggcaggctgggctgtcgcgccgcttcatgccggaatctgccaccggccgggagatagtcacgctgggcgagggacgcccggcgccagactacccggggcggtccgtcttctttctcccctttgcaatggcagggctggttccgccattttcttctttcttcatggatgttctggagttctacgatctccagatggcgcacctcacccccaacgcggtgatgacattggccatcttcgcgcatctgtgcgagatgttcattggggtgcgcccatctcttcggctgttccggtggttcttcaccgtgcagtcggtgtcgccgccatcggtagttggtggctgctacttccagccacgggggccggtgctgaaccgctacatcccctgcgccctccgcaagaagtgggacgactggaagagcgactggttctacacccccctcgccgacgaagcgcgcctccgacttccgagccagcccccggcgcaggcctccagctggcgggcgccgg

SEQ ID NO: 21730 - DNA, 1241 bp, Oryza sativa
ctcggggaaacctcatttcccctccaaagtggtcgtttaaccgaccccctcgcaggttcgtctctcacccatcgtggctgtattcactctctcaacgcgagttttcactcacccatcttgttcgtcttctagtcttttcttttgtttcagcgagatcccgtcgcgtccctcccgccattccaagtccggccagtctgaggccgaggatccggcggccgcagaggcccggaggcgggaatctgaccggcgagaggctgcggatcgcctacgggaagccgaggaggccgcccaggaggccgcccgggcccgccaggccgaggaaaccgctcgggagggggccgcccgggcccgccaggccgaggaagccgctcgggaggaggccgcccgagcccgccaggccgaggaagccgctcgggagaaagccggatttcgccaggacgaggcgatggcgacttccgaggcagctcgcgatgaggccgcgggcgcgtcgcttgggcccactccctcgggcgacgctcaggcgacaacttccggggcagctggcgacgaggctgcgggcgcgtcgcttgggcccactccctcgggcgacgctcaggaccaaccgggtccgggggacatccccgagtccggcacttccattggcggcccgagccgcgtggcatcctctccaaggcggctcttccccacgccttctatcgccccactgaacacagagccccttctgcaggccttggccgccgcaaacaccacggtgttggatgggttaagtgcccaggtggaggccctgcaggcagagcgggcggagctcgacgccgcgtgggcgcgtgtcgaagaggggcgacgctcggtggaggccatggtggaggtgggccgtaaggctcaccgccggcacgtctcggagcttgaaacccgtaagaaggtgctggcggagatcgccaaggaagtggaggaggagcggggggctgccctcattgccaccaccgtgatgaacgaggcgcaggacaccctccgccttcaatacgggagctgggaggcggagctagggaagaagctcgacgccgcccaggggatgcttgacactgccgctgcccgagaacagcgggcggcggagaccgaagcggcgtcccgacggcgcgaagaggcccttgaggcgcgcgccatggcgctggaagagcgcgcctgcgtcgtggagagggatctggcggaccgcgaggccgccgtcaccatccgggaagcaacgc

SEQ ID NO: 21731 - DNA, 1947 bp, Oryza sativa
tccccccccccccccccggagttcaccacgccccggggcagggctcggttctgggccccgtttggcgattttagccgacccgagcccccgagggcaggattgagcgcgagtgacctatttcaagtcaagattcttcaaaaggaaaaaacagcacagacacagcctttaggaaattgaaactgcttttattgaaatactgaaaaaaaagaaataagaatgtgcatgtgtggcagcccccgggcaaccctgcacgcccgagggggtgcggggttggcccgagcccgaaacctgacacccgaccccccccctcaggggtagaagcgacgaaggtgttcgatgttccatgggttaggcagctcagtgccgtcgcccgtggccagccgtatggagcccggccgggggacgccgaccactcgatacggaccctcccacattggtgaaagcttgctcaatccagcaagcgtttggacgcggcgtaggacgaggtcgtcgacgcagagtgatcgggcccggacgtgacgctgatggtagcgccgtaggctctgctggtagcgcgcggctcggagggccgcgcgccgccttcgctcttccaagtagtcgaggtcatctctgcgacgctgatcttgatcagcctcgcagtacatggtggcccgaggagacctcagggtgagctcggatgggagaaccgcttccgcgccgtagacgaggaagaaaggcgtttccccggttgctcggcttggtgtagttcggtttgcccagagcaccgctggcaactccttgatccatgaatcgccgtgcttcttgagtatgttgaaggtcttggttttaaggcctttgaggatttccgcattggcgcgctccacttggccattgcttctggggtgggcaggtgaggcgaagcagagcttgatgcccatgtcttcgcagtagtcgccgaagagttcactagtgaattgggtgccattatccgtaataatacggttaggcactccaaaccgggccgtgatgcccttaatgaatttaagtgcggagtgcttatcgatcttgacgaccggataagcctcgggccacttagtgaacttgtcgatcgcgacatacagatactcaaacccgcccggggcccgcctaaacggtcccaggatatcgagtccccagacagcaaatggccacgaaagtggtatggtctgcagggcctgggccggctgatggatttgcttggcgtggaattgacacgctctacatcgccggaccaggtcgaccgcatcattgagagctgtcggccaatagaaaccctggcgaaaagctttaccaaccaaggtgcgcgaggcggagtgggctccgcattcgccttcatggatatcggcaagaagcacaacgccttgttcccgaggaatgcacttcaggaggattccattagctgcgcgccgatagagggtcccttctaccagcacgtagcgtttggagatgcgatggacgcgttcactcccttcgcggtcctcgggtagagtcttatctgtgaggtatgcttggatctcggcgatccaagcaatcaatctaagggagctgggagcactcccctcgggtcccgaggcctggactccgacgggcctcgggggccggtcaggcgcatccgtctcccctaaggggtcgggtcgcgccgacggctgggcaagcctttcttcaaaggcgcccggtggggtctgggctcgcgaggacgcgagccgtgagagttcgtcggcaatcatgttatcccgtctgggcacatgccgaagctcaatcccgtcaaaatggcgctccatacgccgtacttggcgcacgtaggtgtccatctgcgggtcagagcaccggtactccttacagacttggttaacgaccagctgggagtcgcctaacaccaggaggcggcggatccccagtccagctgccggggatcctctagagtcaacc

SEQ ID NO: 21732 - DNA, 2707 bp, Oryza sativa
tctttacaaccaagtcatcgacataagcctcaacattacgtcctaattggctacccaaagaaattcgagtagtacgttgaaaagtaggacctgcattctttaacccgaagggcattgtcgtataacaataggttcctatgggggtaatgaacgcagttttttcctcatcctccctagccatgcgaatctgatggtaaccagagtatgcatctagaaaacacaaaaggtcgcaccccgctgtggagtcgacaatctgatctatgcgaggcagggggtaaggatccttaggacatgccttgttaaggtcggtgtagtcgatgcacatccgaagcttgccgttcgccttgggaacgaccaccgggttcgccagccactccggatggatgacctcacggatgaatccggcctccagaagtcgcgccacctcctcgcggatgaaggcttgacgttccggggcctgccgccgcactttctgccggaccggccttgcgcccggccgcacggcgagacggtgctcaatcacctccctggggaccccgggcatatccgccggtctccatgcgaagacgtcagcgtttgcccgcaggaaggagacgagcgcgtcttcctatttgccgtccagaagaccaccgatccgtgtggtcttggatgggccgtcgcccagggcaacctccttgaccgggacctcgtcgcctatgatcatccgctgcctcggggtggcgggggcggaggcgccaagcctctcatcgccaccctcgggcttggacgcatcggcgaggtggtccgcgcgctgctccagacaagcgagcgcgactttgaggtcgccatggacagagatggggccaccggggcccggcaccttcatctgtaggtaggcgtagtggaccgccgccatgaacttcaccaacgcgggcctccccaggaccgcgttgtagggcagattgaggtccgccacatcgaagttcacccgctccgtgcggaagttggcggatccaccgaaggtgaccggtaggtcgatgtgacctaacggccacgtgtgccccggcgtcacaccgataatcggctgggacggccggagcaccatccccggggccttgatggcgtcaaaggccgcaggggaaaggatgttgagggccgctcccccatcaatgaggacacgccccaacttcacgttgcaaacggtgggggaaaccaccatcgcaatctgccctccccgggcaacgcacggtgggtggtcggtctggtcgaaggtgagggcaacctccgaccaccgcgcccgacacgtcgcctcatgagtaggggccgcggccagaagctctcgcttcatggccttgaagctccggcgagaaacgtgagcacacgctcccccatcgacagtggcaatggtggccccaggctcttggaaacctaggtcatcatcgccgtcatcgatgtcctcggcgggggccttctgcttggcctcacttcgccgattaccggaaggaaccgccggggacttgccctctcggcgctcctgcctcctctcctcctcccacttcctcgtccgctcagccaaacttttgactgcacggcagtccgcgaggtcgtgaagggaagtgttgtggacggtgcaccacttgccggttgggcgctccctgctgggagcgccggcctccttctttttgtctcctgcaggcctcccctttcgggtggcccgcgaagcaccctcgacggcgaggacatgaccctcgtcgtcggtatgggctgacctcttcttcctcctcctatcacgccgccctatctgagcggcggatcagggggcggccgaagctgccacaccggaaccggaggggttccaggtccatgcctcctccttacgagccactcggtccgcgagctgaaaaagctccgcggtagtctggggctctttggaggcgatcttttcgagcatgcggttgtgccgcacaccccccctgaacgcgtaaatcaccgcgtgtgcagggatgcatggtatggtgttgcggacttgacagaaccgctgaatgtacgagcgaagtgactcatcatcccttcgctgtactgcgtgcaagtccgcttcctcacctgggcgcggatatgtgccttggaagttcatggtgaactgttggcacaaatcctcccaagagtggacagacgcgggtggcaagttcattagccaaccccgcgcctgtcctttcagggtcatgggaaagaaattcgccatgaccctgtcgtcacccccggcggcctcgatcccggtcgtgtagacctggagaaactcggcggggttgacgctcccgtcatatttttcggcgatggtgggccggaaccttgggggccaacggacattccgaaggctcgccacaaaggctctacagccgacaccaccaaccgggggcacggagggctgatccccgcgtccgtggtgaggtcacactccggacgaggaggcgccctccgttgcgtggggagcacgtcggccattacgccggcgctcgatactgatgcgggcatccggttccccacgcagatcttcccgggtcggaggcgttgacgaaggagtggcggccgaatggcgaacagcggctgccgctcgccgcgccctccgtcttgacgacgcggagccggtggtagcagcaccagaggccttggtggcggaggaccgcccaccagcatctaggcgctgccgtgcagtcatgaccaatttggg

SEQ ID NO: 21733 - DNA, 710 bp, Oryza sativa
gtttggctaagcatccacatttgaggctatttttttacatatttttccctctagaaaatgtgatggaagatgatgagagagaaagtgtgtgtagggaataaagaagattataaatacttgtttgaataattaaatataattttgtatgaaattataaaactaagctaatttaatattaaaataagaaaaccatattaaatatttgtttataatgtaattaaaacatgaaaaatatgtacaatgaatttaatagtaatgattaattgtatgaataattatattcaattattgtattattatgtaattaccttgtaaatcttggattttgtataattacgatttatatgtatttcatatagatgaatcggcaatggatatacgcggatcggtggtcgaaagagtttattgacggcgtgcattattttttgggtgtggccaatgataacaagcgtaacggttttataagctgtccatgcgataagtacaaaaaccagaagaagtattccaccacacaaactattcatgcccacctgtttcaatgggggttcatgcgtagctacaaatgttggacctcgcacggagaggttggggttgcaatggaagaagatgaagtagaagatgagaacattccggactcggctcagtatggcggatttgaagaaaacacaatgggcgaggcggagctggatgttaagggaatgatgggtacc

SEQ ID NO: 21734 - DNA, 725 bp, Oryza sativa
aatctttacaagagactagagaaaatgtctcattgtaatcaatcccttctctttgcgtgaagccttttgccacaagtcgcgctttaaacttttccatatgccctctggagtcatatttggttttatagacccatttacagcctactgttttggcttctttaggaatttcttctaaatcccagacattgtttaatttcattaattttatttcatctttcatggcttccaaccattcagatgagcgagcgcttctcatggcctcttcatatgaggtgggatcatcctccatgtgcgactcttctatattatgaacatgatagtcatcatggatagccgatcttctgtctatttcagaccttctaggggcctcctgttctggcacattatctgtttgaggctgttgcagctcctcctctagtgtggcaataatttctgttgaatcctgtagaataggttcctcactttcattcattgttgccacaggagagataacaacatgtgttggtaccgcaacgtcatgcattggaggcacaacatcagcaggtagagagaagaaaggttcctgagtcgacggagcaggtacagacacccgcctctcctcaagatcaatttctcgaactaccgagctccccctaatccaagaagacgacgtgtctcgtttctacaaactttgtataactgtttggacagtagaaatgataaccctttgatctttcgggtaccga

SEQ ID NO: 21735 - DNA, 543 bp, Oryza sativa
gctccgaatggaatgagctcaaaatccgcacctttaaagtcagttgccctttctagaaatctctccggcataaacttctctgcctctggccatatgtctttatctcgacccatagcccagacatttataaacacttttgcacctttaggtattgtatagcccaatatttgaattgttgttgtagcttgacgtggtaataaaaatggaacaggtggatgcaatcgaaatgtttctttgatgacagcttgcaaatagggcagtcgaccaatatcagattcttcaattcttcttgtggatccaataactcgttgcagttcatcgcatgctttagccattggtaatgggtttctaagcaattctgccatcgcccattctacagtgctagagcttgtgtcacttccagcagcaaacaaatccttcaacaaaaaccactttgagatattaatatatagcacactcttaattatgagagagcattcaggtgatgaattattcagcactaatcactaacttaacccgtgcattagcacatgctattgatat

SEQ ID NO: 21736 - DNA, 603 bp, Oryza sativa
cagtgtatccagccttttcaattgcagtcttcaagagctcaagaccctccttgttttcctgcaatatcacacaacacaaacgattcaaaccacatgctaagtatattcatttagatttctaattacggattagcttcatacatcaaaacagaagttatctcagcatctaacatcaagcaaatacaaagcaaaacagggaaacataattgaagtgaagcacttcacatggatcaacagcatagtggaaagaaagataattgaattcactgctgcaggcataagtacctgaatgttaggagcaaaaccaccttcatcaccaacattggtggcatcctgaccatacttcttcttgataacagactgtacagataaaattaattaattttcaatgacgtaagatggggaaaaggtttaaaatgaagatgaaagaattaccttcaggttgtggtacacttcaacacccatcttcatggcctccttgaatgaagcggccccagtaggaaggatcatgaactcctgcaatatagagcacatcattaaataactttatgagcaacacatagaatgagaaaatcttagttcagatcactgcctgcatggcaa

SEQ ID NO: 21737 - DNA, 552 bp, Oryza sativa
ggaattatagagttaagcaaagtatttaatgaaattttatctggccccattttatattggaatttattaattaaaattagatcttctcttctaggcttttaaaatcatttctaataattccaattaaacaacaatttatatatttaggatttttagggtgtgacaaacctacccccttaaacggaatctcgtcctcgagattcggaagaactggcgaatagatgcggatgagctgacttcaattcatcttcttgttcctaagttgattcttcttccgagtgattactccattggactttataaaaacggataacttgatttctggttcttctctcatctatttctaagatacggattggtttctcaacataggttagatcctcttggacttctatctgttcaagattagcttcttcggtaggtacccttaaacactttttcaattgcgacacatggaacacattatggactcctgccaaagattgaggtaactccaactgataagcgacctctcctcttctgctgacaatcttgtaaggtcccacgaaacgc

SEQ ID NO: 21738 - DNA, 885 bp, Oryza sativa
ccttgccgtatacaattccgccaaccagcttccggaatatgttgtctttactgggatgaaatgagccactttggtaagtctgtcgactattacccaaatagagtcgtggcctgatgacgttctgggtaggccagtgatgaaatccataccgatttcctcccacttccactctggtatcttcaaaggctgcaacaaaccggcgggtttctgatgttctgccttgacccgctgacaaacatcacatactgctacgtattctgcgatttcacgcttcatacttgcccaccaaaatctctccttgagatcctggtacatcttggtactactagggtgaatggagtataaagtatcgtgagcttctttcagaattgcatcttttaaatctttgttgtcagggacacagattctctcgcccaaccatacagttccttgctcatcttccaagaaaccgatagcttttcctcttctcatattcttcttgatttcttgaatatcaggatcattaatttgggcttctctaacctgatcgattagagtgggctttgcttctaaggctgcaacgaaacctctactgacaattcccaaatttaatctttcaaattccttgcataactccaatggcaactgtcgtccttccgtagcattgcaatagcctttcctgctaagagcatctgctacaacattagcctttccctggtgataatgaattcccatatcataatccttaattaattccaactatctccgttgtctcatgttcagatctggttgagtaaagatatactttaaactcttgtgatcggtgtacacctctgtacgagtaccaaaaagataatgacgccaaattttcaacgcatgaaccactgcagctaactcaagatgggt

SEQ ID NO: 21739 - DNA, 660 bp, Oryza sativa
agattttcctttgttgaattctagattgcattgtcgtgttgagtgctggtttatttttagatttaattttaagttttgagtggttgcatctgttcatcacttaggcctagggttcatcactcaagtcggtgtgagttgtacgtcagttttaggtccagtttttcatctcaacgattgttgctggtatcttgaaaaattgaatcctctcttcgtcgggtaaaaaaaggtaatgataatggtgctacaactactcaaggtatgtatatttatgatgtgccaactatgtctactacttatgctacattagagcaacccatagtggaaacaattgctgaaatacctttgtcacaaaataatttgcttgatgtttcttgtgataaagaagagttgtgcgatgctccacttatatccatgccacaactagtgaatggacatgttagttctatagtagagccaccatgtgttgagtttaaacatgttattaacattgctagcgagaatgaagaggttaaattattatcttctttaaatacataggggtatattctatttgatgatgtttgtcctatcaactgttcagagaagaaattatttgctagatttgaattgccatgcccttctgatgtgatttttcatattattggcaattatgatagtaaa

SEQ ID NO: 21740 - DNA, 791 bp, Oryza sativa
ccgattgtggtatggtgtatgcattccacccaaatccaatatctttggtggtggagggaagtggttgggaatcttggaagtctgttctagagaaggactccaatggaagctggattgaacttccattagtgaagaaatctattgcaatgctgcaggcacttttactagattctcaacttgggggtggccttggcattggagggggatctggggctggcatggatgctatgagtgcacttaatcagttgttggatagtgatcagccattcttttgcatacttcggttgacacttgcttcaatcagagaggatgacaatggggaggatgacatttttatgagaaacattagcatgaagaatgtcatatctgaaggattaggctgtcaaactggaagcatgatgattcatgatgataattcttgttcgccttccaggaaacctcaatctgcgcttctgtggaggtacatagtgtataaccagaaaagtgtagtgatttagaataatagcttgttcaagtcatattctgaaaaaaaggctcttagctcagtaaccctgcaaatatgtactccctctgttaaaaaatataaggcatattttatttcgttaggacaagactttgatcaacacttactatattatgatatactgtcaccatttttaatgtttgacgctgttgacttttgaacatatgttcagctattcgtcttattaaaaaaaagagcaaatatgcaaaaatgttagtcatgcttaaaatacctttaataataaaacaaatcataataaaataaatga

SEQ ID NO: 21741 - DNA, 721 bp, Oryza sativa
gttctccattcgaactcggtacccgatttccacctgtccatccaggtgccgacattgatcaaggataacatccaacagactttgctcgatacctttcgaccggtcggaaatagacaatcctaactggaacgacctcttgtgggccgggcgccccggcgggcgggcaatccttgacaacataaagggtaagctccagctgcaaccatggaagcttgcgggcagccgtcaagtgttgcacgattaccggaacatgagtggtgcgacaatcgcgttcgtgcttgacgaactacgccggcgtcccgataacgaagaacaccagctaccccagcctgaacggggagggatgctacccgttggaccaaggacaggactgacgcacatggaatgcgtaccccccatgtccggggtcccagacaaaaaacctgaccagcctcctgaaataaaggatcgggcaatcctctgggggagggggatttcacgccgtgaggtttattaatggctggcaacgaactcgttgcgctggttaatcggctcccgcagcggaatcacctcactaaaggccggtaatcgggttccacaggaaacagggattcctccaggaataacatgcgaccaaaagcccgcaaagggccggaaccggataaaggcccatcgcttgcgcttttcaaaggcttccccccctggcaagcatcacaaaaatccctccccagtcagagggggg

SEQ ID NO: 21742 - DNA, 743 bp, Oryza sativa
  unsure (1)..(743): unsure at all n locations
attgaaannctggatattttgatattcgagctcggtaccctattaagtttctttgcaaagaagggacataaaaaacatctctaagtaaaagtgtgaagccattcgcgagctctaggcgaagatctctaatagtttcaacttttgcttcaactccattggcaactctaatggatctttcgcttctttgcgtagtcctcatcgaacggaatccctttaaacaattacacacatgaatagttgctccagaatcaatccatcatgtggatctagaataaccaatcataatgagattcatttacaaatgtaataatgttctcacctttctttgccatgatcactatcaggaagtcaggacgaactttcttgcaatgccctgtcttcttatagtggggacactgatcttgtcttaactgtgaactgttgttactgaggcagatgctgaggctgttttgcttttgagggggggggggtgaccagtggctcttttcctttgtatctttaacaaggttattggaggcaccattggtctctttgattctttcctcctcttgcacacaattagagatgagctcttcaagattccatttttctggacttattttgtagttgacaacaaagttgtcaaagttctttggcaatgaggtcataaccagatggaccaaaaaggcatctgagatgcccaaatccattggcttcaacttgaaagccatgtccctcatcctaagaatgtggtcttttacacc

SEQ ID NO: 21743 - DNA, 6584 bp, Oryza sativa
cttcttgatgagattggtggcatggcaacttactgcatccatgtcattgactttgatctcggtgttggtggtcagtgggcttccttcttgcaggagcttgcccaccgccggggagctggaggtatggccttgccgatgttgaaactcacggctttcatgtcgactgcttctcaccatccactggagctgcaccttacccaggataacctctctcagtttgccgcagagctcagaattcctttcgaattcaatgccgtcagtcttgatgcattcaatcctgcggaactcatttcttcctctggtgatgaagttgttgctgttagcctccctgttggctgctctgctcgtgcaccaccgctgccagcgattcttcggttggtgaaacagctttgtcctaaggttgtcgtggctattgatcatggaggtgatcgtgcagacctttcattctcgcagcatttactgaattggttccagtcctgtgtgttcctccttgactcgcttgatgctgctggtattgatgctgattctgcctgcaagatcgagaggttcctaatccaaccaagagttgaggatgcagtgattggcgggcacaaggcgcagaaagctatagcatggaggagcgtttttgcagcaactgggtttaagcccgttcagctcagcaacctcgccgaggcacaggcagactgcctcctgaagcgggtgcaggtccgaggattccatgtggagaaacgcggagctgctcttacgctctactggcagcgtggggagcttgtatccatatcatcttggcggtgctgatcagccataagcttcactccaccaaggttccaccaccgtttgcaagcatcgaccactccagtaatgtccatttattcttgcaattaaatgttgcaaatgaaattgttgtcttgagctgttgaactcttcatattgcttttcgttgcagcttattagctagcctagtggatttaggaatattggtgtcagtctctatagctaatgatgttgctttaggttgttgccatgctctgctcaattagccatgatcatctcattggaaacactgcttatgagtagagactagagggtaatttaacctatcaaatggttgtgtggtacagaattaatattatactgctgttgctctgtaattctttgggtacgttagttctgcatttccattgttatgcattgaactgaaatggatgcacaatgcataccattctaatagttagtggggatggctatcataggactaagacatattgatataactacatatgacttagtacagcaataaaaggttttgccaaacagctcaaatatatttggagtaataggtcataatcaagtttcagaaagcgaaacaaagataataaatttccacgtcattctctcctttttagtttgtgtaagctgtgcttagtaatttttgcagattagaatatgatatgcagagcaactaccggtgtcgtagttgattttgcatagcaattgtgtatctatcgatctgcacaagctcctgattgaaattctctcaagtaagtttgtctaaactggatcaaaccttagtttataacccccttgactgaccatcaacggtacaagaatgccaaacgatgtttctttccacaacaaacaacaaaataaatttattttgtatctctactctagaaatggatagccaatgtgtaaaaatatattgcccgtaacatgagaacttcacgcttcacagtccattcagttatatttccacaatagacgtaattccaggataacatgacgagggcgaaactaaaaatgcttattgtaacttccatgttatgtcctgtgacgaggacacgaggtatgcatatattcccattggcgagatggtacataaatcaatccttgtaaacttgtcaccttggttttagaccgtattccatttcgggagaggcctagttttcttggtgatatgttgtaaacttgtcggtgttggtaatttgccggatttgctccatgtgtatcccacatctactttgactccatttcactgcattactggacactgtaattgtcatcgtctgagttgtttcactctacagtggagacatttctaggctatttttttatgcatatctactgcttcaataatgcacatacatacacctgcacatacatacacctctacccgtgctatcatgtgattgtgtcctatacctcggattagaaaatgtgaagggctattctattaacgactggagagttgattaaatttactacagaactgggaaagacccggacaagaacactggctactatcagggcttatttcatctttgctcatctcccacatggacgtgtcccctcctgcatgatcgcctgcccctgcatttccttccatccatttacaaaaactaatcacctggagtctcaattataaaactagttttttatgatttgaaatttctgaaactccgaattaattaatagagttgtactcgatctagattctcaaatattatgttatacgatttaacaaattctgaattaatgaacataaagttataccccctttgaagtcttgggtatagtgtttttatgatttaacaataccggaattcaggattaatatacattaataaatattgtgttgtaagggcagtttcaaccctccacttaggataggatggtgtttatagcattaactacattgtcatgtaggacttttaacttatgtggcactatattaattaagagagaaatgaagagatgaagaaactgggtcttatgcaagacacagctttaacacgagaacctatgcactagacactatcaagttttgcattaggagagaataatgtcttcataatagatgaagaataaatatgattggtagagaagagaaatgatatatttattaatggtccactttaagaaaccatgggttgtggagtgtagtttctattgtggtgtcttgttgacatggcaccatagacactacttatggatactgtgggttgggactgccctaaggcctcgattagtattttttataatctaataattttgaaattccaatagttgaaattaacaaacaccgagttatgcttagtttagaatctcgataataatatctctatgatcgcataattctgaaatcaaaattaataaatattagtactagttaaaattgattgtttaaaatgtatagcacgtgcaggtgcactacttgcataattgatggctagttaaagggaacgtattttatgcgcttaagtttttcgtgtacatatcatgtatactagctaacaaatttcaaaaaaaaaatctaaaataaaattatacaggtacttttattagtattacttatgtgtcaagttttacctttaaatttattatatttagcctaaagaaaaggataaaattcctgacaatttcaagagtataaatcggttcgaattttatctttttttcaatcatatataaaataaatttgaaaatgagactttacacataaatgtactactaaaagtacatgtacaattttttctcgtaatttttctagaagtttgttatgtgtgcacaatgcggatacgagaaaacttatatgcatggaatgcgtttactaattaaaaagtaacaacaatgcgagtgtaaaatataggggtataccgagaactggcctggtcgaagacgatttgtggcttgatcctagcctgatccaccatgtttgtctggccaaggaccttgtttgcttgccatacggagatcctctgctgctcacctggaacgatccatctttgcctcgcaaattgcaattagcctgggcttcaaggcggcagcgacgattttatgattaccacggtaatcttaatctcgtagtacgccacaaaccgccgccgctgaatcccgtttggccggatcctgccatgacttgtcactcagatcccacaacctacacgaagccactcccgtaggtctccttcccaaatccttgacggatccgcgaagccatccgccgcgcaaagctctcgccatggcctgccggctcaccggatctcgccgtcgccgcggttttgcgcgaagaagccggagaggcacagaagtcgatggcggcttgtccaatctttccgcccacattgctgtagcctgaagcctgaagccgtaattccgtaaagcagttgatcggaagcgatagaaagcggtaaatgtgtttttggcgaagcttctgcggaataaaacttgcaggattttcagcggaattttttacatcgacatagattttggaagtacaattagattctatgagtctgtttggcacagctccaactccagcccagctaaacaatttcagctccacctgatagggagcgtagctgggtggagcgctctcacgaaataaactaggaaggtggagcagggtttaggaagctccataactccactccagactaaactcttagagctaaatttagaaattggagctgtatcaaacatggcctatatgcaattattattttcactatcaaaatacccgtgatgaagagatttttcattgtaaaggttatcacttattgcaagttgcaacatacaaatatattttgtttgtataatatatatttagagtttatgccttaaaaaaatgaattttagcggtttgcctaatgaaaagctgtaatggacggggaaatgtggatatccatccatctacaaccattgacattcaagtagtcttaaactcgaatttcaatgtctaacatcccctctccccctctcctcaaccaataaagaaaaagcacgccctcatctttcaattgttcacctcacatctcagaaagttcgagccaccggcccacctttcaaaccaccgatgacatgacatcctggctctctcctctcccgcgtcactgctgctcatcctcacataccttagacacgcctacgccccttcctcccacacaccatcgctattgacatcgcagggcaagatctccagttcagcttgaatcgattgtcctgtctctagctactagcttaggtgcatcatccccactcacgcgcctcgagattcaggaactttggcctggtttagttggtgaaatgaaaatttttgagtgtcacatcggacgtttgaccggatgtcggaaggggtttttggacacaaatgaaaaaactaatttcataactcgcctgaaaaccgcaagacggatcttttgagcctaattaatccgtcattagcatatgtgggttattgtagcacttatggctaatcatggactaattaggctcaaaagattcgtctcgcgatttacatgcaaactgtgcaattagtttttctttttatctatatttaatgcttcatatatgtgtccaaagattcgatgtgatgtttttaggaaaaaatttttggaactaaacaaggcctctatagaaatatggagaggaaactagttgtattgggatatcgagtgttgaatataaagagtctactggagcgtgcagaaatatagaaatggtatgttaaggagaatcactcatatggatggaagaaaagcttgttgactctaaatttgatccaacactcgaatgcctgagagatttacttgactctagtgtagatcctaaatttcaggttcaaagcataccttagttgactctaaatttgatctaacactcgaaggcctgagagatttatttgactctagtgtagattctaaatttcaggttcaaagcatactggaatttaggatatacactagagtcgagtaaatctctcaggccttcgagtgttggatcaaatttatagtcaactaggttgatcctgtatgttttgatcagtaaagaaagatacttcgattgtttatacgttatataagcttagccgatgatagcacatttctttatcaaaagcaatcttactatatcggacttaacggagataatataaaattgaagttgataagaggatatttaactactgagtatacacaattaataacaaaattttacttaattaactacaatctaatagatcagattcaacccagtacaagattgatagcaataggtagatctaattaagccgatagattctatacaaagtaatggatatataagtcaagctaagatagcaaaacaatcaaagaaaaagcggatatatgggaagacggtgtttgtaataaattgattagaatgtcggaccgaagcgagagtcataactaggtcgatacaaacaaagttgatgaaacttaccttctcgctgaaaattgtgacgatgtatcctgctcgaataactaagaactcgctaaaaagggtggtgatgtgtcagaaattgtatattgactagcaaaagtgtccgtgcgcgtgcgttgcaccgggtgataacggagtgtgtatattgaccaaaagtgttgtttggtttagcaaaagtgcccgtgtgttgcaacggggatgcgtacatatcagaaaaatattcaattaattaaaatacaaatttgctaaaatatttggtatttttaagtaggtatatgtgtataattaaataaatttacaagtaaagcaagtgtgagaaataactataattgtaatgcttctaaaaa

SEQ ID NO: 21744 - DNA, 5989 bp, Oryza sativa
ggttggtggcggccgcgcggatccaagggtgggggcggcggcggcggcggctccctccaccccctctagcctccctcccgcggtagatccggcggcggctgcgtctcccttctcccctctcgcctccctcctgccccagatccggcggcgatggcggtgtcggcggcgtcagcggtggcggcggccgcgggccggcagtggcttactcctaccctctcacctccctcccgccctagatccggcagcgatagatccgacggcggtgtcggcgtcggcggcggtgcccccaccacccacggcggcgtcggcggcaccctcccccaccaccggcggaggatctagcgggaggggaggcaccccgtgagcgacggcgacggcgcccctcctcccgtgagcggcggcggccctctcccccaccaccggagagcgccctccgccgccgctgccggcggatctagcgggagggaccggcggaggcggcgctctcccctccaccagatccagcaggaggggagccgctggcggccagccgtccctgtggcggtgacagcgacggcggtggttcggcaacgacggcggcggcggcggcgacccccttgatctaatttttggttttgatttggatatatatgtgtacatgtatcatgatttgtgtgattgaactccgattgtgatttttttccggggtttgattgcatacggattgggatttttttttggagggggggggggcgacgaagcgggacgaaaaaccggtgtgacgaccggaaaaatccgaatatttatattacttatatatttgttgataatttacaaggcttgtgtgcacttatatttatgcccctaacctaactgagtttgattcgaatacaattcaatcgactaaaaacttatctcctaaaaagaaatgtaaatctaaaaaacctgcctaaacgtaagtacacgacatataatttcaaaagtaaatctaatactatcttaaacaacctgatacacttttcaacaaaaccaactcaattgatggcgtcaattacttccattgacccgtgttttaccaaagactatgtcaaattttaccgttaacagtttggtttggactcgtattaattggctctcaagctgagcccaagcctccttcatatacagccctagctgtgggtgtagagagaggagaggatgaagggatctgctagcacatggtggtagtgtggatggtgccggtagccgacttagatgaaactctcgccatctcatggtgtctcaacataacaccgcgggcaccgctttagccactactctcctcatctcccttccctcttctccttggctccacactcactccctcctgccgccgccgccgccacgctgcgccgttggccggtggcatgatgtgcgtgaaaatccaacctcatatagcatttagtctatacgatcggatgctgttgtataagtatgtgataaaataggcggtatatttaaggataaatttaaaatactattttagtaaaaagtaaattttaaatagtaaaattattttttggtcatgttctttttataggggtggaaaatacgagcagataaaacatatagtagggcgttaaaaagacgacgctaggagcagagccgattgaaaacgatacagggagagagagtgacacttttaaaccttttttatgttgcacgcatccagggaggatggcagcggagagagaagagtccaccacacagaggagaggagaggagagagagaccgtagcaagaggagtagtagtagaggagagcagagagccgaggacttggccaggagagagaaggggtagggggagaccgggagagaggttgcagcagaggcagagccaactgcacaaggcaaggggcacgcagccacgcagtgctcctgcttgccctgcccctgcccacccccacctcctcgctgttctactgctgctctactctggctggcaacgcatcgcgtcgcgcgcccaagcaaaggctccatcaaacacacaccaagaaagaagaagaaaaaaaaatcccccgccacgccgggctgctccagatctctcagccgcgcgcgcgattatgtgggattaggtagatgagggcggcgctgttcggtgccgagaggagcggggtagtggacctcggcggcatcggcggcggtaacagggggctgttttggcccgcggggaaagggggcctggtggtggtggagccgaggtcggtgcttgactgcacgcgcagcccgagcccgcgcaatttcacctcgacgctgtcgtcgtcccaaggcggcggcggggcggactcgaccggtgtggcggcggtttccgagagcagcgccgccgccgccgaagccaccaaatggggagccccccgggaacaccggggcggctgttgctgccgtggccgccgtgggaaagaagactggagcaaccgctgtgagttgcccccgataccggggaccctggatgtggggctcgtcggaggagagggctgggacaccatgctcggcaacgccgccgccgccgcagccgggcaggatcagtcgttcttgaactggatcattggggccgccggcgacctggagcagcccgggccgccgcttcttgacaatgcgggattcgggatcccggccgtcgacccgctgggcttctctctggaccactccctcaccggcgtcgcctccgacctgtcgtcctccggtgcgcaaaacgcaaccggcggcgcgggtggcggcaaggcttccctaggattcggtctcttctcgccggaagccacctctctcgagcagccgccgccgccgatgctgttccacgaaggtatcgacacgaagcccctcttctgggcgcgcagccgccgggcctcctgaaccactatcaccaccagccgcccaaccccgccgcagccttgttcatgcctcacccgcccttccccgagcacaatcaccagtcgccacttctccagccaccgctcaaacgccaccacgccatgcctgatgacctctacctcgcccgtaaccagctaccgcctgcggcggcggcggcgcagggtctcgccttttcaccactacatggcccggttccgttccagctccagccttcgccgccaccgattcgcggggcgatgaagacgacggctgcggaggccgcgcagcagcagttgctggacgaactggcagcggcggcaaaggcaaccgaggctggcaattccgtcggcgcgcgcgagatattggcgcggctcaatcaacagctcccccctcttgggaagcccttcctccgctccgcctcctacctcagggaggccctcctcctcgcactcgctgacagccaccatggcgtctccagcgtcaccacgccgctcgacgttgccctcaagctcgcggcctacaagtcgttctccgacctgtcgcccgtgctgcagtttgcaaacttcacggcaactcaggcacttcttgatgaaattggtggcaccgcaacttcctgcatacatgtcattgacttcgatctcggtgttggcggtcagtgggcttccttcttgcaggagcttgcgcaccgccgtgctgctggaggtgtgaccttgccattgttgaagctaacagctttcgtgtcgactgcttcccaccatccattggagctgcaccttacccaggataacctttctcagtttgccgcagaccttggaattccttttgagttcaatgccgtcagtcttgatgcattcaatcctggggagcttatttcttcaactggtgatgaagttgtggctgttagcctccctgttggttgctccgctcgtgcaccaccgctgccagcaatccttcgtttggtgaagcagcttagtccgaagattgtggtggctattgaccatggagctgatcgtgcagacctttcattctcgcagcacttcctgaattgtttccagtcttgcgtgttcctccttgactcacttgatgctgctggtattgatgctgattctgcctgcaagattgagaggtttctgattcagcctagagttcatgatatggtgcttggacggcacaaggtacacaaagcaatagcatggaggagtgtttttgcagcagctgggtttaagcctgttccacccagcaaccttgccgaggcacaggcagactgcctcctgaagcgagtgcaggtccgaggattccatgtggagaagtgcggagctgctctcacgctctactggcagcgtggtgagcttgtctccatatcatcatggcggtgctgatcagccataagcttcaccccaccaatgttccaccagcgcttgcaagcattgtcaactccagtaatgtgcattttgttttgcaattaaatgttgcaacggaaattgttgtctcaagttgttgaacacctcatattgcttttcatcacagcttattagctaggcctagtggatttagcaatatcggtgtcaatctctgtagttaatgatgctgctttaggttcttaccatgctctgctctattagccattatcatcaaattcaagacactgctgatgagtagagaggataatttgacctatcaaatggttctgtggtacagaattgatatttgcttgctgttgctgtgttaattgtgcatttctgttgttatgcttatggattgaactgaaatggatgcatttctgtatttcaattttgcaatggtagaaatcattcaaggcaatgggaatggctataataggagtaaaccatatggatatattgtacataagatttactacagctatatagccttttggcaaacagcaaaggtttccgggtatatttgaattcgtaatcaggtttcagaagagaaagaaagatattttttggaatttataatatgatgtgttaaggagccaatggtgtcaccatcgtttatctggccacctgtagctccaaattttcaaagtttagtttgtctatttctggatgaaacgttttctcaacaacccttgactgaccatcaactgtacaagagtgccgatgatgtttctttccgcaacaaacaacaaaaagaatattgagtatcctcactctcctggaatggatagccatattggcgcttcatttgataatgtgcccaacacatagagcaagtaacatgataaattcacgcttcacagtccattcagttatatttccacaatagacttaatgccagtataacatgacgagtgcaaaactacaaatgcttattgtaacttctaggttatgtcctgggacgaggtatgcatatattcccattggcgagatggtacataaatcaatgcttcggttgtcaactagtcatcctgggtttagatcgttttgcatttcgggagagtcctagttttcttggtgatgtgttttttcatgattgtgccttgtcggtgtctgttttcttgaccaactgcccatccaaatgtgccggatgttgctccatgcatattccaaggaggccatcgcttcccttatccatggaataagcgaaacggtatatttgtaaacgaaaaataatttgtaaataaaacttttatatacgtgttcttagcgacctaaaagcaaaggctaaaaaataaactacaatgaaaaaacatcaaaatcagctccaaatttaaggttgaaaattcaaatattggtttataagtataagcacaagccgaaagatgagaccgcaaatattcttttgctccgttttccattactggtcactttaattgtcatcgtctattttttacactcatatgcattttgaaaaaaaaaaaaattctgtacgatttgtatcctattcagcccattgaaacaagagattaattcctactaattcctttaaaataataaattcttatagaataactatcctgaaggaaaataagcatgaataatgagcatgttttcccttttcctacatcttgctcctatgaaagttcttgtatttcaaaatccgatagtaatgctatgagcatgccatttggggttatactggctcctttagaacacacca

SEQ ID NO: 21745 - DNA, 8078 bp, Oryza sativa
gatcaaatgcatcgattactattctctaagaaacctgtcattatctaagagagcactagcaattatatttgctgttgtctgaaagcgtacagtcccggaagaaactgaacagggtacgcctccgaaaacgttatctgaaaatctatccttgacccgagatgactctcagctggttttcaggtttcagcagctaacgacaagggcttgcacagttgcgggggatgtgtagtgtactctagctcattaatgagatgtcaggtaagaaaagtagtcctccaaatcgcatcgacggcgacaaatgccctcgaataatagacatcacccgcagaccggctcatttggccatttgggatgcccacaaatggtaaacattccaacgcccgtattactacctaacacaaagtacagattcagagaaaatatggacagattttgtgcacactcgtgcagtctctgtccgttccctctcgtggcaagcggtgtaaacttaccaaactgcacaatagcaactgcactggatctcaatcctatagagaggagattttgccaataaacagaggaaagcctggaagctttcctggacacttatgtcactagctgcatgctttgctgcaattcaaagatgctgtattgtcagcaatcagagtctggctggattttctgtcacgtgataatttgtctgcaaataattgatcattgctctcctctctctagtctatattggcacacatctgcaagcaatcaagaaagagagactactcttcaggttcacgacaactacttgcacattttattcaactactgcaccgtcgctttgcattacacagaaatggaaacgggaaagatctgacgagctgctaaacactattgaatcgcaaaaccacaaagcgaggtcgctatggatagacaaaaagatgcaaaagattagccctaaaagcaccgtgattaagcagtcggtctgatgaatgcctgcgtgaaatgggtttcagtacttgctggaaagcaaccgacgcacattgcagagtattgctgtctggtccaaacagagcgtacaaagcaaacggagcgtaagttgcaccctcttaatcttaacaaagctcacatgggtggtagtataataccctggcaatctaacttgttcctgacattacagtacctcacctttcctacactaaagtgactaactatgtcgagagaaaacttccaaacaattcagtagcaattgattagttggacgacagaatcaaatgaatgagaggaacaagctatcatcagatcttttcctcagatacgccgagctgagcttagttgagatgaaagctggaagaagccaagaaaagaccaccagggtttaaggcctgaatcatgaggaggaggacgaagaataatacacaccctgtcctaatgcaaaagagcttccttgtccttatcaagcaaggctgcaagtctttgctaatcttctcatccgatcgaaaagaaagcaagctaggggagaagagattgtagtagtagtagtagtaaagtggatgcatgggggtgatagaaaaggagccatgcattgtaccaccaacaagcaagtgccgttgcatcgatctgcagccttttgatggaccggccggggaaggaagcagaaaaaaagatagccgtcgattaaaacagtctgtattgcaccagcgatcgatgcgtatgggtgtggtacgtactacgtagatagctaagctaggtcgtctctcgatcgtcatctccctggccctccactgctcgcaaagtcttgtaataatgcacagccttttcggttgctaaagggaagagggaaaagagagacagagaagacagaagtgatcagattgtttttcttttagcgaaaagtgatcatgctatgtacaagtgagatgatgatgatgatgatgataacggtggtctttctttctctcttcatgcacaagggccggcggtctgaattcaaaccccatgggggtacatatccttttaaacttaaaaggcgtaaaagaaaaataaaggagaaaggatatgccataaacagaactcagacagcagccatgaaaatgcatgtcttcatcagtgattagtgagaaaaggagggagcggatgaatgacaacttgtttaattctccctctgaataaagatctacttacgttgtgatacaggcagaaagatggcatacgcaactctctgtctagtgtgcacctgcagggctaatctaaccggcgtgggtgagcgcgtagggcaaacgcttcctctccctttcgacgaaatcttttacgtgctgcccgccctcaaaagaatgcactcaatttcatgcttgtcgaaaagccctgccttctcgagtgagagcgatacgtgtgatcgagcccctagcttctctctgtgaggaaacgcttgtgcagcagcagctagcaagacacctctgcaatcccaattttctgtcaatcactcgcgccttccgtgtggtcctcttgtcaatctctgtgtgcgtgtggactacttgcttggccacttgtggccaagtagaaacgcacggaaaggaagctctggaactcatcaattcgaccaccggaattatatttgctcgtcgatctgtactcccagctagcttccagcggcaaaatctcacacatgcacagaacagtaaattagtgacagatcgatctcagcgagtaggtagaagaactgtattagataggattttcctagctagttgagttaactagctttttttttaaaaaaaaaaatatcagaactgcattaggcaacacgcaccaagatgaaggttaatagagaggtcaactacgactccatccaaacaaagaaaagctcgtagctttcatgcatggcccacgcagttgtggccgtgcggcaccacacgtacagcgacgacgaaactaaagaccgtcgagtgagtgctcgtcgctgttgctggctagctagctgtactacccgctggccgcgatcacggttattttcgccctgcttttctcgcgggtcaatgctctaactcatctggatgtaataggcgtatagctcagctatagcttattagccagccaaatcgatgatatactgaaatgatcgatcgatcggatccatctgcgaaaagccatttgctagtaatacggtagcccacgtgttgggggcaaggagagatcactagctttcggctactcgctctcgctagctctctcctcttcccggtcgatgattcgcgtttcgctttcggtcgtctcaccatcgatccatccggccgcgacctgcctcagctacagctttttaatttccgttgtgcggtacgcatgggctcgggataatctcaggctcgcttgcgcggcgaggagaggccagcgtacgtacggcgtggcgttgcgcgctggccgatccgtaaatggatcggccccgcgctattcaccactagctagcagtttgtgttacacggaatggcgatggatagaaagagagggggtggggtgaggaggtgaggtcgacgtgaaggctcaagcgcgatcgagatcatgaattggtcttttgctgcgtgtgggaggtgtgtccatcatgcaagtggagctgtcgattacatgtattgtgtggttgttttttttgttcttgtatgtataggattggatttatgtatatgcacggagagagatcatttatgggtgtggagacaaagcagagattttgaaggcagcatgcaggaagtggtgtagatcgatcggattgtattgaaaacgttcggggcgtcggtgtacacaagtgtggttcatgcaatttgacactagaaagtagtagtagatcagatggtctctacttggaatgtagtagtactagtaactatagagttctttcgtaaagggcatcccctgtgcatgatattgcaggggaatatattcggaacatccgtcagtgtgaagactgttcgttacttatagtatcccctcctccttttgttctcctccccgcgttagccaacttgactacctgcgaaaaagaattgtggtatggctgtatattacttaacccgtaagtctaccgaatatttcatttctgagactggaaaagttttgcacaaagatcgtgtgtcgtgtctaaaagatgtggctggaaggtttggtgagagacgatgtgtctacttggaaatccaactagtaacgcagcccgcaacacggccctctcggcttaacccatctgcgcgatgccaagcccaggcgatgcgttggctcccagtgggctgttggctaacgccgcaacgtgtatgcatcagcttagcacgacaacctcgatagaataagtccattttagctcccttaactagtgacataatctgattcgtatccctaaatcacaatagcggatatctcgacccccgaactattggaaccggtgcaatttgactatctcgatagttttgaaagatggtttcgctaatgtggtggtgttgacctaatcttcgctaaggaaaaaaaaactataatgataacaaaatacgtatagtatcatctacgattctgaggaaacagacgcgttgatattcatttttgttctggaatccttctatttaccattcttgggagcacgattaacttcttattcttattagataatattttgtacagagacgcaagcggcacagcgtccttatcggcacgctgtttcgcacacctgccacgactaatacaaacacttatactgctgctaaatccctgaaccgtatagcaccaagatgggtcagaatcttgtttatggtatatggcaggttcactttcaccacgcagaactaggatggcgactggcgaggtaggcgttcacttgtgcagagcttgctgtgtaatcaggttgtgaaattggggaccttcaaacaaccggaataattggtcgggtaccaacgcgaccaaagtttaacaatgtcccattctcctttttttttcttctttgctgtacagaattccgatttcaagccaattccccgtccacctacacacctttttgcggcaaaaacaggtcgattagagcttccttgggtaaaatagcgcgaatccaccatagcaagctcacgactcgagaaccccgttgccttcctgcagcatccgatcccctatcttcgagctcaactgcagcattaaggaaacatcaggtaaacatgtcactattctgtgcgccagcagtgaacttgttaaaaaggcctcggagatagacactgatgatgtataaacagtaaaagactacaagcgtcaatcaggacctgaagatagtagctagatgaggaactgggtcacttacagcaggatatgtgaagactatgagctgcttgtcagctgtcgaaacaagaagattagtgttatctttctgtaacgcaattgctgtaacgttctgtccttccccaagttttagcatatgaattatctggcagtatatcccttattggttagaattctggtcatagcaaacaaagataaaaaataagttaaaaagttgctcatggttttcacctcaagtttgtatagatcaatgaagcagaccgagggcacatgaacagagggcttagtctcatttaattctggcaaatcatcatcaccgttgggtttgtcaagctcataatcatctatagcactaaaaccatcacgattgcaactgttggacaagcatgttccgatcaaagcaaacttgccatccacagaaatctcaatgcaactaactcgaccagagaaaggtgtcagaaccgaggtaccaatcgggattccattaacagtgaatgtcgataatcttttctctgattcattccaaatcaatatgattccttcagaagataaacacattaaatgtgcctcctgtttatccagcttcctaatgagcctgcctgtcctcaaattatgtagaaggacaccagacgtacttgaagaggaagcaacaagtcccaaggcagaactaacagaacagcaagttacttctccaagatgccctcttagtacatgcataggaccttcaattcgtcgcctcctgctggtttctagaactttgcttgaattgctagtgctgctatcaccagaggctgaatcatttggtgttgttggtgtagatggtggaggttctggagtacttttcttacgtaaagagcctatctgacgtatcctccaaagtattactgtggtgtcacgagaacctgtgacaagataattgctatctggagataaagcgacgcaggtcacaggagcaagatgcccaaatgccgtttcaatggtccttgctccgtctggggatatcaacttcacagaattatctgcatgcccccctacagttagaagggaaaaaaggatatcagaaacagcagagggagcagtttgatgatagttcatagtgtaaatacagttcaaaaaaggaaaaagaatgctgctgtaaaagcagaataaaaaaacaacattttctacatgaattaatgaagatgtcagttactcgtatgatctcactttgaacaccaggttttcaaccagaaaaagatctaggagggctttcaatacaaataaaacatggaaaatgaataatagaaaaaaaatactagctttccaacaatataattgagggggaaaatgaagaataaaataattaccagttataacctctctctcacatgtgacaacaacaaccgatgaattttggattgcagaggcagcaaaagcaatagcccttgggaactgatagtcgtctacagaaccagcagatcctttgaagatacgcattattgcaccaccacttaaatttatggcatttcttccatgatgaaagaggaaaggtgtccctgggccatttgaagtatttggctgccaatggtgcagtgccaaatgtgctgcaggaacatttgcacctacgactacaatagagtcatcggatacaagcattgcactagcaggaacattgcagttttctggattaggtagtacataagatctgacttcagttgggttccagaatattgtctgcacagaaaaacgaagagataccatgcactcacttcaaacaaatctaaatcatgaattagcgaaatgaaagctaacaggtacaatagatttcatctgatgtaagtgaaccatggtgcccataggatcactttaaccccagtaccccactgctccccatcctctccgacattcaaccatcgactgaggactaacaagtgaaatgaggcagcttgactttcttttagaactgtagactttgcaatacatgttggtatatctcctagaggcaaacatggagatggttgtgtccctatgattacgatgtctataaactcttcaataacgccttacttttcccttgaatatgctatgccattttaactcagcaagtatgtagcttactcgtgaacctctgtattgcttgatgatggctattctaaattgcttaatctgtattctaaaagttcacaggccaccgtgcttaccaaatagtgacatttcattttgtaaaacacagaaggataacttgaaaacctacctgcagctttaagatgtctgccaatggccttctctttgtatgtgggattgtcagcaattgagatggtgtttgtccaaaattacatatttgatcttgcatggatcgccgttgcaccttcagcattttcagcagcacgttaacaactagctagctactggcaaaatctaaaagttgaatgcagaatacttactggattagtgatttgatcaatatccaccatcccctcatatgtagcatagggaaaaacattgttagccatcactgcatctttacctctttgtttatgtctgaacgagaaatagttgatgactaaaggatgttaacatagagattaataaaatataattttaatacaactagcagaacccgtactttgttacgggattaaaagaaaaatcaaatgcagtggaaaaaatatattgcttttctttgtaatttttaattaaatatggagtatatgagtattaattagatgtgcatgctgcaaaaaataatcactgtgacttcatcgtgggttgtgaccattggttattttaatcattctcatccactccaaagacccaagtccatcttg

SEQ ID NO: 21746 - DNA, 5211 bp, Oryza sativa
ccacccctaccaacattttaatgtagtatagatatagatcctctagggcaacaaaattaggacccaagataatatattaaaatatacagtttctgtcagcaaaaatatcaatgaatatgtatcgtcatcagcagataccatcacaagaaattttacattgtccatctatgtcaactaaacatcccctaacagtctcagcagatagtagtctttctatttccagcacaaaaatttactgacatgggtcagttttgggaagaaagataacacaagagggttgaacaagtggtcaaaggatggggcaggacatcgatgtcactggccaacatatatgggacgaatagtagataattaagtaaaataacgcaatgcagctaagaggtggcaacaaaaaggaacagcacatagataacgtacccaaatattaggtctatccattcatgcaaatgagcggagacataatcactctcaagagccttcctgtgtttacatatgaaatcaacagggttctcagcccaaggaggcaattgcacagaggctgcaatacaactcaacattagaggagttcagctccattcccttatgcatacagaatgaaacaaacttacatagctttccagtaagttgagttgaccctaagtcaaccgaattcacattcgtaaataactcaggaaggtaaaacatctctggaacctagagaaataatcacatgattaggttccaccaaagattctgattggacttactcactaaggaatcacaatgaattgaaggcacatttttgaacaaaacttactaactcttttacatcattcatgtcttcaaggacactattccatgttttgttgatacaagaaaacatgtgatcatcttgaccaaacctgccaccttgctgctgaatagaaagggctgtaaaaggctctatcctgacaagataatataagacctgcagtagatgcttatgtcaacaaccaatagcacagaaatcggggtatttgaaaaaaaaacaaatatgtaaagtcacactaatcaactacaggaggaattgtcatcgatgaacagtatagaaccgattaatcaaatgggatgacttaataaattaatctaactccaaataaaaggaacacatgcaagcaaaatgctgactcaaaacatgcacaagagaaaaggtaccgtgccaggacaggagtaatgtgaactgtagtgaaattttgggatggttggatcattgaaactagagtaatgttcctggaatttcttcagtcgtgcaggattcagagcgccaattggctgcattgaaatttttcaagcatcactaccagtggttattgaaaaaggtatcatccacagagttaatgaattgaaaagaagaaaaaaaacaaaagaggtctaaactggcagcaaggaatgaggtacaggatctacctccgaaagatctcggtatgcggacggatcttcaagatccagtgttttggagtggtaatctgctaatacccatggaaaaacagggtactgcataaatagctagtgatcatttaaatgcagtagtatatttattatattcagaaaatgagttatgaagcaaacatgcctgtgcaatgtcattgtaactgcgcccagcaagagtgttcagttccatcaggtattcaaagttgctaatctgcacaatgagatggctctacttaagtgttgaatacacttaacatgctgggctgaaaaaagtggtttattgcattgatacctcccatctagcccagcgctctgtcaattgcgactttttaaggattttctcaggtctctaaaacaaaagtacaattgattaaaactttcagtaagaaacagattttaacattaaagtttgcagaactgcactgaacaccaacctgggtagctaggaaaatgctgttcaaataaggaggtttggtatgaacgattgcccgataagcatgtttacatgcttctgtatcctgataaaaatcatatacatcttcaaaatattcaggtagctgtagtgtgcatatgattccaacaacgtaaactagagtatcatcaaggatgtacctcaaaatcgaagaagaaatttgacctatctaccatgaatagctctaaagcacttcgccgtaacaaatatctgcacagttaatttaaatcagtatgacatgcaagtactataaatggttactgctaactcagtagtccataattatatgataaggacacagatgataaaagcaaaaaagttatattagttaacactaacgactgcaacaagaagttcaatgtacaccaccatactggataatgaagaaccatttaccttctactataaattttatgaagtgaagatatgaaccagctccgatctttatcttgctgatcgtattgcccactagtagatgcagcatcatccatgtaactatcgctatcactcatatgctcatcaattataaagttaatcatctttgatgtgacctgaggaaaatcattatatactagggcttaatatatctttcgcatattacattggagatgaagcagaatactaccataaatgaatagaaatacaagaaaacaacttataatgtaaaaagaaagtgatatgacaaacataactagttatgttcatcagagaattgagattgattaaaatccagttaagaccaagatatacagcaaaaatattaactttactaaaacagaaaggaatcatgaatgtgtagacatgattattgtaacttcagtttacaactaatatgtcataatcatgaccaagaagtaatggcattaattagaatttgaaaacacccttatgcatgaaaaactacaaaagtgaaagtacgtacattagaaaccacttacttggaaggttccccgcacaaccttgaatggacgcaccatcaatgaaggcagttcaacaataattctctcattatttttgctagaactgtaacacggtgcaaccacggtcgatcgaaccaagttgtgaacactagaaaagtcagaacttgttgaatcatctacactgctatagatagtctcagtttctgtctgtttggcattcccatgtcctccatctactgatattgcgtcagctactataatggaagaatttgttcgaagagcatttgcaaatagagagtctgcatcttccctgtggctataattggattctgcaccatcacatagaagcatgttctcctcataattattggccatactcaaatgttcagaccatttgtagtttcttttcataaatcttctcattcttgatgaagtttctgtggaatctaacttccagaaaatctgtgtagaaaaatagtaaagcaaatcaagatgtctataagaaaagaaggcatgcatagtgtttactgctaagatgttctttttcctcttgttgactgaaacaatttatttgtatcatcataaattggtcatcaaggatagagcttttcataataatgtaaaataaaagaaaattttaggaaaagcaggactgttcgtacgttatcaggagtacacagaagttccccaaaaggtccgtatagcctacttgtctctattaagcaatgaacaagacgtcgccatgcccgaattccaatagatgcacaacgacgattcaaaatatctacctgtgttcgcctctccatctgcatgtccaaaagttgcctcaatggtgtattcacaagttagtaattcctaaatatcagagcagaagcttcccattccatatcaacatacctcaactcgttgcaagttccgtgccaatgcaaaactggaaacaagaagtgcaacatatttgtatgaaagggcagaaaaatcccttcctgatactgactttgaatcagcagattgaagacactccaaccaagcagcacacatagcttcagatgtattccacctctgggccctctcaatatcacctgcagccctcctttgtcctgaagttgccattgctacagcactaagaccccttctcgagccaatcttagcactgcgctcaaggtcacgagcagcagccaaggcagcagcttttgcagctgctttatcctttggtgcagatgttggtaggtttggtgttgcatcaataggcttctgaaaacttgagaaagtgtgtagtttagcagatctacgctctagcaatgaggtgtcacgcctgcgcaacttatttgttggtggtgctattgtttctgtcccagaggtaccagcagcaatcatggccaatgccattgcaaccgggggagaagcaaaggcagcagcccatccaggtgatatcattgagacagcagcctgagttcaaaagacacatacagtaatctcaccatgaacagataacctccagaaaagcatagaactgaagaggtctttctcaatagtaattattgcaaagtagtttatagttatgctaatgatccaaatcgtttaaatatttgacaaaactagctctgaagcattccatgaactactcaagagactagagataaaagaaaggagagatactgggacaagtgactactgtacacagcacacaccacatagtttcacgagcacaaaatggaagtgcctgatgagcaattgttaaaaagaatgaggatttaaggtaattagccaaattcagacactttgcaaacatagcattttaagctggatatgagaggagctcccgtattgattttttttaagaggtggtgaggctcaaaactaggctagctagctcaccaaggtgctagccggtaagactccgggtctttctcctaaccagaacttctactctacgtaaaaccaacattagttgacacaggcatacagcatcagcgcaactgccaggcaatttaagttgatagccattgtgtacgaactgtgaagaatcaattgttacctcaataggtaaagtgtctgctgctaaagcacagtcatcaacaactagtggattttgtccatctgaagatgtgagctcatgaattccagccaaaacagagcgatatcttttcagtacagctacaaatggtggcatgatcaatccaacatattttttccttagtggttttctatcactacttacagcatgccatacctgttaagatagaaacaacttcatgaataatgcataatataatataataaactttcttcgctttatctactaaaaacaaaaaaaaaaaaaacagctcatagagttccacaaatttccaagacctaacacagaaaatttta

SEQ ID NO: 21747 - DNA, 1834 bp, Oryza sativa
agttaacctacatggtcatctagacatctagtctagtcttaggttggctcatgcgacacatagctctttgtacatatttttccttgctaatagaacagatatgtagtttagcaccataggtcttttttatgacttcaccacttgcctttatggctaagggcatatcatgtaggccatgatatatttttccttgcaaatggaatagatgtacagtttagcaccataaaaacctatatagcatatgatggcaacaacacatggtataacttttttccttcatggccatatataattaacgatgagaaaatgcaactgcagtttatgtggacttcattgaattattcaacctggattacaccatggtacatgtgtgttgttagatgcagatcataagcttccatggaagtggaacgtgatattacctctgaataaataatagaagatgcaaccaaaaccctctgtctcttagattcagaaacaggcatattcaaaataggaccaagcactctgtacaaaaaacaagaattacatatatgaatgaagataatatggattaaaatatcaatgaagagatgacggagaaacaattagtctggaatataggctgagaccgaccactgagaaagaattgatcatgatgtaacccaaaaacaaagcttaattcacataattaattgtgcaaaaacatacagtaagggaaaaaaatctccaatactcctcgttaggagttcaatgcacatatattttcattaggttctgtatttgatgttcagccacattgagaaaaagaaaagaaaagggaaacatgtggcaaaattgaatgttggactcttgtaccccatttctactttggggcaaattgttcagtaacaccagaagatagcacaggtcggagaatggcatttgtgggcatgtcccctaaggaccagctgtcagactaatgatggacgttagtctctaatttatactccattaaaaaatataaggcgtattttgttttgttaggacaatgctttgattacaaatgttttactaatatattattaatgtgatacaaaagcataatcataagtactccctctgtcccaaagtatagcatacgggtattaacagagggatgaaaagatttggttgcctcctcggtatagatgaggtataggcccagactatttggggctataataaaacaacggggtagtagggatagtatggtaattggtaagtttaatggtaaaagtacaatactaggtttgagcagtagaagttatattttgggatagagggagttaatacttttgaataagaatataataacattaattttgtgttacaaaaaatactccctctgttttttaatgtttgacatcattgacttttgaacatatgtttgtttggccatttgtcttattcaaaaaacttacataattatcatttattttattatgatttgttttattattaaaggtattttaagcatgactaacatttttgcatatttgctcttttttttaataagacgaatagctgaacatatgttcaaaagtcaacagcgtcaaacattaaaaatggtgacagtatatcataatatagtaagtgttgatcaaagtcttgtcctaacgaaataaaatatgccttatattttttaacagagggagtacatatttgcagggttactgagctaagagcctttttttcagaatatgacttgaacaagctattattctaaatcactacacttttctggttatacactatgtacctccacagaagcgcagattgaggtttcctggaaggcgaacaagaattatcatcatgaatcatcatgcttccagtt

SEQ ID NO: 21748 - DNA, 8333 bp, Oryza sativa
acagacttccaagattcccaaccacttcctccaccaccaaagatattggatttgggtggaatgcatacaccataccacaatcggcttctgtacttcaaccttctgaaagatctgaaatacaggtcccataggatacaaatgcatgcctaacagatccatatggctccgctgctgctgctgcagtgacacgttccatcacctcagaagaaatttgcccgttcgcatcagccatagaagcaagaacctgatgttttgtacaccaacaataaagatagaattcaaaacgatggtgtgaaaagtagttcaaagcaagttaagttcaggctatgaaatatccttttggattatactcatattgctaccacgaaatagcttatatattcatgcttgtcgagttctaggaaagaatgtagaagaacattcaagacagataatagagataataggtacagtataccaacataaaatggccaaccagctactagctagtagtttacagacatttccttttgtcaagaaattagtgtacacgcatttctttttgtcaagaaattacaaactacaaacagattttcaattctaaaactacgtgtgtacaaagaaaggctgggagacacaaaaaacattgttcatagcaccaactcttcagaaatctcatagcagtatcctttactttcaattttcttcacgagaaatttttcttagaatttggacaatcaggtgtcttctcatacattattctatttatgagtttaacagcattagacaaagacaaaataattaatatagtgaattcataaaaggacctcgaaaaaacaatcaaagttgattcagtcatatgcagcaacattgaaaaaaaaaattgaaaatttcggagctccattatcatgttagtgaacactagattgaaataatgcaaataaaattatgatatatggtcttctagatatacatacatcaacaggaagaccaccagcatcactggacaaagattgccttgagccccctgcatccaaaggttcactaccagtcctgctcaatgaatttgatctagtggcagctgatgaagcccctgaggcaggagatgcagcactatcaattgagcacgataagaaataatgttgactgcgtgacctcaggtgatcttctacgagcatcagaagaacaattgcattctcagccaaggctagagagagatgggtagctttatctgcttggattttagtttccttgggcatcataccctcctctgcaacaccagctgctgcagcattgattccttcagtctgctatggatataaataataaaagaatatcatttgcggactaataaaattaactgaatactttctaccttcatagacacaatatgtgctatgtccctaagaatgaactcatgagtaattgaactggaattttctgcgcaacatcatgaagaactaattctgtttcaagagtgcacaacaaaagtgaagtttggaagacaaaggcaaagggataaattctttatttcactggaaatatcaaatgatggtagtagtgtgaaaatgaattgctactgcggtcacacaatcatgacgtgaaagtgtggtaatacaagcttactatgttcaatctagggacctagttagcggagcaacattaggagtcttgtgattctaagctcttaccagacacctgcttatccctatgcttatttggtaaggctatgctccttcctaaactgaaacttaagtcagggaagatgattttggagttctacaaggttgcaaggaattagaaaccagattaatcatgtatagtttcctgtgctaactccatgagttagctagtttcacttataatcctagtaaagtggtatataaatattaccaagaaaacaaaacagaattattacgatgacttattccccaaatttgctatcactttacacaaactgggagtaaaaagtctaaacagattgatgtggaaaagaaggtagaaagtagcaacaacaaaatatacaagaagaattggctgacgagtatattttgtaagagaagcaacatctacctgaacttgaagctcctgagcagaaaattcaagcagattacccaataatctccttttgaaaatcggtaacgattcctcacgccttaataagaagaaaatgcaaactaatattagcatatcaagattgacatatgttttaagcaccaacattcactatagttcaaaaacacaggggagtatttcgtaatgacatgacaaagctccttcagattctcagaaaaataagagagagatgtaacaaagtgcaaaaggctgcatgctaaaggagaaacttttttagaaaggtagaaacgaatattttgtaaggaatggtttagattatatgaggcaaaaccctgtaagtattcatgctttagcaaccttattgattgtggtggtttatcacctcaaaatttctgttagtgcctagtagatcaaacaatgacaggatgaatggaaaacatgttatggggccaatgcttcttgtttacctaattctttggtccccagtgctagatcctccaaccattgaaagccattctgcacaatgtatcgttgcctctacatcctggaaaaacccagatataatgttaccataaaaagaaaggttacaatcctataaagtaagttaatatcaaatagaaagatatgatatcaaagtcacttgccttccacccatctttctgccgcattgaatgctccaacatgatagctagataattgtatatatggtcttccatcacacttaagcttggaccatctgaacctctgttatcacccatctacatatcaatttttatacattagaagttccagtagtgaatgaacaaaagggggaaaaaacaagaagaagaatacaactgtcacctattaatgtaaccctcactaaaaaatgttttcatttgtcatcacagaaacgttacctcatgatttgaaattaagacctccaaaatccattcgggccattccgcaatggaagtcagtgcaattctattctcattattagttccccccaaatatagaagatcctgaaataatataagcaataagtaatcaaacaagagattttatgaaagatgatatacgatagtaaaaaagataatacttattttaagatttacaaaacatctgcacgtcgtgtatttaaatacaatgtttaatgatattggtacaatccatgccaataatgttatctgtggtaccatcaggttcttaaagtcaacagaaaatcaagacaatttaaatttaacaaatcagtaaaaaaaacctgaatagcatgggcttggaatgcccgtgatgcaaatggaagagaacggagtagaactgacaaaagtggagtatgcttaacacggtgaccagaatcatgtagtttcaagctaccatttgctgaaggaacattgatctgcattgaagaacacaagtcaacaattaaggaatttcagagtacaagcagttgaatctataatgagcaaaacttccactactgagaagcggagtaaaataaattaagggttttttttcttttttttaaccaaaatttagggctttatttgtttcaaaaatgttctcgaatgtctcttattcaaatacttccaagatgattgggaaaatgataaacataataaaatatttccagtaaaaagaagatcaatataacccaatagaaaccaaaaacatggatggccagcttttgataaatgtttggttacatttgttgagctaaagttttctgttcgagttagtgatgataatgtaaaaacctcttgaacataaagactcgttaactggtagttctgtttgaactatagaggttcctgttgaagttttttgttgcaatgtgtcacttatgtttgcagcaccatcctaaaagtcatgattgcatcactggcatggacccattagtgtaattctggaaacgtgttgtatattaattattcacaaggaacttaaaggcttaaagaacaccataccacagcagaaaataaagctttatagacatttctggtcataagccttcttggagctgcttggaaagctttctgcattgcaaagagcaacaaagaaactctgtcttcaaacatggaatttccttcgccattagaggtagttaggaaactgctgggcaactttggctttgcagcaggcaagttaaatttcaggtgacctgatgcaactaaagcacccaaaacatgaacaattccaacaagaactccatctccattatcgatattgtatatgtcgttctgaacattgtctgcaatattcagaaagtcaatgccacctagattctttaggaactgattcttcaataagcaccatttgctagagaatccaggttcagtgctgccttcgtgacagggtggttcatggtgctccaatggttgagtcttatgaccattgcagtttgcttcaccagcagtagttttcaaatccaaatcactactaatagattttgggtcagaaccagcattccacagagaattctgtggcacaatacaactgtcggaaatattgttatcaccagatttagcctccctttgcaaaagaacaagtaatgcctctacacctcctcgggaaatgaatgactgagcaaacacgttggctctagatgtgtttggatgtacaatcaatctatagatgaggagcaaaaccctagcaacctgacaaagcatatcgttaaaatcaccacaacagcacactcttactcagttaccacttaaagaagatatgtagattgagatcatgggttggctgcatatctcattcactaaaggaaagtagaaaatatatatgtgacaaatcatagaaaccacatttgatctttagaagaaaataattgcgaagaaacattttatagttcaaaatctagcaatgatgtgattaacaaagtactgttactttggaattttgctgtactgaaactaacacatctcattatatattgagatgtgagcttaacatgttctaatgaaccatgaagattaaaaattggatatgaaaggatcaagtgtaagcatcatcataatgccaacaaaactatgtcaagaatgtttgtttcgtgattgaaactaacatatcagaatatgttactaatgtgtgagcctttacatgttctggcaaaccagaaagattcaaaaattagatatggaaggagcaggtgtaaacatcatcacaatgaacaagggaaatgctggcgaaacgatgagaacagtatttgcttcatggaatgtgcaaagtccagttacctggttaggttgtggacagtcaacaacaaagcccaccaaagagcgaacatcatcagaagccaatgtagaagatactgctcctagtaacagttcaataacaaccaaaagctcatcaacaagagaattcactttctctaaaggtctctcagttccagtaaatgtgaatgtatcgattgaatctgcttcatgaattacccagtaacaccttctgcacccatcaaggagcatctgtagtgcatttgcatcatgcatgcaagccgattctgcaaaaaccatgtccgcaagtgaagatagaagctttttctgcaaaacgtagttgcatgaactccacatcttcaggtccaacagcaaagtgctaaagagctgcacttttagaccatgatcatttttttgagactgacacagagatgcaattgctgcaacaagctcctcatcactcagtatctctttctccccactttctaatctcgatagtgtttctaataggtaatgtaacacttgtgataaaagctctggtccatgggcacggcatagctcttccttatttccaggatgttgagttgccagcgaaataatcctaaaaataggaacagaaagagaagcagttgcaagagacgatgacaaatccccgagtataggttccatattatccatctcgacattgctcacagtcaatggtagcaaagccattggacctccataagctaatgcccacaatgattctgcaggtcgcactcgatatgataaatgaaccatcccaagaacttctgcgggtcttctgtgggtacctgaggttcaacatccaataatatcagtaatgattcttctaaatcaaccccaggcctttgtgcctttgtaagttatattattgcatggcatgtgtttttacacccattggaaacaccctgatcccagataatcgttaacagcatgggactataacattttgtttggatcaatattcaatataggcatgattgatgccagatagaaaagttatgcagaacgtgctaggcaatagcaggcaacccaagcaggaagtaataggataatcttttagcagactgagaaacattagtgtaactatttaaccacgattgtgagcctgtaagtagactatggttcagctgccaagtaacaaagtactctctctgtttcatattataagtcgtttgacttttttcttagtcaaacttctttaagtttgaccaaatttatagaaaagtatgttaacattttcaatacaaaacaaatatattatcaaaatatattcgatgctaaatttaatgaaactagtttggtgttgtaaatgttgctgttttttcttataaacttggtcaaacctaaagaagtttgactaagaaaaaagtcgaacgacttatgatatgaaacggagggagtagaaactaagcaaggaaagtatgactggcaatttataatctacttaattatcaggtggataggagtgcaacaacagtctgaacaatataaagaaaaaggcaagcataaaacaaacctgttgaaccagaaggtgaagcatcaggacagaatcgaccattgagtagactaggatgataaagaagatgtaagcttcctccaatctcaatgtcaagtgtataattgtcttctgcaatgtgcctaatgtgagcatttgtagctttccaaggcaaaccagaaccattgctgaagctggggagtgcatcaccacccctagaagctatacggctcattctctcaggcccaattgactctgtgaagatgtagataggccccatttctgcaaacaatggacattgtcgccggcgctgctgcaggcccgcaatagttggtggtgggttcgtcccaatgcagcagaaggccagaggtttcaagatgcgaggtaactcgaatggacagctctcatgaagctccccatccacatacaaccgcaattcactctcgaccttccctagcagggcctgcttgcttgtgtactccaaaccaacaaaataccagcactgtggtctgaattcataagtgaaatgcagagaagccttcttccccttcccagccccactctccacgaccagaaactggccatggaagtaggcctccacgccatggttatccatagtgaggaaacagaaaagtcggggcatgtgcttcgtcccctctcccgcaagtgtgctagcagcagcggctgctgctgacggtgatgacttcccggacgttgaggctgcggcggctgcaattgctgctgtagccatgcctgtgttgagcgagtccgagaatgactcaacatatatccacgttgcaaaaccaaaaccgtttgagaatggccatcggctttccgcaggggcaagcaagccagagccctccccaccgagctcaaatgtcactgcaggacccttggcctccttgcagcccacagccttctccaacgcaagggtcagcgacgtggcccagcacgtgccaagtgtcttcttgatcaggaggagccaggaatgtaggtccttgacactaaccgagtgcccacccagcatctggatgcattgcacaagcggtgctccgtcccacttgcttctctgacccattccgacgaacagcttctctgcagcgtcgagaaggatggcgagaaggcccgatgaagtgcacatggtgcggtttcgggtacaggagctgagggtggcgaggagggcgcgggccatgcgagtgcgtggcgacggctcgacgccgcaggggatgtagggcaggagctcggccgcgatggctgccgcgcgcgagctggacatgatgctaggcaacgtgacggcgccgtcgcctgccccctcgtccagaccgtcgacgccgcccatcgtgagcatcagcacgtccacgacgaaatgcgagagctcttcgtcctctccggagaccatctcgcggagcgctcgagccgccgcccatgatcaccgcgtgcaccgcccgcaccacctcctccggcacgtccgacggcacgaccggtgccaggcgcttccgcagcgatggcggaaaaggcagcgcggagtactccgagggtgccaccggcgatccctcgctcat

SEQ ID NO: 21749 - DNA, 949 bp, Oryza sativa
agaaaagcttggcgcacacggaagagtgcgagagctcaaaagatccctcgcagagtcccctacctggcgcgccagatgacggagcgtggggctcctcaccgggagaccgcgcaggcccccctttgccggttcggccggggaccctgggtgagactctaagctcccaatctgtggaaggttcgcgagacaggaaacacacaagacgccggcgatgtatacagattcgggccgctgagaagcgtaataccctactcctgtgttttaggggatctgtgtataaaggagctacaaagtatgagccagcctctcccttgttctgggttcccaatctggaaaagtcccgtcctcccctctaagtgggcaaggtcctccttttatatcttaaggggatatcacatgcaccatttccctcttatgtgtggggacttaccctaccttttcataaatggacggagatttgtatagttgccgtccgagtcaccttctgatgggacggctacctccactttcgttgggagcagatgcgacgtggaatcgtggctgtctactgacgacatgaccggtgtcagaccagtcacgtcggtcattcttgtccaccacgtgtcagcttagcaatctacatgttcgcccttcttcacacaacatcttgcctgtaatggttaggatgaaacctggcatatatctgaccaggactaacgtgccatctctgggaggtaacacgctagctccagctggggacgagcgcctagaagccctcgtcctgacgggatggggcgaggcgtgcgtcagatcgcctgtcgccacctaacccgcgatctgaccggtctgtgactggtcacagaccggataaatgagtgcactgtactgcgttacatgcggcgtaacacgctcagccaaaccgcaataaatgtggttaggtgagccccactgtgctcacctaacccataca

SEQ ID NO: 21750 - DNA, 7855 bp, Oryza sativa
ccttagtctccttcacattgagaacatggagatcatgaatgtatgtgtttttttgcttatcttcatcattactacactatgccttctctatgtgtataggataaacccccattggttcttctggacttatgcttacacttgtctctcttgtatatttctttgtatgcatatacttagggggagcaaatcctatacatttattgtgcatgttttagatccatgttgttcacctattatatatatcggtatctttgcacttgagcttgcatacgagtatatgacacttatgatgttaatgaatactcaacaaacatatccatatctttcatatgtaactggttggtcaccaagtggaggatgccaaccgatttgttgggactaatgttttcctttgagccgtgcaaaggaatagatctaattgcgatgaggctaatgaatgacaccatgggttaatggtcaccaagccaaggacatcgtcatgttggcaagaatgaagtcaagcttgtgatgagaataaagtcttgacaaatgatggcaaagacctcggcataaacatggttcaaccgaatggtcacaagtgttgatgttggctcaagcattgaccccaagttggatggcgcaaggcaaaggtataatggagctaagaatgttttcttagtctttttcccggtcttggtgtttggtgtagactggatttactagataggtgccgtactatcaagaggggtctatgaagctagcatgtggatgattttgtaccatattagttcatatgcatataggttcattttgtgggcttgtctagccaagtgtggtgagttttatcaagtcccaaacaaagagagatgtgggcacatcctataggtttgggtagcctcatgtggttatgtccggtggagtatccttttgagtgtgagccatttctccctgagaaaatttgtgtttcttggatggattgttcatgggttggatatccctttgaataagctttccatagagtcctagaacaccaaattccgagatccgagtcaagagatatcgccgttttactaacggttggttgtgctgaaaagtgacctgcggtctgaccgtgggccttaggtcggtctgaccagggctgttagccggtctgaccggcgtggtaaggccggtctgaccggccctactggtctgttgcactggtctggtttttggtggcgatacagagcccgccagagccgcaaccggtcagaccgagccaatggcggtctgaccgagccgtggacggtctaaccggctgcttcactgcggtcagaccggccaggttgagtgggctcaatgattgccctgtaacggctaattttctatccgttacaaagtagtccggtctgaccggccactctatggtggtctgaccggcagagcacagagttggagatttcgactctaacggctagttttggtggttgggggtatatatacccactccccagcagcaagggcaaggttttggcactccattgcattatcttgaacccttgcaagagctctcacacccttgtgcacttagtttatctagtgaggtgttagagagtgagttaagccaatccaagtgcattgcttcattgttatagctagtgtggcacttgatcatcctcggcaagcatcctagacttgttactcttggaggttgccgcctcctagacggcttgtggaggtgttacccggtgacctctccgaggagattgtggaggaggcccggcgccggttgtgagtggtttggagttcaccaccttcggagtgaaggaagaactaccctagtgatcaaggctttggtagtcctctccgtgggccggctcccgccttgcccaccccttaacgaagggggcgtgaggtggcttcgtggttgagtggtggagttggggtcgtctcaacggggattaggaaaccggcgagtttctgaatctcggtgaaaattccttgtctcttgtctcctttattttgggcaaatttactttgagcaagtttacatactagagtttatttgtgctattatcaccctaggcttgcaaacctcaacataggctagcttctttgtgcacttacttgagactagttgatttaggttttgaattgtgcaaaaccattttgatttacgcttccgcatacaaaactcggttttagccaaaagtttgaaaaaccgcctattcacccccctctagtcggccttcttgatcctacaagtgtggaagctgagaacttaccaatgttttatacagttggatggtactttgatgcttcggattattacataaggtatcttttgggtcttacgtagaaaatttctatcgtcgcttcccgatattatttatacaaggtgattccccgcgcttttgcatgagaattactaagcagttttcaatatatatttttcgacaatcaagctaggagaaaatagaaaataaaataatgaaacgtgagggtttatcagtacttatcataaaacaaacaaatgatacccacgatttaatgtagaacatattgataactatatgttaaatattataaaaataatatatatatttgttaaaatattgtagaaatgatgtgaggggtaataatttgataaacttgcatgttgatttgtataattaaataaattatagatgatgttgtgtgcttgcttaaggttaaatatgtaattattgatagtgggtgatgatgtggcatggttgtatgttgagttttaagagttagtggtcatcaaatttatagtaagataggatttgtaactaaagtgtacattgctatataccaataaacaacaacgatgtcgtagaataacacatgtgttagtgtcctaggtaaatgatgtaccctgcattgcacatatctcaaacggaaaataccgcacaccaaattatataaaaaataaatccacgaaatagagattgggtaagaagtggtggcatattggggtaaagtacatggttcgactggcctacagccacaactgctcagtatgtatccttgtctcccaaactttacttgaactcttgaagaagggggcaaccctaaggtataatgacatcacatccttgaatgggagagcatcaagttatatatcaatcaagataagccgtaggtggcgtagccagcgactacaacctgtggggttaaagttgtaaaattctttaagttttatattgttgcaacacaaatatcaatagttttttgggttgttttgcaaaaactatttcctcgtagcattgccattactacacgtagcttcgctactgtaagccatacaaaaacatatatcgatttgatattcgaaggaatcccaaagcccagccaccgaccatatcgccaaggtccaccatttagaatctcacagacttagtcgaataggttacactatgatttatccatgcgttcttattctatcttggtgtatacccttataagttcatagtcaagcatgaacccaccaacattttggttaagtagtgggtcgaaaccacgctcattcgtggtagatcaatatgtttattttcatattgcttatagaattaatagcatgccttatgtatttccatggccgtattttttttggtagttatgcctgtcagggttacggataaggcataccctctatcctacgacttatggaatataccgatgaggtataccttcacgtatgcgggttgtttccgtatacgctttaggaatttatctcaagttatggaaaatatctctatgagtttaggaattgccgaagtcctactcggaaagggtaaaatctctagtatatcgtgtcagtttacatatctccaagttttacttgggggtgaaggtattccacggtataaaagggacccttagggagaggcaaagggcatcgcatctcatcgccaatacacccaccaaagtttacgaagccggagttcacggagccaactcgtcaggagatctcgtcgaatccctcgactacgatctcatcggtatcgcctgtttcggttactttctttgtaatatgttctcatcatcatcaatcccatataaactggactagggctataatctgataaggggcctgaaccagtataatctttttcttttgatgttttgatgtcgtactacgtagacccctgctccaacgtaccccaattctctattcatccggtccgcgagtatcactcgtcaacaatgcatgttgtatattttcctgaacatgaataaatcaaatggctagtcatattttacgtacttacggcccttgttaaggccaataattcccagttagtttttctttgtgaaactaggcaaagttgtaacaaggtccgtcgtcttcgtcgtaggttgggcttaagtggttttgtcggagtggatagtaatggcctgagtggaggcctcgctttgttttggcatgaaagttttaatgtcgaaattaaatcagttaatgatagatttttgatgcttatattcgtgtgtcccctactgcacctctttggcatatctcttgtgtgtatggtgaacctcgtacagagaacagacatcttatgtggcaacaccttagcagccttagacaatcttccactttaccttgggtagttctaggtgacttcaatgaggccctttggcagtttgagcacctgtcaaagaatcctagatctgaaatccaaatgcaagcttttagagatgttttagatgtttgtaatcttatagacttaggttttgagggtaatcccttcacttatgataacaggaggaaaggcagtaacaatgttcaagttagattggatagggtggttgctgatgaaagttggagggatatttttagtgcggctcatgttgttcacttggtttcaccttgttctgaccatgtgccaatccttctgagattattgcaggaggaaaaccataatcaccggaagaaatgtcgacactacgaaatcatgtgggaaagagaggctgagctaccacatatcatttcggcagcatgggaagctattgaatgcaaaacagatctaggcaacatcgaagtgggccttgacaaggtcatgtcagatttacatacatggggaagcagaaagtttggcaatgttgtgaggaaaatagaaaagttaaggaagaaattaggggagctccagtactctaattcagaccaacatgagatcaggaagatcactgatgagatgaatgagttactttacagggaagagatgctatggctacaacgctcccggatcgactggttaaaggaaggtgatagaaatactaaattctttcatggtagggcagtctggcgatctagaaaaaacaagatagaaaaacttaaggcagctgatggcaatgtttactcaaatcaggaaaccatgggtaccatggcaacaaattatttcaaagagttatttactaaagatccaaatctggtgccggctaatgtggcaaacttgttcgccccgcaagtttcttcagcaacaaatgaagccctgtgtgcagatttttctgaggaagaaatatcaacagctctgtttcagattgggccaattaaggcaccagggccggatggctttccggcaagattttttcaaaggaattggggactcttcaaggacaacattgtccaggctgtaaaaaagttccttgatacaggtcaaatgccagaaggagttaatcatactaccatagtgctaataccgaaggtggatcaaccagttgaaatgaaggattttagaccaatcagcttatgcaacgttttatacaagattgtctcaaaatgcttggttaacaggttgagacctctgctgggtgatattatctcgcctaaccagagtgcgtttgtccaggggagaatgataacagataatgctttgatagcctttgagtgcatacatcatatacaacaagtgaagagaccagacaactccttttgtgcttacaagctagatttatctaaggccaatgatagggtggattggtgtttcttggagcaggctatgcataagataggtttctctaaccggtggattacttggataatggcgtgtgtttcctcggttaggtactctgtaaaattcaatggaaccctattggaagcatttgctccatcgcgtggactgcgacaaggtgatcccctatctccctttctttttctgtttgtggctgatggtttgtctgctttattaaaggaagcggtgcaaaatggtgaaataactcctgtgaaggtatgtcgtagagctccaggcgtgtcacacctcttgtttgctgatgacacacttctctttttcaaagctaactcagatcaagctaacatggtcaagaatgtattagagagctatgcagctagtactggacagctgatcaaccctcaaaagtgctctatcctatttggccatgcatgtccagaagagttacaggaagaagtaaagaatgtcctgcaggttggtaacgttacttttgaagagaagtacctgggcctcccaaccccggaaggacgaatgaaaaaagggaagtatcaacggctgcaagaacgtctgagtaagaaattgatgcaatgggcagagaaccacttgtctcagggtggtaaggaagtcatgatcaaagccatcgctcaggctatcccagtgtacgtcatgggggtcttcaaattaccagatggggtatgtgaagaactaactaagattattcggaacttctggtggggttttgataatggaaagaggaaggtgcactggaaagcgtggtctcaactcaccaaatcgaaaaatgctggtggtttgggatttagagacatgaaagcattcaatcaagctctgctcgcaaggcaagcatggaggttaattgataatcctgtcagcctgtgtgcaagagtgttaaaggccaagtattatccaaatggttgcctaatggacacggttttctcaggtaacgcatcgccgacgtggagagcaatcgaacatggtctggaattactgaaggaaggattggtttggcggataggtaacgggacaagggttcgcatttggagagacccatggattccacgatcgttgtcgaaacatgaattcggcaataataaaagggggtagcgtacgagacctaaaagtggatggatgcggagacaaaggatttagacaggttcaggccctctcaatgagaggtaataccctactcctgtttggggatttgaatccaccgggtgtagtattgatctgacgatcaggttgtgtcatgccccctagagggcctcctgcccaccttatatagggtggggggcaggattacaagatagaaaccttaaccaatacggtatcggtttcctaaatctactttacaatattatcaaaccaggactttaggctgttccgtaatatataaggaaacgtaatacccgagtcatgatctattacatattccatagatataagttatcccctatgactagtcggataaccatgccgtatgggtatggggtacccataatatccacaatcgtcaactcgtaaagtgataaccagccaaggaagatgcagaataaaatgggtggcagatctgttggatgcaaacacaaactggaatgagcaattagttagacaaatctttcttccaatggatgcggatgctattctgtccattcgcacatcacgccaaggggaagatgatttcttggcatggcacctggagaaatctggtatttttacagttaaaactgcctaccgtttagccattgaaaataagctgaattccgaaaatagcaatgcttctggcagttcaattgaggggagtaaaagcttatggaatacaatatggtcttgtccggttcctccgaaggtacgtatttttgcttggcgagttgcttctgactgtttgg

SEQ ID NO: 21751 - DNA, 2761 bp, Oryza sativa
caccgactagatgcacctaataggtgtagcccccgacaatgtggttaattgaacaaaccaagcatgtagtcaaggaataaataatccaaccaaccgagtggttttgataatcgtaatcaaccaagtgacttgatatcaatatatagcatatgcggtgtgaatcctccaaataacatgatccgagtgatataccaactgctttgtaaaatatgatgagtgatatagcaaaatagctataaagaagcttgtatattgtgaataaagaaatttccaaagtattgggcatacgccatgcgcacactgctttaacagatgtgcttaagtccctagaagacacatggtttcaccacacctggaaatatatggcatatgtggtgtaaaatccgagtaaataaactcataaaggatttaccaaccgcctagaaaatgaccacaatatataatcagcctaagccataatattggtcaataaaaatgcacacttacgtggcgaaaagcaatgatattgtatccaatcaattgcttaaaaacccaaacagcaccttgacttatatataaaaaagtcagcgggacagctatataaagctttactgtttgacaccttttaagatgcattgtaccaactcctaaaaagttaagtaactgcggtataaaaggattttaaggtattgggcacttgatcacgcgcactttggcctaagcaaaaagtgcctaagtccctaaaagaacgtgacaggccacacctgaaaatatgggctgcagacatattaggcctaggccaaaacatatgccttcgacaccctttaaaggatgacgcatataacatgctcccgagtaataaatcttccgggtaatatagaccaagcgtagctcatatgaatagcttctgatctgagtggttatcccttatgggatactccaaaatagatgtaacaattgaatcccgactggcgcaagtattcagttgataacccttacggggaataataaatagtccagtctttgagcatataaaatagacccatgatcatgaattcatgttgcatgtatccggagcaagtccaaattgaagatataatacttgtatttgagctagtaagcccctgagcacgtagtcacaattcttcatcgatggtagctgacgcagttggcatagagacaagacaaccaatatagagagaatattgcccaccagaggtggcaaaaatattggtggtagtgaagatagtgataccaatcaaaagtactgaagtcgcatagccatggaggcgaagaaaccagtcggcggcagtcaggtcagccagcaatgaatatgaaggcgctcagcgataaagttgtgtagttgacgacgacaaacgcaaccgacatgatgaagatgacgatgtcggtgatccagccaatagcagtgtagcaaccaatgataatgacaaagacactcatcagcatttgcatagtaggtcaaccgtcaaggtgaaataataagtcggcgaaaacataatcatccattagcaacagcagagatgtcagggtcgatgaagcagaggtgctggtgatgatgtcagtgacaataatccatcaaattaatgttatagctgttgtagatgcttcacttggaggagaattgatgttgttgcccaactcgtctaaaccgaaatatttgaagttgttgaagtagaatgtctgctccgaagcaaagatgaagataatgactcctggagttgactcgtgggttgatgaattgatttcttcagcttgacataaattttgtcaaaattttgagccttgtatttgtgtagcccccgactctttgattagttgggaaacaactgaacatagagtcgagaactgtagcctcttgtcgtcgaatagttattgcttgattgaagatatgtgttgaagatgtccaagtagaaatcctgaatattggagagccacttgttgtagtaaaataacacggcatcgcatgccgagatgtcgaggttcacaaagacgtcgtggttggtgaagtagcaaaacttgcgaagtagcagcaatagagtttgccagtgacgaagataataaagatgaagtcgctccaccatgatgacaaagttgcatcgccgtgatgaagtgaacacgagtcggcggcaacagaagcaaactggtagcgaagacgcgcagttgtgaagataaaagcaccagtcggcggcggcataaccagtcggcaacggaagacgatgatgtccatcagtagtggtagctgtctaaaccagacgtagaggtgagggcactagtcagcagcagatgtagacagcttgcgttgaagatgatgatgcttattagcggtgatggtgatgtagccagccgtgaagaagatagcatcagttggcgtcataacaggccagccgttcaggcggtgacaccagtcggcggcggacgaggcggccggtcggtgatagcgtagacgcccaacaacggcagcataataggccagccgtgcaggcggaaacaccagtcggcggcggtcgaggcggccggtcggtgaagacgtagacgcccaacaacggcggcataataagtcagccgtgcaggcggaaacaccagtcggcggcagtcgaggcggccggtcggtgaagacgtagacgcccaacaacggcggcataaagaccagccgtgcaggcggaaacaccagtcggcggcggacaaggcaagccggtcggtgaagacgtaaacgcccaacaacggcggcataaaggccagccgtgcaggcggaaacaccagt

SEQ ID NO: 21752 - DNA, 3044 bp, Oryza sativa
gcggccggtcggttaaaacgtaaacgcccaccacggtcggaataataagtcaaccgtgcagcggaaagcaccagtcggcggcgaaaaagcaagccggtcggtgaagacgtagacgcccaacaacgtcggcataaaggccagccgttcaggcggtgacaccagtcggcggcggacgaggcggccggtcggtaaagcgtagacgcccaacaacggcggcataataggccagccgtgcaggcggaaacaccagtcggcggcggacgaggcggccggtcggtgaagacgtagacgcccaacaacagcggcataataggccagccgtgcaggcggaaacaccagtcggcggcggtcgaggcagccggtcggtgaagacgtagacgcccaacaacggcggcataataagtcagccgtgcaggcggaagcaccagtcggcggcggacgaggcagccggtcggtgaagacgtagacgcccaacaacggcggcataataggccagccgtgcaggcggaaacaccagtcggcggcggtcgaggcggccggtcggtgaagacgtagacgcccaacaacggcggcataataggccagccgtgcaggcggaaacaccagtcggcggcggcgaaggcaagccggtcggtgaagacgtagacgcccaacaacggcggcataataggccagccgtgcaggcggaaacaccagtcggcggcggtcgaggcgagccggtggtgatgttctgactgatccattcctggagcgtaagagataagcttaaagccatgaatcccttttatgcatatctggatctagatcctgcagaacaaacatataggatgagtagtatctgatataaatataatactcgagaaaaaatcaagtattttaaaatatttataaatatgtatttctcctcttgtcaattttgatttccccgagcagatgactctgtacgtttaaacactctgtccgactagtcatagcccccaagcatcgggagtcggtctaggcatttcccaaacatgcatatgattgacatgagttcgtcattaatggaacaaagtttcacggatcagaatttactactcaggtacttttgcaattattaagagcagaaaataaattatattatctctatgcttttgatttcttccgagtaatacttagcaccttgcgttactcggtccatccaacgagcccccgggtgctaggaatcggcccaaaggcaaccatccattggcaaaccaaacggaaagcataggaagatagaactccataactcgataggtacttttgtactcagattatgtcgcaagcaatcaagataaatattataaaaaatatgatataacatctgtagcccccgactcactactcaatggaagaccaattggtgtagtgaggcagaggaaaaggaaaaatatcatataaagaataaaataaatgatgacttagctttgtaatattccccttggtgatggcagaagtggccaatgtgggaacaaagtcgtccatcaataacaatgaagacaccagtcggcggcgacggaggcaggccggcggtgaagtcgtagacgcccaacagcggcggcataatagaccagccgtgcaggcggaggcaccactcggcggcgacggaggcaggccggcggtgaagtcgtagacgcccaacagcggcggcataataggccagccgtgtaggcggaggcaccactcggcggcgacggaggcaagccggcggtgaagtcgtagacgcccaacagcggcggcataataggccagccgtgtaggcggaggcaccactcggcgacgacggaggcaggccggcggtgaagtcgtagacgcccaacagcggcggcataataggccagccgtgtaggcggaggcaccactcggcggcgacggaggcaggccggcggtgaagtcgtagacgcccaacagcggcggcataataggccagccgtgtaggcggaggcaccactcggcggcgacggaggcaggccggcggtgaagacgtagatgcccatcagcggtggtgtgatagaccgtccgtataggcggaggcaccagtcggcggcgacggaggcaggccggtggtgaagtcgtagacgcccaacagcggcggcttaataggccagccatgcaaacggaaacaccagtcggcaagagtagtgccgcggcgttacatgcaaacagcagaaaataccaagagagattaatctgacatttagagatcaatctaataaacaacaataagttgaaaaggaaaaaacccggcgaagtcagagattaaaaggaaaaaactcgccgagattgatctcttcgactgactctgagacggagcggaggaggcggaggtcgcagtcgcgggcggcgttggtgtccatcagcacgacgcaggacggcaggaaggcatcggcgtggctgcagccatctcctatgcatccgattagatcggttttggcatgcttcgtgtttgtagatccatcttgcaacaccatggcatcctcgttgggtagattggaccagtaggcttggtggtggacgaggacgaccatcaaatccgtcgaactgtcgttgccccgtcgttgccgtcgtgctgatgcgaacaagatcaggcagagaatagcagcgacgattcgtcttgttgaagtcgtcggcggcaaggaatcaaggagctcccaaagcgaagacgaagccggcgactcataaagttgattccatcgcactcgtcgtcaggaaactcggcgtttacccctacctggcgcgccaactgtcgaaacatgaattcggcaataataaaagggggtagcgtacgagacctaaaagtggatggatgcggagacaaaggatttagacaggttcaggcccacacaatgagaggtaataccctactcctgtttggggatttgaatccaccgggtgtagtattgatctgacgatcaggttgtgtcatgccccctagagggcctcctgcccaccttatatagggtggggggcaggattacaagatagaaaccttaaccaatacggtatcggtttcctaaatctac

SEQ ID NO: 21753 - DNA, 8648 bp, Oryza sativa
agggctctatgggcagcatagcgcgaggtgtggcagataccggaccagacaaccaggacatatcaaggtacgaaatggctgctgcttacacttgttaaattatctgaaatggaacgaatgttcattctaatgttgttgtggcgtatttggcatgtacgtaatgaggtggttcatgataaacggcctgccccgattgaggtctccaagcgattccttgtaagctatgtggactctctactgggaatacgtcaacacccaacaaaggatatacacaaaggtaagggagtcatctgctaccagctgcggaattcatcaagacaaggtggttcagagagatcgcaggggacagacgaggcttgggtgaggcctccaccaggctggtctaagctgaatgttgatggttccttcaataacagcagcggccaagcaggcatagggatgatcctcaggaattcagaaggagaagccatctttacaggccgccaggctatagcaaattgtgttgatgctttggaatcagaactactggcctgtaaatttggtctggatttggctctacattggtcgattctgccaatcatccttgagactgacagtatcctggctgtctccgcgattaatggaaaaactgaggataaatcaaggtttgcttacttgatacgtgagctgcgtttgctccagaaaggagaaagggaagtgaaagttcagaaagtgcatcgagatcataataaaattagccatgttctggcaaatagtgctcgagtagcaaataggtcagacttctggtttggccacgagagcaactgtgtctctgcactcattctggaagattgtaatcactcttctatagattaatgaatccccttttccccgcaaaaaaaatattttacgtacttctgaccaaatttaggtagcttcctttgtttaatttgtcatggactttttatcttgtatttcaataattcattgtctgaatttcagctgttttctaatttgtgggtttgttcggttgcctgatacatgcatgcagtgctacatgaccaccagttatagcgaacgaactaatcacggcctacgggccagggcatcgttgtaaccaacggccgaacatgctagtgtatgtattttgacatggtctcttcagtattaatctagaccattttaatttgaacatgccgcacaaccaataacttttttttcattttctttgaaatgcataataatttatacccctttgagaacaagtttgaactttgaaggcttattcacaccgtgataatatatgaatatgaatatgaatataatagctaaaagtaggaaacgagcaccttccaccctctatataaagacaggcaagaggtaccacgcaatcgaagatcaataggaggaatttgtcaatttgggtccaggaaaacgagagtagttcatagtcatttcttttttgcatattcacatttttttcgaaactcatattcatcgatattatagcacccatgaacacttctaggttttttatacggcaatttggtaatctcctatgagatatctacaaaattctggtataactggttttcttctcacacgagaaaaaaagcactccacattctagttagatggcttaacttaaactatttcaacttcgggtgaactgtgcatatgtttagttaacgagtgattttttttttggccgaggaaactgtttggtagagctcaaactgctaaatttagtttcaggagttgagttagttgtggagttgtggagctgcctaaactgggcctatttggcacaactccagctctagctgcacccctcctactccaactgcacccctcctggagctagagctcagctaaacagtttcagctccacaaaaaatgggaatagagctgggtttaggtagctccacaactccattccagacccaactcctagagctaaatttaggagttggagctgtaccaaacaagccctcagctccacctctctagttcattttgtgatagcgctccacctagctccgctatcattttaggtggagctgaaactgtttggctaggttccaactccagtagaggtggagctggagctgtgccaaacaagcacagaaaacatgagagaacatacaattctcaattctttctggttaaatgtttcgacaatataaacacagcactctcatctagtgacatgttgcatgtagtattaggaaaagacatgcacaggggcgacatccaaacagatgagaaaaatcaaaggggtgaaaactcagtgatttactacggtacaccgtacaacaggcttcacaactggcaccatatgacgccacggcctttactgatttagcataccagcatggtggaaggactcatgagaaaagtatccaagtctcaaaacgaaagcatgttctagtttacagcagtaacacgactatggcaccaacgacgggggaaagagaaaaacggcaatacagtctcatacagaatgcaacacatttgcttccaggaaaagaatgacaagaaaatggttgaccatcgccaacgggaaggaattgtaggcagaggagctgtagcaaattaacgccttttcgctcctggggattgcagtaaccggcctgtgtttctcagagggctcgcgacttgacgatgtccatgctcatctcactcgggtcagtggcctgcagctccacctggatgccgtccagctccctcttgaaccgatccttggagctagcatacagcatcttgctcctcacccttgatgtatcaggagccctgcagagagtaagatgcacaaacacattgcctcagtgttacaattgaaatagcattatatagttctgttacattgggcgtttgacaagctgatggatataaacatgttttatgatgcttacagttaataatctaactgtcatgatttattcattattcaaataaagaagaaactggtagtgccaaacagcttgcagtgtttagagacataatcctgagatatgttgattaattcctgaagttatcgatccacaaatccaacatatgggaaaaagatcaattcagtgtctgtcaggctgttatctgtaattgtaatataaggttgctttacatttttttggcaaggaattcaattttctttacatgctaatatcagtttcttaagatccatggcttgggtgaacagtgaaacaatgggcacaaaagagctttagcagaaatgaccaaaagcagcattgttcctttagattattggcactgttcattgtctcactgacctcatttccctatcaaaattgttccttaccgtaaaagtagataatatgtctaataatcactagtggcagtgaggcattctcataaaaaagaacattttaagtacaggtagcgaagacattagtgctgataacaattttgataagcaaagagatgcctgatatcaaagtgtctaattttagatctatgatgctatttttagctaaaaattgataggctaataattatgcctctttcttgttcctgtttcaacctaatctaagctaattttacacttttgtaaaatagaaactatgaaatatatttctgcgtttccctttgataatgaatttgaagtgctaatgtgcttttgaacaagtgacaaaagtgcagttaacccatcctataaaaaagtgtttcgttacacctggtaagtctgaagatcgaagggaacaccaaactgcaataatctaacgtaagcaggcaattgctcacaaacaactcaatccaaattgagacttttaggtcagtaactgccacacgtaagatcgaaacaaaaccaaacataaaaaatatgctatgtaaatagaaatttacatgttgatgaaatcaacaagaatatgacactatgttgacaggggaattgttaccaggagatgaagaatatcttgctcttctggcagttttcatcagtgacaaagtcaaaatcaaataccgcgtagcggcactcatctgctggtaagcaggcagtgaagtcgtcatagctctcacccggctgccccaacctgtccaccaccacctgctggaccttctcattgatcttgaacacgatgaagcggaagctccttttcgccttaagttccaggaacttgagtttgcattcgtcacacacggccattcccgacgccgaattcgacttacatatccccacaacatacaccatttcgttaatggacagatcttgatcaacattctgaacgaaagagattgaactgcactcaccatggttgatgatccttttttttcctcttccttccttctttccttccttactatggtgagaaacagacaggccctgcaaggaggagagaggagggaatgtgccaaaacgcgagcaggagcaagatttgaaggcctgaaagagaggaaggaggaggcaaaatatagggagggaagggctggcggtggagatggaggcttgcatgatgccaccacgttcggagaggagcatttgaccaagcacgtcccctccttggtgtgtgagaaccagaagcgttgtgtgcaaccaacatgcgcgccaccacccatcgctatagcagctccccttgcatagaaaaatcatttgtggcatcaaaacaacatggcgtgagtttgatacgtttcccgtttttttaatggtgcaggtactcaggtactccacgtctctagtttctttggtttgattccaccagtaagatccacatgtaatcttctctattgtaagggaagactatttattaattccagggcaacaattagttttttttcttaaaattttagtcaattttccaactgatagaatctgcataaaagatgaagtgctttgatctatctcatataagtacaaaacttacattctatggcattgctgttcggcattgtacagatcttgcctcaaccaaactagatcctggttcttttaggaggcccctttccaccatcattctccggacatcctgaacatccctccatctgtcagctgcagcatatatgttaccaagcagcacgtaactcccagtgttctccggatcaagctgaaataatcgctttgccgcaacctccccaaactcgacattcttgtgtagaacacaggcaccaagcagagcaccccataccgaggtgctcggctcgaatggcatatcttggatgagacgatgagcctcctcaatcctcccagcacggccaagcatgtcaaccaggcacgagtagtgctcgccatttggcatcaaaccatggacgttgcgcatgtccttgaacaccttaatgccttcgtctatcatgccggcgtggctgcatgcatacagcaaagtggcgatggtcacagtattcggcttccctcctgactccaccatcctgtcgtagagcaggatggcagttcgggcgtgaccatgtataccgtacccggcgatgatcgttgtccaggcaacaacgtccttctcaggtagccactggaagagagcccacgcagcatccaagtcaccagccttagaatagacatcaatcaaaccagtggcgatctctgtgcttctgaggaatccgagagtcagtaagaaacagtgaatgttcttcccttctttcaggtctgcagattctgcataggccggcaggatgcttgccattgttgcagagtctgggcgcaccgattcagcaatcatccgcttgaacaattctatagctttcttctcccgtccactgacggtataaccagacaaggctgcattccatgtttctgcacgccatgagcccctctcaagtgttaatctcatcagcttcatcttaccgcacctcgcataagcgtcgataagcgcagtttcaacagcaatgtctgatttaaggccaagtctaatgcagagtgcatgtgtgcacttggcatgcttccctgacggcatgctggcgcatgctgagagcagatacaccattgtcactccattgggccatgctgccccagacatcagcatctgacaaccaagagaaatggcctcaaaagcacggtcgttcagcacataagcgccaatcatcgctgtccaagaaacaacatctttatcatgtttgcagtgatcaaacacccttcgtgcatcctccaagctcctacacttcccgtacatgtcgatcaatgcgttcttcactgcaacataatcccccaagcctttgtcctcaacaagccggtgcacggctctcccagtgttcaagtccttggcttgcgcacaagctggcagcactgacacaaccgtggcacggtcgatcccgacaccatcagcggccatctcgccgaacacttccagcgccctctccgcgtagccgttcttgacgcacccggcgatgaccgcattccaggacacgactgtccggttccgcatcgccccgaacaccgcctccgctgcgcccacgtcgccgcagctcatgtacatggaaatgagggcgttctgcacgtacgtgtcgccgccgaaaccagcggcgagcgcgcggcagtgcacggcacgcccatggcggccgagacgaaggccggcgcaggccttcgcggcgaaggggaaggtgaggtggtcgaaggcgcgcatcgccgagtaaaccgcgagggcctcccggtggcagccgaggccggtgtacgaacggagcagtgagttggagaaagaaaccggtggtggttggggcatttgcgcgagcaggtttgtgggcgctggagggacggccacatgcgcaatacaccatgaagagcggatggaggccgtgatagcggaggaggtggccggacgtgaggaggagcgcgtggagttgagcggcgacggcgggagcaagcggagccgtgttcttcgagtggaagatggtgacgagcgagcattgccggacaagcggggctgggtttcatccaggaacggagttgagacaaggggatgtttcggcttttgggcagattggcttctttcagcctcggtctctctcggggatagttcgattttgaacttttgggagaaaaaaaatcagttgcaaacttctaaaaactaatttgaagtttgactgaattttttacatattggtccttttataaagcttattttagacatggatactaaagtaggcagtccaccttgcagggcagtcgtcggaagaagttcgccacaacgtcaggcagcctctgccgcagaatcgggtgccgcatcaggtagaaaccagtcaacagcgccaccgcctggaacggcaccgagaacgtgatcacggcaaggcacaggcagcccagcaggtacaggcccgtggcccgcgggtcccgccacgtcatcacgcaccgcgcgcgctcggcgtgcgtcgcgatgtcgccgacgatctcctgtatccgcgcgttgaggctcctcagcttgtcgtacctcatccgcaccacctcgggcggccgcgccgtcgggaactcgtcgaactcctcgtcgagctcgtcagggtgcgccgtgtcggcgtgggacaccctcatgtcgacgtgccacgggtgcttgggccggcgcaggtagttccgcatgccgagcatgaacttgtacaggaagaaggtgggcagtacgagtctcgggtagcacacgagcatggtgaagatgacgtggaccgcgacggtggtgaccgggttcgtccagcggcagacgtggtagaaccacgcgctcgccgcggacaggggctccagcgcctccgcgaggcggaagaagtgggccttgctgcgccgcatgctccaccgcagcgcgtgcgactcgcagaggtgctcgacgcactcccggcgcagcggcgggtccatccgccccatccggtgcgcgatgatcgtgaccgcctcccgccgcagcatctcctgctgcacgacggtcagcggccggtggtagtgcatcggcggcagatgcggctgcgcgtacgtctggaacaggcccagcgtcgacgtgctggagaaacggacggcgagacgaagctcgcccatcttcttgacgccgccgccgtggagggacataagcgggtaggcgtaggcgtatgtgcggccggtctcgagcgtcgagagccggatccgcaccttgccgaggaggacgtccttgacggggtcgccggccacgaggccgcccttgtcgcctatctgagaattgtggaagacggcgacggtgagcacggtgcagtggtcgtgcacttcccagtggtactgctggtggaaacgcggcgagatgctgtcggtgacggtgcgcgtgcggtaccacttcaccccgtacttggcgacgcagtacgcgtcgcaggagcctcggccatcgcgcgtgcgcgtcgcggtgaggatggcctcgcggatgccgagctcgacgaggccgatgcacttccgctcccgctcctgctcacgcgccgccggccggacgtcgctcaggtagtggaccggctctgacagcaccttgtacccgcattcgaggcaaagaacgacgcttatcttggcagagtacttgtcaatcttggcggctccctctggctgcatcaaactaaacctgtcaaacagcatttgcgtagcagttagctagggacaaattcaatcttgcttgcctaataccaggtactttgtcgttctttgctagtacatgagatggatggacattgggcgtaccatcttgggctgtcgggcgggcgtcacaccggcgttcggagctgtcaag

SEQ ID NO: 21754 - DNA, 1639 bp, Oryza sativa
cctgatcccgaactcattgttcggcggcagcatgccggcggggcgggcataagacctcggcagtacgtcgcccatgtcggcgaacactgccgccggtcgaacgagatatgctgggctggtctggtcacactagctggtcagtgagcaagttgcatttatatatgtgtgttcagcagtctggctggccaccaaccggccgcgcgcgtgacgtcgtgcgtggcgagcgaatgcgtggatttttgggatttggtgatcgacacagtcggggtgtgtgcttgctgacggacgattggtgatccaccagggttagttagagtaagtcccagagcaaacagacatgacatgttgatttacatgacttcagcagattagagaaccgtgtcacggcttcacaggcgtttataccgtttagggaagaaatcaactgatttgagctgatttgcatgaacctctaggttctgggccttgtgttctggcagaataggccatggcaggacaaatgctaacggaataagctcactttaggtccctcgagttgtcgtcgagtctaaagttcgtctctgaaccgcaattccagatagatatatatgacgcgtctcttaactcctaaaattagtgcaaataaggttctaaggtggtttggacatcgtttctcgatgacatgacgttaacgtggcacttaaagctaaaaataatgtaacacccatacatcagtgtttggttaaaaataaaaaaccgcgaccggacccacgtcatcaacccctatttattctcctcttctatctgttcttcatctctttgtccctttcctcaccatcgactcgtcgacagcgcacgcacaatcctgtcagaaaaccacaagtccgcaacgccgccgccgccattgtcatgtccatatccatctctgcgcccacgcctttgtgacgaaacccattacgcagcatctctgcctccattacggtcgtctccccgtcgaccgtgaccaacgctctccgctccctcctcaacgctggtgtcaaaccgggcggccaccccgctcccatgactctcctcatcctcctcctcccgtctcgccttcccccgcgtggctgtggcgccgccacctctatctggcacatcgcgtggctcctacccgcatgcatgccctccttgcagggctccgctgccacacccttatatcatcgtggctagggcttagagtgagatcttgtgatctttttatcttcgggtttgcatctatttagtcttgattaatttataccataattttatgtatttatagttttattcgcatcattttcgaagatatatgatttttagaaatatatattgcaagtaaaaatatattttattttgagggcataggttacgaagctcgtttatggccctctgaaatttagagccggtcctgctcacaagtgcttccttgaaaattcctcagccctgtaaaatcttgccaatgaaccatccagctcacatttgcatgataataatcgttgatgaatttggcatgtggcaacatcaaaaaagaaaaatcatagttgcatctgcatcatcagagcagaatatgttagtgagtagtgttctgttttttcacaaatagtgagtagtgtacttacgtggtgtttgggaaggaggg

SEQ ID NO: 21755 - DNA, 1993 bp, Oryza sativa
aaaatttggacacccctttcccctctggtgatttggtcccctttcagcagcgagagactgaagctttatacccataccccatacccctctgggggaaagtatttgcacatcgatgcctccgtgatgctgctacgattcggcccttttgggacttcttaagccaatatctttttggttttagctgcagatttttttacccaaatctttggaggttttctacaagctgttatactgcttgaattgtgatcctaatgtttaaaggactatgctttttggtgtttgcaggatgcaagtggcaaagatgtggacctgagcaccttcaaggggaaagtcctccttatcgtcaatgttgcatctcagtggtaccaattattaccaatccctcacctccacagtgtctacgttttaattttgtaaacttggaaattattctagaatgcataatgtgatttatctttttcatgttgaaatgttccatgaacaacgaaaccttggaaccctagtactgcgttatcaagcgcttaagttgaatgatatgctcatttgatgcctaatataatgtatattttcgatcaaacttccattcatgttgcaaagtaaagatgccgaatttatatggtttcatatggaacacattcgagtttctatctaggccatatgagacaaatcgaaatttgaagtattgttctgctaaatgaaactttaaaaagagccatggtagtgtttgtcccggaggatcagcctttgcatgtagattatcgatatatggaaaaaataataatctggtcagcaggtaagttggttttagctggacaacaggatgttgatctcttgccaattggaaagtttgtgcagattgtcataccattaactatttttctatttgcgtctcatcctccttgtgttaagggatacatgttctttagaggacggccattttttttttactaattttaaagaccaatgagatgcagatataataaaataacatacaaactgatatcattatcctcaaattaagaaatcttgttgctctctgtcattgttgcagtggcttgaccaattccaactacacggagctgagccagttgtatgagaagtacaaggaccagggtgagtgttagatgcatctcatcatttgttccctcattatgaaatctctcttgtgcgctgaattgctcatatgttctttcatttggagtttatgaccaaccaattgctaatgtcattgtcaatttgatttgacgacaggttttgagatccttgctttcccatgcaaccagtttggtggacaggaacctggcactaatgaggagattgtccaatttgcttgcacccgcttcaaggccgagtatccaatttttgataaggtaaatttgggcacattataccactacctcttgcatttttgcactttttttttcatttatctttcaagcggaaagaaacaactaactcaagtatatgttcaccttccagagccgtcataatattttaaaggaaattaatcccattccgaaagtgttccctttcatatgtagcctgtgatgtatttccagatacttgtctagtacttaaaaggaaattgatcaagtccatgaagtttttatccgattcttatgcatttcgtatgatgtatgcgatcgataagcctgataccagttttatcctttcatttatcacaagaaagaatcatggatgtttataatgtgatgatcaattgatttttattgtttagagaggtgagatctagaagttctaactaccattatcttaataggttgatgttaatggtgacaacactgcacccatctacaagtttctgaagtccagcaaaggtggtcttttcggtgacaatatcaaatggaacttctccaagttcttggtcgacaaagaggggcgtgttgtggagcgctatgcgccaactacttctccactcagcatggaggtaaatcccgagctccaagtgggtgtaatttgagttccatctcat

SEQ ID NO: 21756 - DNA, 632 bp, Oryza sativa
tgctcggtccccatagcaaaccaaagaaggggaaagggcccgatgagccaagacgccatgttgttctcctaggcaagaggaaaatcgttggagtctaggataatactgacgaaaattacaatctgtttgaggggcaaccttcgtttgcagtgacggttgacccgagcatcatactatcaaaggaggacacgccgtactcacgcaacgatcatagcgaaggaacaatagtgaggagaaagtacctgagtaagacagcgacctaagttgtttgatggaagatgtaaattatttgtattgtattgaaggtcgaacaatttggatcaatatattattcacaactgcttaatttgtaatgtattactatttttcaaccatatgatatttataaatggttactttcatttatttacactttgaataccattaattaagcaatatgttatttataactgaataatgggatttatttccactttgaaaacaattagtagggtattttctaaatataaaagattatttttatttaattacacttttaatataattaaatgggcttatgttaaatataaaagaatatttctaattaattataccttggaaacatttacttaaggcataatcctgtttatttt

SEQ ID NO: 21757 - DNA, 1980 bp, Oryza sativa
cttagccgcgtagccgccgcttcgccgcgacgccgccgctctccgccgccggtcggttgccgccggccgccgtctcgcgcctgtgccgcatgcgcaccgcgccatcgcgcgccatggccgccgggccggtttgcgccggcccgcgcgcgctggccgcgagctcccgccgccgtgtcggggccgtcggttcggccgccgcgtgtgcgccgcgtcggcgccacgtgtgcaccacgtggtgcgccgctcctccccggatcgtggaccccgtccgccgtggaccgccctccccgagtcacagccatgtggggcccgcatgtcggctccgccccttctctctccccgggatttatttattgcgcaataattcaattaaggatttttctgtttattgtaaaaacacaatgaatcttctaaaattcataactaattcatccgagctccgtttaagcccattcaagtctcagtaaatcaagaaaaatgcgtagaatccattaaaaatggttttgttctctgtttcagtagtcttatagcctgtttgtattgtttgccttgtatgtcgcttagattccagctctcccgacgctccggtgtacttcgaaatagtcgtcgaggttcctccagctgcagagcaaggcaagtcatgcttgtcacttgaacatgttgatcctatattgcaaatgctctattgtttttcttcaaatactgcattgttttataatattactatgggatgtttacctattgtcatagccatgctatttttgtaccatgcttagccatgcttagttcaactagcacacaatgggggaaaatcatattaatgtatagacgataggtcctaatgttaatgactggattagtgccaccgttctggtgttgcataattaaaatatattaaatggtgggctgtgggtgcatggttttgctagtcgcgcctatggcacttaaggaccggttcgcgggaaaccctggaagaattcctcgtacttaccacaagccagcgtgggcaacgactgggcttgtagtgtagctttcctctagttgacgcatccaggcaagggtgggcgtgatggagcggggcgggccctgcgacggcctctgtcgcttccggattcacctaggcacgaaaggggactgcccactcccatgcgaggagtgggggtgaaacatgaggtgtggtgtgcttggttaaagggggttatgcgagggtcctgtcacggcctctttccggtatgtcgtggtggcatgtcggcacatggaaacgtgtcgtggggctgtgtcttgtgggtacagttgtacacctctgatcagagtaaacctattcgaatagccatgcccgcggttatgggcgctcaaccagattcaccgtgattagattcaccctagactagtctaatggaattgaataatataggtggatggttgggcctgttgcaacgcggtgtagcattgaacagtggatggttaatattgattaattattacaactgtttaattctctcaacttctgtttataaatgctcgctttatgcaaatgaaccactctagctctccttgataattccctgcatcatacctctattccggtatgacttgctgagtacagtgggtagtactcagtcttgctctattttccccaaaccccagagtttgagtatgcgtcagatggtggcttctccgaggagtaggcttcgttcgtgccgtcgaggatgcctgtggagtggtgatcccgctgcggttcaagtcaaggcttagctccagttatcttttagttttccactgcatttatgtaagacttttataatgtttgtaagacgtggatctgtatgtcaactttgtcgtttgtgtacccccggccggtcctggacagggattttaatacatattctacttggaattctattcgggaatttctgggcgtgacagggtcccagctcgtcccaagccaacccaggccaaccgttccacattttagttgtt

SEQ ID NO: 21758 - DNA, 13895 bp, Oryza sativa
tatctctctcttttctatccacttagcttagataatatatatgagaatgagtagttaatgcttgtgggtcactctacccttggattaacttaaccaatgcttagaatatgattatcaaaagtaatatataaattattagtcaagttctctctacatgatcttcccacgggataaaataaatgcgatacccttggaatactctcgggtgaaatgctaaaatggtatatccgtgcgcttgcggatgaactctgtaaccataatataccaaaagtatttctgctccattgctaggaattatatttctagtaatggcgttaagaaataccaacaagcatttctggccccgttgccggggaagattcatactagagattacatgaactaatattttatatatacctatgtataatcattttcctttgcaggctaaccatggttgttttcacttttattatgaaacacagggtagtgaaatagtgcttgactggtttcaacttgccggaaaacttcaaagaaaatccagaagctttcttccggaacgtcagaccgcgagtcgctgctccacagagaactctaccgacagagaaatcagtcgtaccagcgccaccaaccttcaagaatatggctaacaagactctccgggagttcgctactccctttgctgacaatgtggccattgggccgcaggtcaacataggggacgtatatttgacttgaagttcagcctatcacgatggcgcaggctagtccgttctgtggcaagcctaatgaggatgccaatgctcatctgcaacaattcctggagatctgtagcacgtacaccatcaagggcgtaagtcccgacgccgtcaggctgcgactgcccttctcgtgagagcgaagtagtggttctatgccaaccgtcctgctgtcaatacctgggataaatgctctacgacattcctctcgaaattcttctcgatgggcaaaaccaatgcccttcgtggaaggatttcaagttttcagcagacaagggacgaatctattccggaagcatgggaacgtctgcaggagtacgtggcctcctgtcctcatcatgggatggacgactggctgatcctgcagaacttttataatggactcaccctgatgtcccgcgatcacctagacgcggcagctgggggagctttcttctctaaaatggttcaaggagccgttgatttaatagagaagatggtctccaatatgggttggagcaaggaacgactctagacccgtcagcgaggcatgcacaccgtcaaggagacggaactgcttgctgccaagttagaccttctcatgaaacgattggacgaccatgagaaatggccacaaggcactgtcaaggccttggactctcacgtcatgtgtgaggtcttcggcggcacgggtcattctgggatgactgcccgaaaacccgagaggaggtgacgtacatgggcaacaacaacgggtaccgtccacaaggaggtcaggggtggacccaaccatgcccatattatcaaggaggtaacaacaacggtaacttttctatccagccctccttgaaggatctcgtttttgcacaagctaaaaccactgatgcgttaagcaaaaagcttgtggccaatgataagatcctagaaaacattaatgtcaagttagatggctttgcctccacttttcaaaactagctgagctttaataaaatgatagaaacacagctagctcagttggcatccttagtccctgcaaatgaaactgggaggattccgggggaacccgactcctccattgaaaatgtcaaggcgatcacgacgaggggtggtaagtccacacgtgatccgccgtatcctaaccctgcaggaactaatgggatatcaaaagaagcgctatctaatgactcggttgacaaggaagttcagccagaaaagacagtgccgcaggagtactgcgacacacggttgctgccgttccctcaacggagtaggaaaccgtcagtggatgagcaattcgctcgttttgttgaagtaatccagaagatccacatcaacgtgccgttgttggacgccatgtaagtgccaacatacgccagttatctcaaggacatactcaacaacaagagaccgctcccaacaacggaggtggtcaagctgatggaacaatgcaacaacctgatactccacaagctcccggagaagaagaaagatccagggtgtcctacgatcacttgctcgattggggcacaacagttcgaccaggccttgtgcaacctttgagccggtgtcagcgtcatgccaaaagacgtcttcgacaagctcaacttcacggtattggcaccaacaccaatgcgccttcaactgccttcaacgccgctcatcctggggcgcccttttcttagcaccgcaagagccaacattgacgtgggaacggggagtatccgtttccacatcaatgggaaggaagagaagtttgagtttcaaccgaggacgaaacaatgttccatggtcaggataaagtacgggctgaacccacagaatattcaagaggtcgaagtggagccacccaaaacggacagcctggtgaaattcatgcagaatttcctggagctggaaacaacgatgcccaggaactgttattggaagacaccggtaaaaccacccacaccggcaagaagctagagcagccggctcagaagaagctgccgtccgcaccaaaaccaaagaaggtgtgtagggagaagccaaagacgcccgctccatcacctccggagacgggtagaaaatccgcaaactgaactggaaggaggtacagtcttgcacgtcggactttaaatgacgcgacctttgccaacaggtaaattggtatgcatccgcatatttgctttcaacaatttggatttttacatgtttgaatttcaaagttgcatttaggatttttgaattttgaggaaattcttcaaattaatttttcagagcaaaccaaaagaaaatttccaacgaaaattcaccatgccacgaccacactgactgttggaatccaacggccgaaagtggggccggttgggcccaccgtaggttcggtcgaaccggccaggaaacggttacctgccacttttggcagggtaacggctagtgggacccacatgtcatttctgaccgttgtgggtaccctataaaagccagccagccgagagagggaattctaccccatttcaacacattttctttccctctccaaagtttgctctcaagttcattaaagctttgatagtttccctcaaattcaaatacttagttgcatatatacaagttgctttggtgaaactaaccggcgggtgaaattcttctcatttctaacccctgccgagctagttcgttcttgctccaatgtgcaaaatgagaaggcgattgtcacgtctgttcaaggggtccggctcttcatcaagtcatcatgacgagtctagcactcgttcatcagctgatgtctcgatggaagacgccgaagctctgcgacgactcctaaacgaaactgacctcgaccttgtcaatgatcgggagagacaagcctactacatgctgagcgaccgggagtatgctcacacgcgagaatactctccggagctgctgaaaaatataggtatggatgttgaatgtcgttctatttggaaagcggttagttggcagagatttgctgtggtagatgagcctggttctcgtttgcttactttgcaatttctgtgcagtttgaaagaaatagaagatggaatttcctttcgctttttccgtaagaagtacacagttacatggaaaggcttaagtactgtcacgaccggaattaacccaacaggcattccattcgtgcgtgtattattccttgtcctaggaggcaaggtacaccaaaagttgatacaatttagagtttaacaagcggaagcctaaatagttaatttattacatgggcgacggaggcccagcacacacgaagataaacagaaaacagcggaagactagggttacgaccagaggcacttgacggcaggcacaagctagacaccaaagccttcatcttccaggaactcctcttctgggttggggaaaaattgagcaagattgagtacaaccacagtactcagcaagacacacccacggatgcagaataaatgcaaaggagtacaagggagttataataaaggggttagggtttgcagtaaacagcatttaaaagacttttagttgctcagggccatttggtaaaaacgatcctagagctactcaatgttattaatcaaggccgtgaacccgcacgaacctgccttaacccaaggcctacgataattcagaccgaactggcaacccgtcctaggttccagctcgtcccaagccaacccaggccaccatttccatattttagttgttaagcaagttttaagaattaaaccactaacttgggtacattgctaggcttgcccataaccgagggcgcggctatttgaatatgttatactctgatcagaggtgtacagctttacccacaaagacacatctttctcacgtgtaaccacgtgccacataccaccacggcatacgggcgaaaaacgtgacatagttcccaacccatcctagccataaacaagagtaccgacccaaccctaactacggccgggattcccgagacaggtaaccaaggttgagcctctagcagcaggacactggcccggtgccatgacatctcgactaccgggacgcagctcgtgtagccttcatttgccctagagatgtccatcgggccccgacttcgtccatctccatccgtgtacctttgtttatgaccagactgagccacaaactaaaccttacccactagatatgtggaagtacggtagagctttgcaacagaggcccgaagaccggtccttatggtggccgaggtgctactatcaaaaccatgcacctcgagtccagcctaaaaccattttgagggttttgaatagagggggaggtgtgtgtccatttcaaaataatccaaccattccataatgtccaaatgatatgagtattcccaaagtctaaggttataaaaccacctattgttgcctaattaatcagcgaagcatctacctaaattcatactagtggaatcatgaatagaaaacccactagttgggtttttattttcctagggtgaacaaggtaataataacaatagcaataataataaggtcataacaaaggtaaaaaggcatggctaaataaaacagtgataacgcgggaatttaaataaagcgataatgcagtaatttaaaccaaaataattttataaactgggattcaatatgttcaaggatgatgtgacttgccttgctcgctttcccaaacgtcgtcttcaacctccacgtagagcggatcttccgaagctgcagcgtctacacgaccaacaggaagaaaaaggcttttactctaataaactccatataacaagctggaacaaagcataaaaatgggttcttgacttcttaaggaaaaattagagacttgaacggtccaattccgagttcaaacgaccaagttatggccatttgaagtttatatgctctttaagtgaatatttacgaatttcttcatttaaattttaattaaaaatatggtttattgcgtcagccgaggggagggggcacgcaggccgggtccacaggagtggtgggcccaacgcggcagcctctcggtccacggtggaccgggtgcacccgcgggctcaccagccaatgccgtgggtcccatgcgtcagccgcacccgaaggaacgggtggctgatggccaggccccacgcggcggccacacggcgcgcccggaggcggccacgttggcgcggtcggcgggaggctgcgcccgcacccctatggtcgccgacggcggccataggcgcggcggagcggcggccaagagaggggaagggaagggggaaagaggcggcggtccacggctcaccccgggtcaagggagcgacggaggaggtggccggcgaggagggaggcggtggcgcagctcaggttgatggggacggcggtgtttcggcggtcggcgagctcggcgaggcggtggacggggtcgccgccggtgcgaaaaacccggaggggacgacgccgaggcgggggacggtcccggcgagcggataagcccggccggaggtcgacggcgacggcggagagagaggacgacggggcgagctcgattccgatggggagaaagggcggcgagtggcggaaacagacgagggaggtgcggggagggtttatatagggttgggagtgagagagcgcggccaacggggaaggaaacagccgcgggagacccgccgccattaattgtgccggcgggattagggggtgcttccatccgaaataaagagagaaagagagaggggaaaatggggggaaagggagagggaatcggggggaatatttccccccattcaattttgaacgggaacggcggagcgcggcgcatttggcggcagcgcggcctaggcgcgggcggagggagcggcgcatgcggagggaggaaggggatgacgggtgggccccacctgtcagcgagggtggtgggtgggcccgcctgtcggcgtctgcgcgcgaggggaaagggagagggctgagtgggccgcggggagagaagagagaggagggagatgggctggattcggcccaagagagggtaggaggatttttagtgtttttctttttataaaaccttttcaactttgtttatttcttgaaaattattatttgtgctctgaaaattccactaaaatttatttacaccttttaggcttttaggaaatatacaaaaatcctccaagcctaatttgacttttaactttgcacattttaatttttggaggctttcactaggattttaattattctaggcataatttaaaggatatattttagggtcgttttgggacgtgacaaacctatcccccttaaatggaatctcgatcccgagattcggaagaactggcgaagaggtcgggatgggctgccttcagctagtcttcacgctcccaagtagcttcttcctcggcgtggttgctccactagagcttgcaaaaacggattacccgattcctggtcatgcgctctattgtgtccagaatcttcaccggcttctccacgtaggtcaagtcttcgcgaacttcaatctgttctgaatcggcctgctcggacggcactcgaagacatttcttgagctgcgacacgtggaacacatcgtgcacattgcctaaggatgcgggcagctccaactggtaagcaacttctccgcgtcgagcgatgatgcggaaaggccccacatacctaggtgcgagctttccttttgtctgaaacctgtgcactccccgtaatggcgtgacccgaagatacacaaaatcgtccactgcgaattccagattacggcgtcggttatctgcataactcttctgccgagactgtgccacctttaggttatcccgaatggttctgactttagcttcagcctctctcagaatatcagtcccgaacacttggctttccccaacttggtcccataacagtggagtccggcatttgcgtccatacaacgcttcataaggtgccatttgtacgctggcttggtagctgttattgtaggagaactcggcataggggagactcttatcccaggacttcccaaaatctagaacacaggcgcggagcatgtcttctaggacctgattcagatgcttggtctgtccatctgtctacgggtgataagcggtgctgaaattcaatcgggtacccaactcatcttggagcttcttccagaagtgagaggtgaattggcttcccctatcagatacaattttcttaggaacaccatggagactcacgatcctagcgaagtaaagttcagctaatttgttccctccataggtggtcttcacagaaatgaaccgagccaccttggttaatcgatccacgactacccatatataatcatatccgccttggtttttggaaatccggtgatgaaatccatcccaatttcatcccatttccattctggtacttgtagaggttggaggagtccggctggtcgttcgtgctctgcattgacacgctgacacacatcacaaagggccacgaactcggcaatttccctcttcatactaacccaccaatattgctctttcaagtctaagtacatcttcgtactgccagggtggatggaataaggactttcatgagcttcctgaagtatcaactgtttaagttccttgttgtccggaacgcatacacgatttccgttccataaggttccgtgttcatcttctgtgaagccagcggctttaccttgtttcatattcttgaggatcccatgcatatccggatcattcttctgagcctcgcgtatttgatcaagcaaggtaggctttgcttccagtgcagccaagaatccatggctaacgatacttaggtttagggcttccaactgttggttcagttccggtggaatgccacggacgcaaagagtactgcaatggccttgtcgactcagtgcgtcggcgaccacgttggccttaccagggtgataatggattcccacatcatagtctttgatgagctgtaaccatcttctctgccgaagattcagatccgacggggtgaagatgtatttcaaactcttatgatcggtgtatatttcgcaacgatttccaatgagataatgccgctagattttcagagcatggaccacagtggacaactccaaatcatgggtaggatagttgccttcatggggtcgtagctggcgtgaagcataagctaccacatgaccttcttgtattaacacacaccccaatccttggcgcgaagcgtcacagtacaccaagaaatccttgcgagtatccggtaagattaacactggcgaggaaaccaacttttctttgagagtttgaaatgctctctcacactgcggactccacacaaattcttcttcattcttcagcaactgcgtcatgggcctggcaattttggagaaattctcgatgaacctccgatagtaccctgccaaacccaagaaactgcggacctgggtgaccgtcttgggttgcttccaatcggtgacggctatcactgtttcgggatccacagcaactcctttagcagatatcacatgccctaagaacttcatttcggacaaccagaattcacacttgctgagcttggcatacaactgatgttcccggagctttcccaataccagacggagatgctgctgatggtcttcctctgactgtgagtacaccagtatgttgtcaataatgaccacaacgaacttatccaggtattccatgaacaccttgttcattaaattcatgaagaaggcaggagcgttggtcagaccgaacgacatcactataaattcatacagcccgtaccgcgtggtgaatgcggtcttagggatatcttcttcacggatacgcaactggtgatatccggaacggagatcaatcttggaaaagacagtggcacctttaagctgatcgaacagatcatcgatccggggaagagggtacttgtttttgatagtgacttcattgagagctcggtagtcaacacacatcctctttgtcttgtctttcttttcgacaaaaatcacgggggcaccccagggggaagtgctcggccgtatataccccttctctttcaactcttccaactgcttcttgacttcggccaattcacttgctgccatacggtagggtcgcttgtacaggggagtggttcctggagcaagatctattctgaactcaatctcctgattgggcggcatactgggtagctcttccggaaacacatcaccgaactcactgacaacgggtatttctgtcagtcctagttgatgaagtactgaactgccggtgggagttgggggtgcaaagaaaacaaccggttgatcaggcttccggtacatagtgacagtacgccttgcgcaatccactactccttagaatcgggtcaaccaattcatcccgaggatcacatccaagtccttggtgtcaagaaggatcagatccgaggggaaaggaattccctggatctctataggtacggccgggctataatactttgctgtcatagcccctctaggggtggtgatgagcagagagttcctaagcctttctacccccagctgatttctccccacgaattgcacaaatataaatgagtgggaagctccagagtcaaacaaaatggtagcggggatggaatgaatgaggaacataccaatgatgacatctggagttgcctgcacatcctctgcagtaacgtggttcacacgaccccgtgtggcatccttaccaccgttgttgcggcgaggaggagcttggccttcctggcgcctcggcttcgggcatttatccgcaaagtgcacgggctcgaagcagttgaagcacagatgctgctaaccttgaacatccctgcgaccttgaccaggctgcacggccggtgcaggaggacggggtgcacggttcccttgctgattctgctactgctgcggctgtgggacgcgtaccacgaattgaggtcgtggcgcggggcgaggttgctgctgctgctgctgtgaggaggatccccctggatagggattgttgtagcggatcctttggttagccacctgttgattacgaaaattcgccaagcgacgtttgtgtaactccagttccttgtgcttggcttccaggcggatgctcttggccactaggcgctggaaatcaaggtaatccccgaagaccagacaaacagaaagttcagagtccattcctgccagaaacttctcctgcttttcttcatcttcacgaacatcctctggggcgtaccgagccaagttattgaactcatgcaaatactccataacagagcggttgccttgcttcaactcccgaaattccctcttcttaagggccacgactccagctggcacatgggtcctccggaaagcggcggtgaagcgggcccaggtgataggctgtccttctggctgcatagcctggaagtggtcccaccatagtgatgcgggcccctgcagctgatgggttgcgaagataactttctcctcatcattagactagacggtgtcgaacttttttccaatggcatgcaaccagtccaaggcatcaacggggttattggagctagagaaggtaggcgggcggatgcggaggaactcggcaagcttggagtgctgcgggggtggtggtggtggtggagcattgtgttgcggcggattctggatgtggtggaggaaagcagccatcatgttggcctgctgggcgaggatttgggtgaggatggggttggtgtcaggtggcggtggtggtggcaaagggggaggtggaggtgggctgccatggttgttgtggttgctgccttcggggtgactgccctcaccggtagcaacgcttgtcctggttgtcaccatctgaaaacactaggagctgatgattaaaaataaccacccacgactaccataattcttgagtttatttctgctattaaattggttcattaaggttcaagctgcttatgcaaataaaataaagacaggctccgacatagttataccacacaccggtataaccatgccccacacgactctgcaagaaaacaaacgaaaagaacacacgcgcgggcctactaactgctcgtctacttctgcgacgggccggggcggaaggtgagtaacagcacatcctccgtgctactaacgccagaggctccctcctcctgaggaaccaagggcgcgggcttggcgcaaggagtctccacgaagcaagtccacgccaaggactgacgaacaagctcaggcctggaggtactcttgcgggcggtgatcttctggctgcggcagacacggcggcgcttggggcggcaggcctgtccttgagcaatcttgagctgatacagctacgctccatggcgtccaagtccttcttcagctgcaaattctcctgacgcagctacaggatcttcatgttgttctcgaccagcccacggtgcaccatatgatggaagtcgatgcgggccgtgacgtacgcctccaccatgcgcaccaggtgcatgatggtagcgtcatcctccgagccagcatccctgaacatggcgtagtcgcgggctcctccacgacgagggtggtagcggtagggcgagtgctgcaactcgcccggatagcgttggtgaatagtgcatggcgaggagcgcggcgttctggcaagcggcggggaaagagtctccacccgcggtgactgccaacgaagtcctctcgggagagccggtgaggatcaccgcagtgacctcccaagcggcgcggggaagcttcttgccctggtagtccactccatgcggatatcccaggacaatgcacatgccccacagttacaaagcgaagccagtcagatccagaccacgacggttgaggttgtcggccatctataaacaaaggcaaaagaaaaattttaaagatcaactttttgatgataaatgaagcagcaagacagggagagactaaaggattttcggaaataagagaagatttttatttcagaatactgctaaggcttgggatctaaggctcgtcctagggtcaaggaggctctgataccaacttttctcgaccggaattaacccaacaggcattccatttgtgcgtgtattattccttgtcccaggaggcaaggtacaccaaaagttgatacaattcagagtttaacaagtggaagcgtaaatagttaatttattacatgggcgacgaaggcccagcacacacgaagataaacggaaaacaacggaagactagggcgacgaccacaggcacttgacggcaggcacaagctagacaccaaagccttcatcttccaggaactcctcttctgggttggggaaaaattgagcaagagtgagtacaaccacagtactcagcaagacacacccacggatgcagaataaatgcaaaggagtacaagggagttataataaaggggttagggtttgcagtaaatagcacttaaaagacttttagttgctcagggccatttggtaaagacgatcctagagctactcaatgttattaatcaaggccgtgaacctgcacgaacctgccttaacccaaggcctacgatgattcagaccgaactggcaacccgacctgggtctgtcacaccctaaagttctttcccaagcctaaattgaagttataaatggtctcaagagaataccagtgtaaggcaagagtaaaccttaataaattaatgcaaataataatcggatttggcatgtggaatttttcttgagttctacatgtcgaaatatgctaacaagatttttaagtggaattttcagagctctagaaataattttaaccttttaaaaatgagcacaagcaatatttaatcccaggaaaatcctttttccttctttttcctttttcttttctctttccttcatttgggccgccggcccattctcctttccccccttcttcccgctggaccggccgataggccgaggcccagccgagccggctgcctccctcctctcccccggggtcgctgacaggtggggcccccctgtcgggcccgtccccttcctccagccggcgccgcaggcgccaccgcaaccgccgccgcgcccacgctcccaccttctccgggccacgtcggccacgcccgcgcatgcgccgcatctcccgcacccactctccctctctctccacctccacctccccacgtcggccggcgaaatcgggccactcccggctgttcccgacctccccacccctataaaatccatccccgcatcctcctcccctcttttcctt

SEQ ID NO: 21759 - DNA, 1317 bp, Oryza sativa
ctgggtgagtactggcaaacctgaaggagttcttactgctgaacagcagaagcaattcgaggaagccactactctctttgtgggatgcattcttagcgttcttggcgatcgtctggccgaggtgtatatgcatatgaccgacgctaaggagttgtgggatgcactgaatactaaattcggtgctactgatgctagcaatgatctgtatatcatggagcagtttcatgactacaaaatggctgacaaccgttctgtagtcgaacaggctcatgagatacaaaccatggctaaggaactcgaactccttaagtgtgtcttacccgacaaatttgtggccgggtgcattattgcaaaactacctccatcttggaggagtttcggtactgcactcaaacacaagagacaggaatactccgttgaggggttgattgcgtctcttgatgttgaggagaaagctcgggaaaaagatgccgcgtctaagggcgatggtgggcagtccagtgccaatgttgtgcacaaggcccagaacaagagcaaggggaaatacaaagctcagcagaccaccaactttaagaagcagaagaagaacaagaacaatcctaatcaggatgagaggacttgctttgtgtgtggccaagttggtcatctggctaggaagtgtccacagcgcaaggggatgaaggcacctgcagggcagacttctaagtctgctaatgtgaccattggcaacactggagatggaagcgggtatggtaatttacctactgttttttcagttaatcaatctactaattggtgggttgatactggggccaatgtacatgtttgtgctgacatctcattgttttcttcttatcaggtcgcacggggttccaccgtcctaatggggaatgggtcacatgcttctgttcatggtgttggcacggtagatctgaagtttacttcgggaaagatcgtgcagctgaagaacgtgcagcatgtcccttctatcgacaggaatcttgttagtggctcccgtctgactagagacggatttaagttggtttttgagtctaataaagtagtcgtgtctaaacatggatattttattggtaaaggttatgagtgcggaggcctgttccgcttttccctttctgatttctgcaataagtctgtgaaccatatttgtggcagtgtggatgatgaggctaatgtttggcattcacgtttatgtcatattaattttggcttgatgtctcggctttccagcatgtgtttaattcataagttttccattgtcaaaggttctaagtgccatagttgtgtgcaatcgaagca

SEQ ID NO: 21760 - DNA, 2665 bp, Oryza sativa
ctactagattttgctatgtgtacttgttgaaaacgaaagacgaggctctagactattttaaaatttataaggcagaagttgaaaatcaacttgacagaaagataaaaaggcttaggtctgatcgtggtggagagtttttctcgaacgagtttgacttattctgtgaggaacatggcatcatacatgagaggacgcctccctattctcccgagtctaatgggattgctgaaaggaagaaccgcacactgactgacttggtgaatgccatgttggacaccgcgggactgcctaaggcatggtggggggaggcattgttgacctcaaatcatgtgttaaacagagttcctaacagaaataaggacaaaacaccatatgagatatggattggtagaaaatcatcactttcttatttgcgcacatgggggtgcttggcgaaagtcaatgtaccaataacgaagaagcgcaaacttggacctaagactgtggactgtgtttttctgggatatgctcatcatagcattgcctatagatttttaatagttaaatccgaggtaccgggcatgcatgttggtacaattatggagtctcgtgatgctaccttctttgagagctttttcccaatgaaggatacacatagtggttcgaaccaaccctctggaataattcccagttcaatcacaccaccagaacaaactgaacatacacatgaacttgtctctgaggaggatgtcagtgaagctcctcgaaggagtaagagacaaaggaccgctaagtcttttggggatgatttcactatgtacctcggggatgacactcctaagtcaatttcagaagcatatgcatctcctgatgcagactactggaaagaggctgtccgtagtgaaatggattccattatcgctaacgggacttgggaggtgacagagcgaccctatgggtgtaaacctgtggggtgcaagtgggtgttcaagaagaagcttaggcctgacggtactattgaaaagtacaaggctcggctcggcttgttgctaagggctatactcagaaagaaggcgaagatttctttgacacttactcacctgttgctagattgaccacaattcgtgtgctactttccctagcagcctcacatggtcttctcgttcatcaaaaggacgttaagacagcttttcttaatggagagctggatgaggagatctatatggatcaacctgatgggtttgtagttgaaggtcaagaaggcaaagtgtgcaaattgttgaagtctttgtatggtctgaaacaagctcctaagcaatggcatgagaaatttgacaaaacattgacatctgcaggctttgcagtcaatgaggcagataaatgtgtgtactatcgccatggtgggggtgagggagtcattctgtgcttgtatgttgacgacatactgatatttgggacaaactttgaggtgataaatgaggttaaatcattcttgtctcaaaattttgatatgaaagatttgggagtagctgatgttatcttaaacattaagctaattagaggtgagaatgggattacactcttgcaatcccattatgtggagaagatcttgaatcgctttggctacattgatagtaagccttctccaacaccttatgatcctagcttgttgcttcgcaagaacaagagaattgctaggaatcaactggaatactcccaaatcattggctcgttgatgtacctggctagtgcaactaggcctgatatctcctttgctgtgagcaagttgagccgatttacctctaatccgggagatgatcactggcgtgcgcttgagcgagtaatgcgctatctgaaaggtactgtggaattggggcttcactatactgggtatcctgcggtactggagggttatagtgattctaactggatctctgatgtggatgagatcaaagccactagtggatatgttttcacactgggtggtggtgctgtttcatggaggtcttgcaaacagacaattttgacgaggtcaaccatggaagcagagctaacggcactggatactgctactgttgaggcagaatggctgcgtgatctattaatggatctgcctgttgttgaaaaaccggcgccggctatccttatgaactgtgacaatcaaacggtaattgtcaaagtgaatagttctaaggataatatgaaatcgtctagacatgtgaaaagacgattgaagtctgtcaggaaattaagaaactccggagttataacgttggattacatccaaacagcgagaaacctggcagatcccttcacgaagggactatcacgaaatgtgatagacaatgcatcgaaggagatgggtttgagacccatgtgagttatactatggtggtaacccaatctatgtgatcggagatctcgtgaattagatcctgggaagaacaaaccattaataaactagaggagagtaccaatatatataccctctccaagtgaagatgcatatactctcgtgagctgcaaggcaggttggctatgccttaatgagttctgttggctttaattagcaaagatgttgtcctgcagagcattcttgaaagaactcacctttgtgagcttgactgttggtcgcagtctatgaagattttgggtgaatcttctaggaagcttactaaagacctag

SEQ ID NO: 21761 - DNA, 32601 bp, Oryza sativa
  unsure (1)..(32601): unsure at all n locations
aggggtgaggatatcaaagagaggagagagagatggggagaggagaagagatgaaaatttttgaaagggtgaggagggaaagaattgttaatgtgaaaaactttgaatcaaattttatgatattaaatgaatttttatgaaaaagttgtcaaaataaagttgtagaactcgttaagatctaccaattttattttggtcatttctcgataactcatcaatatctataacttttgttttggtcattttgctatgactttatttcaataatttgaatttgaatttcaaattgtgacatcttcaaacaacattttcaaatattgaaacaaagtcatatagcaaaatgaccaaaacaaaagttatagatcttgataagttatacaactttgttattggtaatttttttatttgaaatcatttactactcgaaaaattatttgaattgagaggagagaggcaaaatagacttctcggtaagggaggaacaaaagggctgggccggcagcccgaagagggctgggccggcagcccgaagagggaggaggagggagagagaggttataggctgagagagggagaaagtaatacttgggccgaaaaaggcccaaggacagagagaggaattttaatttgctttctatttattttaacaggttaaatgaactttgtggtattaaaattagttattgagcttcgaaaatttacgaaaaattttagagaattatttagaccacgtagaatattacaaaaatatttccggccatgatttttaaaggaatattttagtttccccattaattcacttgattaaattgctttaacttttaatatatttttttagaaatgcattatataaatttatgacgtttgctttgtgccccttatgacaaattaatattcgtcacgatgtcccattgaaatactttatgacgatttctagttggtattaacgacgaacacctttttttcatcactaagccaccccatctcatacttatcatcataaaatggaatgtgctagtgacgaatagctccgtcgtcacgaggaattcgtcacagaaggtcatatttcttgtagtggttaattcttttttatttaatcaaccgatatataactttgtttgataacttagttgatcactaatggatttgaatatatgtggtctagtagagaagcacttgacagaagagataatatcattgaatcgactattcatagtattattattcaacgaccttattatataacctccatagcacatagtgatcagacccatctgatctcaaagctggcatccccagtgttgatagtaggcccaatgggcacattggaagcagagtgagccgagtattcatggagagtcttctgagttcgggtgccgagagcctgattttcggaggaatgacacgaggtcggactcttctggcaagtttctctagattatcaacgaagtttatccacagatcaaaaccggtcatacactacctgtttttacataaagagaaaacaaatcaaggttaacctatttggaccaatgttttattaaacatagtatgattatagatgtatataacattatctttaaccagtgccttccctgacagtggtgctagaaatgcttgttggtatttcttacgctcacaaataaatccgcaagcgcacggataccgttgtagcacttcaccaatgagtattcccgaaagtgccgcatttatatttcagcagcaaaaacagagagtgtaaagacatagtttatatcaatctataattaactcactatagtctagacctggttagtattatgattaaggggtattatagacacacataaagatttcatcctctaacttaattaaatatagttggaaaagacaataagagaactatgaacccaacccgttattctcatattaatcactgtcatatattatataccttaacaacaatagttggtatttattaaccagaggttaaaacctttcgggcttggaccaatttgatcgcgaccctcaccgaaaatgcttaaaaattttcgaaataaaaaaaaatcctacttgaatttgaacaaatattaccaaaaatcatgaaaaaaattaaaaatttaaactttttggccaaagtaatatcgtttgggtcagcgcaaggaggagcaaaagcagcaacggtcggcgagcttctcgcagacgctgacagtgaacggcggggtttcatgaggtgcagccaaaagtgnatttgtagagtgaagnattgtnaagctaatggtggtggtcttgtgcatagtggtgccaaaatcagtgtcagcgtcgcaggtgagcttcggcatgctagtcagcttggggggggcccccccaaaatttcttttttaaaaaaaggggtttcccaacacttgggccccccatttggtttggggggagacacccccccaccataatcccaagagataggatagctgacatgtgagcccaagggtattttgggcatttcacgtgatttctctctcctcttcaactgtaaattattgttttagtcggcgcggtgtccatggccaaaataccacgattatggatgttcccccaaaagttagttttggcagtgtcctaaggctaaaactacacaatagcagtgtcctgtaacaaaatttcctaaaaaaaaaagcaccatcgctcaaaaaccaatagtggcagcttgaaaagggccctgcagttcttcacactaacatatgtgaaacgactggcgcaattattggtccattctaagcatttaagcaaggaagaacttaaaggttactagtaatcgtgcacgtgcaatgcacgtttttcacaatatatattccatcaatctaatattttgcagactcaatatatagccaaaaccgattcatttcgatccatagaagaatgaagaatcaaagcttcctgaaatttacattcaggctgaaaaggggggaaacaaaactgtactgtatgcaaacagagtacattgcacaaggatccatgtaaggaagaaataaatcattggaaaaatggaagaaacctatcgtcatttgaatatctatacaaatgacaatgaaagaaattagaaattctcatagcacaaccaaagcacagggaattttgaaatatcgaagaaatacaaaaactgatagtactgagttttgaactaatgagaatgtattataaatctgcatgcattccatatatcttgaaaatgaagttggatccttcatcaagaccaacttaaatttattatacaatttggggccttcagtttaaactttgcattgaattctattgaattcttcctgcaactgaacacaattcatggatcaaacataagaaataaatatatttttttagggataaacggcaggagctctgccaatttcattataggagaagaagataaaaagagtttttacaggctatggatacaagaggaaaccatagaaccccccacaaaacaagaagaaacggatgggaggattttcaggaaatgcatagcaaccaagaagaggaactgggtactactcatctagattatgagctccctcataggctttgcatatggcgatgatggagtcaacgacttgcggtactgtgctgtaggcaccgttgaagatccttgcgtttcgttgaagccaaattccccaggctgtgtagatgaagaggccatcaaaacttctcccttgatccctgatcatttctcttctgcacgctgtccaccagctaagcatatccccattgaaggaggaagccataggcatgtgaagcccggctttctgctagatggatctctagacctgctttgtaaaggtgcaatccatgagtagatgagtggccgtctctggctccactccacagagtgggcaaatgcggctgttatcccagccgcggagaaggagcttgtccgctgtaagaatcttcctatggatcatgagccaaccgaagaatttacatttattttcagtcttagctttccagaaaaaatccgacctattatcttgaatacttccaacgaattgtatcttgtaggcggagtttgccgagtatgtcccgttagaagaccatctccaagtgaccgtgtcatctgttccctcctgtagttccacccgtaagaaataaatatataatttcagtaggctatccaatccgtttacatgtaacagatatgtcatagatattatgttatagttcaatatgatgctatcaagccctgaagagtctgactctacatgccccattgttaatggaacatactactaagaaaagttgcttttggtccataaaatcttgtattgtctatgggaccttggatttatttctatccataaatttaagtgaagcaagcatctttttatggctcctttttacctggtgaggctctcaacaatcaagaatcaatttaatttaacaacaatgatataaaaatggatggttcagctgtaaaaaaaactcagtttatcatttaataaggaaaatctactgcaaaaaatattacaataacaatgtaaataaatatgcaaatataaaagatacaatgccaccaatgttcatttcttttaatcagggattttctacttaaatcagctaataatcactttaaatgatcacatttgctgaaaagggaagctaactactggaaaataaatcaatgatatatctcaaaataaataggagcaaattttctctccacactaagttcgatgactcatgttgcgtgtgatagttgaaactgatcatataaaactatgcatacttttttttacctctataactactcatgtgtgcatatgtaaaagggaatagatccattaagtagccccaagggttattacatgcacctagcttaaatgcgcatgccttatgttaaacaaatgaatggcagtgaaatgtatcaaacagtgagcatcaatgttcataggaatcaaataggatagtcaatgtaccatactattagcaatcaataagtgaagccagaaggggatttctcaggggacaagcatctaagttcagaacaaatggttgcgatggatgggaaccaagagcaattgtgacctcgagattgcgatggtggcagaaacgtagaaaagtgaggcggtcaatgcaactcctcatgaatttgcataggtgtacgttaatagatcccttgatatcctattcaaatagagtgttagtatatagtatattagctttaaactgatccacccaatgggttttgcgaatgtcaagcatggctgcaagcaatggaagcaagagatgtagaatcagttgtagcatgtccaacatgcaggaataaagcttatgaaagtcttcatgactcagagaggcaactaagcagaacaaacattttgtaccttatctttgagttcaactgatccatcatgtttatgcgggaatcaagcaggtgcaaatgtatgtttagctgcttgcagcataattatcgaccaaaatgcaaatcaatggtgcaccaacacggcaatgaacaaagttccctactcacctcagtacctcacagtgtccaagagcctcttttaaagccattatatcaagcatcaaaagcacatccacaatttctaattgcaatgatacaaatttgtgtgtcacgataaattaacgaattccaacagcaaacaacagtacatactgcagggaaactggatattactgaccttaagtgcatccaaatcagatcccactttcgaggctttgatatttactcatggagaagcaagatcatcactgcacgcaacaaaacaaaacaatcccagttgaatcaggcaaaactggctgtaattagggagacagttcaccaaatgctatcgagtatcaagagaaagagacagagacagagacagagtggatggatggacgcaccgacaagggcagcatgcgccactgaattactactccgtgtcctccaacacgcgcttcatggcaccgagctccgccgcgcacggaggtcatgagtcttatgaccactcacaagcctatcgagcctgaaaccgcccccattgcctctccgcggcgccacaagcttcctcctcaccgtcgtcactgagtaggcctgatccagtggccccacggtgcctcagaggttggatatatacatggatctgatggagaagaaggccaaacgggtctggtggtggaggagactggtggattcgatgggagcttgggggaggtgccagccattactgatttggggaggtggtctcccaacggagcgatggtgaccaaggcgcagcggcatctcatcaacatcgtttccagaagagaagcgataggatgcacgccatttgctgcctgtgaccctagctccacctccgtgcctgcgtgatgatctcgagggcaccctacactgacgctagcttcttgttgcccacctcgtcggtcgccgctgcatctgtgggcggctcacaccgcgcctcgagaagcagcgctaggctattagcaggagcgagggggctcacgtcatctggggaagatggagaaacgacagtgttattgcgagcggcggcggtgttaacgcgaggaggatggcacatcgagcgaaaatagcggtggagatagaatggggcctgcgatgtgggtggacggcagggattagggctcagggcaatgtagatgcagatgaacggtagggatttcataagttgatttggcctgtaggattggaagaggtgaactcctcatttttatattagtatagatatagattggtaataataaaaccatgagcattaatctttccaaggcaatggactccatcaaaacctacatttatcaatggaacagtactccgaatattagcttaagttaaagttcattgagcaatgagcttatacaaaatacgattgcaagaaagtcactgaaatgcattagtaccaagacatggatcgtgctgctattgcttacaaataataacaacatattgaatatgcttcttataagcaccagattgttgaggtagtgaagtgtatccttaaaactatgtaggcatcagttcaaaaatggcaggtaactggtaacgctgcctcgttgtttgatagtgcagagatcaagtgagcattcttgttttttctagttgttttgccttcttgttgtctaaaggagcattcgattctttccttcgatgatctattttagagattgtgtaaagcaaacaattccaaactgtcataacgtttgagtggcgagagagagagagagattcaactacatatgaggcatgtaaatatttggataaccttaaacaatgtggagaagacattgataagtaggataaatcagatatcaatgatgacatatacaacatctgagatttaattatgagtatcggtcaggattcaggtcatgatataatcttgggctcctagaagaaaaaaaatataatgaatgcctcacaaaatggtagctagcaaaagcatgcttgtacaaactcctaaatgaatcatgtggcaactttatcaatagcttaggcattgtatggtctaattttgttccattcattacacaaatattggcatgctactttctaactgcacacacaaattctaaggcctacagtactgccaaataaacgttccagtttattaagttagggctttacaacacgaatggcgagcactatgagttactaacaaacatatatttatgtaatgcataaagacatcacttactatttctggttggtgtggtgattgattttgtttaattgctcatgtagcaaaacgaaattgacggctccaacaggtgcaagtttgcaacgtatacacaattgtggagacaaatagcgatgagtggctcactcttgtcataccttgtattgttgccccaaagaaaaccttaatacttcctccatttcacaatgtaagtcattgtagcattttccatatttatattgatgttaatgaatctagatagatatatatgtctagatttattaacatcaatatgaatgtgggaaatgctagaatgacttacattgtgaaacagagggagtatcagattgtagatcttgcattttttttacccttgcataaggtaaatgtggacagtcctgctttagaaaccatgctaaagtaacttcatcattctacagttaaggtatttacataatcaggcaacaacaacaagaagtcaagaaggtaataagactgatgagtgtatgacatgaatatgatcgataggagtctaaccagtgtctcgtgaaagctctcaaccaaggagcgagaaaaatctccccaccgctctggcccctcttcctcctcggctccggtggctcgccccggtgatgggagaaagagaggtcgggtcctccttgtagttagtggggcgggttttcccgtagtccaagttaatcttgttttttaaggttcagtggaaaagcttaagaggtggttaagttccctccgtggcccagttttcagggggaaaacccgggggcccctttggggggcctttccggggtttgggcccaccctttttccaatcacaagggggtccccaattaacttgggttgcccgggcaacattttttttccgggaagcaagttcaaaagcagaacctttttcattgccataagttgggactcttcatcaagcagttgggttttgcatgttgtaccaaagaagctttaacctctacacaacagaggccctgtttgggtatgtgttcttggtttgttctactgcaactgcttgtggtttctttgtttccgccgtcagagtgatcgatttggctgcttcacatggaggatttgcaacaacgttgactttccttgttattttttacagtgttattttgcggtggagctgaacttttctttgattgccaaggccctaacctcctatgtgaggcccttgttggatcatgctaaggctagatctgctgcagctctctgtggacaccccgagtattataccatccagtgtccaacgcgaccaccacatactattggagaagtgggatccatacacgcataaatagccactcgtcctcaatgtgtccatgatcgtggttgacaaccttctgttataataatcgaaatgtcgagtagtgagcgcaagacataaccgtaagatagcttgccagtccaccacgtcatatgcttgtcaaccactcgaaggtggcgaccaaaagcataccccagtgactcgatccaaagtgctatccccaattatctcaagcgatcaaaacccgttactcatgcttagctagtccccaggaatgcgactagcctcacactttcatcgcaagcaattaataaacatagcaagtaccataatagggttaaagtgcagcgaggtacatgacacataaaagggtccgaggtcccaacatacaacacataaatatagcagcggaagtctcaattagagttcataagcaaaagataaaaccggtggtgccacaactccactagggcaaaccaaccgagcaagagccaagctgcaagagatcactcattgccctcgccgccctcggcagagcaatgaccacacaagaaacataactcataaccagaatcctctcctgaaattgcaaacatcgggttaagtacaagattgtactcgcaagtcttacccaaaattatatatacataagggagagagaagtatgcaagctttctagcctatagtgggtctctaggttcaacatttgcataaagctaattttattgagcaattaatgagtaaaataagcaaggacaagtaaatctagcatcattttaatttatggacagcaagtatataattctgaaatgtataagcaaatgagcccaaaacggcgctctcatcatcaaccatggactaccaaagtccataccaacatggcacaacatgccaacaccaccatcaaacataatcccatccataataatccacatttgatgctaacataactgactaacacatcaagcattgtccataactaaggacgcggctattcgaatagattatactctgaccagaggtgtacaactggacccacacgaaatgaacaaagatcaaatgctacacaccccgtcgagtgcggtacacaagtgattcaagctcattacatgccctttcttagccccaccccaaccacctataccacgctggggttctcgatgactcagtcacgtgcgtgcgtgatgtgaccaaggcgggcgcgccacgcgggaggcacccccgaccaaacctaggcacccgaggccctccaaaggctacctgcctcacgactctccaacgtggtataaatgatcacagtagaactagtaagaacaagctggtcccaaataaggcatgtggtaagtacgaagggtgcttaaatagatgtcaaaatgttcggtccttaatgacctagacggggctacttgcatcaggggaaaccaacctcccatcatcgccctatcacccgtccaagtccaacatatttcatcaaccattatttagtgtaagtgctcaagttttatgcccaataatgcaagttgtttatataccacaattaatagcactgtccatccctatagttctattagcactaagcatggctaagcattaatgaataagaaatcccaagtaatcccaaccagtggtaataggatataaggacagcaataacacaagaactaaatgcataaataggttctacacatacaccataaaccaacaatattcatatctaggcaatgcaagcatatatatacgtatagattgcaaccaaatcatttctagagaaagtataggttctatatgcttaggtgcttgccttgctgctgagggtagtcactatcctccttgggatatggctcgttactctccggaatctccgaatctatcgaaaagaagcaatatgcgaataagagccaaataaacatgcatatgcaaaatgatcgataaattatgaaataaatacagtgggtagataatcaccagattatcacttatggtttgggagatatgaaaatgacaagctctcaggtgctgaaaatggcaattctgtaaatattaacgtttcctttagtacattacaagtaaaattcatttcaaaccaaaatttcataataatgattatttttagagtaaagtacatcactcacagctcctaagaaaaattatttcacagctatatgtgttgtcattatttatttatggatcttacaagttagaaacataggaatgctaaataaactcctaaacatgatttaagaggtagtttttccaaaaacaacaccataacagcaaagagtactaaaatataagctcaacaaaattggtttcacaattttagcttttaccaataatttcttacgaatttcataagagctagaccacacaagggatacatatagctatttatatttttactgggaaaaccagtacaaaagttggtcatttttattttacaacattgaagatcacgtttttcttaatccacagaaatttggttcagctcaaacagagttcagatgaattttctacgaaaaatttggttagggcagcagtaaatattgctagcttttccaacatttgagatggcttttcgtggtggcattcttttacaggacctgtaggttgaactattacatgtggatatgaaattagcaacatgctagatggttcagcaaaagcttgtttgtagctaaaaaaaaaggttctagttagtgtgggaaccacaatacccaaagacgagctcggttcacttcacaatctaatagaggtccaatgggtgcagtggatagacatgcatgagagcactctaaacctacaagatatgagttaacacattcctacagaatgtgacacacacaaaagaaaaggccgtaccaagagagtaaaccgaagaatctcagggttgtcctgcaatggagagggacgagttgcagctaccacttgcctccaaatcttgaatcgatgacctatggaatgcactagagatgaccaacacaatggagaacctcataggggagccatggatggagagggaaactcataaatcaatggaaataagttctccctgctgctgtaacctcataggctgcaagtggcttgttcttccttcttctcgatctctctcacgaatccatgcatgtgggagattttcggatggatgaggagcttagagtgatgggggtttagtggtgtgacatgcagggatggatccaaagtgtttggaggagatttgatgggaagaagtgagctgggagctcagcttgcaagaaagaaaagatcagacaagggagaaagaaaggggaagaagatgaaagagtttccatagctgcttgtcatatggagctgagttgggtgcacgacctggaggtgggatggggcttgttggagagccgaagtcagtgacaagtggggccaagtcgagctggacccatggggcagataaaggaaagttagaaacataggtacacattaaaaatagtgaattttcaggaattttcactctctcattcatgggtaattagtttgacctagctacacgagtgtcaaaaatgtgtgttcaggtgtggagatagattgagttacctagtttccatttttcaaagttacactcaaaaattcaagatattttaattctagcaaaaaggtaaaaagtggtatgctgagaactaaattgaattttaaagaggtcaaaacggagagctaaaattccacaaaatttatatttgttggtgataaataacctagtatttgaataaattattaaacatgtatacttctgttcaagttattgttcaaatagaagtggtttcaattttaccgattagagttaattttgttatcgcgtatgattaatttgcaatatagtaaatatgcaatctaaaggacaacaaatgcacttctaaatacctggttatgagcctagggctgttacatctccatgcttgtattcctcaccgtcgtcttgaacatcatcgaggctatcgttgtggccacagcttgaagacagacttgaatacttgatcgcttttttgatcttttattttgtccttccatgcttaaatctggacctctatgtaattcacccttgcttaaggagctgttatgcaacactagttgtacatccagttctcaaataaataaatatggagtctgttgcctctttgtcttaaaaacaaagaaggtaataagactaaaactatggaggcagtaaactaaccttgcaaaagaggttcagtaaatctatacctatactaatcgggcacttttttggagctctcacgttaatcaggaagatcaagccattgattaaacaaaccataatatgtcaaccgttgattacaatctaatccaagttccacgcggtgggtcttttaaagcccatgtaacctatattgtcaagcccatcgatatgatccattcacgcacgcattctttttcctttttctttcgaacgtgggtatttgtttctttttctaaaccgatgagtccatccatatttactgagatcgatctgatcagatgcagtggaagatacgggagggcacggcatgggcatcgcgccggccggcagcggcaaacgacggagaaaggcaggaggaaacagtacatacaagcacatcgtacgccagttatgttctgctcgctcggccccggcaaaggcgaatatatcaacgttatcggatctagcagcacacaatcactaaggcgaggttgacgtgcggccggtgagcgccggaaaagcacacaacgtcagccgaatgctaattggtggtttctccattggtaagggttgattctaacttctaatttccagttcaattctctttacatgcatacttctcatctgggacagcgtccaataggaattaatctacatcatcaccatactgtatatatttttgatgttcagatgttgattcagcatcaacaagttcgctagcacctgacaagccaatccatggtcatcgtaccataataattcatagaagtcttccatctatttgctttgacaaatccgctggcatttaggaagatccatagtggtcgccgcatgtactattcatgtaagtattccatcaatttgcatagtctaactttttatctgtatttgatctacttttaccattcttcatatattcactctctccttaaatataagcgatttcaagagattaggaatgaaggaaaaatgaagataaagtttaaaaaggggtgaaggggcagtagaacgatggttagggataagattgatcgaaaaatattaaatgagaggtggctttacaaagttctactcttaaatccttatatttgtggatagaatttgaagtctaggatcaaaaatatttgtggatgaagggagtatatttgttttaaaatgtatttttttcctatgtgatatgaatttgctacccttattattatattgttaaaaacttttttcatatttatgttcaaaaatatgttcggactttcctaaactatccccgcaaaaaaaaactctccgtatattatttagttgattttttttataatggaatgtaacattccggcctttactcaaagagctacagccaattattacagaactcacacagaaagtttacgatagcaaaaacaaagctaagcaaacacaaactaattgacaccaacagaagaaaaagatcccctaactactgaaatctattagagaacctccacccgatattggcaaatagatgcataattatattatttagttgattcatcagaaattttgtgttatacaggtggtcatgcaaaggcaaagggcatggaaaaaaacaatagttatgcatgtgcagtttttttcgataataatgcatgggtggaaaatagtaatagatatgcatgcgttgcttcagtaatatacatgcatgcatgaaaaagacaaatggtgtgcagtgaaacatggtttattttcgtccctattttccaaaaccatggaaaaaagaataattccatgcattttgctgatcctactttatcctaacatggcacacaatgaaaaattattggacacggaaccaatccatattaacattatggtaggacagtacagcagagttcttgatttggctcctagaactaatccattaatatttatacgtagtacatggtttcctcttactatatgttaatactatatgttatttgattttgatcctttattatgccatgttctcacgataaataagtatatatatgtgtatcatcctatatcactataatctgttgcatgcttcatccagttgaacaatttatgttttcattgatattcattacttcagaaaaatacatcattcctccaacaaattcagatgaagtacttttcttttaatcaatgttgagggataaacatgactaaaattgttttatgtattattaatctaataatagtatattgggacattgtattaagaaaatatgccattggaagtcatactcaaaatgaattaaaaaatatgaattttatcgttttaagtattctattgattaggaatcaatatttaacaatgtatatttcataaaaactcttattttaatataatctaagagccattgtaattagaaaagcccatatatttatacataactaaaattttaatatttatgatgatataaataaagagcccgtgcaacgcatgggttgatggctagttagtaataatctgtaacagacaaacaacaagactacaattggtgtccattgttggtgcttctatgttgcctgcttgccctgggctttgtagtgcccatccccatggcaggcacactgcacacaccacacgcgaggctaataacaatcgagcgggcgaggaaattaggaaaacacaaggcccctagtcctaacggcatgcatcgcacgcgaggccaactgcagcggatctgtcgatgaaggccataagggtattgactctgagcggatgagctgcacatgaaccaaccgctacattgtcttcggcaccggtgataggggtgaatgaagcggcggcggcgggtgggtggaggaaggggtgctagggattaagaggagcaaagcaaatgctaggtccgaggaggccggcgggacacgcaggtgggagggagaaggggcgacggggagctccgtactcctcggagtcggaggaggagggagccatgggtgggaggggaaggagagatgcggaggggtctgcgtccaccgatcccacaacttggtaaggccgtgcaaagctgagacacggacggatagatgggttccagatgtgggatcgaacgacccaaaaaaaagatcctggtaactaccgtcgtacaaaatcttgcttagtgatgcgccgcaaactaattggtcagccggagctaaaatctgctctagctggctggctgcggcaaagctaggactaggctgccttcggaaccctgtgttccagactgtgcgtacgaaaaacggagtggtctattagcgtatcattaattaagtatttgtaatttttttttcaaaaatggatcaatatgattttttaaacaactttcgtataaagactttcttttttgcaaaaaacacaccgtttaggagtttaaaaagtgtgcgcgcaagaaacgagaaggagaagttgggaacacatggttccgagcgcaagcctaagggtgattagatgacctactgcttatttattttcattcatacaaccgtttcatgaaatttggcatatgttgtctaggattcttcaagtcattacaatatgtagaagtgtaaagtgaacattattaattttgccctactaattatgtctttcatagttcaatagttcatggttgtgacactattctgctgtatcctttctttgttggattgtttcttcatattgccagaaatggcaacaaagaaatgagaagcaatgatgcttgaaggagcaatacattttaaggcttatgcatccataatgttatatttttagtcaggacatcattctaaaaatatttttctgagtaattgactagagtacgaggagtcaagagaatatcacggaatgaatctctactacttaaaattccgtagtgcttgtggtgagtttggtatcctcccatagtgcttgtggtgagtttgggatcctcccaccaaatcaacgctcagatgccccatccgcgctcgcatcgcgctgcatccgcgctccgtcgcacgcgcggcccctcccctttctccgccctccgtcgcggccgccttccaacccacgcttcccgctcccttcgccgccggccccactgatcgcgcgcctccgcccctcgcgccgatctcctccgcgggcccctccgcccatcgcaacgatctactctgcgccgcccccatccctcccctaaccatcgtcgaccccctccccttccaacctcgccggccatccgcccgtcgctcaatgcccgtcggagatcgccggccgccggttcccctaaccgccgcaatcgaccccataccggcgccgctgcacatcctgatcaccgggcaggcgcctttcatccctcggccggtctgcgtcgcctcgccatcaggtattgcttggttacatcagatgatccttctttagtattgataggtgcagacttgcagcgtttggttggactgaacattttgtacctttcaggagcaagaggttgaggtgtcgagcgcggagagagaggcacccaggctgacctcgctggtggcgacctggtggtctgtgtgacctgcaagtgtggtgtccacaaggagttcggcttcgaccattcccactgatcaaattagccagtccccttattccatcctcactgtcaatgtcaatttgttcttgcaaccggacatcaggcataggtatgttctatgctttgtacaaatctgctaaaaaattacttcacaattaatacaaattcagttgtcggggtttttcccccccccaaagggaagacaccaatccccccaaaaaatcttggggcccttaaacccccaaaaaaaaaactttgtgaaatgattattttggattcatggacaagcagtctttgtaatatatatttttgctgacatggcacaacgaaatgttgttgcaaatcacagaggtagttttacaaatccaaaaaaaagtaagtttggacacattgcatcccatgactgaatttctttgaaaaatgactaggcaatgaagatttaatcacagtgctgcctatatatgataccgttccctttgtgagatattctcaattcgcagactgtaaagaacagttgaagaactaatcttaaaatgaacttcgataactattattcatatgatttatagcgtaattctacttatttcaaatgcaattattacattcagttgataattgtttataatggtcgatttgctcggatacattatttaatttctgttcatttcagaatgttccaactattgaggaaggtcaacgacaggttgagttttgatctaagcattacaagatccttgcgtgtaagtatcatatgctcacaacccttttaatttagtaggatattgtggatgctcagacctttgtgttcaatttaaagattcttggactgtttcctggaatataatggataagatgtaggctcatatcttattctgtttgagaattcaaaattttgattgctcagatgtatgccaatgcatgtacatcttttttttaggggaaagcactgtaggggaaactcccacagttaaaggatattattaaggtataaaaataataaagtattacacctggtttaacaggaggttaatgtacatctttgtattatgaaagaatctattatcctactttgatcgcattttaacgctataatcactaaggaaattggacacactacatgactgagcatctgagacacacatgaatctgtagattaatagatcaatcctttatattcacaaaaaaagtgttctactacccttagatatgcataatagcattttttttccagtatgcctggcattttctgttttacgcatgtgacaaataaataattatttatactaaaaatcaatgggtattggtaattaatgttgtctctttaagtgatttactgacgtgcctatctatctccttaacgatacttttgctacgtgattttacttcctttatttactgaatgtttactacttggtggtggagagtttatttcctttaggtcagagattttattttcatgaaacaaaggtcactagggcttcggtggctagagaacttgtcaaacatgcccgacttacatgtttccagatatagagtttagtacctaattggatagagagctgaatggaatgctataaatggtcaagtccaatgatatgttttgatgaacatatgttacccttaaattcaaaagccgtgttacggaaaaaataaactatgtacaatgcagatattgtggtctacttactcgaaatatttcgttggatgatagttgggattgaaaagtagtattttcactcaatatttgttgcatgtgatctgaatctttactacttaaaaaacttgtagtggtggtggtgagtcctgaaagattgaagggctgatatccatccgaggatcctcccgcacaatcaacgatccagactccttcggatagcgctccaccgtattattccgtgtgtattcgttgttgttcctccgcctactctctctcaaacaaccactctctcctcaatgctaccccctgccgctccaagctgccacaggcctgtcgctcacctgtcgttccccatccacaccgccgctgtcgcatccccgttgctcacctgccgttccccatccacgacgccacccgggcctcccagctgcaccctccacacccccccgccccccccccccccaaaaaaaaaaataaaaaaccatttggacgaaggccagtgcacccaaattaccaacatcgcagattgaaaaatctgaccaatcaagctagcgctaccagtttgcagtagtgtttcagatgatatttcactaccatgataaatgcagtttctgtactattaaaactattttgttttcaatatagtaagctcaattcacataaaatgtcttgaatttatatggatgtttgattgttctgcttttgtaacatggtttctcatcaaatggcttcagcagctcacgaagtagcagaattacctttgctgatcttgctggttcaatgaacttgatcacgggttgggacttgggagttggcgactgaggcgcatgcagggcagcggcaatgaccaagtgttgggcgctctattaaggactgcaggttgtggcagtactgcagcagccagtgctttggtggggaggtcataattgttttgtagtatggctcttacggctgtccatttcatgtttatccaatttcagctcaaaatatttatttttatgcctatttcgtgctacatttgtccctcttttaatttttagattttactaatcatcttagctgttcgcttgatctgggaacaaggggatctgtgtaatatagggaacgagcaaggggacctgtgtaactgtgttggaggtcgtgggcttcgatacaaaattaattgggttgcagttggattcatcattggataaatgatctgattaattagttgtatcagtaattgttccaaagtacctgcacatttctatgttttctttactatttcatctctgcagagtgggaattgaaagattgcaatttaagatatttcatttgtgtttcaggtcctaatctttgcttacatctaagaaatttctaatgagaggaagattctcatttcaggtcctcatcctgttattcacccttcatgccaattcatgccaagctggtttacaatgcttacctgatcaaatttgcccatgttcagtaagggaacaatatgaatgcatcatgttggtcaaatatacttaggtaactgaatttttgtggttttctttcaggtggaaaatttttgacatagtagtgcctgcaatcaaatttgatgatcaaagtgcatgcaggcaggcagggttcctgacctgggcaatcaattgagggaaattaaaacttgcgagagttccattttgagttaatagaaaaaaaaggatattttttctatttaaattgacattttccatgagctaaacgtgaagtagcttgattgaatgcaagatctgattggcagtatcacgcacgtaatgcttatcgagattgttgatcttgcttgatgagagcttttgataacaaagctttgctgggcatattaatcaccagaccagtttgattgtttcacgttggtgcttgcgtcctaccagtattatgtactgaataatgtttctttgctatgtccttcactgatttactgattttggtaaattgaggcttctactgcgctcgatcttatcaaataattaagcatgtagcgtatgtggaatgaaattggtgggtaattaatgcccaaaccttacatgggtgctgctgccctgatgtgccagggagaagaaattgaggcagttatatatggtcaagatcagctaattaattagcaaatgcgattagcacccttgtggaattattatttttgttcttccctatacgtgaacgtctcgacgcatgttacaagttcgttttgctaactcaagtattggcattagcactaaagcggcattattttatttcctaccatgattgatgttttatacaataattttcgtttttctcgttacttaatactatttggaaactataaaatgtgatacaagtattatgtatgtattaaaattttcatatagtaagcatagcatatgcttgatatttatttaacatcattttactttcctcccgttgcaacgcacgggtaaccaactagtggtagaaagtaattgtagtagtgtgaagatatctatataaattttaaattttgactttgttcacgtataaatgtgtcaactaaaaagaaatttgcggggtcacattaaaaattaattaatgactgtcgcattcatatcatgccccaaaaatcttattgctttcatttatactttgtagatttttttttctatggttgtatcatataataataattcggtatgtgaataggtatgtgttatttatagaaaattctgggatatgttcactgcatacttcggctaacttaactactattaacaatcctccctactaaaatgtatatgcacgtttctttctttttataaggttataatgtatattatacgtggtctgtcactctgtcatacaaaaactactaccttcgtctcaaattaattgttttttaaggttgtttggcatattttaaggtttagaacaaaaagactacaatacccttataaaatattttatggttaaggatataagggtggttgaggggtagaataggaagaaatttgaatgggatatgattgatgggacaagtagtatttaggagtgacgagtattgtgaatttatagaaaattctggaatatgttcgctgcatacttcgaccaacttaactattattatcaatcctccctgctaaaatgtatatacacatttctttatttttataaggttataatgtgcattgtacgtggactgtcactttgtcatactaaaaactactacttttgtctcaaattaattgttttttaaggttgtttggcatattttaaggtttagaaaaagactacaatacccttataaaatattttatggttaaggatagaagggtggttgagggatagaatatgaagaaatttgaatgagatataattgatggaacaagtagtatttaggagtgacgagtattgtgggataaaatttgaatggtagaaagacaactaatttaggatggtgcatttgtgaaagccagtttccggagcagaaaaaaggaaagcccaatcacgcagagccgcttgttgctccgtgctattttttcgtttctggattccctattcttgtcccgtcccattcctttttcccttttccttgctgtcttcctcctgacgtgtcatcgtcggccttgctgcccatgacgcgatcaagaaacgccaccgcccctccgttcttccagagatcgaatcttgggggatcgagctagttggggttagcggtgtggaagggtcgaaaatccttggagacattggattggattgcagtggggcggacggcggtgggcggggcttcttgtaggctgggctgtaccagagaggagccaagacggcggcgataacggcggcaccggtggcgacggcgccgtcgccgtcggagggtgggggaggcgggtgcctggattgtctgcaggatgtggttcgggcgctgtcgatggggacatgccttacgacggcggagcagcgggccatggaggtgccggctgcgtcggtgaagggaggagggggcaggaggagtgacgaggaggcgcccggcaggatcgcgggtaacggcgcggggaatgtggcctgcctgttcactcggcaggggaagaagggcaccaaccaggatgccatggtcgcgtgggaggtatctggaccccaagatctcgaatccctttcttcttttgttcactgctcgtccacttttcagttgtaaacgtgagcttttttctttgtttaattggcaaacggatctaacttgcatggattacttgtaagttcagcagatttcttctttccttatctttttttttgcggggaaaggttcagcagatttcgtagtattacctatgtgtagtggcaattgagttgattctttctaacgaaaaagaaaatttctgatgcctcaataatttacaagaaaatttaaactgttgtttgcctttgtaatttttcaaatgaacattttttatgttaccaagcgatgaaggtaaatctacattatctttgtttgctgtagtttatcgatttgtttctgttattttacgttgttcactaatacaaatagcttgtttataatatttttggccctcaacttatatttctgatgtaatggtctatgcctgataaaatgctcgcagaaagggcagcaacaaaatgttacttatctggtaccattggtgagctgtatatataaatcaaatgaatggcgttattttgaattctaccttttctttctaacaactccaagtcccaacttttgctctctaacctttaaatggattaattacatgttctctaagtatcatgaatgagtgtctccttcaacacttctgttacatctttcttatgtcttctcattatgtgtactattaacaccctgtgaacactatggaacaatggacagaactataacggaagatcagacacggtattttgtggagtttttgatggccacggtccacatggccatctcattgctaggaaagtaagagatattctcccttcgagactctgtgatttgatatatgaagactgtggggatagtccaaccagcaattcagatgtctcaactctggaagagaatttatctccgtatgcagatgcagagtgcagatctcccacattggctggacaaaaagaacatcaagaattcttcaacgcaatgaaagaatctttcagaaaggcttttaaaaatgtggataaggagctcaaattacaacggaacattgatagcatttgcagtggaactactgcagttactttaatcaagcaagtaagcagtttcctctttttgatgtaacaaaatatatttactattacttaagaatttcatatgcagactatctaaaatcgtgtctatgccatcagggtcatgatcttattgttgggaatctaggtgactctagagctgtattaggcaccagagatcagaacgataagttggttgctcatcagttgactgttgacctgaaacctgatcatccaagtaatctctttcactcctaactttaagttactttaatcttctgtattttctcttctaagacatgatgcattgagcaagttcaacttggatgtttttatggtgatattaggctaaagtgttcccttgcatttcctttttccaagataaatattgagcaaaaagtatacactgtctttgatttatttgagtgttcaacctgccacgctgccaatgaaaagaatctcaacccaccttggtagactcactgcagactttttcttatagcagcaacactaagaccattagccccgttgatagatctcaacaactcatatgttgtttagcacatgcaaatcagcttaatattatgcaatgtgtgaacacttggcttaattttatgctccctcctgtctagtgtttacccctcagatgctagataggtcgccgggtggtagtcgtgctgcgccttgtacaatgcttagtagtgaaaacttggcttttctagatgctgcccttgttccatttctatacattccagataggtccttctcaaatactagacaccacaaagtacaacagtagcatttgcacaatgaaagcaaaatagttgacaccatcaatggagaatagaggcagcatgttcagtgactcagaagcctccagcagggtctgataggactatggtacacattgacatcccttacagtggccttactgtgatcctagtggaaaaaaccagatcatacctgcggtttaaccaaaaagaaccggaaccagctcattgattcaattgtgtccaaagatcattcgtgcatttgtaccagtttacaccgcctggtttcgaggtatgcaaagcattaaactgggactagttggactggctggagagagaagagtgtaaggctgaacaaaggtctatttataccttaaggcccaagggtgtgatttgacccttggtctagaggtttaagtcagtcaccctttaccatgacttaatcaggaaccggtgaactgacagcttggccggttcatcttctccagatggcatggatgtcaagaaagatgaccgctgtcttgttattgccatttctattagttatctaaaaataccatattaactttttttatgaaatgttgtattggcatacccatattgctgaaggaaacattctgttgctagggatctaccaagagtaaaagtttacattttgtaccgatattttaatagcgaatcttgtgttacaagattaaatcactgtaactgctatttgccattaaagtcatctgtaagagcatctccaagagttccctaatgccagctccaaaagataaattttaggaatctagtctaaaaccatgtctccaagagatgcccaaagaaggtcccaatatttaccgacaccctaaaccagaaccgatctgaaccaattttggacacctccacgcactcccaattgatgaaatcgggaggtttttgctgctcgcgccttttcttcccctgtcgtgccctgacgcgagatggccaagccctggccttgccccccacaacgtgccttgcagacttgtcaatgacctcgccgtctgctgccgcagctgctaggtacgcgcaagatcaccctcctgcacagcatagctgagcagctagcgtgccattggttggcagcacccagctccgatctccctcttactggaaaaatggaaagacaaaaggttgaagcaggatctacttaagatgatgtggcatattattattgcaaaccaaatttaggcgcactcttggagtcggaggtgatttttgggcccaatttcttttcggatggtcccaatccaagatttttaggagttaaattttaggatgctctaactaccaattaatggtgtgtatgtatggtcagttactaataatttaaaacaaaaaagataaaatgatctcttccataggtattttgctacctacagtactttgttttgtacctgcttgtgctaaactgataatgtgtaaatatgatattgagtaaatcgcatactagaccaccattttttgccatggttgcagtttggactaggggctaaccactcttttcactttgagctaggaatacttgcaaggtgttgtttttttttctcctcctagacctgttcttcctctcccctgctctctctctctctctctcatgttcttcctcccactcctctctctcctgttttggtttgagcctcaacgtgatggtgagcatctcctgtttgcgtcagctcatgggatgaaacttctgccccaccatgatggtggacagaaaggggaaggagaactcaaggaagaagaacacaggtccagagtgcaacttcttacaagaattcctagcccaaagtgagaagagtgggtagcccctatttcaagctgaaattattatggtaaaagaagatgctaaaatgcaatttactctatgatatttgtacctttagatagtcgttggcagtaagcacaattatcgtgaatcatcatattatgttcataatatcatattgataacgttaagcctgtgaaatagaatgtaaccagtgcagcatctttaacatgctgacttgtcatgggccttgggccaggagactgaggcccatgaccaagcccaagaggaaggcgtggtcaaccagggtacacgtgttgtgagcatgaaggacaataggcacacactattaccatgtcagaggaggtttccagagctaggggattatattagattggattattaggtgccagtctgtataagggtactcggcaaatgtataagatcgagcaatgaagaacaatctataaattgcccagttcatcacctcagcttatattcctcctcaaatccctagcagctgaatgcactactatcctcccagtagagtttattgccaatgaaaccttgcccggccgtaacatggttttattagaatgaaagacaccaaaatacgatatgaagactgaataagttgatgaagtgaatcaatgcttaagaagatgcaagcatagaataagaatataaggtggtaacaactgtaattgatgttgttcatcgcacataaggatggaatgatatatggtagaaaaacagagtatgttcaacttaaatcacatattttaattaattttacagtgagtgattactgcttatgttttgcccatcctcattagtcgtttttctctgtatgatctgtaaactgtagtagtagatttaccatcttcaggagatgcaatcttcagcactcattcttcaagaaagaaattcaagaattcaaacaccgattataaattcaaagctatctactgtgactcgtattcttgttaccctatgtttataaacttttgttctcttggacagatgatttaaaattaaattatcatgcacaaagattgtgcagtagttagcttgtttctttccatgttatgtatcaattcctttcacagcaagttctgtgttgtatggttatttgatgtattatatcttgttgactcatcatccatcagaacagctattctgatgagactatggttctgtgcttctactttagctatatgttttgcatgtacttttacatcttagttatcaaaaataaactctaggacatcttgctaggccagcacatttttcttgtgaatttttttcagccgttagtctgttgggaattgtcaccttgctccagtctaaataaatacaattttgagcataatcttgaaaataataacataatgatattctttccaggggaggctaggaggatcagacggtgtaatgggagggtctttgctcatcaggatgaaccagatgtggctcgcctttggcttcctaattgcaactctcctggactggcaatggcccgagcttttggtgacttttgtctaaaggattttgggttgatctcagtacctgatgtcacctataggcaaattactgaaaaagacgagtttattgtcctggcgacagatggggtaggtaacaaaaaatgattaacaattattttctaagtggcttcttcaaagagaagaaatagttcttaatcaaaatatgtacttcccaatttaaaatcgttggactgttttgtcttggctggctctgatacactattattttacattgcctacaggtgtgggatgttctctccaaccaggaagtggtggatgttgttgcctcatgctctggtcgtttcgctgcagctcgttctgttgttgatttagcaaatgagacttggaggttcaaatacccaacctcaaaaactgatgattgtgcagtggtctgtcttttcctgaacaagtatgaagttaccggtggtttatcagggcaacctggatatagtccaaggatgcctgccctatcaggtattacccggcccaatagtaaaagggttactcctgacgacgtcgatgatggtagtgactcaaacgtaagcggagatgagaggtccttggatggtttcactcgattgaacacattgttggcactaccaaagtttggtgacacaagtccaactaagaaatgagttggtaagcagatgagttttgcaggtgctttggacaagagagcatatcggctatattagcatgtccggtgagctcccgttctgatccagcttacgatagctaagaatgagtagggttgttttttttttttcatcctaactcccatttggttacgagttgacaattacgcagcaagcatttggagtcttaactcttatttagtcgagagtagacttaacctttttgtatagctgctcatcgattttctgtcttattgtatgtacttggcgattatatgtggacaaatcctactcattcttatggtaatttcgtttgtcggattatgacagttggaaccttttgctcaaaaggttcgtatgcgtttctaaaaaaagggggttcgtatgctctagtcgcatgcaactatgcaagccggagaaggtctaaaaggccaacgataggggtaaaggataaattccttatatatgaaacggatgtaattacacagctagttctagctggtttgtctaatacaagagacaccttccacctatacttcaaatataattttctcttaaactactcatccgatctacgatccgattacactgttgtatttgtaacaactaaatctttataagaagatctcacatgattatattttgatgaaaaataataaattacttttataatatatctaaattatttttagatttcactaaattacttcttagacatattaaagtaaattcaataaaacctaaaagtaatttacatatatatatatatatatatatatatatatatatatatatattatataagtaagtgttaaaaaagaagttataaagaaagtaactttaattaatgcctttctttattgaacaaattgtcatatatataagttacttttagatttgattcaaatacttcctatacattcataatgctttgaggtgattacttttattattgtttttagttaattccataatttgtgctgattaatttaatttcagatagagttatgtttttatctctacaatggatttacttcaaataacatgccaaagttgcctccgttttgttctaagttacttctataatatatgtaaattacttttagattttactgaatttatttttatatgtttaagaagtaacttagtgaaatctaaaagtaatttagacatatcataaaagtaatttgtgatttttcatcaaaatataatcatctgagatcttattgtaaagattaattgttacgaacataacggtgtaatcggattgtaaatcggatgagtaatttataagaaaattttatttgaagcatagatgataggaatattttccctacttacttaatagattagattcttcaagttaacacatatctgaattgctgctgataggggtcgctcgttatgactaaatcgagagtgctatcaatttaaattttgcgatatgaaacttggaaattacgttgaattcagaaatgttagtaggatatttgtccatgtacaaattatttttactcaaggtggtgtggacaaatctcaagcgtctttttttaatctaatattagtttttaggtgtccattatttttatttgtcgtttatcctcagtccatccaaaatagatatgcaagtggacaacagtttcattagaagcataacaaaccaccacttgctagtttatttcctatgtaaaaaaaaaagaagaggaaactaccaatctagcgcctggttccctaaaaaaattgacagccacggtggaatggatttcaaaaatggagatcacgatcgttgtctttttcctcttgagcagcaggccagcgctggcagagccagaactggttcggccaaaccatggtttcagtcgaaccgttctggtcgccaggctagccaggctcaggcaaggtgctgggctggactaagtccaagtatagctcagtagacacataggatacatattaaaattgaccaactctataaagtctgcatcctgccccaacccctttactggttctaggaaaactttaaaacgatggccatttaccttaaaaatactaccttcgtatccgccagcttgaccgctccgtgtggcaaaatatgtagccataggatacattttacggttgcaatcctctgatagaaggccctcccccaccctgatccagggggggccgccctccctcgccccgatcttcctctgtctcctgaagcggtgcctcccgctggcttcagtcgtcaagctcggtggcggccatatccgaccgccatgagctcgtcggtaggccgatccagctgccatcagcagcaccagtataccctgggacgatccggccaccatcaacaacaccaacatcatcttagctttctttgatggatgtggtaactttctgaaccaaaaactaacccaggactacctaccattattgataatcattctttttggagctttagtgatctttaaatgaaataatccaaatttagccgaaccataattttctatgcaggatcttagatagaaagaataaaaaaaatatttgcttcattgtcctaccatggaaattaatttagatagaaggtaacgattacaatatgcattttgtactaagcttaagaattgatttttcatacaatattggtgattgaataattgcttttacaaagagatggcatgaggcatgtcattttttcttttgtggttacctaatgtttttctgcatgaacatatacaattggttgagcatcttgaaaatatggatctcaatcgtatcctttttacttttaaaattttaaaatcaattcaggtgcaccttgctagcagctagcttcaaattggcaagttcaacatgtgtttttagttagtttgttaatggagtttttgttattttcatatttaatccagtatacctatactcatcaaactaggatatatatggtctttgttcccattatgctgcatcctttctcccatggattaatttgatggtaacttagctttactgcatggtttgcttatgcattttctattttgtttgatagcttttagaaatagatatgaactgataacttgacaagtgataaatcaaagctattttggtcttttcctactttatctaacttgcacttctagattcacaccttttggagtagtatagaattcaactgaatttttggatgctattcatgtacttgcatatttttagatttgttttgagtatatcgatggttctcctaccatggcaagctgctatatctgactttggattcagacttatgggcccaggtattggttatttacgttttgctataatcacattatactaacaagctgtatgtccagta

SEQ ID NO: 21762 - DNA, 35248 bp, Oryza sativa
  unsure (1)..(35248): unsure at all n locations
ggaaaggctgcaggaatacgtcaccacccgtcctcatcatgagatggccgagtggctcatcctgcagagtttcttcaacggattaaccccctcgtcctgggatcacctggatgctgctgctggagggacattcttctcaagaacagttatatgccaaccgattgagaagatgctctcaaataaggggtggagcaaggaacgactccaaacccgtcaatgcgacatgtacaccgtcaagtggacggaaatgctagccgctcagttggatctccttatgaggagactggacaacaatgagaaggacgccgagcagggtaccgttaaggccatggactctcacaagacatgtgaggtcgatggcaatactggtcactctggcacggattgtcggaaaacctgtgagaacgtcaagctcatgaacaacaacgggaatcgtccacaaggggaccaaggatggagcattgctccatggggtagatcaagaacatatcgacacacaaggaggtcaaagtaaaaccccgaaggacggataacttcaacactttcatgatgaacttcctggagcgggaagaaacgaggaaccgtcagtaccttaagccggcatccaagaaactggaaatacaggccggtcaacctgcattcccagtttcgaagaggccgctgcccgcacctatgatcaggaaggtgtggcgggttaaggagaacacacccgttcctgtacctccggaactgggtgcctcatccagcaaaattcgttggaggtatggtcgtgctcatcggacctgaaacgacgtcgcccttgccaacaggtaaattggtagtaatctcatatttattttccattgcatcaaagcatgtttgaattttcaaatgcacatttagatttgaatttgaggcaatttcttcaaatgattttttgtgagcaaaataaaatgcaatttttggcaaaattttgcacagccaccttcacactagtcgttggagcccaatggctaaatgtggggccgattgggtccaccagtggttcggccgaaccccttggttcggtcgaattggcctggtaccggctggttgcaaatttctgcagggtagtggctagtggggcccacatgccattactagccgttatccatgcactatatatgcagctcaactgggagagggaggtcacaccactttaactcattttcactccctctcaaaaccttgctgcaaaattcattcaaagttttgcaggcttacctcaaattcacacaattcactgcatttagtttagacaccttgcatatacaagtttgctttagttcggtgcaaggataatcggcgggtacttgcttaacccccgtccgagtagtcttgtattcttgctctttgctgtagctatgaagaaacgactttcgggcatattcaagagacgatcaagctcacggacaagccgacacgataagccgagtgcaccttcttccgcggatgcatccatggaggaggcgtacgttccaccaaggctgtacgacaactctgatctcgaccttgtgggccaccgggaaatgcaagcctatcatatgttgaaagaccaaacgtgtgctcagacctgaccatacgactcgaccttctgaaaaggataggtatggatgctgagtttcatactatttggcgtgctgtaggatgggataaatttgcatgtgtagaagagccgggttcccgtttgcttaccatgcagtttttatgtgccttgctagaggtaggcgatggcgttactttccggttattccgcaaggaatatcacctttcttggaaagaacttagcttgcttctagtctttgacaaaacatgcaaagttaatttcaggaacgcatttcctgattttaacaagcgtatgttttgacaaagtatttcgggtctctcatcctgtagaaagcctagaactaatgacatccataatcctaccttaaggctgttgcataagtttcttgtttcacgttgtttcctagagctaatatccggatagtgcgaactagtcctcttgtatgccatggttaaaaaaaaaatcaaagtttcacccgttcaacccaggatcaagcaatggttagaaaatgtgaagttgtctagtcctgttgagtgtatttctttggtgactcatttagcatgaagagttgggactctgctttatatgcaaatattcctattacccgctcttatgttgatgaggcctatttggttcaatgccacatactcaaacatggtccaaatgattatcttatatttttgtttcccggctatgcaaatgagattacgttacctaacccggagtttcatttgtataactgccgagaactaaccatttctttccaagcggagttgcctcgagaagtcccacgcagggtaacatgacgaatggcgagagaagtacctctggaggcgtcttcctcataaccaccagtgcagatgtatggaaacagttggggcccgaccgtgcatgcccgtggttggacccaattcctgcaacatgacaccggaggttcgtcctggcagagtgccagcgacagcaggaggcatgagccacaggagctgcactagggatactcgggctccttcagttcaagtggtctacctccatcctcttgatgcattgctcagtctcctctcgaggggatctgggagaactcatccggaggatggatacacttagaactgcaggcagggaatgagcaacacaccttggaggatcatgtggtacagtcacgggaacggcagcagtctgttggtgcacagctcgcaaacttcaacaccatgatgcaacaacagcaagctgactggcaagcgtttcactgctaccagggatttgatccccaccttgagccatagcaagaagcaagcttgggggagatgtctctccccccactgagctaacttgtatcacattgcatatttccctttcaaattgcatgtttaaatttttgcattgcatttataaacctgaaaacaatataaaaatttgcaaaatcaaaaataccaaaaagataggttatatttaataagataggttagatctaatatgctaggtaagacatgcttagttcttcatgttgaaatgatgaatagttgctctgttatatatctctcatacatgggttcatggttaagtactctctcaaaaattgaataggagtagccaataattatccggggacctgaggtaagtgatctgagtctaggttgttgcgagatatgagatactaaataagagttgctatgaacctgctctaagtttgacttgcattccggatgttttatgttccaaaatgataaaattgaaagttcctcatttgatatgagttcctaccagagccaaaaatatccatattaattaagtcatatacattttggttacttgtaattccattgaattttgtcaaatctttgtgacttatgtagatacttctcatgttctatgatcaagatcatacacccacttttgcacacatatgctaagcatctacactggaagatagcatccatatcatccaccatatccatgttatcattatccacaaataagctctccatccatgcttcctttccaaagaaaaatcctttgcaaaagtaaaagaaaaaaaaagaaagagggaaaggtatggctatgagaaataaataaaaaaagaaaaaaagagaaaaagtagccataccccctctatgaaaattaaaggatattttggaggaaaagcataagcacaaaggagaagcattttctttatccatattttgttttccatcatattttcccaccatatcatgcacacacactttgcgcgatcttgatcttgagtatgattagtcatctagtttagtccaagtttttgacatagtaataaatgtgaatacaagtatgtcatgtttgatccatttcaagctccacatatgaaccttagagtaggaatcaaaaaggcaaatttggtgaggaatccatattcatgcactttgagtgatctagagaatcatttgaggaacttggatttcttttgcaaaaatcatttgaaaacctccggaataaaagttgaataaagattgggtaactagcactctaattgttgttctgtctcacaaccgctcaagacaaggaaaggcagtgtctcgtgggaatcagggataagggtaagccgccgtgccaaacttatttgatttgagagagagtacccataccttgcatctgtatctttgagatatacaacattgcagcaactcctgatcaacaactaagtctttgttcctttcgttctttacttgggacgagcaaaggttcaagcttggggggttttgttgacggttgttatcgaccagtttcgaccgtcaatattacccaattaatgaagactaactatgcttgcaatgcattattccataaataaaatattctactccaccatatgcttggaaaactaaccatgcaggagaagctatcaaaatggagtagaatcgacaataaaacaatcgatcaatcaaacagacactgtcgagaatcaaacttgtggatagatgggctgagaactcagatatgacatgatcaaataagcccaaaattccctgttctgagttaaggggcaaacgaggaatccacctaccgaattgtgggctgattgggcctggccagggttcggcccaactccctagtttggttgaaccaccagctggcctaatctagcccattttccaccggcagttatctacatgtatcctatgacggttaggagcaattctaccggtagaaaccgtcataagcatcgacacatggcacaatgaggtgtaagatgctctttggatacttcatcttgccacttgtcatgaggagagcaaacatgctcctaggatgcttggagcatctccacactcccaaggcacctcatgggctataaatacccctcctctcattcattccctcacacacctcaagaagaagatcaagagctctctcaagtattgtttagtagttctagtgctattggagtaggaaatagaatagtcttcatagtcctcgagtcttcaggagattccgggtatggctttaatagcttttctctcttcttttgtaagatttattgaattaataaaatatttttctttatacaagttcggtattttattccattcatattacttgagtgccgactttactttatacttgaatcaatatagtcatgtaactagctttccagataggtgtattggtgtgggtttagtgtccgattactcggttgctctatgtcggttgcaaggatgtagagtagtattcagtaatgtaatcgtggtgcttagattattagataccattaattgttgttatatattgcggatgagaggtgggccgctgatggtaacagctcagtacgggtattcctccgcgccggtatataatcctaagttaattcccttgggaggttattcctccttatttagccccggttgtatggtcatgacaggctatcgtaaggaactcggcagtcagaggtggcttctcgaaacaccaggaggacactgggtatgtggtattggttgcatgactgtataatagcaagtatagactaaagatgtatgtatactagaagtacaggaatgatacttttcttattctttctccacttagcttagactatattttagtgagagtagttcttagttctttcttctgtgtgtcaccctacccttttaactgaattaacccctgcgtagactttgacgatgtatataagtaatatataaactattagcatggtactctctaatcatatcttcccttgggataaaataaatacgataccttggaatactcccgggtgaaatgctacaatggtatatccgtgcgcttgcggatcatgtctgtaaccataatataccaggattatttctagtgccattgctgggaattatatttccagtagtgttggtaagaaataccaacaacttcctcatcacttcctatgaagcaaataacattctgcaacagtttaggatagctcaaacttttttgtatgattcaaatgaaaaatctttctcaatgatttctcctctactacttctactaacaagagtagacatgtaaaatttatgtttgttcttgaagggaaaaccgttcgagttgttccttaactcaacaatcatatgtctgagaatctggtttaactaagcggattggaggcgggcattttcatttcaacgtagcagtagggaaagtgatttcggggggttagtacctattgatgaataatcatagtagaatcaaaggtacatagtcaaaaagggttctgacctaaggctatggatgaatcagttcaaagaatttactcttaacaaattcttagagtatttctggtagaattggggagcattaagtataaatatgatacatagccctttcttattaataaaagaataaggaaaaacttttgaattctaccttcatatttcctgctgagatcccaagtctccaagtgggccctcttggccacccatgaccttggctttttagagaatcccgctcctatgtcgtcagacagatccgggcttatcaagtggtactgaaatagggtaaaattcagtttagtagaaaggaaggaagcaagtgaagaaagatgggatcaaataataataatggtacgaatatttgatgattgatttatacccatgtatgacatgcttgtgcatatggtgcatgttgaatgctacggtaggtgatgatatgcttctttttaagacatgcaccaaatgaatgtgggatcctaaaatatgccccccttgtatatcgatgtatgacatgtatgacatgcttgtgcatatgatgcatgttgaatgctatcataggtcatgatatgcttcttttcaagacatgcaccaaatgaatgtgggatccaaaaatattttccccttgtatatcgataatcatatcaaatgtgggatcctcaaatattctcccacttttggcactaatctcacaaaaaaacatttgcaaggaactaaaaaagaaacaattttgctcgagcaaaacaagaacaaacattcacaagaccaaatattttttttgaaatcgaggctcaaagcaaaaattttacaaatggtccatttaacaattactcccccttactctcgtagtctcaacacttagacaaaaagaattagaatggatttcatttgttggagggagtgattatgagcattagaactttctctcaaaatgcactcatcaagtatttttctctaagagaggagtttggtcaaagatacttgacagattcttggtcatgtgagtaatctcggcaatggaatgacaatgattgacaaataccgagttcaagatgatcaagggttagtaccattttatatagacaccacttgtgtatgcaagtgcgaatttggatcaaggaatggtagttggcaatggcaacaagaatcaacttgtatttcaaaagcaaaggaaatggaatatgtaggttgttaatgaaaattccatttgagtttaggttggctcaaataatggggtttaagagcaagaggaattcatgcaaggaacaaatccaatagagctcaaaattgatttaacattcacgtaacatagaactcactacacgaaacaatttttattaagctatcgactcagattttcaacaaaatgaaacgcacttttaaaatttgaattttaaccaaaaaaaaaagatacaaccaagcaagctcttgtagcaacacaaaacttgtggaaatgatctccaaaaacatgcaataaatcctggagataattcatggaatcatgcacaagtttcattttggagtcttgctcatatctcaaccatatagacaaaacaaaaatcataagatttcagcaagctgaaattccagatttttacacaacttaagatgggctttgaaaaagcattcaaacagagtccaaatgagctgcaaaaattaaaacaaaaattaccaataattttcaaatataggggatcaaaagtcataccgaaagctccttccagtttgcaataaattgagagatataaaactcacaaatcagtgtaaaaccatgtcatttccaaattttttttagcaagttcatcaaagtgagaaaaactcgaaactcttccaaatcatgtccaaataagatgaaatcttacagaaatgatctttagacatgagagaatcttgtccaaatgaagtttttggaaaaacatttttctatcaatataaaaaccaaaaatagcattgtaggcctttcaatttagtaaattcgaatgaaagtcacaaatcacacacaaatgtgtttttcatggagtttgacatttgtatagcgttatatgggttagagatactaatttaagccaatattcacattgtactttagctccattagcataacccttgaaatccatgttttggtcattgtggtcattacattacacaattttggatgaattttaaatagctataccctttgaatggttggtattttgagaaaactttgaactagagatttgtttttaatgaccaacccataaactttcgtattagaaatgttttcaaaaacacaaaatattttgaattaggagatagaacattttgaataagaaataggatcatgcaagatccttttacgcccattttctatattattttagaaataagatcttttacttcaaataccttgcaaaaatttgaaatacatattgaagcacttttgggaggattttcacaaaatttggcctcttaaatgagatttttcttaattttgaccaaagaggatatttgaaatagctataaatccaacttttgaaatctttcatattttgaaagcatgggatataaaaatatgattaagaccactccgaattgatttatttcacactttaacatcatgaagtcaaggtttcgaagaaaagaccaagtttgagcaaaaagctacataagcttctattctaaacacttttatccaaaaatgcaaacacaaacaaataagatggttttggtgagaaataaatatgaatgaatgttatgtacttatttgagctagtatgatgcatttatgcaaccccaacaatgagaactcatctaagtgatagtaggtggccatgtatggtctaaataatattttggataagattggaatgtaaatttcttttagttggttggctttttagagaagttttgaaaaccaaaaatgtttgaattagccaaccctatctttttcattttgaaaccattttcaaattccttttgaaaattagctaaaacaagatacttagagctacatttttttttgttgaaattctttttcattgaaaattagctcttctttgaaatataaaagtattgagagatatttgaaacacacgttgagatcatttccaattagatttctcatagaaaagctttttctatagttttcaaaattttcacttttggctaaaaggtttgttttgaaattacgaactagcacttaaccaacttgagaacatatattggtgtgatatgcatgaatatgattgagtattaaatactcatatgacacaacttatcatgctcaagaatgcataaatgatgaatttcacatatgcaaggaaggtaaattcttaaatgctatgagaatgcaatgcaacctatacaagattaaatacaagataattcaatgtagatacatgttaccgagatgagattggttcttgacgtgaattttgcaatggttggctctaaactccgaacttggtgagatccacctttgcttgcataagccatacctccaatgtctctccatgtacacatattctcattttagcacatttttgtccacaagaaaattgggtccatataggttagtcataagagatttcggcacccaagtgagctttgtgctagcatgtggtgaactaatcatttaagtaatactagtgacattttttgccttcctaagcaatttaagattcaaataaaaagttcgggttaagaatgttaccattgggacaatttttttaccaatttgtccctttcaccggcaattgtaacaaagtcgattcttgtctttacatggtgctttcttcaccgcatctttcatcttacttgttgccttgatattaagtttcttccttgatgacataaagtcttcatccttcatatgggggcatgatgcaacttcatgatccttcacattgcatccataacacttcatattgcttcttcttgttctcctcttggtcatcaatcttgttggaacatatcaacgcatagtgtcccactttcttgcacatgatgcaagtactgagagttttgatactactttgaatttgccctttactcttgttgttgaacttagtatttgcttgatagaacttggtgcaagctacggttgatcccttctcaggcttcttcaccatgttcccacggttatcttgagaaggttaagcattgcccacaagtccttgtccttttttcctacataatccaagtcacatgtagtgctcagggaaatgtttgcttcggagcagcaagtgttagcacaagtaagatcaacctgagcatgaggcccatatgattttaccgttgcaattatcacctcatgagctatctctactatggtcatgagaatctgcaaagttcatgatgcatttcttgtaaatccatatacttgctagtgatctcaaattcagatttgagctcttgattttccttctctaaaaatgctacacaagcaattgaattagtggcacaagaaaattcattttccaatttttcgtacttcataattaatgaagaatgagatccattgagtttcttgtgttcatcagatagacccttgatttcttcattcttcttaatgagtcattcatgttgcttctcaataacccccatgagcatgatcaccattgttgtatccttcttgttcaattgatcaaccacaaagtcatcatcatcgcccataaagcatgcatgatcttcggcaatggaagataaacaagttgatgatgtggattcttcacttaaccatttatgttcattcacttcttccttcaaaaggttagttccacaagtactatggaaagtagagcatccatccatatcatcctcatgcacacatttagcgctagatggtttgtatgagtcaacaacacaatcaaatatagcaatttcattatcggtgttgttggagtacaatgggagagttggacaatcatcaaccttattcaccatttcattaccttgcttgtagttgtatgttggtgagatggatgatgagataagaccttcttgatcagaggagataatcatttcagacttgtcaagatgaggcgatgaagtagagcaatccccaaatgatgcttccactttccgctgcatatttaagacattatttatttgtaagacgtggatctgagtttcgactttgttgtttgtgtaccctggcttgtcctggataggggatttaatacacattcttcttgaaattctggttcatgaatttctaggcgtgacattccctttcacattgcatttataacctgaaaagaacattaaaatttgtaaaacataaaaagtcaaaaatatataggttagatttttatatgctatgtaagactactaaattttctatgttgaaatgatgaatacttgctatcttttatatctcctatgtattggttcatagttaagtactactctcttaagttttaagccggaaggccaaatattatctgggaacctgggagttgttaatagaacattgcatgatctaagtctaggttgttatgagatctgatttggtaaactatagttactatggtcttattctaagtttgactagaatttcagatgttttttttctcaaaatgataactttagaaagttcctcatttgatatgaagtcctaccagagacatatactcatttaaattacaaaaacctaatgttatggttgcttgtaattccattaaactttagtcaaatttccgtgacctttgttagatgcttctcatactttatgatcagacacacacttacacgcacatatgctaaacatctatactagaagctagcattcattttatccattttatccattttcttccacttcatccacaaaataaatactccatgttatttatggctctctttccaaaagtatcattcaaaatgaaagagaggtatggctatgcaaaaggaaaaaaagaaaaaaaaggagagaaaaataaaatcttgttcatacaaagtatggggcatgatgaaaaaacagaagaaaaaaacctagccagacaccctctcaatttttgaaaaaaaagagaaaggtgtatgcagaaggggtaatgtcattccatatccactatcataccagacacttgcacgatcttcatcaaaagtatgttttgttatcttatttggcccgactttttgacttagtaataaatatgaaagcaaatatgctgtcacacccagagtttccccttctctgtagtttctaattcaccaataaattgtctatagaaattactttggttaaccaagagaaagcccaaattaacaagacattttaataatcggaaatgtcagggagaattctttttcgaattctctttgctctaaaatcattaacagcacttaaagcggaatattcagaacatcggagttaatgttggtagattgaattgtcaagatttgaattaataataatctttctctcccgcatttggtcgtgaatcgtgcccgattcactgccctcttcgtccgtggttttgttttgcataacgagccaagtccgtttccgtttgtgagtccgtttccgttcttttcctaaaacggcacagcatttctttttcaatttgggaaagttcctttccaaatcctattcctatttttcctcccctccccatcccactaggccgccactccccctctcccctttcgcgagcatgcctcctctctccccatgtcgaactaggccccctctcccctccctctttgttgcctccccaccagtcccacctccctcttttttccccactcctgtataagttagaacaccccctattatttttcctattcaatttttgttttagccctagtcctagccctagctgccgcctcccgccgtcgccggcgtcgccctagcgtcaccgataatctgttttccctctccgtgtcatggctaccacgattatctatctctattctaatttatctccgtcctagattttgatctagcatcaccgctgtctcggcatgttgccgccgaactgtagtcgtcgtctcctcctcgctgattgtctcggtttggtgaggaacctatccgtaatctcccggtttaggtgttaattctttttagtgtcgttgttgtaaccctaaaagtgtaaccccgacaaaaccctagtagcctagccgtgccgccgccgcctagctgccgtgtcaccgctgccttgtgtcaccgcctagctgtcgtggtttgccgctgcccgtagctcagtagccgagtcgcaaagccataggtgcatccctaaacccctaccggcctatcgcttgctgtaccgagtctctgtcgtaaaccgtgtctgagccgtcggttccgttcgccggttcggttgaccgtttggatggtcccatgtcacgaagtattgggtcgttgagtcgttaattcatgaggcttgcttaccagaggtttatttccattgatctatttatctatcggcaataatatgtaataaatgattaaggtttttcagttattagtaataacgcaactcatattataaaattcgtaactaaataatctgagctccattttaacccattcaaattgtagtgaatccgttaaaatgtatagaatccattaaaattggtttcttttgctgtttcagtagcctcattgctggtatttcttgtgtgctttgtttgtcgtttagactctgtcaggtctggtgatctagtttatttcgaagtggtcgccgaggtttagtcagctcaagagcaaggcaggtcatacatgcatcattgatcatgtggagcctattttataaaatccccttctttctattaaattgcattgttttagaatgtcatgtgggatggatgcctatcatactcagcatgttgaatatcttatgccattgataacttgggttataactgactagatgattgctctaggagtgattagccatgcttagatcaattagttcacaatgggattcattataatttagtccttaatctaccctataattcaccaaatcattttactcatctttcactcctacactcttacattcatcactcaacggttaagatcgaccagtgtaaaatcaaatgatcgagatcaatcccacctcccacctctatgaatcgctcccaccaccttgaatcgcgcacgcggcacgcccctttctctctttctcgctctcccagtcacagatccacgtctcctctctgtcctcatcccgcaaggtcgcaacccgcaaccttgctcatcccctaaccgcgcctctaccctaatcgctgcgtgttgccgcggccttcgatcctccgttttcaagggcgtgtcagctcgtgccgctcgccgcggtctccatcaccgccctcatctctcccctgccaccgccaccttcaatcctccgtggtcaagggcgccggctcaccatggtcttcgtcacatctctcccctgtcgccactactatgagccctcgacggtggtgaagcggtggcgcggtggatcttcggtgaaaccgaggtggcgcgatggctggagcgacaggcgcctcgccagcatgacgcggactgcagtggttcttcagcaacatcacagcaccactgcttcatcttccatcagcaagtgcgcagcgattcatgcccgttccccttacctatcaccgccgcgattcttgcccctgcccctctcaaatcttcaaaccctacctagccgccggtaggcccctgccgctcgcctatcgccaccgcgccgccgctcacaatccccaaaccgtacccttctaccggtactgcgaatccccgatctccgcctcgcgttacggatgccactgcacctcctccatggagacgaaccaccatggaggccgctgtctttgctccccaccaggtcgccatcctggcactgccagcggtggaggcggaggtggctaccgctgctgcaccggggaggatggccgcgaacagcgtgacctcgatatccaagggcggggctgtaatgaggaggtacacccgtggaccatgatggatcggtgtgtgcggcggatgcgggcgagaagggaatcgcgcagctggtcaaggcaacatcccatctctctctgttaatctcgatctctgagattgctactaaactaaaggtgatatttttctaaaggctactaaactaaaggtgatatttttctaaattttgtgccaattccaggagaattcggaacctatgaggctccttgaggggagggagtacgtccctgaaaccacctgattccttgcatcagttcatcccttctattgaggctttgagtggctggggcttttgatgctatgtgctcttggtttgatgcgatttttgctttgttttggtgcatacagcaagatcatagacttgagcaggaatgggccagaagctgtggctcgctaactggcagctcgctcacacaggaaaattcccatatgctggcagtaagtttccccctaaattttatcccagaaacttcactgttagttgccaagtgaaatctgtgcaatgtttagtttaattctgatcgatcaagagaagcatatacactgcatttgaaagtgtgaaaacacatattttgctttattgagtttgcaagccaacgtgttaattgtagtttcatagtaactgatgtgtgtagtaccgaattctaggaaaatgcattctctttatataagcctttcctgatatgagttaacggatcagttaacggaaaatgcatactggatcacttctcttttttttttctcttactggtgtcagagttctctcttacaaatattcttatacaccattcataatactattatacctgcccactgtagttgtattgtgcatatataacttcagatttttattagccttcagttttttttttctactctgtcggattttcctgccgattaattgttggactcgatgtccagaaaaaaaaatgcaaggtctgctccccttgtcacattatttgcttatatttcccttgaaaaaaatagtgggttctagccttctaggcataatttatagtaaattgaaatagatatttcctgcatgttgaactatttagttcattgaatattagctagaaaaggtacaaaaacagggagaaaaggaaatcccaatgttgctactgaggcaatatgaaaaaaaatggtatactgcaatctgctttgtgtaaaagcttttcaatctaactgttattgtgcattattatcaaccaaattaagagaggatgcaacttgaagttccttgaggtagatattttatgtggtgatcatgaagttgatgttcatgggctttcattggaaaatttgagtcactaatctgatacattgggtttcactgatttataatttatcatttaatattcaccatttgattgaatttcttgtttcttgtactgaatcatgtaggttttaatgtatgtagttttacaagaacgtctccaacaccttaaaggatgttctttggaaatcagacgatcttcaaagtccacattcctggagtaacttgggagagtaggattagtgaactattagcataccgtcctttggaatcaatattcatatttctagaggtgagaaaaggagaaagcatgtctattgcacttgtaattacatgtgaatgatcctgtaaattatgttaagtctccactaatgttgcatgtgctgctcttgtttttcagagaacccttctaatagctcaagtgaagttgatcatgcaatgagttttatgtgttagtaagttttgtgcgtaaatcaatatgctgtgagatgcaagtataattaattaattaattagcatcatttcatttacactgtaaagttgtatcattctcagcaggaatttccttttctgtgatatcacagtggtcttatgaaacatccccgtaacgttagtacgggcatattactagttatattatgacatttaccccattaaattcaagtcctataagaagcagtcgattaccgcaatcactcaaagactaagtctaaacctgcaaacaaaaggttaattcaatagcaagagtcagtacattataagaaataatgtactggtaagcaccaagacaagcctaacactctacttgcaaggcatataatcaaggaaggcatgatatggttctttttagcataaagcaagttttatttgcataaaacatttccaaatcagatttgctttcaaataaatttcagcaagcaagtacttgacatattgggcatcaaagtagtcattaatcatgtataaatatactactcattgccatccatggcaacaaggagatcattctcaaatctcatcacattttgaagttaaatttcagcatttagaagaataaacacaagtctatactcaacacatatcgacatgccgctcatgaccgcgagcacggctaatcgattaggttttagaactctgcagactttatacagctttacccacatgatgtgaatcgctctggtttgtccggtacccgtcggtaccaccatactctacacattgagtatggtctagaggtcacaacgaggcttttacattaagtattgtctaaccttgcatgagcacgatatgtgtttctccatcctaggccatacacgttatatgacctagaactgttaatggcaggcccacgctttaaacttaacgccgtgatagcggacacaacgaggcttttacattaagtattgtctaaccatgcatgagcacgatacgtgtttctccatcctaggccatacacgttatatgacctagaaccgttaagtggcgggcacacgctttaaacttaacgccgtggtagcggacacaatgggaacccaccacgtggcacaatatcgttgtattggacacacttagacgcccatgccgtgaggcggaacacgtgaggcggaacagtacactcgtcccctcacggaaatcacacacgtagggaatttatcatcctacgatcacacttaggaacagtacactcgtcctaaggttcaacacacacatgggtagttcctctaggtagcccacagtacactcgtggcccctacctatactataacggcctcccgaatgcaaggttagacaagtgcttaacttaataggccaagatcccccataaagacacatgtggatgtatggtaaacataatgaacagacattgagtgaagtccttaggttggtttgggcacactctccccctatcggtacacaactaatcaccatatgtgcaccacttgaggcccaaacctaaaatccatgttttccaccattttatttatcaaaatcacaagtattaaaattctttccagattatttaaaaattaattttcatgtttgtaatgagcccataatgacaaggaaaaccattctaaacatggctaagcattatagtaacctagtgtcaccaaaactcatatataaagtggtatagtcgtattgttcctaaggttaggaatgagggatatggatatatgtgggttaaggtgataattcaaataataggagcttgcctaacaagtttaacaaaattttaatttattagtgtacaatcgacatgcaagatttgccaacattttcaataacctccaaaacataggttcaaagtgatcaaagagagggaggtgggactttccttgtaaccggaaaaagtcagcacctaaatcacttcttcaccgtttaagcaatcatctatacaaagtacatgttatgcagttaaacaccgaaatatgcgaaaaatctaaaatgctctaaaatgcatgatttgtgcacagtggataggtactggtctaaaatgaatttacgtgaaagaatttctattttatctcatttcatttgagagttatgaattatagaagtttgctcggtataggatagtatttacttaggtagtgttataaaatatttttataaagtgatgtttattaagtttgactttacagaggtgtagaggtgtgttttctaagactaatacatttggtttcacaatttttagagttattatgtattctttatgtggttcacaaattacaagttataacgtgttctaggcatatagtctctatgtgtacatggctttggagatttaggctgccatcggttcgcttttgcggttgctgttttgcagcagaagcgcatcggttcgctgttacggcctaaatgcaaacagctattggtagtgggccctacacatgtcgggatctatctacggccacgcatttggactcagtgctgacgagcacacaacgcacacagaggcaggcaagcagaggcaatgcatcagttcatagaagatccagtaatcagccataaacaaaacaatggaattgctgatgcttataagcattaggctagtactgctgaaaagcagcagcaactgcaaaacgatggcgcccttaggtccagaacttgctttaacttgctagtgttgtataaaatgagtattttagttaactaatctaatcttagttcataatttcggagtttatattattttactacatattttataaatagggatgttctatgttagttacttaacttatcaatctaaagattgttgcatgagataagttcatctaagttttggtagatggggatggaactatggctccactggtcctaacaagttttatttggatttatttggagctaccatgcatatatatatacacttattcatatgtattgtttaaccactattatgtgtttagtacctattctaccaaattaaggtttagagctatggtctgtacagagggtgccataattcactctactaggttaaagtatattacttgctggttctacagaaatttggttcacttcatttagactaaagatgaattttctacaaattttacaatttaaggtatgctccatgttgcttattccttacataaatgcttaggggttcttattatactgtaagtatgtctttttattttataacattgaagtgcacaactctatgattctacagaacttgagtttactcgaaaaggatctaagatgaattttatataaacttctaaagttcagcttatgcagaactagttattttaaagataatagttttagaggcatttgatgtaaagtgtgtatacgttttattttacttttttttagagaacatgttggggaatctgtagaaactaagtttgctctaaaatgagttgaaatgaattttgtatgcattttataatcctgtgtatgttttatatgtgattttacgtagatgaattttagagacagaaattgtattgtgagtgcaagtttttatgcaataaaactaaagttcttgattagatgagttagcagtaatttgaattactctaagatgagttgttttcaatttgttatggattttacaagtttacatgtttttctgttgaaaacataaagctttaggtatttcatttagattttttcagaatttaaatagattgggtcgacaggttagtctcaagccagtatgcagaaaggcccctggtgtttcagcaaaatcaacccgcggtcccatgactgttctgtgtgtgaagtaggtttacaaactactacctagagttttgattcttctcaagtgaggtccttggttcgagctgatacagagctagccatggccgagctcgtcctggagctcgccggcgacaaacggtggcagatctcggcgtgcaacgtaaggataaatgtaaaggggttcaaggcgacgcttttggtggtattattgcaagcattagtcaccggaattaatggcgacgncggcgcgagctgcggtggttctcgggtgatggtgcatgtggagctagagcattgatctagatgtttagctacatgcatgtgccgctatgggatcctagggatgcttaccgagcgtccaatgaaacttggcagggtccagatagcggtgaccgcgagcagaacgactcggcgacggcggggagcttcggaatgacgtcgccggcttgatatggctgatgatctaccatgcatgcatacacacggtgtataataggtctctggaaagcttcatgcccgaggaattgagctgtgactcaccggagagggagaaatcgaaggtggagcttgacggctggaattggggaagacgatgccgatctccaagctcgatgcaccactggctggggttcatgagggatttaagagaggaccccgaggagatgttgatgatgcggtggctcggctcggcttgctccggttcgacagcaacgaagacgatttcccgatggcggcgtccagtgcgcgctccagagcattatcgtcgaggtttgagttcccaccaaaccactgcatgaaatgggatgaaacttagagggctggaatcggcgaggagaggtgataatggaacgcaagagaagaggaaacgacggcggcttaatgacgctggaggcggtcgtcgtcttcacgaccggcggcgaggttgagatggaaaagggagatggagctctccttcttggtttcttcagtttaggaatggataatggggtgtggcgatgcagctgggaggaggagaaggctagactaggtgtttgatggcgtcgacacgttgtggccacgtgtcgttcatagccggcgccgatctctctctcagtctcggttgtctctggtcggttggaggagatgcacagggtgtggagcaagccaaagaggctgccatgtgggcccagggcgaagggaacatggcccagggcgaaggaaacaaggctggattgtgagaggtgggtagaagatggggtgttaattgattttggactaattttcaggattattttctcctctaaatttgtagcttcgtaacttaatgtgtggaccagattaactagtgttgattttactggaggtagatgaagttacctagtttccattttctttggttgcacttaaaaagtatggatagattactcacagaaattagaagaagaggggctctttggaaaatagtttggatttttaagagacctaaacagagaagataaattctggaaaaattatatttattcattataattaacctagtatttgaataaattatttcgcctatacacttccatgcagttaaatgcacattttagttatgtatggttttagctgattaagaactatatttagtctattattcgactagtttgacttgtttatttaaggtatcaaatttagttaatgtttgaccaaaattacagtgaatagcttgtgctaataatattctacataaatttttccatgattttatcttgcacaaaatatcttagataatccgcaaggcttatctcttatatgtgtttcccttttctaaatgcatgcaaatatttatataagttatatttggactcttcttaacctgagatgatgttgatatgtttgagttacagtttaccttacacagatcataagcttcttacctatttatgtataagtttactttagtattagattaagaggatgcttatagagatgattaagatagaatataccctatatgacttaatttatttgttcacttccatgttcatgactcgtcttcatatggatgaccaaattatttttgtggggcttgacattggccttttgatatattttaaggtttctatgtattattttccattagttagcactaagctctaatggtttagttgtttgtctagattgtaattatattcataagacctatgatgaaatgcaaatcaaaaatccaaatgcatatgaaggactcaagtctaaacatgtcctatgagtatgcatgcttacacataggtttacatttttgtcctaggttagagatgcaaaggttttaatttgttctcaagttttacttaggttcaagttagactgaccacacctaggttaaaaatggaaatttttggctctcaaaaatggaaaagttagcttccaactattttgacacgaaacttttaaggtctaaaatttgggtatgttacagtataagaaatgagagaggactaccgacaattgtagaattcctccgacttcttgtactctactctatccctaattctagtatacaataaagtacaatagagcctcttataattcagctcacgctttggtgtatgtgagaatgaggaaggagaggggtatttataggtggaagtgcattgggaggatagagtttctgtaacacccccggtattctctgtcatgcctggaaatatacaccatttccaaacgctcagtgcattaatcctcgtcccaggagatgaggtacacatagacattgttgattattacaagccacacttgcggaagcgtaaaggaagtactttattacatgggcgacttaagccctcacactcaaagataaacaaataaaacagtggaagactacggaacagcagcagccacaggcactcaacggtggagcgaactagagatccaagccttcatcttccttaggtccatcctctggattatttttgtgagcaagagtgagtaccatcaccgtactaagcaagtcacaccggaaatgcaaccataatgcataggggaaacaaggaaatggcctaatagggtttattttgcataaagccatagttgaaacattttaatcaggttaaagctcattttaaaacacgatcctgttctaagccaatattttaatatcatcaaggtcgcatgagcctgcgaacctgccttaacccaggctaatctccacatgactacaccatcatgatttcaccctcccaaggttttataaaacaaaactaactttgggtacattgctcagcttgcccataaccgaggtcgcggctattcgaatagtttttaactctgatcagaggtgtacaactttacccataagacacaacctcaacacgcgttgccacgcgctgggtaccaccacggtacccggatagaggtcgtgacaagactatccatctaggtctacccaaaacaggagaacccgccgaggtttcgccgcccgccggtccacgacaaggtaaaggttgccggatcccccgggacgagacaggcccccccttgcgccgggtgaaaagacagccttaatcctggccccatacccttccaaacaatggtctgtcttttgagaagatctaaacttccagtcaggccttacccactagacttgtggttgcacgaatatgccttgcaacagaggcccgaagaccggtccttatattagccagggtgcgactaccaaagtaaccagcttgcaccccaagcccaacccaaaaatatattttagctgtacaaagcattttatcacctatctattgacaaaccagtcaatagtccataactaatccagttttagttgttaaccaccagtctagtttatccaaaagttctaggttggaactaagcatgattaagcatttacctaaagcaactagttagtccatcatgtagggtactagactagtcaagttataattttactagggttcacaatgatcatggatatcaaatcaacaacatggccataacaaagagcataggaataactaataaaacaatattaataatgaaaagtataatttataaagcaatgcactataagtaaaacaacataattttcacaatatgggattcaacatgttcaaggtagatatgacttgccttgattgctcacaaagtcttcgccatcaacgacgatgaacaactgatcttccggaacggcaggatctacacgaccaacacaaagaaatacaaaaaggctaataaaaaccacatgaacataagcaataaagcacataaatgggatctactcaattttaggagaaattagagatttgaacgggttgattcctagttcaaacggtcaagatatggccatttgaagtttaggtgttatttaaatggaaatttgcaattttgtgaattatttttctaaaggaaaacttgaattattgagagagagcgcacgcggaccgggtccacgagcgggtcccacttgacagccgctcggtcccccgtgagccgagcacaccgaggtggctcacggtgcaccgacgtgcacagacatggccgagtagagcagtacccgagcaggcggctcgccggcaacggccaacggcgcggcggcggtgcgacagagtatgggaaggggaaaaacagaaaggggaggagacgacggttctcaccgagcagacacggcggcgagaggtcggcggtgttgccggcggtgaggaagaaacggtgagaagcttcgggtcgtcggcgtcgtcgtcgttcctgcggtcctcgtgctcaacagaggggtggacggggaataggaggaatcgccgaagcggatggtggcgactctgagctccgacgagggatggccggagttgcgacggcagcggcacaagaagagagcggagcggaggccgcggagaaaggaggagagggcggcggtgtgtggggagagaggagggagtcaggggtccctttttatagttcggaggggagggagagagacgccggggaaggagatcgacgccggccatggtggagctgaccattaaagaacaccatcaaaatccaccacgaataatgcgggatagagtaggaaattatgagggaattggagaggatgaggtgggaattaattcccctcaattaatttgatgaaacggcgagtggaggaggcgaatcggaggttgccgtcggcaggaattcggccggaaagagagaggatggctgaaggttagggatgacgagtgggacccacatgccatcgagagggagcacacctgcccaggctggggcgcgcggagaaggaaagatggacttagtccgagggagagggaatgagctgggccggcccaaggagagggagggggaggagagagagggaaggagagggggcggctgggctgggccaagagagggagagatgggctggaaacagcccaacaggaggaagaggatttcttttagcttttccattttataaaatttctttaattgtttttgttgccttaaaattatttagaatgctctgaaaattcaagtaaaaattggttaaacatttttaagcatggggaatttattaaaaatacccacaagccaatttgaaataaatgttggtgagttttaattgttggaggcttttttttaaaatttctagaaatgcattaaagcacgatttaaatttagggcgatttacattctcttacctaggatgctacacactacggtacagaaaccactgagtcctaaattcattaaaaatttcgaaagagtatccctgtaaatacggacatccacgacatgcaattatagattaaactaataataacatcattcccatagcactatccatccatctaatccatggaaagaaactaaaaggtagtttaagtgtcattatagacctaggcaatatagtttgatattgtgcagataaatgtgtatataatggagctacttcctgcccatgcatgtcggtctcaatgcgtgcataaaaccaaataaaacacaagagtgagtataaaaatactcagcaagtacaatatggaactagaaaacacatatacacatcattggcaataaagcatgtacaaaaggctttctttctttgataggaaacacattttcaaacaccaagtcaaagaagatagtagttcccatcccgggtaaacatgaattgaaatagtagtttccatcccagacaatagtgaatacatcctagcatttgccagcaaagccgagtaagcgtgatcaacgcttacccacaggaacatgaataaaaccagatagcacatccatgactcacatggaacatgaataaatgaaaccagaaataaagaaccaaattgaaaaccatattgcacatccatgacaagcatggaactttaactatttaaccagaacctgaatccggaatattgaaacaagaataatgacgtaaacataagataaacttgacatcaaaatagcatgaacaacaatatgaaaatatgccatcacatatcacacataaatataatgaaaataaatagatagagcaaacactccaagaatcacacaattagttcgtcatgcacttgcctccaataaagggttggtatgatacactattggatgaccaccacctaattacaaacaaaacctgaggaaacacattcaaatatacatataaaacaatgaaagaggtgaacctactggcccatcctgtcgaaacgcaataacagggaacgccggttggactatacacaagactactgcttcaaacctttatatcgtgaaatatgaaaaggctatgactgagagatatgatttaacccaatgtgttttttaataaaaacaaaaacatactctacgaaccatacctactactgatatgttgaaagcatatggatatgctgacgtgttaaacggtttaaatcgctcttgaaagtaaggttttgaatctggccagaatctcagagagaacatacaaaaacaactatatatggaggtctactcattggatctaagtctattttaccaatatggaaagcttggagaaaactctataactttgcctataggcggcctgactgattccactgtttaatcctccaaaaacagttaaatctactactacataaaaacagtcatactaaaaaaattatatctcctaaaccacttgagataaaatcacgccctttggtcagaagatagatccaaacattatctacatcttcctagtatacacttttgcagaaaatagcatttagagccccgaaacatcgaaaaactgaagcactgtaaatttgcccaaatgtagaactgcaacaaaccgaaccgcaagaacccaaactctttctctagccttccctaaccacgaattaaagcaataaagtcatgctagaacaactaatacaacaaagagaaaagcctcacctagggtttctttagagaacttgtgaggagacaatagaggagactccgatctaacccctcctactcctctccttctcctcgttccgtttttccacttcgcttcttgatccaggttgttggggtggagatctatgagggcaatttgctgtagaggggagagatgtgaacacaggaggagggaaggaaggaggcgccgttggagcccggccagggaaaggggtgtcggcaccaagagggtaggtggattcggttcccctctctctaggttttaggggagaactagtgggctgggtttatgggccttctcatgttgggccacttctaaaggtattttcttttatttatttctgttaacatctttattttaacaagtcaacccaaactaaaaaaacctaaataccttttaatatacggggtattacagtttcttccaagcatccaatgagtatcttcatcctcctagtgccaagtgtcctttctgatgatggttagagcgccggaaacagtcacaaccattattgggatgtcgttatctaccgaactgaacttgggcctgggccaatggcctttgtcagggttcgaccgaaccttggccagctccgttggccccgcttttcagcctagacactcattctggggccctcaatccattgccatggtagtttaattgggcttttcggtccaaaacttcgtaagtttggatatgagtttgactctccttgttcttcatgtatattttctctcaactttggtagtttgtcatctacatccaaatatacaccaacactcgtggaaattgttacaaatataccctaccactatgttggatgttttatgctttccattttatgcaggtactgatggcatgaatttggtacttaagagccatcaacaactatgcacttagtacctttgagatggacaacatagtagcaactcctgatcaacaactaagtttagtttatgcaagtcctttactcgggacgagcaaaggtttatgcttggggggtttgttacgttcattatagaccaatttctaccatcaaaacttctgaaaataatggagaactagcaaagcctgcatgcatatttatttataaatagtctagttccacttgtacttgctaaagtatttgtatacaggagattacttcataaatggaggagaaacgatggaaattcaccgttcaatcaatcaaaacctgtgtcaaacatatggattgatgggcccacaaacccattgaaacatctacaaatgggcccaaccaccatgccactgggctgaggatccatcaaacgacgtccaggaggaagcactgggctagggaggcctgctaggggtcggccgaccctggcctggctccgctggcctaggcccaagccaatgacagttgtaatcgaccttccaatgacgcccacaaccgtcatcctcaagctataaaaggacctctcatccttcattccagcatacacaaagaaggattcgcgaataagaagctctcttagtttactcactttgctctagtgctagtagagttagaattagaatagtctccttagttcttcaagtcttttggagaatttgggtatggttctagtagctcttccctctcttgtaagacttaatccattaatgatatattcttctttatatagttgtggtcctttactatatttgcataatgtcatgcccggaaaatagaacactatattccatttgtgagtgcataattccttgtcccaggaggcaaggtacacattacaaagttggtaaataacggagtatataaacataagcgtaaatagagtggcaaccaaaggcccaacactgaaagataaacgataaaagccagatgctacgtcgggccactacaggtacttgacggcaggcacgagctagacatcaaagcctttatctccaaagtactcctctgctggaagggggaaaaaggagcaaggctgagtacaaccaccgtactcagcaagccatgctagtaaaatgcaaatataatgcaagggagtacaaagaattcatttataaggttattttgcagaaaactagaatttaaaagcatttcaatatttacaagcatttaaataaaacacaaacatatctctagtcaaattattaccaagccgtgcaccaacgcgatcttgccttaatccaaggccacaagtgataactctagttattcaaattttaatagaattaaactttaactcgggtacattgctcggtttgccataaccaagggcgcaactattcgaatatattatactctgatcagaagtgtacatcgttacccaccagacacatcttcctcacatgtttccatgtgccacatgccaccacggcaaattgaccgaagccatgacataacccatcgtttagtaccgccctaaacaaggaagactgacatagactttgatgaggacacgactagcttggatataaccatgactatcttatgtattaattaaccaaaggtgcatatgttctatattggatttacatgttatatatttgaacaaatgttgctacacaatgagtttcatgtgtttccatttgcagaggtacttggttgggcgaaagaaaagaaaccgagcgtaaggaatgcatggatgatcaaagaagttcattggggaccaaactaagaccttccctaagtccacttccatctcaccacgtcacttttggtccgtagcatagtaagaaaacctggaccggtccttgacccggtggagggctcggttcaccggtttaccgactcaaccgttgggtcaccagttgaaccgcggtttatatcatatgtacatttagtatttccccttagtcacaacagttagtttggcctagtggtttgaagagtttgcctcaatcctagcagtgaggggtcgaatcccactgcctgcactatttttatcatataaatgtcaagttgggccttagctcctacatggcccatacagaataatgccatcaagtggcccagcaagcttgagtcggccagttcaggttgttggtatttctagaaagggaaaatttgaaccatgccacacaaattttgtaaaatttatgatatgccaccctgacccacatgtcattgactcatgtgggtcctacatgtcattgagatacgggtggcatgtctcaaattttgtaaaatttcagttacaaagtttatccgcaagcgcacggatataccatagtagcatttcacccgagcgcacggatagaccatagtagtatttcacccgagagtattccaagggtatcgtatttattttatctcgtgggaagatcatgtagagagaacttgactaataatttatatattacttttgataatcatattctaagcatgggttaaaataatccaagggtagagtgacacacatgcattaactactcattctcataataaattatctaagctaagtgaaaagaaaagagagagataatctattcctatacttctaatatacatagtatgtatacattctagttaaccgatatactagctaatatcctctttccgatgccctcctggtacttcgagaagccacccctaactgccgagttcattacaacagcttgtcatgaccatacaactggggctaaaagcataggaataccctccccagggaattaacttaggattatataccggtgcggaggaatacccgtactcttctgaaggcttccggactcctgatttctactctattcctattccactagctagatactactaaattaaacttgagagaaatgagagagctattgcttgaggtgtgtgagtgaagtgagaagaggagctccttttataggcaggtaatgacggttgtgacggttggaatggtcggtaataccctccaaccgtcattggggatcaaccccggccgtccatccaaaccctgcattatcggcgccacgagaggttcggccaaacccatgggctggcctaacccaacccatcttcagctagcggcctcttttgttgtcctcctccgtagacttgtgaattttggcccaatgtgtcatgttatttctgagttcttggcccattcatacataagtctggttcttgacaccgttcgattggtttatcgtctgagttgatgtcgattctcctccactttattatcattctctgcaaacggttattatacctaatactagtggaatattattattctaacaggtatatgcattgcaagcatcactagttctcctctattttagtaatattgacggtcgaaactgatcgataatgaccgtcaacaaaaccccccaagcttgaacctttgctcgtcccgagtgaaggacgaaaggaaataaagacttggttgttgatcaggagttgctactatgctgcatatctcaaagatactggtgcaaggtatatgtactctttctcagattaaataatctttggcacgtggcttacccttacccctgattcccacgagactctgcttctccttgtcttgggcggttgaaagacagaacagtaattagagcaccaatcacccaatctttattcaactcttattccggaagttttcaaatgattttgcaaaagaaagccaagttcctcaattgattcacacagtctctccaagtatatcaaaatgaattcctcaccaatttgcctttttgattcctactctaaggtttgatatgtggaactcagcagggatcaaacatggcatacttgcattcacatttattactaagtcaaaaacttagattaaagcagatgactaaacatactcaagatcaagatcgtgcaaaatgtgtgtggtatatgaggaaaaataaaagaaaaatgcttctcctttgtgcttactttcttcttccaaaaatccttcttttattgattaggagagggcatggctacatttttttttcaacatcatgctcatgcttgatagagcataactttattttttttttcataaccatgcctttccctcctctttttttttcaaaagcacttttctcttttataagaagaaagcacatgaaagcatggagaatttattttggtggtaaaatgggaatggaacgaaatattgcttaggtcccagtgtaggagtttagcatgtgcatatatgtggatgtatgatcttgatcatagagcatgagaagtatctacacaagtctcaagagtttgacaaagttcaatggaatgacaagcaaccaaaatgtatatggtttaatcatgatggcacgtttttggctctggtaggaatttatatcaaatgaggaactctcaatttatcattttgaaaaacaaaacatctggaattcacgtcaaactagtatcaggatcatagcaactcatatttactatctcatatctcacaacaacttagacttagatcagcaagtgcagctcatttacctcaggttcttggataattgttggctactcatatttagcctttgagagagcacttacctatgaacccatatataagagatataaaacatagcaactattcatcatttcaacaaagagaactaaggcttttctacctacatgactcaaacctatcctatctttttggtattttctatttggcaaattttatgttgttttcaagttttataagatgcaattggaaagcaaatatgcaattggaaagggaaatatgcaatctgatacaagttaccttagtgaggggagagatgtctctccccaagcttggctttcgctcagggtccttgataagaattgaacccctgaaaacggaagtacgcttgaaggtcatcgtgctgttgctgcatcatgttgttgaagttggcgaactgagcatcagcggattgttgccattcttgcgtctgagctatgtattccgtgaggttgtactgaacctcccctgcctacacatcaagggtttctattctcctagtgatttcacccaagtcccaatgagaagaacttgagctccattcacttggagatggaggcttaccacttgatctggaaggttggttgtccccccattggatgtcatgaggcgcacgccaccggtcctcactggcactcacccaagttgagactccgatgctgtggcgtggagcttgggtccatccgggtgcatcccagttggtgcccaatctgcctcatacatctgtacgggtattgaggatgatgaattctctcgttcattccttgtcatgttgcgcgtctccctgtatgctccacctgtacgagattcttctatggtctgcaagggaatggttagtttatggcagttgtacagatgataccccgcatttggcaacgggatttcatttgtacaaccggggaaaatgtaaatcaaagatccatctactccatgttttagaatatgcccttgtactagataattctcatcaatacacggacgagtggctgaaataaaagcaatttggttgctaacgacccctagcccttttgcaatccgagtaatcagagaagtgcactcaacaggaatagggaactttatactttctaaccattgccttattatacatttcataggagcaattttgatctttctaaccatggcaaacatgataatcaattcatcccccctaatgggtctcagatcacttctaggaaacaaagtcatagcaatccatttgtgcatgagcctaagtgtaggattatggatatcattcgttctaggtttcttgcaaattggggcacaagaaatgtcttccccaaacctatttttctcgaaccaagaaattcctttctggagatcgattttacaggaatcgtgaaaaccaagaagtgtacttgtcacatcccaaaacgaccctaaaatatatcctttaaattatgcctagaataattaaaatcctagtgaaagcctccaaaaattaaaatgtgcaaagttaaaagtcaaataaggcttggaggatttttgtagtatattccctaaaagcctaaaaggtgtaaataaattttagtggaattttcagagcacaaataataattatcaagaaataaacaaagttgaaaaggttttataaaaagaaaaaccctaaaaatcctccttccctatcttgggccgaatacagcccattctcctcctctctcttgtctccccgcggaccactcagaccttttccttttccctcacgcgcagacgccgacagg

SEQ ID NO: 21763 - DNA, 635 bp, Oryza sativa
cgaattcgagctcggtacctatcgaactaatacgagctaacaataagggtcgcaccaccgagtagataatgaaagaacacaagcgactcttcatagattggttgcgagacctagacttgcttgagggacaaactaccgatgaaataactatgaagcggttggcttgtggtccatcaactacagtaaattcttggcagggatatgacattaatggatactcgtttagtacaagagcccgagataataaaacatgtacacaaaatagcggtgtccgtgtggaggtaattgataaagccggggaaaaacaatcatactttgggtttattgaataaatatgggaaatcgactatgggcacacaatgcaattcaccatattcatgtgccagtgggtaaaatacccgaacggggtcaatgttgataagttcggccttactgttgttgacctagcgagtgtgggttacaaggatgactcttgggtactcgccaatcgcgtggcacaagtgttttatgtgaaagacccttcaaattttaagaaagatatagtgctacccgggaaacaaaagatattgggagtggatggggttgaagatgtcgaagaaaacaatcaatatgatagtatgccactttatagtcag

SEQ ID NO: 21764 - DNA, 11809 bp, Oryza sativa
ggtttaactataaatacaacaatatttatattagaaatcaaatgtatagcttaaaattcatgtatgcttgaatatttttgattatttctcgctataaaaacaggaagggtagatggagagctcaagcgaagtagggaggtttcggtagtgccatgttgtgcatatgtgtgggggagggcgaagtgcaggggacatgagcggtttttttcttttttttctaaatgatttaagtgaaactgatgatccagtttttctcacaacttttgttattcattttttctaatttttaatatgtaacacatggtggcttaagatttttctaaaaatatatctattggctaaaaataaggatatacctatttaagtagaacttgatggatagatggttttcttccaatctgtaaggttttatttttatttaatgcataactcgtaacgccttcagtgcacttcagaggatatacaatgatttccattgatgtaatacttattttaattttattattaggttctctttcctttttgctatttggttacaattcgaaggatcagtgtctacattcaaatgatgtatttttaattttatagagtggaatgtgggtaacatgggtcttaaaatatttatttaattataaataaaacacaattcagataaagtaaaaattggatttaacttaagaactataatcatttagctttctaattattggactgtttttttacttagttaaaaattaggagatgaaggaattaaatgagataggagaggaagagagagttgaagagaagaagattacgccgcatataattataatatttctttttatgggttatattgttttagttggtattacttttttagctaaaaattgataaatgctttattgtatgattaaaatctatctttttttacttgtcttttcctatggtatattcgcagtagatattaaaaatataaacactatattctaataacgttattttgacttattgtaatgttagaatggacgagtaattttttaaaaacattactcagagttaggttcattttgcttttatccatatagatataatttaattattctgacatcatatacgatgataaaatctatatcactatttttctataattttgtattttttcgaatgatatacaaaaataaaatattgttgcccaaattgacagatttcttctcaaagatgaattaccgtggatatgggtctttaaatgtaaaatagtctgattaaatattagttgtgtgatacttgtcttttcctatagtatattcgcagtaggtattaaaaatataaacactacaatctaataacattattttgacttattgtaatgttagaatggaggagtattttttaaaaacattagtcagagatagctcttttgcttttatccatatagatataatttaattattctataattttgtatttgttcgaatggcatacaaaattaaaaaattgttgcccaaattgacatgtttcctctcaaagatgaattaccatggacatgggtctttaaatgtaaaataatctgatcaagtattagttgtgtgaattagatgttaatgttgcttacttttagcataagttttgcttttaaactcacagaatattcattttacttttatcattatggacatagtttaattattatgaagttatatacgatgataaaatctatattattattatttcatacttttcacaattgcttgaatggcacgtaaaagtcacaaaatataaaccaaaatttcatttcttttcaaaagctaaattgtgaaatatgatcttcaactgtaaattgagttataaataatttaaagatttaacgtgtaggatcgaatcacaataactaagccaaccagaggggggtgaatggttggtatacccaaaaccgaaaaattttagccgaaataaaagttgccctcgaaattgacggaagtcagtctgaccaagattgatctgccagtctgaccgagtggatgttgccagcctgaccggtatagattacccggtctgaccgccgatgtcgcctgctgcgcctgtcgccgccgctggtctgaccgccgccttgtcgccggtccaaccgccggtgagtcatcggttagaccgccgaaacccgatgaaacacaaatcgaagaactcttaaagtagatgacgactttattacttctctatgtgtttacaaagtgccccaacagcactccttataaaaatctcgactaaactcgaaaccctaactcaaaactcaactcaattgctctcgaaagcgataccgctaagcctcacgctccccctctattttatacatgaggtaggcagcctaaagccacgaaccaaactcatactaagagtcctaaacaccttaggaaaccctctagtacaagaaagaaactttatataaccaatcgtaccaaatttggactccttccaaattcgactccgcatcccatacgtacacaatacctccatcgtataccatatagaatctccatcaaccacgtgcatcaactctagcctaagtatcccgcatgatctttgaccaccatggacgtcgtcttatccccaagccgacttccggtccatcaccgcaaatattctcccgaggtatcaagtcacctacacatgaaataaacaaagaaaccatattccgagaccaagttatctcaaacttgactcattagtagcgaacaacagtattacatacgtatagtatccatctagaagcccataatcatgacataatcacggaacaactcgaaaccgaaaccgacacagagtcggccggtcagaccgcgggctgcgccgatctgaccgcgcattacacgccggtctgaccggcaacacctgcccggtctgatcggtcacatgaaataatgaacctgtaatcacctctgaaatccacttcgtgaataaattctaaataacaaaaccaataatcttcaatgccaatttttcatcacagaataataatcaaaaacacctttgattttacataacggatcaaaaattatttatatgatgtagatgctttattgttttacacataattgttgcttttctaactaataaagcatgcaaatagaagaaggaatgggtaaaaatgtagagaaaagaattgagggaagagggggcatacatacatatattcgtttgttttttccttaaaaaaaatgaaacttatacgtactggtttaggtaggcccgggttaaggagatgattttctaaaaaaaaataatccaatagttataaataatgggtccatcaaatttaatgaaaatttgctttgtttttttctagatttcttaagtatttcagtaatttattagactgacacgtgatgaacatagtatcatttgtagaacaacacatgacaacataggagcacttttaggaagtttaatggacttttagtatataatgtatacattatccaatgttctaaagaatcgatcgggcctatcaatttaaatgaaatcaacagtgatatttatggaaatttatagagtgatacgttttatctttaaataatagaaaatcatattttaaatatcgtcatttttctccaatggtactaagtacgtatgttttttttatgctttattgatctttatagtaagtctgtgcgtaagtttatttgtttctttagatgaacagtaggtaaagcttcattgtttttttcagtcgtacgtatgtatggatacttctccactattataaaaattaaagaagttttttgccgatattttggtacgtcattcttgtttgagtcggttattaatttcgttcgtttttgaaaatattgattcttgtttgagtcactttttatgttcgttcatttttggaagtacaaaaatagttatataaaaaatatctttaaacaaactcgcatgctaacttgagatgaaagtcagactcctaattgcagctaatgattttcaaaaaaaaaaaagcgaatttccagagtaaatttcatcctagttaaaccgtataataagaataagattaaaatagccttcatccgtagcaatggacaagtattttttttctagtacagttatataattctcccatatacatatatggattaaggaattagtttttaaaataaaatacatctaatataataatataatggtttaaaatatcggatccactgctaaagtgaaaatcatcggtgagatttgacagttccacgtggcagcttaggagcgttcgtataagtgtcacatggcgatttgagagctttcatagaaaatttaatggatgatatttacgtaaatttatacaatgacagtgtcacgtggtggtctagtagtgtttgtacaagtaacacatgatggtttgagatcatttataggacgtttcatgaatgatatttacgtaaatttatagaatcgtatgttttatctttaaataatagaaactcatatttaaagatcatcaatttttttcaatggtactaagtacgtgtttacacccaaatttggcacctaggatcaaaataagaaagattgccaaaatttagaagtctatcggtttccttcgagtcggccggtctgacagccgtgtgttgggcggtcagaccgccagttgagggcctgtcagactggcggtgtgtggcctgtctgaccggcaggtccgagtccgactgtgtttcgtcaggtctcgaggtttccttgctcgggaaggcatgtttcaggtttcctttagtttctatcccaagttggacatggaggagggcctgtagagggcaagaccaacccctatataaggtacatggccagttctattgtaagaaaccaatctacaatcaatcaattcaatcgtttttcatattgcttttagttttctcttagtttgtccatctttgtcggtttgcgccgtaaaccgtccgccgccgctgcgagagtgcaacatctctttgtaggtttgtcctgaaaaccttccgttttgcccacgagacgggtaattatcttaaattggctccgctagccggtttatttgtcaaaacccatctaggtttggctctttgctagatcgaggtggttcgtgactctaggatcaccgcaaggcataaggtgttgcaatcgttgttgtcaacttatcacaaaaagttgccaacacgattttggcgacttcgctggggagatccgttcaacgtcaactcaacttcgatttcgccatgacgaaaccgccgtcatccaaggtggaggtggagccggcctatgtgataccaatcacattggatgatttcgaaggagaagaccgcaagtccatggaggagtacatcaaggagctcacacaggaggcgttgatgagggcgtctactaggactcgtcaaggtgtgatcatcaagcccaggccacgtcctaggctcgctcccaatttggtaagcaatgaagaggtaacacaatctatccaacaccaagtagcatctacaatagattcatctatgactatttttaaagatagattagatgcaacttttgaggataaatttgatgagtttttaagatttaaagtcggccctctcttggccgattttgtgggtaaaaataaagcctctagcactgctagccaagcccctatagatcaaacaaatagagaaccgatggagtggcgcacacagctggtctgaccgggcctgatggccggtctgatcgcgacttcaccgtcggtctgaccggccaaatggccggtccgactaggtattaccccggcggtcagaccgggactcaggctggtctgactgcgcctctggatatcggttagaccgggccctggaccggttagaccggcgcaataataccgattcaggggatagatccaatgactaatgctagttatttgtatcatcttagaacatttgatcctcctgtatctactactgcaactaatccccgagttcccccacgtccatacctatactaattggacactttctaggagctctcacgttaatcagaaagatctagccgttaattaatttgttgaattatcataaccgtagatgaaaatacaatctacgtgtgatgtgggccacttttaaagtctatctattgacccaacagatcataacttgagagataaatgcatctactaaaaagaagatcaccgatcctatctccttaatgagatatacgaattcggctgcacaaagaaaaaaaaagagatatatggagcagctaaataagaggtccaactcgcggcacgacggatttcgctagtgacgggggacgccctccaggagtccaggttgcccttcgttctgatcatcggcaactatttcgacttcattggcgttgacgagagacatgcgtgcacatcagaggtcaggacacactgcactgtcatctgatgtttgcttgcatgcgcacaagttctggccgggtttcagtgaggaaggcgaaaggatatccatttagtgatggctgctacctgatcaattaatcatggccacgatgcttcatctcggattaagctttgctacaggatccgggatgatgaagatttcttattagattttctgataaaaggaaaagataacatatatattgatctatgcttttccgaataaaaactggcaactaaataatatgactatagatttcaggtgttgcgatgttgttcctctaaccgaaagttcactctttcctgcatgcacggaagatttatacaccgtcatcgcttcaaggaattcaagtaggttacttacatattgtatgtgacctatttgaagtattcttgatttctaattttcgtagaataattaatgatcatgttataataagtgttaggtaatcaggtccctgaatatataattatgtttatcaataagtgtgtttacgtagttaggtttatacagagcaaaactcccatagttcacaaacgaatttgatctattctataataattttagaactgagaactcacgttaatctctattttttcaatagcaactaataattagttttccatgtatgtcttatcatgtttcaaaaactgtatgaagccttattgttgacgttcatgcagttaaatatcgtgactaattccaatttttacaattattatatatcatgaaaactgtactcatgacctattaataacgaatttcaaaaatattaaatcagaaaaaagttataattcagtctgtcaaattggaaatattaattataccacgacgaatctacaaatgagactccaacatttttttttcttaacggaacatcacaatagttacttatcaattccaaatcaataaattaaattaaaaatactaaattgagattccaacatgagaagaaaatgagtagtgaatgattccgatttttataattatcaaaatagtggaaaggctattagtaatatcccgaatgtgtacatcttgatcaacatctattagttataaatctcagaattattaaatcttaaaaaaggctatactgagactcagaccagataaaactcaatattttaaatacaaaatttacaaatattaaattaagaaataatataatttggaattaacagctgagtttcctaaataagtataaaatgctacttgggatggatcttatgtttatactttttaattttggttttttgaacagtcaatacaaaatatattgttttttctttatagctataaaaatctacaaataattttcaaaacaatatatttaaaattttaatatttaataattctaccaatgatagccgtgcatcgcacgggttggcgactagtgttcctaatgcttataatgatgttgctagggagtatcctcctgatactaggcaaggccaatataaccatattgcgtcgcaaacacaacctattaggccaccaaatacaccaccaaatcaacataggcctgataatatggaggaaataattagtgggattattatggataaattcaggattgaaactaggaatcgtgctaaggtttaccaaaagtcgtatcctgactattatgataatgtgctgtttgctgtaattatagagttcccgaatttaccaagtttagtggtgaagattgtagaaccacatgtgagcatgtaggtcaatttttagcacaatgtggtgaggctaatagtgatacttttaaattgcgcttgttttctttatctttgtccggtaccgcttttacatggtttacttctttaccggcaaatttctattcatacttgggctcaattagaacaaagatttcatgattatttctatactggagaaactgagcttaggttatgtgaagaaaaaaatataatgagcctgtcattgattatattaagagatttagggatgttataaaccgatgttatagcttgaatataactgatagagatttggctagtctttaattgctcctcttagagaaagactagatggccaacaatttcttgatgttagtcaacttttgcaaagggctctggctcaggaaagctgggttaaggataataaaaaaattgttagaccatatgagaaaaggcctaatgttaatatgattgattaccttgaggcgagtgatagtgaagataagggtgatcatgatatgtatgttgctgaatggtcatggactaacaaaaacaagccttttgtttgttctaacctaatgccgactcctcgcaaagatcggcaaagtgaggttaaatatagttttgatgtggccaagtgtgataagatctttgattatcttttacaagaaaaacaaattagattatctaaaggccatatcataccatctcaagaagaattgaaacgtcgagcttattgtaaatggcatgattctcattctcatccactaatgattgcaatgtgttttgacgacaggttcaatcggccatagatgaaggacgattgaagttcaccgatggctccaagatgaagcttgatcatgatccttttccggtgaatataattaatttcaatgacaagaaggtgttgattcggcccgagcaagccgaatctactaaggaaaaaggaataatcattggtgaatcaaggccaaagatgatagtgccaaagaagccggaggttggtgttttgaaagagaataaaagcgaagcttcgacttctaaagctcctaggaagaccaaagtgacccttgatatgcttttggagaaatatgaaaagcaaggtggtgagagagcttgcaacaatgggaaaagaccaagatcacctcctagggagcgatttggtcactcgccaagatggttgcattcacctccatatcatcattcacaagacataccatggggtccctatccaatgccgccgctgggttatccttatccttattacatgccatggggggcaacgccgccaatgttcaatcatatgcctccaatacaattcaaccaaaggtggggaggaccaaggaggccaattcatgaacatttgtcttcaccaaacaacggctggttttatggtaagagccgggccagtgaggaaaggagagaaggaaagcgcattaaagtggaggcaaggacttcagaggtaattaccatcaaagtagggtctcatgatgtaccaataccttctggagatgaagttagagagtcctcgagaaaaaaatccgaagccggtaccagctcatcgtagtcggctggtctgaccgggccttctagccggtctgaccgcagccatacggccggtctgaccgggccatcaggccggtctgactgccgacccgacaatggtccgaccgacgcctcaggccggtctgaccgcccaccgaatgttggtctgaccggcgcatctggccggtctgaccggtggtctacgtccggtctgaccgggctccaccgccggtttgataagaggtttgcaaatggcgatgtgagggcttcatcgtcatcaattagacctaatagggggtattatttacctcctggaacagatccgaaacctagttgtcacgcccaaaaatttagcccaaatcttcagactattttgtgtattaaatccctatccaggaccagccagggtacacaaaacgacaagtgatatacagttccaaacgtaaataaagcgtaaaatacttacaaaagaggcacttagtcctcgcaccgaaacaaaagcagcagcagcggaaaaaggctatcctagcggggcttcaagctccactccacaggcaaaactcaactagggtctgagccttggtcctctaacttcgtcttcagctcagaagtactacacttctgaaaagggggaataaaagcaagactgagtccaaccaccgtactcagcaagccacaccaacgatacagatgtgcaaggggatacaaggatggtttgtggctatttgcataaaggcggttgtaaaacattttattgagcaaaacagtaaaactgttgagtaattaaagtaacattaaacctccactgatcaacgctacaccacgttgaacaggcccaaccaacccacctgaactacagtgtattgggtcgatttattaagatgggactaatcacggtgaatctggtcgaccgcccataaccgccggcacggctattcgaatagctttactctgatcagaggtgtacaactgtacccacaagacacagccccacgacacgtttccgtgtgccgacatgccaccacgacatactggaaagaggccgtgacaggacccttcgcataaccccctctagccaagcacaccacacctcaggtttcacccccgtccccagcgggcaacgggcagtcccctctcgtacctaggtgaatccggaagcgacagaggccgtcgcagggcccgccccgctccatcacgcccacccttgcctggatgcgtcagctagaggtaagctacactacaagcccagccgttgcccacgctggcttgtggtaagtacgataagttcttccagggcatcccgcgaaccggtccttaactaccatgggtgcgaccagcaaaaccatgcacccacagcccaccattcagtcgcattttagttggataattacgaccatgaagcatggccagatgtctcgagcacgcagcttactctgatactaaaaaggtctaatactgtaattatcccatcaactgagctagtggtaattaagcatggctaatcatatagttctaggtaggtcacataagtaacatgagcggcgaagcagataggtaatacctggatcccatgtaattagcaaaacatgcatatttatttgtaaacggtaaaacatttataaattgggatcaacatgctcaaggggaatgtgtgacttgcctttcttcttcacttggatcttctgaactcttatccttgcgaacgcgaacttccgaaacgacggattctacacgctggcacgcaaaacgaggaaaaactctaataaaaaccaaggaaatagtacataaaaagtaaacaaacatgtagagctcaattttagatgaattttgcaagttgaatggctcaattcggagttcgaatgaattagatatgaattttagaagttttgagccatttaaatgaatttctagaattattaacgaattatgatgtaattattatttatttttccaaagaaaaagagggttgctggcgtcatcaaaggggaggggcggcgccggcaagcgggccccaccggtcaacggcacaagggggagggcggttcaccgtggaccgggtccacgcgggtggtccactgccggtccacggaaccgacggcccagatcaccctcggggtcgatcggacgggcggcggcgacctggctcggctcaaggccggtcaagcggccacggcgacggcgacggcacgcgcgaacgcgttg

SEQ ID NO: 21765 - DNA, 2618 bp, Oryza sativa
aacaagtggaagcgtaaatagttaatttattacatgggcggcgaaggaccagcacacatgaagacaaacaaaaaacagcggaagactagggcgacgaccacaggcgcttgacggcaggcacgagctagataccaaagcctacatcttataggaactcctcttctgggtttgggaaaaattgagcaagactgagtacaaccaccgtactcaacaagacacacccacgagtgcagaataaatgcaaaggagtacaatggagttataatataggggggttagggtttgcagtaaacagcattaaaagacacttagttgctcaaagctattttgttaatacgatcctagagctatacaatattattaatcaaggccgtggacccacacgaacctgccttaacccaaggcctgcgatgattcaaaccgaactagcaacccgacccagggtcccaactcgtcccaagtcaacccaggccatccattccatattttagttgttcaacaggtgttaagaatttaaaacactaacttaggtacattgctaggcttgcccataaccaaggacgcggctattcgaataggtgatactctgatcagaggtgtacatctttacccacaagacatgtcttcctcacatataaccacgtgccacataccaccacggcatacggacggaagacatgacatagtttccaacccatcctagccatagacaagagtaccgacccaaccccacctacggccggaacctccgggacaggcaggcaggattgagcccctagcagcaggacacccgccctgtgccatgacatctcgactaccgagccgcagctcgtgtagccttcatttgtcctagagatgtccatcgacccccgacttcgtccatctccatccgtgtacttttgtttataaccagactgagtcacaaactaagccttacccactagacatgtggaagtacggtattgctttgcaacagaggcccgaagaccggtccttatgtggccgaggtgctactatcaaaaccatgcaccccgagcccagcctaaaactattttgagggttttgaatagagggggaggtgtgaatccaattccacaatagtccaaccattccacaatgtccaagtgatatgagaattcccaaagtctaaggttataaaaccacctaatgttgcctaattaatcagcgaagcatctacctaagttcatactagtggaaccatgaatagagtacccactagttggggttttgtttatcctagggtgaataagctaataataacaataacaataataataaggtcataacaaaggtaaataggcatggctaaataaaacagtgataacgcgggaatttaaataaagcgataatgcattaacttaaatcaaaataattttataaactgggattcaatatgttcaaggatgatgtgacttgccttgctcgctttcccaaatgtcggcttcaacctccacgtagagcggatcttccgaagctgcagcgtctacacgaccaacggaaaggaaaaaggcttttactctaataaactccatataacaagcaggaacaaagcacaaaaatggttcttgacttcttaaggaaaaattagagacttgaacggtccaattccgagttcaaatgaccaagttatggccatttgaagtatatatgctctttaagtgaatatttgcgaatttctttatttaaattttaatttaaaaaagatttattgcgtcaacccaggggagggggcgcgcggcccgggtccacgggggggtggcgcccacgcggcagcctcacagtccacggtggaccgggcgcacccggctcgcaccggccggcgccgtgggccccacgcgtcagccacacacgaggacgcgaccgctgacggctgggccccatgcggcggccacacggcgcgcccgtaggtggccacgatggtgcagccggcgggaggcggcgcccgcgaccctatggtcgccggcggcggccataggcacggcgaagcggcggccgagagaggggaagggaagggggaaaagaggcggcggtccacggctcaccctaggtcgacggcgacgacgaaaaaggcggccggagcggaggaaggcggcggcgtggctcgggtcgatggggtcggcggcgttccagcggtcggcgagctcggtgagggggtggacggggtcgacggcggtgcggcgaagccggagaaggcgacgccgaggcgggagacagtcccggcaagcggagagggccggccggaggtcgtcggcgacggaggagagagagggcgacggcgcgagctcgtttccggcggggagacggcgcggcaaagggtggaaacgggcgaaggaggtgcggagagggtttaaatagggttggaagggggagagggcggccaggagaggaaggaaaccggccgggaggtccggccgccatcaatggcgccggcgagatttgcgggagcaaatccggccgtttgaatgcgagaaagagagggaaaaatgggggggaaagggggaggggatcacggggagtaattccccccacttaattgcacgcggggacagcgggatgcggcggattcggcggcggcggcggcgcttggtgcgagcggg

SEQ ID NO: 21766 - DNA, 1473 bp, Oryza sativa
aagggataaaaggtccaatgagttgcgaccaccaccggtatggaggcgtaaaaccatagagaaggaaaaaccggttgttgtagagaagaaggaagaacaattggttgctaaagatgagtcatctcctaaagaagacatggatatcaacatggtatgtatgttgcctatggaattttttgctatggatgaagccgaggttgctcacttttcactaggtcctaaagatgcagtttttgagaagcccgatgaatcaaaccgtcatatgaagcctctctatctcaaaggtcatattgatggaaagccggtctctaggatgcttgtggatggaggtgccactgtgaatttgatgccatactcgttgttcaagaagttggggcatggagatgatgagttgaagaagactaacatgattctcaatggcttcaatggtgaaccaacggaggcaaagggtatcttttcagcggagcttaccgtggggaacaagacgttaccaaccgctttcttcatcgtcgatgtgcaaggtaactacaatgttattttgggtcgttgttggatccatgccaattgttgtgtgccttctaccttgcatcaatgtttaattcaatgggacagcgatgatgttgaaattgtttaagcggatacatcggccgaggttgcaatggccgatgctacttttgagtggtgtcatgggaaatattcaatgctatgattttattagtatctccaatggcaaatttgtacatatatctgtaaagctggctagtgtagcatggctaagccatataaatttgtataatgagtaaagagactaatttagagtggttacaaaagagggtgcaagaatatcggtctacaaagaacgatattggtgaaactattgaagattttgatgaagtggagaagcttggacaagggtttatatcggccgatccattggaggaagtagacataggtgatggaaccaaaccaaggctgacttttgtaaacaaaaatatgagagtcgattataaggttaagataatcgagctacttaaagagtatgttgattgctttgcatgggagtaccatgagatgccgggtcttagccgtgagcatgttgagcatcggcttccaattaaaccgggttttaggccttataagcaaccacctcgtcgttttaatcctttgctatatgactgagtcaaagaggagattgatcagttgttgaaggcggggtttattaggccatgtcgttatgcggagtgggtttctagtatagtcccggtggagaagaagggcagtggtaagattagagtttgcatagattttagagatttaaataaagccactcccaaagatgaatatcttatgcctatagccgacatgatgatcaatgatgcttcgggtcataaggtgattagctttttagatggtagtgctggctataatcaaatttttatggcggaggaggatatgtacaagacggcttttagg

SEQ ID NO: 21767 - DNA, 6680 bp, Oryza sativa
ttgccaattttgataattttgctattagacatattgctaggcatgataattctagagcaaatgacttggcacaacaagcatctggctataatgtgaagaaatgattatttctgatattagaagagcaggtgcttgattttaaatctttgtgtgaaattggcaaaactagagaccaggggtggtctgaccggccacatgccgtcggtctgaccggcgaccccgagtggtctgaccggttcaatcaatttagaggccgaattaattataaattcgaacatttgtgcctaggaaacagaggaagattggaggattcatttgattcgatatttgaaagatcccacacttaaggttgatcggaaaattcggcggcaagcattcaaatacacattgcttgatgaagatttatatcgccgaaatatagatggtgtcttgttgaagtgcttagatgaagatcaatctaaagtggctatgggagaggtacatgaggaatttgtagagctcatcaatcggcccacaagatgaattggttgcttaggagagctggattttattggccaaggatgattgatgattgcttcaaatattatagaggatgttaagcttgtcaacagttcagcaatgttcaattggcgcccgccgccatgttgaatcctataatcaaaccatggtcgttccaaggttgggctttggatttcattggtcaaatttatcattcgtcattaaaggggcataggttcgtgctagttgctacagattacttcaccaagtgggctgaagctgtgccgttgaagaatacgactcatacggaggtatttgactttattttgaagcatgttatccatagattcggtattccacaaacattaactacggatcaaggtgcttcttttatatctaaggaagtgaagaattttgccgaatcctatggtattaaattgttgagttcttctccttactacgcttaggctaatggacaagccgagtcgagtaataagacattgttgaaactagtgaaaaagaagattgaggaacacccaaagaggtggcatgaagtgctttccgaaccattttgggcgcataggatatctaaatatggtgccactaaagtcactccttttgagttggtttatggtcaagaagccattttaccggttaaggtaaatcttggttctcttcgttatatcaagcaagatgatttgtgaagtgaagattataagacgttgatgggagacaaccttgatgaagtcatcgacaagcgcttgaaggctttggaagagatagagaaagagaagagggtggccaaggcgtacaacaagagggtgaaagcaaagttgtttcaagttggagacttggtttggaagacaattttgcctttggttactcgatccagagagttcggtaagtggtctcctagttgggagggtccttatcgagtatgcagcattgttcgaggaaacgcatattttttggagacacttcaaggggagtgttttcagcgagcaatcaacgggaagtacttgaagaaatacttcccgagcgtttggcaaaacgcttaaggaggtactatggccagtacttggattatcgtcctaagaccaaaacatgttctacgcttttagattcacgttgttcatcaaaaaggcaggggggcatgtgtttacacccaaatttggcacctaggattaaaatagggaaaattgccaaaatttggaagtctatcggtttccttcgagtgggccggtctgaccgccggttgagggccggtcagacaggcggtgtgtggccggtctgaccggcaggtccgagtccgactgtgtttcatcgtgtctcgaggtttacttgctcgggaaggcatgtttcgggtttcctttagtttctaccccgagttggacgtggaggagggcttgtagagggcaagactaacctctatataagggacatggccggttctattgtaagaaaccaatctacaatcaatcaatcgaatcattttttcatattgcttttagttttctcttagtttgtccatctttatcggtttgcgccgtaaaccgtctgccgccgctgcgagagtgtgatatctctttgtaggtttgtcctgaaaaccttccgttttgcccacgagatgggtagttatcttaaatcggcttcgctagcctgtttatttgtcaaaacccatctagatttagctctttgctagatcgaggtggttggtgactctaggatcactgcaaggcataaggtgctgcaatcgttgttgtcaacttatctcaaaaagttgccaacagtacgtatgtgttttttttgctttattgatctttattcatagtacgtctgtgcgtaggtttatatatttttcttcagacgaacagcaggtacgtctttgcgtacgtctgtacttctttgtttttaagtcgtacgtacgtatgtagtacttgcagttatggcagttatagttctaccgtatacatatagagattaaggaattagtttcttaaaataaaatatatcatattaggtaatttaagtgaaaatcgacgttggatttgacagtgccacgtggtagttttggagcgtttgtagaagtgccatatggcagtttaagagtgtttataaaaagtttaatgaacttttagtatataatagatagatattttttatataacaaatagattttgccttcatagcgcaagaaagcagaggtatcaagcagaaacaagaaccagagtatagttaagcttgtcgatgaatgtcatttttttttaattgtatgcccttcatgacctgatctgcagagatgggataaactcaagattgtatatgttctattgaataagaattacatgatctattatgtatatttgtgattaaagtattcttatttctcatttgagcaatatctaatcaatgattttgtataaatgttgtaaaaaatcttagacatatcctttgtttgaaatttcaaactgtacatttgacctttaattgtcagtgtatacaaacagttagtcttgttttgatgcataactccttcaattgacatatataatttatttctataataaaaaggggtattgcatattaaataaagcatcttatcatataatttttggatttctatttttgacttcttgaatacataataacatggtatttggatcttcgaaacatttttttttctgtgtttatcaccactgtgttcatatgaaaagtcaccatagcgttagcacgggcattttactagtaatataaaaagtaccagttatttagttggattaacacagtgattgcgattagcactggattaacactgtgatcagcacacgaagcaaaatcaacattatcaatggtaaaatcaggtacatattcatgtgtccattgtgcatatagaagtgcaataagaattttattgcacatctcattcattttttcaagaatgttggactgattttcaaagtgaccaatacattttaactctataccattgtttctgtctatagtaccatgcttcttagtgctatgcctattttcatatatcgttctcatattatatacagcattccattgtataacggttcatttttcattttattagtggctgccaaactgatggacaaccttcttgtggtgagcaacccatatagtctgataagctcaatctgcctcacacttcttccatggccacagaaacagctagccaggtaggataccaacattttcgtgtttaccaacattttgttcagctttcactgatatagctaatatatttgttgtcacttcctgtagatgaaagaaactgtatctgctgatgctaaaaagaaaaggtatgcttctatatactgcagagctagctaagtcatgtgtgttctttacctttcacgcacatttcctttcctattatcattgctgaatatcctttttcccttttcttcagcgctgcttcggctcctgcaaccacccgcacccctaaaatccaggcacagaagcgaacctaaactctgaaatggtactgggtatgcacctagcacccataagttcttaactcattggatgacatattattgacaaggaaactttacactaatggcatgttctatttagcactttaaatatgcaaatgaaaaaactatcagagagtgatgatgacatgtatttacaaactgtttgcatttaatttcagaagcaaactaagtataaggatgctccacccactgcaattgatcttttcaaggagtgccattgcaaaagcaagatgggttttaatgagcctgtaaagaatgttattgtgagttacttttttcttttatcttttgcaattatattttaatgagaatgaaatgtgttttgtgatttcttatcttcctgttgctaggctgtgatagaagttatcattgataatcctgcacaagaagggcaagatatgattggactttgtagatatggtcagtgatgtagaactttgttttgctatctaggatatggtggtactgttgttttgctcaccgactgaacctagtttgctctcatactgtatttggaatgtgtctggttttggatgttaactaggttgtaagatttatgttgtattggatgttcgtcgggttgtgctatatgggttgttatcgtgtttgattgttgggcatatatgggcttagcccacttattatttgatattaatataaatgaatatattatgacgggctcaaaatggtgtggtacaatgtttgggcctttatgggcttttgcaatggacttgtcacattttgcaacgtgacgaaaaattcaatgtttgtgacgtaaatgaagcgtcatctatcataagatctctagtactgccacctttagcaacgatgccatcatcgtggcaatataggggatttcctatagcatccaatatgtttcggtggcaatagaagtacccacctatagcccctgttgatatttcttacccaaattactagaaatatattttccagcaatgacgcataaatattcctggtatattatggttatagagtttatccgcaagcgcacggatataccattgtagcatttcacccgagagtattccaagggtatcatatttattttatcccgtgggaagatcatatagagagaacttgactaataatttatatattacttgtaataatcatattctaagcaggggttaaaataatccaagggtagagtgacacacaagcagtagttactcattctcataatatattatctaagctaagtggaaagaaaagagaaagataatctattcctatacttctaatatacatagtatacatacattctagctaacctatatactagctaataccctctattcgatgccctcctggtactccgagaagccacccctaacagccgagttccttacgacagcccaccatgaccatacaaccggggctaaatacggaggaataccctccccaggaaattaacttaggattatatacacgcgcggaggaatacccgtactgagctgtcaccatcagcggcccacctctcatccgcagcatataaccccaaataatgatatcccgtaatctagacaccatgtctaaactaccagatactactctaatatcatcgtaatgacatagagtaattgcataagcaaacattatacccgcaccaaagcatctcccagataagctagccgtatatttagtataacatgaacataatgtaaagtaggcattcatatactcggaaagtatttcaataccataaatgtatatagaagagtattctaataaaattacaaagcttagaaaagaggaaaggaaagctactagagccatacccgaactcttccgaagacttccggactcctgatttctactctattcctattccactagctagatactactaaactaaacttgagagaatatgagagagctcttgcttgaggtgtgtgagtgaagttagaaggtcagggtttatatagccttccaatgacggttgtgatggttggaatggtcggaaataccctccaaccgtcattgggagctaatccacaccgtccagaagaaaccctgcatccagcggcccaaccagcccatggtttggctggcggcctcctctgttgttagacatgtgaattttggcctagtttgtcgtgtcaattctaagttcttggcccattcatatataagtctggttctcgacatcgtccgatcgatttatcgtttgagttgatgtcgattctcctccactttatggttattctctgtaaaaaggttagtaaacctaatactagtggaatattattattctaacatgtatatgtattgcaagtatcaatagttctcctttattttggtaatattgacggtcgaaactgatcgataatgaccgtcaacagccactaaaactttaatcgtggcaatagcagtgcccacttgcagcaataacaaaaaaaatatagtggcgatagaagtggccacctatagccaccaaaccaataagcgtagcaataccgatgcccacctatagcaaccgaaaaaattcaagtggcaatagaggtgcacacttgtagcaaccaaacaattctagtggcaatataggtacccacttgtagcaaccaaatattttgagtggcaatagagggtccaactatagcaagagacatgtgtagcgtggcaatagtgggatctatc

SEQ ID NO: 21768 - DNA, 815 bp, Oryza sativa
tgtgctaatgtttctaagcatggctaagcaatcatatctaatatctagctgaaccactatatatagcccaactagtcaaattataataacccaaggtatcaaggaataaagtaatcaagaacaaaagggctataacaaacaataggttaattccacccaatgacatttgaaaataaatgcaatagttgaatagaaacaatagctttaaacgtgatcaacatgctcaaagggttgtttgggatctgtgtgacttgccttactggccttggaactcttcaaaatcctctcctgcaaactcagactctccgaaaacgtcggaacctaaacagaaaagagcaaaatcaccaaaacagaacacaaaccagcatgaacagtacatgtggatattttcaacatgtagatctcaattttagaaaaatttagagacttgaaccaactaaatccgagctaagatgaattagttatgaatttttaaagattaaatcggattaaaacacttatatggattttaattgaattatgacgcaataatgaattatttttaaaaaggaaaagggaattattgcgtcagcgagtagggttcgcggtggaccgagtgcacggcggcagctcacggaaacgaacggccgagatcgatcctatccacaacgaacggccaagatctaacggtctacgaccggtctacgacggacggcaacgatgacgtcggcaatgacgtcatcaccggcggcggctcgggcggcaagctcgccggcgaacaacggcgcgacgacgcgaacgaagaacacaactcgtagagggcaacgtggcgaact

SEQ ID NO: 21769 - DNA, 1136 bp, Oryza sativa
atgcattaggactttctcaaaaggcatatatagaaaaggtgttgaagaaattcaacaagtacagatgcgatgcgacacctgctcctatagtgaaaggcgaaaagtatggggcatcccaatgtcccagaaattagtatgagctcaatgaagggaaaacaaagccatatgcgtcagctataggaagcctacagtacgcgaaagtgtgcacacgatctgacttggcatttgttacctggttacttggcagatttcagagtaatccaggcccagagcactggaaattggtaaagaaagtcttgcgttatttgcaaggaacaaaaggcctcatgctgtcttacagaagatcagaatcactccagatagtggggtattcagattttgactttgaaaagataatacaaagtcaacatcgggatacgtgtttaccttggcaggaggagctatttcatagaaaagctcaaaacagactatcactgcagggtctactatgtatgccgagtttatagcatgctatgaggcaaatgaggcaacggggcaggtgaactggctaaagaagttcatacccggtttaaaggtggttgacagtattaagaaaccactaaagttatactgcgataacaaacccgcggtaatgtatgctcacaacaatcagtcaagtggtgctgccaaacacattgacataaagtactatgttgtgaaggacaaagtctgggatcaaacaatcagtctcgagcacattagaacagaaaggatgctcgcggatccgctcacgaaaggcctaccacccaacatgttcaaggaacatgtagctggcatgggtttaagggaagccttatgaatcctggactacagggcccaaaagtaaaagtatctgtttctgaatagagatatgtatagtggctgtcgaatccatcggtgattgaccgtgacgatgaaacatgctctatttacaaatctgtgatggaatagaaaaagctaaaagaaatagtgagatcaagggggagaatgttagatagatctcccatccgtcgggcccaacggcacaacggaccttgaccgcgccctgttcgggggcggccagtccaatagctggtgggcccccgtcacactgagcgccatataaaaggggtggaggt

SEQ ID NO: 21770 - DNA, 708 bp, Oryza sativa
gatcattcttcggcgcaaagatcatcggggcgattctgaaagaaaatccagatcctaattctggtgtcggttcttcagagagatattgggggcctgtcattgttgggtgatggacttggctacattgctgatttagtggaaattttgctgccaagtcgcctatccgtgaaggaggtcttcgtctccaagaactcattgtcctctgagacagagttggctaggctgcagggtctgtgcttgccatgtcctagctctgcccctctagccactcatagcagtgagctcagcttagcaaaagcaaccagctatgaaagagtgttgctgtgcaaggcagtgttgccattctactccttgtactacactgctaagtgtgctgtggactctgagactgttactcaaagtttagtgttgtttagttcatttatagggttgcatcttattgcctaattcaaaaatttctgttttgttccatgtttgatgtaaccagtgctcttctcttctatacaagtactaattgaacttcacagttctctctttgttgcatcttgcagacttttcgcatgacgcttttcttttattcttgctatgctgttcgccctttcttgtccatatattttatttttaattatttatatagtttttgagtagattacaatactttggtagtattgctcctttcattttgagatgtttaaggggtgctcggct

SEQ ID NO: 21771 - DNA, 539 bp, Oryza sativa
ccgccatactcaccggtgaggatccccccctcctccctcttcccctctctctcatttgcgccgcctctctccacgcgcttgccgtcgccttcggtcgacgccgccgtcctgtaccccgtctgccgtcgcttcccgcgccgccgattgccgtcgccggcgaccgtgcgcgtcgccgccggttgccatggccggccggccggatatgaagccgagctgagccgtgcctagccgccgccgtgccgtccgatcggcctcccggccgatccggaccgtcggtcccgtggaccggcggtggaccacccgcgtggtcccggtccacggtagaccggccaccttgagccactgcccgtggggccatatgccggcgcccccttcctctcccctttgagccgctgacccgtgggccccgcctgtcggcgccccctggatgacgtcagccctggatattattgcgcaataattaattaaggactttttctttattagtaaaaacacaatttatcttctaaaatacataagtaattcatccgagctccgtt

SEQ ID NO: 21772 - DNA, 1525 bp, Oryza sativa
ttcaaatatcgaatcaaatgaatcctccaatcttcctctgtttcctaggcacaaatgttcgaatttataattaattcggcctctaaattgattgaaccggtcagaccactcggggtcgccggtcagaccgacggcatgtggccggtcagaccacccctggtctctagttttgccaatttcacacaaagatttaaaatcaagcacctgctcttctaatatcagaaataatcatttcttcacattatagccagatgcttgttgtgccaagtcatttgctctagaattatcatgcctagcaatatgtctaatagcaaaattatcaaaattggcaataatatccaaacatgaatcgaggtacttatttagtgatctgtccaagcatttataaactccggcgacttgttgcaccaccaattccgaatcaccaaaagctttcacgtactaggcaaaactacccctatgccttgaccttctttgcaagaagaaccatcaaaataaatcctccaaggtataacttcaactaggcaaatctcttcctcataagcaatatctacatgatggtccactataaaatcacatacaatttggcctttcatagattttaatggttcataagccaaataatattctatcaaagcatatgcccgcttgccaattctcccacttagaattggcctttgcaacatgtgtttaataacatcggcttgacaagcaactatgcatgtactagataacaaataatgcctcaatttggtacaagcatagtataagcataaacaaagtctctcaataaagacataccttgtttcgacatctaaaagacggcggctcaaatatgtaatgatatattccttgccatcttcctcttgcgtcaaaacggcaccaatgactttgtcttcggaggcaatatataaccgaaaaggttttccggctttaggcgctcgcacaacgggtaaagtagacaaatacctcttcaactcctcaaacgcctcttgttgttttggctcccaagtaaaatcggcttcttttttcaagagaagtataggaacaaaagcatcgattttacctgctaggttagaaataaatcatctcaaataattcaccttacctagcaacttttgaacttccttcttgcatgtcggcgctttgaaatcacgaattttttctatcttcttaggattgatctcaactcctctctcatgcaccatgaatcctaagaacttccccgccgacacaccaaaagcacatttaagtgggttcatcttcaaaccataccggcgcatcctctcaaaagctaatctcaaattggctatgtgtcattccataccatccgatttgacaacaacatcatcaatatagatcactaagataatacctagcaaatcatgaaatatcaaattcattgccctttgatatgttgcactgacgttcttcaatccaaaagtcatgacaacccactcaaacaaacccacaaattccgggcacctaaaagccgtcttgtacatatcctcctccgccataaaaa

SEQ ID NO: 21773 - DNA, 5241 bp, Oryza sativa
tatgaactcttcattatatgttctcccagggatagcaatggctgtagcggcctcaagagtattcccggagcgtccaatgggaacgtgcaatctgcagggtgtattctccttgaggtcatcgaaggggtaatctggctcaggttctttggtttcggggcgaggtaaaagcatgtgcttgacgcagaaatccatcatttgcctttgaaaatccgcagccccatcatctctaagtttatccttgtacgcatcacgcttcttgtgggggtcatgtttgaacccttccttccaactcatcttggacgacacacctcgaaccctacccccatgctcaggagtacccaacaccgtacttagcacatctttctccctcttaggcttgaaaaatcctttcttctgtgaactggataaattctctattttatcggcaacaccctgcagctccggatcttgaaacgatactttgccttcattcgtgatctttggagttcaagctcttacccaattccttgatctctgtgtccattcctccattggtaccggaagccccgccttcctcatttcctcctcctcttttgtccactgctccacctttggtgcgtatcccgtggagcctaagtgatgaggaaatttgtatttcttggccaactctgaatacttttggctccttcgaatttcttccggggagtttttcaacgtcagaaagtcctcccactgtttcggggttatgttggcatacgtcgaaaacggtgtacgtcccgtcttcacaaatttcttgttcaaggtggttttccaaccatgccaagacttggccattgtttgcagagcacaattcctcactgctgcctctaatccatccggggactggaagattttctttaactctttccataggacttccttatccctattcgatacatgatcccagtccttgaccctgatggggatcttttcccttactattatgccgcactgtgaactgaatttcgcatgtgctgtcttagaggcgagcggctctccttttggcgaaacatgggtaacaacatggaacccttcatcccttctattcacgcttctctcgcccttccttttctttgcctttgctgaccgctcgcttttctttaagccggttgtgttagctggtacctcgtcgtctttcgacggatcttttttcttcggctgcccttttgatcgccgtggcgccgtttcctacgagaaggtatatatcaaagtttcgaattagctcgggctaatagttatcatggtgaactgtttacatattaagtttatttaccccttctatagggggaatgtagtccttgtcgccttcttcaccgttgccctttttccttctcttcgggcttgggctttgacaaggatcgcttggcaatgagtactcattgtcttcatcagctacgtcgctgtcggaactatcttccggtgggaccgttggttctggagcaaccacaacagcaagcgactgctcttcctcccctaaactcttctcttcagtccctttattactatcggccatcgtttcaaacttctaacataaaaaataaactgtatattaacaataggccatatattaacactcagcaaaaatagtttaaaaaatttataagtactgtactatgacatattgcaaacatatcctccacattttaaattactcaaattagtacaaacaactttgtataaaatttgaaatgttattattaagtagtgcactaattcacaataacatttcctcaacatgttgtttaaataaaaaataaattgtatattaacaatatacaatatgcacaaatttaagtactgtactagtttgtgtacataattgcgaaatgttattaattagtacaaactaatttgctaaattaattagtacaaacatatttgtacaaaatttgatttgttattattaagtagtgcactaattcccaattacatttcctcgacatgttgtttaaaaaaaattaaaaaggcaaacatatcctccacattttataaaaaaaaattaacatacccttgcacatgttattaaacaaatttgacaaattcacatatcctgcaaaatagaacataccctcccaatttcattcacatatcacccacattcccaaattcacattcacaatcaacatataacccctcattcacatttctcccacccctcattcccattcacacccacatgcacacacatatatacctctcacacccacatgcacacacatataaaaagaaacacccacatgcacacacgtctgtggacgacgaatggccgacgacgagcttcggtcgtggacgacgaacgaaaggccgacaacgaggttcggccatggatgacgaccagccgatgaagccgttcggccgaggacgtcttcactcgtgtacgatgaaaggccgatgaagccgttcggccgtgagactgctactgcgagagagagagagagatggtggcggcggccgtggagcggccggcggcggtggagagaccggcggcgtggtggaggggccgggggggggagcggccggcggcggttgatgggccggcggcggcgtagcggtggagcggcggcagaggcgcgcggtcggtggagcacggtggtggagcgtccggcggcggcgatgcggccggcagcgggagcggttggtggtaaagctggatcgacggctagcggcgcggtggagcgcgcgcccggtgcgagctcgaaggtcggcggcgcgcggaggacgacggtcggagggtgaaggtcgcaggcgggcggcggcggaggacgggggaggcgaaaaaatttggcagcctgacggtgccaaaatttctagggttcccgcctggacttagaaattttggtgccgcgagcttgtccttctatagggaaacgatcttcgtaggcggacggtccgcctgcgaagatgtaaaccctattcggcataactatcttcgtaggcggaccgcccgcctgcgaagatttttacagtgttgagtatatttatttcataataattattaattaatttttgtgatttgaaattgtctacagtagttttaataaaaatggtaattgtacatacaaatagacaaaccttaggactactacttttcaaatgtaaatattacttcaatgtttgaaacattaatattactactttaaaaaaaacatatagtagcaattttttatgtggtaagtgaacataaaaaattgctcgggctaaatttttaagcctcttttaaataaaacttttaaaatataaaaaaatgtaaatgttaccctacaaatggtaattgcacataaaaaatagtacaaactaatatgcaaaatgttgagtgcaaatgttcgtcaatttgcgatataatcacacatcaccttatataccactattacataactactaacttcttagatgcttacatgcgactcaacaatcattaccctttaacattttttcccacaccgtccgtgcgcatgtaaggcttcatggtcttctaagtagatgtctcaacattcttaatcttctgtacaaactgactataaagtggcatactatcatattgattgtaatcttcgacatcttcaaccccatccactcccaatatcttttgtttcccgggtagcactatatctttcttaaaatttgaagggtctttcacataaaacacttgtgccacgcgattggcgagtacccaagagtcatccttgtaacccacactcgctaggtcaacaacagtaaggccgaacttatcaacattgaccccgttcgggtattttacccactggcacatgaatatggtgaattgcattgtgtgcccatagtcgatttcccatatttattcaataaacccaaagtatgattgtttttccccggctttatcaattacctccacacggacaccgctattttgtgtacatgttttattatctcgggctcttgtactaaacgagtatccattaatgtcatatccctgccaagaatttactgtagttgatggaccacaagccaaccgcttcatagttatttcatcggtagtttgtccctcaagcaagtctaggtctcgcaaccaatctatgaagagtcgcttgtgttctttcattatctactcggtggtgcgacccttattgttagctcgtattagttcgatatgttgttcgatgtaaggctcaacgatagcaaactgatgaaggacgctgaagtgagcttcttggaatgatttgtgatcatgggtgatgaatctcttctttcctatcgttcccttgccactcaatctgccctcgtgtcggggcacaggtactccaattgcatatccatctttgaggtaatcgatacagcactcgacaacctcttcagtattataaccctcaaccattgatccttctggatgtgcacgatttcgaatataacccttcaaaaccaccatgtaacgctcgtatgaccacatttgatggaggtacaataagccaagggcaaccatctgcggcactatgtgaacaatgaagtgctccatcatatcaaaaaatgacagagggaaacacatctcaagttggcactgtgtctcttgtgcgaatgcacggagacttcctaactctttgagactaatgaccttctgtgacactgcgttgaaaaagtagcacaatcttgtgatagcaacctttaaatgctccggttttatggcctttattgcaattgcaagaaacacagtgagcaagacatgacagtcgtgtgaattataaccagatactgacaaatctttcatggaaactagtcgactgatgtttgatgagaaacctatgggcactctgacatcacggagtgacttgcaaaatgacttcttcaccgcaggagttagtgtgaaacaggccggtggaagatatactttgccattcttctctccttctttagggtgtaactcttccctaattcccatctcgactaggaccatccttgattgcagaacatctttagtcttcttcggcatgtccaacaatgttccaactatgttgtcaaacacattcttttctagatgcataacatttatggcatgccgaacctccagatctttccagtacgggaggtacttaaagaatatggaatgcttcttgaatgggggagggagtttatcatctggcttcgaactatcatcttacttcttactatcccctggtttcatagttttctcgggtttcttgcgctttgtcccctttgatggtttcttagtcacttttccaaactcgcaaacaa

SEQ ID NO: 21774 - DNA, 9406 bp, Oryza sativa
ataccgtttaggaagcgtgcgcatgtgaaaccgagagggagtgagttggattacggaagtatcggacacagcccagggtactgcggcaccagatcaattaagcttgacgccgtggcaatgttggctcgtggaggcttgcttcccggcccgtgtcccatctactgctcccagtgtcccatctacagctgagccctgaagtttcatactgtgctggcgtgtgaaaaagcacacaagagctctaacgatggtgtcgagctgtgaaaacaagctaccatgatcaagacgttttccagatacagctcattcctaggcctcaatttcacacatggtactagacacgtagttttggcatcgaattggtcttgctcgatcatctccgcgatgttaatttgtgtgcatggcgtatgggacgagtgataaactgatcatgttgagagggagcggaagatgggatatatatagatacatgggtaggtgaactagtgaatatggctatgtgaacgactgatcgttgatgcatcacataaatgagcttctggaaaaaaagatgtcttccatcacaacattaatttgtccttacaggatttgtacagaaaagatgtttcttcccatgaaaaaaaaagactaatattatcgatagaacatggaaaatctatattaatggcataatatatgcaaaatccaaaaataaattggtggagacggagctaaagctgaagctagagccgtctctgccaatgtcaatccatgctggtgctgccatctctattgtcacatgacttttcatgcctgcgtcaattgtctgtatgcccaggatttggttggaatctattgctgaattcctgtacccgttgatctattttgatcactgtcgatgcaatactcacgctttgatcaattgtttttgagttctcgatccctgctaggcaatcattttttttttttgaaaatgcatgtttcactggtaatccatttcccaacggctagattaccagggatttccattccactggcatctttctagacaacgaaaattatagttacactttaattacgacggtagagatattgagaattcccaagccgtctctcagtctgtaagttgaaattggacctccattattaaaattatttccctccaatgtgatccctatgcatagcaatgaaattaactatataagttaccatagttcataatggacatacactcatacaacttccattatctgcattaatgggataaattgtctgcatgaaggaatccttatcgagtgagggtctgatggagtgcacaccacatggcatgagttgcaggcttgtctccttaacccattgtaacttataaaaaacagataaaatttcaagattaaacaaattacattaattgagtgtcactcttagccaatgtgtgcacgtgggcgcccctgcccatggcactgaggcaccgcttcaagagattgatgcaacaactacatgagctcgatgtcttagaggttcaatcccaggtccagcacactgaggagccctggaaggtcactaagcaggcacgcgaaacaacacaaacgaagtgaaaccaccatagcaagctgtgcagataaactatcacggtgaagacgttttcctcatacaactcattcctagccgacctttatttttttcacttatactcatgtcgcttttgcatcactcggtatgagactgtgaatgtatgatcatcatgttgagagggagtggaaggtggatatatatatatagatatatgtgaacacatggttaattaggtgaatcggtgaagggtgcgcagctcaactggttaggtttttgtggcggaaccagattcaaatcctagattttacatgtgtgctcgtatttacggctaattattctttcagtggttcaaatcctagatgttatatgtgtgctcgtatttacggctaattattctttcagtggtaagcaacgtatccgttgacaacacttgtagtgacttggtcaatctcaagatatgccggcccaatttttcagaggtactcatatagatagggtgaacatgtgtgcgttcatatgggtgagcgggcacctgcgtttgtattgtgtttctattaaaaaaagtgaaccattgaatatggttatgtgattgtgcatggatgacataaatatatataatcagcttcattgaaaaaggttgcgtatgtccatcactgcattaatcgctttttcgtggctaacacaaaatcacctaatgatttgcggtgtaatcaacagagtcgccaaaatcgatagatcaaaacctgactttgagaataattcactttcgtagaataacacgactaatttacaagtaaattagcaaagataaatattgtacttacacgatgacgaacgactagtttcggagcaaattagcaaaggataacctcctcactttcgtggagaaacacgaccgtttttcagcgcaaaacagtaaagattaactaaattctagggttgtcagaactcagccgtaaaaacaaaatagaaaataacaaaatagtagattgataatttttgggggttctcaatctaatcagcaatgcgctatatatatagcagtctggtctttggtgtcctatccaaataataggaatattaacatatctgtaaaatacgttgcctaccgcgtgaagatccgcctggcgttttttggtcttcatcctggatgcagttttaccaatccggttgtattctctgcacacaaattccagaccatgtcttctgctacgttctcatcgtctcgtgcgatcagccggtcagatgtaaccaacacaattcgtcgtcaaccaccactgccgctccggccgcatataatctacttgcacacaactgcataccatctacttgcatctccatcgaggcgtcaactccaggcaaggcatcgactgcacctttgcatgcacacaacactgatgcgctccatctccaagcagagtcaactgctgcaataacttagtgatttgcaaacacaatcttccagtgcattactgattcctgcacctgcacccacacccacactaaatttgacctttcaaggaaaccactcaaaaatacaccagctattcaaaataatctgacctactaaaataaaactaactctttgccaaattatgacacaaacagctacattcttacatataagatatttcctcccatggaaaaattcgcactattatcgatagaacatggaaagtgtgtattatatatgtcataatgtttgcacaaaatgtaaaaataaatgaaccaaatatattctaaaaaaatattttcgtgagtaaaaaatcttgcaacagtaattaaactaagataaaaaagaaaccccaaaaatgtaaagaataatgatatttgtaacaccagaatatattgtaaccagtaaaatatactcaaggtacgtaaacttaggtgatgggtgtaaacaagtagaacaacttgtgtatttagtgagaatgacgtatgcaaaatcagagaacttgtgtattctgtaatatatgcaaaatctaaaaataaattaaacggtttaatgctgcaaattattaaacttgccaagaacagtaattaaataatgcaaaacgttaaataattgtgaatacacacataaacaataccatgtataataatggaatatgactattttgctgtaaaacataggttccttgaaataaaatgcaacaaatggtgtttgtgttacacagatgcctaaaaacctcagttcttacaaaatttacacaaaacataaattttatggcccgtgcgatgtacaggtcattgactagataaccctaacaacaatacctaccaaaccacatgttaaaaggattagtccattttattcctctcaattgttgtgtttgtctaaaatacaaccctcaactataaaatcggatattgaaccctctcaactctcaaatcatttaaattcactccctcagagcaaacataggtgacactttcctacatgatgcttaggtggcatctactcagcaaaacgtgttaaaataaactaggacccacttgtcatcctcctctctcttttccgcccctagatccccaagctgtcccctttctctccctctctcacttgctcggatcggagatcgctctcatggaaaatgcagttgctgcagggaggagcccgatggcggaagcactcagaggttgaggtggtggcgagcacttatatttttagtctcactaatagcactaaaatttagtactattgatgaacaccttaaacaaattatgtttactctatacaataaataaactcaagacacaaaagaaaattttttttatcaccttcatttctttcactcattccctaaaggatgccaagtgtagatctcaactggctacattgtagtaattatataggagtattcattattcagttaaggtggtccgagtaagaggttatcattgacaatagagcttaactggcctacttgctgataaaattatgctccacactcatcttgaggagcacgactataataatgtgggacccatgaatcaaggcactagagaaaactccttagcggctaagttggcttcacccgatcgtcaaaggagaattcatataaaagtttaattattttatcctattaattggtagaagcggtatttttaaatatttatatataaatttggacgcctgtgagacatgggcacttggtatgatgtggagattatcttcttatggtattaatgatgtatagggtttatttttgcatacagctgcaattccatctattaaaaagacactcatatttcaagacaataataataagttgtggtgaatgatgaatttatatataaccaggataaagtgatttttggttggatatgattgctattctgatcatttagtatatatcaaaatctatggtctatttcttatagatatggcttcttttagtattccttttatagacaactagaaaggaagcccgtgcagatgcacaggcatcttatttattgattatataaataatactaagagaattaagtcatatctcaccatatatatataacaaattatagattttgcctcgtagtaataaaaaattatgttgtgaaatagaccgtagactttaatataaatgataagaatgtctcttagatttaatcaaaattcacttttgtccaggtaagtgtaaactctcctattatcaccattacttattatcattgttcttaaaacatagatatgattttaataaatggaactccatctaaaccaccaaaataagtctaatacatcattaatacataaaactttatttcaattatttacctaaatgtttatgccaacacttatttctaaatctacggataagtattctaaaactaactcttctattggttattaggatagcaccgttaaaaaatagacatgcccctctaatggggggaaccatcaagattccttcaagcatgggtcgacatagtcgtgcctctcacagcctcacgaccattgtggagcacaattttaattaatcctagttcactatcgacacccttaaagactattgcaccagtaagtaggaagttaaacactattatcaatggtggcctccactgagcctgcctcaagtcaaccatatgtgtgccccatgctatagttgtggtatccatgctcggtgccctctagggaaacaaagagaagatggatatgatgcaaatagttatttggttcttcccataaaatatagtttctttatgttttgtttagacacaattttgtttatggtgttaatcaaaactgcttaatttttatggtacaaatacaatgtcatctttagaaatgagtgaagttgatcactaaaaatatatatagctaaacaaacacgtgaccgtgacaatgttcagattattatatcattgtttatattttgacaaagatctatattttagcatcttgtttgttttcatcacctattgtccataattgcatgagacacctttactaattctaaaattgtatttatttcccaaaattatttataataactaatttgttgaggtgcacttatagttatgtcactgtggtttatggcattacattcatcaattatcacttatgaccattatattataattcctctactataagagaaaatatcatgaatagtttcatgctcatgttataggattgttcatttgttatcaaacctatttggcaaagaaaaaacgtatatgaccataattcttgtgatagattaaggggtcgtattatagcaagatcattgcctgagcataccaatccaatagttatgaaaaataaaaataaactttgagaatctcaatctcacacaaacaaaaattaaatcagatataattaaaaaacataatgttgtttcatttttcatgcatgtagatttcagttagtgttatataattgttaagtgatatttgaccataaattatgatgtgaaattattttgaagattatcatgagattaattattatatgccacctaaattatttaaaaaagtattatgatattgcttattatatgttagctccaggtgctataatgtatttagttataatataactattatatgttatcaagatttgaatacacctgattataagttgactatagaatttaaaaataatctaaaaaactttgtgtgtaaacacatttaatttgttttttatatttatctagtttaacttgcatttttatttttggagtaataaattttattttatggtatagaaaatcctatttttaaaatcatctatattttttcgatggttctaccaacttatattagtattatttgggctttatagctttattatcatgtgttcatatgtttctttgcttttttcaatcgaacattgctaaatggtttctctcgtatgcatgagacgttgaacacatgatattatctatatatgcaaaatatatagaccaacttatattatcgatagaacattgaaaatgtgtattaatggcataaaatatatgcaaaatctaaaaataaatcagtggagacagagctgaagctggagccgtctccgccaatttcaatccatgctggtgctgccatctctattgtcacatgacttttcatgccagcctcaattgtcggtatgcccatgatttggttagaatctgttgctgaattttagtacccgttgatctatttttatcattatcaatgcaatactcacgctttgacgaattgattttgagttctccgtcattgctaggcaatcattttttatttttttttgaaaatgcatgtttcgctggtaatccatttcccaaacggccagtttaccagggatttccattccactggtatctttgtagataacgaaaatcacagttgcactttaattactacggtaagatatacagaattcccaagcagtccctcagtctttaagttgaaattggatctccattactaaaatcataacccccccccccccaatgtgatccctatgcatagcaatgaaattaaccatataagttggcacagttcaaaatggacatacactcatacagcttccattatctgcattaatgggacaaattgtctgcatcaaggaatcctgatcgagtgagggtctagtggggtgcacaccacatggcttgagttgtaggcttgtcaccttaaccccttttaattaattaaaagaacagataaaatttcaagattaaacaaattacatcaattaagtgtaacttttagcgtacagctacgtgacctcgagccctccatgtcttacaggttgcaatcctatgctcagttcactgatgaggcctggaaggtcactaagcaggcgcacgaaacagcacaaacgaggtgaaaccaccatagcaagctgtgcagaaaaactatcacggtgaagacgttttcctcatacaactcattcctaggccggcctcttttttttcaacttatactcttgtcgctttggcatcactcggtatgagaatgtgaatgtactgatgatcatgttgagagggagtggatagtggatatatatagatatatgcgtccacaggtgtaccatcgaaggatgcgtagcttaactggtttggttacctgtggttgaacaagtccacccatgttcaaatccaaaatttaacatgggtactcgtatttacggttaattatgtccatcattgcataatttgtacttgctagattcctaacaataatacgtacccaaaccatgggtacttgcttacgtggtgcttaggttgcatctactcagcaaaacatgttaaaaaaaaactaggacccacttaggggtggatagcgagccagctcggctcggctcggtctagctcgttaggataacgaactggctcggctcggctcggttcattatcctaacgagctagaaaccaagctcggctcggctcgtttgaaagcttgagctggctcgttcggcttgcgagccaaaccaacaacccagctccatggcagactcgcagtaagcagcggcgtgcatggcgagatggcgggtggcggcggcgcagagagtggcgggcggtggcggcagagagtgcttggtgcggtgggcggtggtgctcccgcggcggcggcgccgatggccatggggttggcggcgttgagttccttcggtggacggtgactgaggagtggccggatgcggcggcggaggccggtaggtggctggtggcggcggtggcggctggcggctggcgcaggagcgtggcggcagcgcttggcggtggtggctggcgggtgacggttggtggcggcgcttggcggtggcggttggcgggtggtggctggtggcggggaggatgagaacgagagaaggggattgatcggaattggccacaccagatcgggatcgggatcagtcactagtgttttttgctcccgagttgggctgttgggcctccattctctgccaaaatccaattccaaaggcccacagctcatgtgccctggctcattaaggcttgcgagcggctcgcgatccagcttgagctggctcgttatctctcagctcgttaggaaaatcaaacgagccgagtcaagcttgtcacgagccgagcgagctaacgagccacaagcttcctgtccacccctagacccacttgtcacccacctctctcatttcctcccctagatccccgagctgtcccttttctctccctctctcgcatgctcggatcgaagatcgctcttgtggcaaatgaagttgcagtagtgacaacggagggagaagccggcggagaggagggatggaccctcaaggtggagcccgtggcggaagcacttggaggttgaggtgggggcaagcactgatagcccaaggtggtggctgagcacaagtaatccaacagtgagctcgaggtggtggagctcg

SEQ ID NO: 21775 - DNA, 11104 bp, Oryza sativa
ggcaatgggtgctgagctcactgacctagtgcaaagttctagcttgagtgaggatccaatccgatccgctccgaatcagtccgaagtgaggatatgaaaagggtttgtagatatccgacggatatggattcggttgtgaatatgtagccggatgtggtattggtaatatccggtagatgtggattatccgatagactgttttgtagataatccggtttttatttgactatgcgaccactctattggcactacttaacatcagctagcaaattgtgacttattagttctagtattttatttgtctatacaattggacattatttatggacctgcaatagggctatgtgtcatatgatattatgatatgtgatgtcctgtgtgaattaagtgcttcttttggacaataaacatgataatcagttaatgtgatattgtgatttgtgctgtcatttgtcccatgttgtagatgtgtcatgtgattttattattaagggcttgtgaaatattatatcattattgtcttgatgcatgttgaattgatgactgaatgttatattggtttaatatacatgccaaatctaatgatttgaatctgtttcccagccaagtccgcaccggcttcacaccctttccgacatgcagaacaatccatttcgcatccgcacccgctccgaatctgctttaataatatggtttaggatatagtatgataactatccatccaaattctatccatttcgatgaaacagagaggagaggaggaagaagtggcattgactgccgcacaaacgaaaccacttcgatactgtgaaaaccacctgtttcttcgttgagaggggttgaataccctgttttggagttgaagggtgttagcagagagatacaataattgaggagggtaaaatgtacctattcctattcccatgtaaaatgctgcattgtcactaccatgcctcctcatgccaccacccatgttataaagaaaaacctttaattataaaacttttcaagattatttttacaatgataaactaaaggactctttcggactaaatcctgcgcacacttgttggtttggcaactccacatctcagagggaatttcatgaggtaccaagaggtaccgaaatttccaaagtgaatttcggtaacttctaatacatacaaggatccaaattttagactagaaatagaaaatgtgatatgcctcttaggttctcctcgaggatcataaaatcactcatcttactttgggacattcttacccctgtccatgccatgtgacaccaaatcgatcccagtgcatactaagcccaacagcagcatcgagatcatcatgcctgattgcctgacatcgcacccaagaggtggtctttcctatttggagtattttggtaggtatctcactgtcacatcacatatatacatttgatttgggcggctaattaacgtcgttgtactgtagttgttgttacaatacacaagcaggtggactctctctgagacactgcacattctgaacaattatcatcccaaaaaccacttgatttctttgcacactctctcgatcgatcgcttcttcacctgcgcttcctcctccccttcgcgtagctcacactggtacgcgggacgaagctcggaatgcagcaatggctccactgctcgccgttgccggcgccgcaggaggagcccgtccgggagatggcgcaagcagggccgtcgtagcaggtgaacgattcttgcctctcccggaggaggtcggcgagtcgcattgtcgtcgccggcgacggcggcgttggctgcgtctcctgcggtggtggtggcggcctcagcggctcggccttcaagatggcacccagtgtgggcagcttgcgaggttcaagttgtatcgcatggttgctggagttcgttctgaatgatcttgcaggggtgccatctgatgatgcacaaatcagatgaaaatgaaatgttatttcatatttgaaccaggctgaaatgaagatttggttgggggatgaagttgaatcaaatcaaagactagatatggataaatatctgaatgttatgttcaggcaatgtaacaccctgatttccatgcaaccatgaaagcaaccgtttcagtaaattgatttctgtcaagtcagtcgttttatccaaaaacccaaatgaaatgtcagattcgagttttgaagtttgagtatgcctccgtagtaaaattcatttaaaagccctacataccacgactcgcacaaacaataaaatgctattgatatttgaaacatgcagcagtaaatatttggttggggtaaatcctagaatggaaaaatatgtatcaggatgaagctgaatcaaaccaaagattagatatagacaaaaatctaactgttctgtttctgaattaactttttctttcacacatgtaatatttttcgttacctccattgatactgtagaattcatcctcgcagtcagactctaaccaagggcaagcttcaaagaaaacctcatctctgctgctagctgcacaggtcaatcaagaagttaatactctgaaagctacagagaactaaacagtgaccagcattgaatcagtccaagaacaataatgttcaaaacatgagctgctcaactgcccattggacctggattgtgtgccactaaggaaggatgtgtgcatgcttcctgccctctctaactagaatcatcaagagatgcagagaagtgtcagcaactgatcacctctctctgattatattttttttcggtgcttgatttcttcaggggaccatatcatttctggtgtgaaagacatggatggaatgatctctcttaacgaactgcgtttacattaattatgtcgtgtccgtactttggtactgaaacactcaaatcacaggaaaactgataactgaacttccatcgtcaaaatcactcaaatcacaggaaaactgatagctgaacttccatcgtcaaaatggattttgcaagggatttccatgttcgtgatagccgaaattgatggattgatagataatctgatttttgtgatagctatttgagggtagaaatgtatgaattaactactataaagttgaaaaatgtttcagaaaaatattctctgaattttttctatataattttttttgcacgaaacgcgaagattggaaagcgtgcaacaaaagttcaaaatccaaaatcagaaaaagtagtggattgtcgatcagtactggatcatgtttttgctgaaactagataatcatactttctcttaaacaggaagaaaataaagtgcttggcagcttgtgcttcaggtttgctgatcattggctagtgtgtcaacccagacagatagcactaaactgggcaattagtttccagatttacgcatacattgactatcatcttaattcttaataatatatttggatatcattaaaattcaatgatacttatctacatatcatatgtcatttcagagatcttccactaaaacattgaatttggccataaccactttgtaatggaattgacagatgacatcgattgaaaacgtattgtggtcatggccttatcttctcttttgtgaaacaaaatccagtatatttaaggaaagaaaaacattctacaattgggacatgattatttcaagtccctcagcatgctcaaagtgacactgggataattaattactggagtatcttagatgtagaactgtgataaactactactcgagttaatttgcaccatcttagatatagaactgaacaagcaagctggcggggctttaactttatatatgtccgagcaacagaagcaaatctgacataagaaacacctgaatcaaaatacagtgcaaccatttgtaagccattcaatcaactttttgaaaataagatattacccttttcacaataacaacaatacagtatgatcgctaactcgaaagcacaagtacagatcactaaagccaccgaaactattgcaatagcacaaacattcataaagattcgccaaacaacaacgacgacgatgacgacaacaacaactgcaataacaagaatgcgaagaactccaagatcagaacagaacaaacgtaagaagaacagaagacatttaccatagccagcttctcccaggggcatgttatcatcaggtgccacttgcctgttgttggaaccaacagcaacagtctccacatttgcagcaatcttctccttggattgcaatggagttgaagagcccttcttggccttggaactctttcctctcccaatcagcctcatgcctcccctgcaactcctattcctggatgaatagtagctactgctattttgcaaggtcaaacctgaacatgagttcagaaatgagattgacaatttggagggggagagagagagagagatgattagtttaagtgaggagagaatatactatggggtggtggagtggactaatggggtgtatataaagcaaagcagcagaagagacggatcttgacttggggaattgtgtaaaatcaagggagagagagagagatgcaaattcagataattggtctcattttgagtggcagcttggagaagagatgggatggatggatgcaggatatttatggttgggtagcttgcttgaaagctaatcctgtggaggccagcgaccttgtaaggtggtgctgcaggtctgtaagaactggtgaagaggacagctgatgaaattcaggtcgggtgatgatacattgacgatgttgcaattgtgtgtagaaacttcgtactaccccatcccaaactatagtaacttaaccatatatttagatatatgcttgtctatgtttattgctaaaaattatattttgtgacagaacaaatagatagtcagcggacacatctttcatgtgatatttattttgtggtatgttgttatattttttttcgtattcctgtttgtgtaccatcatttctgcaaaggttgccatcagtccatcgactctgccaagcacacaacaaagcatagtacgtccacatgtcctactgtgactttatattaaaagtaaaacagtataagctgctacagtgtactacttttgttttacttgtcatttatggcattaacacggtcatccacacgtttcttttgaaatcttttctgttcatatatgtatataatcattaaaaatattagctatatgaaagtatttttttcattaaaaatataccaatgttatttactcatatcgattcttaatataacaatattgtttgacatattagtgatttaaggtcttaccattcttttgctgtgaagtaaactgttaaaatcatataatctgacttgactgctcagtagcgtatcaagaagaattagtggtctgaataaactagataaagatataatcccatttacatgtatgtatgacaaaaagttttagtgagaatttcataggagcttccatgatcctattgtcagtagtagtggaggctcgagctcccgtcgctcctatgctagatccaccctgtgactgtttgtagtctaaaacttaaaatagaatgaaactactatgagacagttatgttcacttgtcccactctgagttttgatggtacaaatttagttctccctctatcgcataaagcgtaatttttttgccattggtaaacaaaataagagtgagggtaaaagaccaaaatgtcagcaataccgcagtggtaaataaagggaaattaaggggtatttaaaggataaaatttgtcaatttgtgagcgagaataggcggtaggaaggtagaaatagactatttttgttacaaagtagaggatagcatgaaatgaattcatctttcttcagatactcgtacactaatcatctgtgacgtactagatgattgtcctttgtataaccattattgctttctgcatccaaggggcctgctgcgaggccttggctgtggcagctgcgcagttgcggctacaattgcagccagtgcagccgagcaccccttaaacatctcaaaatgaaaggagcaatactaccaaagtattgtaatctactcaaaaactatataaataattaaaaataaaatatatggacaagaaagggcgaacagcatagcaagaataaaagaaaagcgtcatgcgaaaagtctgcaagatgcaacaaagagagaactgtgaagttcaattagtacttgtatagaagagaagagcactggttacatcaaacatggaacaaaacagaaatttttgaattaggcaataagatgcaaccctataaatgaactaaacaacactaaactttgagtaacagttctcagagtccacagcacacttagcagtgtagtacaaggagtagaatggcaacactgccttgcacagcaacactctttcatagctggttgcttttgctaagctgagctcactgctatgagtggctagaggggcagagctaggacatggcaagcacagaccctgcagcctagccaactctgtctcagaggacaatgagttcttggagacgaagacctccttcacggataggcgacttggcagcaaaatttccactaaatcagcaatgtagccaagtccatcacccaacaatgacagccccccaatatctctctgaagaaccgtacaccagaatttaggatctggattttctttcagaatcgccccgatgatctttgcgccgaagaatgatccgttcagcttcgcggcgatcgattttcctgctgccaccagcctagggttctcctggacatctgtgccggcgaaggcatgcgctttgaagaagaaccagtactctgggcagggcaaaaacttcagtttgataggctgcactgttccaattgtagtgacatgcttgttgctggttgtgactatgatcttgctaccttgtttgccacaactcaggcttttcaggagctcctcaagcatgttcttcttgtgtatgtcaacatcctcgaaaacaatcaagaacctcttgttgaagaaactctgctccagttcatgtagtggatcatctgaatttccaacatctccgatgacatgtttaggccgtagaacaggctttggttcacacatctccatcttgtaggtgtgtgagaaattgaacagcaagattgttgtgaagtggctgcgcaccctagcatcatcacaggcatgctgtactagggtggtcttcccgaccccgatatcgcctagaatcggaagaacaccaagttttcctcttggtagatcatcctcatgcagcaagaagttgatgatcatctcctttttgacatgtcggccgaacatctgcccctcgatgaagatgttggtagctagaggccgatgaatcggctggcaggcctgaaggagcatcatgaactccttgagatcaccacacatgctctgcaagctctcaaccaccctatcaatctcatcaacaccgatgtcgtggcgagacagtatgttcctcacggtgaaagccgcgacgcgcacacgctttgcaggattgaacttggacaaggagaaaggcttgggatctacctcatcgcgattcttgtcatcaagatcaggctccccgcatccgatcgtgtcgagcaagtaacggccttggtatgcgccatcgatgagctccgagagccactcgagggtgccatggttggtgatctgcctccctttggcctcctcaactacgctatggatcttgatcagcatgcggcatatcctctgtaacttgacttcagtgctgtgatctccattgaaattactgacaacaagggatatcactctgccgatcacatcgccaacaattgccgagaagattgcttctgccatcggtgaaagtgtttagcagatggtgtaggaatctctttggaagaagccaacggatgtgtgatgtgtgtggttgaatgtcataacttttgacgaatctaagctggtgataaaagtcaagatgagaaccaataatattatcagcagctggcacataacaatattggcctgaaagagacacaaaagacttgggtgcgtgactgcatgtcataagtcttgctttaattcagagtggttttacagtcctaagcaatgatgatatactccctcgagtcacaaatatgtatcattttagactgtaaaaagtcaataagatgtaactttgatgacttcattcttagcataaatcgaaaaattgttgcataagtttaaaattgtaaaatttttgttacttcaaatgtgatcattttcatatgcacaatacctatattcacagagtgattatatttgaagttaacttatgttagaagcctacaaaattagtaggaaaaagtttggtattctaaacgactctaatataatatcataatcacgaaagtaattccaaatataatagagattttttttgatacatcatgagctgagtgatgactgggtagcctagggaaaattgatttttagaacaaactaaaattcccttggtttattgaaagataacagcagaaggatagtaatggatttttgtcagttaaaagcagaggactgtaaaaagtccaggacttccacaagacagctgacacactacgctgccctaataaattaagtttttagcaaccgaattgaccaggaaccttttttcctccctagaaactgattgcgacgaacattcaattaggcatcagtattagattacaatgacaaaagcaggcagctgcgtagatttgttgtcatcattttagtagaagagacctaaaggacagcaacttggaagtaactgacagggccaccactagtatagtaccagtcaattttttttatttttttatttttttgcctttccatctacatcttgctttgtatacaagcaaacctgtcgcttgcgagcattaatgtcttttaaccccttcgttaagtttttggggctgttatttcttccctgctgcaaatggtaaccaaagatggtgacaaccggtggtctgagtcggagccagcaagaacggattacctaccctccttcccatcgtgttgtccctctcaaccagaagaattggaccttcatgtcgtggctggagatctgtgttgcaacctttcgatctactaacaggaaatactccagcaagaagggcaaagtagggatcttagaactcccatcgtcttcccctagctgccatagccagcactttgtatcttttttgctatccgtgatacggcttgcccaagctgaacttgttggttcctattaccaggggtgcagctggaacaaaaagggaaggggtatcattcgcttgctttactctattttagatcaagtttaagctaatatgagtacctgagtttgaagagtgatgctccgatgcaatatacttgaagtattctactccgagcagaattaatctggatcgtatattttaaaggacaggtaagtaatctcctaatatccttacgagagtggtggccgtgacgttctgcgtgacgctggtggcgcgccacggcgcgacggccatggcggcgttcctgatctgcgcccaggtctggctcgccacgtcgctcctcgccggccaggtgagctagctagctacctacctacatagcttagcctacattccgatgatatatgcatggctgcttaattaactttgcttaaattgatcaatcaacctcaggccttgcttgccagcgcgtttgcaaagaaggatcactacaaggtggcggtgaccaccgcccgcgtgctgcaacttgccatcgtcctcggcgtcgggctgacggccttcctcgccaccggcatgtggttcggcgccggcgttttcaccagcgatgccgccgtcatcagcaccatccacaaaggcgttccggtacgatggtcatcataagcaagaacagattaatcttcagatattagtaaacatttttctcatgaacatatctgacgattgtctccaaatcaatcagttcgtcgttggctcgcagacgataagcacgctggccttcgtcttcgacggcaaatggaggggaatggcatcgattaggataggatagggagagggtgaacagttagataatgacagtttacgataatacccctacgtgaattattatcgctggacaaatatagccctccacatttcttctccaataaaatcgggtgggagtagaactagatctcaaccctacgattaaatacgatcaatggcacggattaatttctactccaagtagaaagcaccggagcgagtctcgagtttgaattgagggggtaccggtggacatattgtgaacatagatgaattgtagctaaaaaatttttcttaactggttcctgggcaccctcccccctcctacctagctttgcccctgcctattacatgtggtcaatgatgtcattgtaacaagatagctttcgtggttggatccaatgacaacatcaagctgagaggcttttacttcctgaatgcattgcctcggagaacctattccatgagatgtaggaagaaaacatgttgagtttgagatgaatatgtgaatgtagtcgatgagcaggacttgtagttttcataaatgttagaatagaattatattcggactcatatcataagcactccgataaataaagaggcaacacctaacgtaagtgcatagggactatagcataggcgaaggaatgacttcctggcagcctaactggtgaaatgtcctagttggggatgagcattgtaatcaatgctgtaaaatcaaagtgtgtctggtccttattctgagatgaacaattggcatttgatattattggttttgatatttgaagattattagcgaatggttttggagatgattgatttgtaggtgatgaacaggaactgctgctgactgtttggaccggtcagatcggagctatgcgtgcagtcagaccggccagcccacggtctgaccagccaactctgtgtcggtttcggtttcggattgtttcgctggatatccgtggataattcatgtttatcacttctagatgggtactatgaatatgcaatactgttgtttgctaacaatgagtcaggttggtgagaacttgtgctcgaatatggtttcttggttgatgcatgtataggtggttttgatgcctcgggtgagtgttgccggtgatgg

SEQ ID NO: 21776 - DNA, 5768 bp, Oryza sativa
ttggttttgatatttgaagattattagcgaagtggttttggagatgattgatttgtaggtgatgaacaggaactgctgcgactgtttggaccggtcagatcggagctatgcgtgcagtcagaccggccagcccacggtctgaccagccaactctgtgtcggtttcggtttcggattgtttcgctggatatccgtggataattcatgtttatcacttctagatgggtactatgaatatgcaatactgttgtttgctaacaatgagtcaggttggtgagaacttgtgctcgaatatggtttcttggttgatgcatgtataggtggttttgatgcctcgggtgagtgttgccggtgatggatcgggagtcaacttgggagaagatgacgtccggacgatcaggatatcatgcaggatgcttagactaaagatcaatgcacgtggttggtgaagattccatatggcatacgatggagatattgtgtgcgtatgggatgtggagtcgaatttgaaaatagtccaaatttggtataattggagtatgtaaagtttatttcttatacgggaaggttttctatgggattaggacttctagtacaaggttggttcgtggctttaggctacctatctcaggtatataaagagagggagggtgtgtcctcttggtatcgtttttgagagagttgagttgagagaaaagttagggtttcgagtgtagtcgagattttcgtgaagagtgttgttgttgcactttgtaaacacggagagaagtaataaagtttcaatctattttgagagagatcttcgatttgtgtttgctcgggttcggcggtccaaccggcgggacaccgacggtcagactgacagctattggtatttcttaacgacattactagaaatatgaattcccagcaatggtgtggaaatggccctggtatatttatggttacagaagtaatccgcaagcgcacggatatactattgtagcatttcacccggaagtattccaaggtatcgtatttgtttaatcccaatggaagatttataagaaagagaaatctgctaataacttatatatattacatatatatatatatatatatatatatatatatatatatatatatatatcaaagtctaaacatgggttactttaattatatggtagagtgacacgaagcagaaggacttagattctttcatttaaataattctaggctaatgtggaagaagaatagaaaagtaatcattcctttacttctaatatacactcaactttagtttacatttgctagtgtacagttttattgaccaataccccctaacagtgccctcctagggcttcgagagaccaccccgggttgccgagtttcttacgacaacctgtcatggccgtccaactggggctaaatacggagcagtaacctccccagaaaattgtcttaggaatatatattaacgtagaggaatgcccgtactgagctgtcaccatcagcatcccacttctactgtcccgcatcatatatgcccaattaatgatatataataatctaagcaccatgcttatattgtcaaatattactctgtatcctctagaataatatagagcaatcatttgcatgaacattaaacccacaccattgcacctctctggtaggctagtcacacaactatatcaacacaaatacaatgtaaaaccagtactcagataaagtaaagtaccaaaggtatataaagaagaatattctattaattctggaagtcttacaaaataagaaagaaaaactactagagtcataccgaaatcttctgaagactcgaggactccgagaactatcctattctattccacttagcactagagcactaaactaaacttgagatagagatcaaagcttcttgcttgagtgtgtgatggaatgaagaagtgacccctttatatagcctcccaatgacggttatggcagttgaaattgtcagaaatgccccgcaatagtcattgggagtgcatctgaagcgtccacgtggagggacgaactgaacggccactgtcagggttcggccgaacctgggccggcccagtagacctccagatttggtagaggggttgacaggtaagtcctcatggcgtttatgatagttatggcggtatctaggatggttgcacctgacatgtgggcccctttatccttgagcttgcttaggagtgagtttttcttcatttcttcttcatttatgggctaatctctgcaaacaaataatactctaagtacaagtggaaataaattattctaaaataaatatgcattgcaagcatagctaattctcctttattatagttatattgacgatcgaaattagtctatagcgatcatcaacatacattacctttattctatctcttttgatcaaaatattgtgttagtgactatttctataatattgtctggaaagcttaaaaaaacctaataaatgatattacagccgatgggacatatttagggtttgctttacttaattttcaactcacagccgatctggggaaaccaacataggctagatctactattgatacatcatcggcttatcggccaatcatctatcggttatttaactctgttttcttgatttccttgttggttgtaggataaaaccagctggcatgcccttgacccatgaggcaagccttggacctgaacatgagttaaccagatcgcccaagccgccttgttttccgtcaacaaggttttaacgaggaaacagatgcatcacaatattcaaagtgccatgcactcttttctcccacttcttttccactgggtttcaggtggagtttttgacgaggcatgtgcataattcaaattcgtccaaggggggagtgttatgaaaactattttgttctggacaaattaagatattagtgaaaagcttactgcagaaggaggcatacattggaagccagcttccaagagaagccaacttatgacgtaagctggcttatgagagaaggcaacttacgacgtaaacggcgtaaaccaagtcagcttgtaggagaagccagcttagagtgtaagccatcaacttcctccgccaataaataggaccctgaaggcactacttggaaaagcattatcgcaagcggccgaaaacggtcttcacaggcggggcggccgtccgcctgtaagccaatgactgtgaagatcgccgatcttcgcaagcggtgcggccgtccgcctgtgaagataatttttgcgggcggacgttggctagtccggtccgcctgctaaaataggaatcggccgcctgcaaaaaaaaaaattccgcctgcgaagtttggtaggaaatattggaatttaataataatttgctcgtaaattacttttaaattatttaatagaaattcttgccggtagattattatgtacatatattggaagattatcaaacatttggtactgataaatgtacatatattacataactcaaaagtgttgccaaaaatattacaatatttttttacattgtcacttcaaatacgccatctaattaatacattatggcatagcactgttccactcccaaagatccttgaattcgtcacttgtggctagggcaccctctgggtcgatgaaatctcctttcacatggtagcactcatggtggatgaaatcgcacagatcacgctgaacatttctgatgcctgtatcttcaacgcttgttcgacgttctaatcttggcatctgcatgcattgaagataaacaatatattagtatcataaatatgtgaagctgtctagcacatagtatagatacttacatcctttgcgttagtcctgtacctcccattaactctaaggaattcgcaagcgtaatacccacaaaggaccgttccttgcggttgcttgtgacacttcaggacatatcataaaaaaatagttaaaatttgtaattagtgaaacaattggtatacattaagtgagtggagtattaccggccaataggtacgtactagtagcttctcccttggtcggactgttctccaaccttgaacttgtagtactggtacgcactgtacggatgtcggaccctttcacattaaggaggatattacttataatacattcatataaaaatgcaagagtcataatcacttactactgtaagattattagaaattctttgtatgactgttgtttttaatcgggagggtccaagactaccacggttcagtctttagggtggatgagtaaacagatataatgatcgctaaaataagacatatgcgtagaagataaatgtacgggacgtacttaaaattataagctaccatgacgactctcttattttgaaagtgcaagaaagctcgtccaatgtactgtgcgatagtaatcaacttctccttgtgcaagcccttcttgtattcacctatctcttttgcagtcttgcccttcagctggtcagaccctggtgctagcctcacggtatgttgtgtttggcagatccgagttggatctaagaagccgataggtttcttttttcttcttagtatccatgtattgcatcctacagaagaagtttgttagtaacaatcacatggatttgtattgtacatatttttcatataattaattaaaactcatacttacatgcaccaaacaccgacatagttgacgtccatcttatcccgacgatatatggcatggagatctgagaaatctagccatacgtaaccttgttcgccgaaacaatatgccggtgatcgagctgttatattgcccaagcctttcttactggcctccatgtagaaggtatgttaccttctcatctcccatggtccttccttcagtgcccattccggcaagagtgctttcccatgttcgtacttttctgggcaatcatcagttgcgaagtatgttggcccggctagttcagcggccttctgggggtcatcatctctgagcttggcacgttccttaccccctctaaagacagttaccatgaacttctccttgttctcatctttggtcttggagtcgtggctcctaagcactctaggcacctcagaactggtagtggccttctcagggaccgtggtctgttgcacctcggggtctttcgcaggagaagggtcttcaaatatttctggctctgtaccgtcccattccaatcctggtacttcttctatttctgtcccaactgatgccacaaatttcacctctggttcagccactttaatatccatttggacatccggcactgcaatctccatgggcacctccggcacttcaatctccgatggcacttccggcactagattttccttatgcatctaaggttcctccaccttatcagtcaccttcttcttaggaggtcttgaaggttttcccaaccctggttttggcacctcatgttttcgcgtggcgtcggtgcccaatctaaaggatatgttattcttgtgctagagaattacaagatcgatcgcatccccaagtacggatacaccatctgcagtagggaagtcaatgtcataggactcaaacccttcgtggaccacttgcgtctgcactttggcatatgcagcaggtatgaactcttcattatatgttctcccagggatagcaatggctgtagcggcctcaagagtattcccggagcgtccaatgggaacgtgcaatctgcagggtgtattctccttgaggtcatcgaaggggtaatctggctcaggttctttggtttcggggcgaggtaaaagcatgtgcttgacgcggaaa

SEQ ID NO: 21777 - DNA, 2649 bp, Oryza sativa
ataaaatggaggagaatcgacaataatttgacgatcattcaatcggacgttatcgagaatcaaacatatggatggatgggccaagaactcagaaatgacatgaccaactgagccaaaattcacgagtctgaagtgaggaacagaaaaggaggccatcgaccaaattgtgggccggttgggccacccctgggttcggccgaacctaaccagccgtagcgccaatcgattcaggttttgactagacggctcagatggactccctatgacggttggagggtattaacgacctttccaaccgtcataactcagctataaaaggcattcacctcacttcctccaacacacacctcaagcaagaagaatcaagctctctctctagtttactagtgttctaaagttagtggagtaggaatagaataagagtcttagtcctagaagtcttcggaaggattcaggtatggttctagtagctctactctcttttgtaagacttgtacttttaatagaatattcttctttataatactttggtattgtatatgaataccaactttattatatatccaaattatattgattatgatgctagcttatctgggaaatgcaatggtgtgggtataatgatcgtgtatacgattattctatgtcatgacgatgatattatagtagtatttggtaagttaagcgtggtgtttagattgctggatattattatttggggttatataatgcgaatttgtcgaggtgggctgctaatggtgacagctcagtatgagtattcctccacgtgtatatataatcctaagttactttcctgcggagggtactcctccgtgtttagccccggttggatgattatgacgggttatcgtaagaaactcggcaatcagtgctagcttctcgaagcactaggagggcgttggaaagagggtattagctaagtaatcgtataactaggatgtgtatataatgtgtatgtatattagaagtgtaggaatagattctttctactcttgttgtgtgtcactctaccctatccattatcttaaccactgcttagactttgattattacaagtaaaatataagatattagtatagttctctctattataatctttccacgggattaaacaaatacgatactcttggaatactcttgggtgaaatgctacaatgatatatccatgcgcttgcggatgaattatgtaaccataatataccatgagtatttctacgttattgctaggaattacacttctagtaatgtcgttaacaaataccaacagtcgccttgagtggttggagacagaacagatcatagagtatcattctctcattctttgcttaactcttattccaaaatttttcaaatgattttgcaaataaaatccaagttcctcaaatgattctctcaatcactcgaagtgtatatttattcctcgccaagatattgccttgagcttgcttaggagtgagttttacttcatttcttattcatttatgtgctaatctctgcaaacaaataatactccaagtacaagtggaaatatattattctaaaataaatatgcattgcaagcatattgacggtcgaaactagtctataatgaccgtcaacaacggcatcgcaccgattagaccgacaggaacgtgtcggtcagaccggcggcagcgacaggaggcagaggcgatcgcacggcggttcggctgggagatcaacaccggttagaccagcggcatatgcgcggtcagaccggcggatcaaccccggccagaccgatctacatcggattctagggtaacttttaattccattaaaagtttagattttcggctagtttagttcttgctattcgatcctacaaatgctttaagaatgtaggtttaagatgaacctcgtaacaaaaaaaaccgtattatattatatttatttatttataaataaatgcatgtgcgagatggtgatgagctaaggcaacatttttttcctattgattaggggttaggcagggcagagagtgtgggtggggcgtgggatttggcaagcgaaggggagaaatgcggtgggggaaggggaggcaatctgtcacgcccagaagtttccccctttttccttgctgtaaatatttgttaaataaatcgtctgaagaaattatcttaattaacctagagctaattccataattaataaatgcaattaataatcggaaatagcgtggtggaattgttccccatgctccaatgcattaacaagatttttagtggaattttcagagccttggaaataattttaaccaattaaaaatcaccaaagtgcaattttaaatcccaggaaaaatcctttcttctttttctttttcttttccttcttttttctctattgggccgtcggcccactccctcccgtgctcggcctccttcctttgggccggcccgttcccctttcccctctctccgggacgctgacaggtggggcccacctgtcaggtcgtccccttcctccagccgcccgccccacgacggcaaccgccgccgaaaccgtccacgccgccgccttctccgctccatgccgcgcccccactccacgtccccacgtcgccgccctccccgccattcctgcccgcacgcgcgcccgcaaatgggcggg

SEQ ID NO: 21778 - DNA, 1026 bp, Oryza sativa
cccttcctctcccctttgagccgctgacccgtgggccccgcctgtcggcgccccctggatgaggtcaggcctggatattattgcgcaataattaattaaggactttttctttattagtaaaaacacaatttatcttctaaaatacataagtaattcatccgagctccgtttaagtccattcaagtctcagtaaatcaagaaaaatgcaaagaatctattaaaaatggttttgtttcctgtttctatagtcttatagcatgttttgcttgtgtgctttgtttgtcgcataggttttggccgtttcgtcgatccgcggtttctcgaagacgttgctgaggtctcatcagttcgagagcaaggcaagtcatgcaatacgtttgatcatattgtacccaatttacaaatatcccgcatttctattaaatgttgcattcttttacaatgtaatgtgggatgggtcctattcctcagccacatattggttaccttatgccattgataacttgggtatcaaaatgactagatgttggcttaggaaatgcttagccatgcttagttcaactagtacacaaatggggatcacattattacatagactctgactattggcatagctttagattggtgccaccgcaagggtgtcagttaattaaaatattctaaatggcgggctgtgagtgcatggttttgctggtcgcacccatggcagttaaggaccggttcacgggaaaccctgggagacttaccgtgcttaccacaagcgggagtgggtaactgcttgatctgaagtatagctcgaccctttcctaggcaccggtggcgagaatgggcgtgatggaattggtcggccgaggtgttcggttgtccagctgccggattcaccgcggcgcaagaggggaccgcccactgccttttgaggggtgggggtgaaaccttagcgtggtgtggatggttaggggagggttatgtggagggtcttgtcacgatttccccctttgcagggtaccgagctcgaattcgccctat

SEQ ID NO: 21779 - DNA, 7157 bp, Oryza sativa
tagatgtcgtactatgcactaactcgcaaacccgctataccgagcactggacgaatcatgctgcgctagcaacgcgccatgctactccgaccatgcgccataattgcatcggttgtataccttgtggtcgctccgaccatgcgccataattgcatcggttgtataccatgtagttgctttggtcacgcataccaccgaaccttcgatgtgcatcaaactgagcattacattaattcccacatatcttgaaaggtatgctcgaaaaagaaacggtaatactcacatacatatttagtcctttgaaaggatcatccgatacataatgcgcttatgaaatagctgcaattgtgtctatttgacactacgctcttcccaaaccaatctagcaagatcacacatattggcacctgcacaatgagaaaaagcactaggtaccggaaattggtaatgaaacctattatgggcaatattctcttcatacaacagaaactcattggcattgacctatggttgaaaatcaacctgcaagttgacctatagttgataatgaatggctaaagatatttttggattgagcactcgcatacaagtattaaaagccccaaaccaagatgatgatccgaatatcatcatataaaaaataaaagctcactcttttggaacgagtttaagataaaattgggagaaacctatgttgcttaggcctgtaagcctacaacatgtgaagagtgaaccatactatgttagaatatgaaaatacataagttccatggacatagttcgccatttctagcaagtaacatggttctaactttgtccaaaccccaaaatcattattaagaagataatgatatgtgtgtcgcatcagcactgatagactatacaaactctacaagtcatagacatgcaagatttgaccattggaacatcactcgcactatgtctgaaaaaaatgatacacgcaacgagttttgatggttcacacttaaaagagatgcaaaatttagggggatattttgcatgtctattaacaaaagcttgatctgaataatcaagtacccaaaaccaattacaaaaatcaaagcaataatttggatagattgtactctttttctcttggataagttttgtcacgcccggaatttctatccaaaattccaaacgcttacatgtgtgtgaaccctcgtccaggaatcagccgaggcacacaataacaaattgataatagagtacaattatcactctaattaataagcgaataaaatgtcattacagaggtagatagttcctctcaatcaataaagatctaagcagcggaaaaaataagataaacgacgcagacgactccactccacaggcagcttgactagggctacacctaatcctccacaccatcagcatcactgtagaactcctcctctgatgaatgattgcaaggtgagtatatgacatactcagcaagccacgcagcaaatatgcaagtgcacaggataacaaaggatggcataggagggtttcatttgcataaacagcatttaataaacatttcagaatttaataaaacagttaagtaataattaaacaatattaatccaatgctatacaacataccctgttgcataggcccaaccattctgaacaaccatcccggctgcacagttctatctccaaaccaggaatataccattccaaaccaggagctaatcaaattattaccagttatagcatcttttattatgatgagaagtgtgagactaatcacgaaagacattgttagacccgcccttaaccgcgggcacggctattcgaatagttttactctggccagaggtgtaccactgtacccacaagacacagccccacgacatgtcaccatgtgcctcaataccaccacggtaccttggaaaggagctgtgacagtacccctcgcacaacacaattcaaagcagtgcaccgttcctggatcataatcacccctttataaacaaggcatagactccccaacgacccccgtgggcttatctccgccacttctcagtctggtgctccgcaatgaaccatgctatacaaaaggtaaagccgttgcccacgctggcttgtggttggcacggttaatgtttcacaaccaaaactcgtgaaccggttcttaattgtcatgagcacgactctcaaaaccatgtgctcacaacccaccattatcaagttttagttggcaagtaattaattaaccaatcacgattgaccatcgtgaactatcattaagccatcattaagtaatagtgagtcataagttatcccaatagtgtgctaatgtttctaagcatggctaagcaatcatatctaatatctagctgaaccactatatatagcccaactagtcaaattataataacccaaggtatcaaggaataaagtaatcaagaacaaaagggctataacaaccaataggttaattccacccaatgacatttgaaaataaatgcaatagttgaatagaaacaatagctttaaacgtgatcaacatgctcaaagggttgtttgggatctgtgtgacttgccttactggccttggaactcttcaaaatcctctcctgcaaactcagactctccgaaaacgtcggaacctaaacagaaaagagcaaaatcaccaaaacagaacacaaaccagcatgaacagtacatgtggatattttcaacatgtagatctcaattttagaaaaatttagagacttgaaccaactaaatccgagctaagatgaattagttatgaatttttaaagattaaatcggattaaaacacttatatggattttaattgaattatgacgcaataatgaattatttttaaaaaggaaaagggaattattgcgtcagcgagtagggttcgcggtggaccgagtgcacggcggcagctcacggaaacgaacggccgagatcgatcctatccacaacgaacggccaagatctaacggtctacgaccggtctacgacggacggcaacgatgacgtcggcaatgacgtcatcaccggcggcggctcgggcggcaagctcgccggcgaacaacggcgcgacgacgcgaacggagacaccaactcgtagagggcaacgtggcgaacttaccggtgaccaaaacaacggcggaagatcaacggacggcgacggcgtcgaggaagaagcggcggtaaccttcggcttgacaacgacggcggtgctccggcgacctacggcgacggcgaaggggtggacgagatcggcgacggcttggtgaccacgacggcgacctcctcgagcagcgacgacgaccggagcgacggcggcgcacggctggagctgcggcggcgacggcggcgctaggctacacgatgctagggctctaccggcgacgagaggcgaaggcgagggtggcggcgggtagcgacgggcttgggggtccttttataggggctaggaggcagcgttggaggcccacggtgaccggcgacggcgaaggaaggtctagggttcggggagagagacgaatccgattcgagatcgaatccacggatttccaaacgattttagccgacgattccaaaagaggaaaggtagagatcccgaagatcatttcccctctattgatttcaccggaaacggaaaggcgtggccgaatttggaaggagatgacggcggcgcggcgatagggctcgggcggcggcagcggcgcgaggaagacgaagactgacaggtgggccccacctgtcagcgggcggacgcgcgcgcgggcggctgctgccggattgggccgactgggccgagggagagagagaggttttgggccgactttcggcccaaagccaaaagacttttaaaaacctttttcaatttaaattattcatgaaatgcaattccatttattaaaaatacttccttagctcaaataaatcccagaaaaatctaggaattatagaattaagcaaagtatttaatgaaattttatctggcctcattttatattggaatttattaattaaaactagatcttctcttctaggctttttaaaataaattctaataattccaattaaacaacaatttatatatttaggatttttagggtgtgacaagttttcctctagtttcttattaagggttttaatgaggcaattcgtgcgacatactcccttcgtactcgtaaaggaaatcgttttagacagcgacatggtgtatagaacacaactttgacttcttgtttctataaaaatatttattgaaaagtgatatatgtatacttttatgaaggtatttttcaagataaatctatcgatataatttttacattttcaaactcaataacttgagagttattcatgatttatattcttaaggtttgacttaaacattgtactaaacgacttcctttacgagtacggagggagtatatgcgtacgctatgtactatttctccaatttatccgactgggtttttttgaagctttaatagggcatagacatcacacggtgagtgtcaagggggagtccatgaaggcctagtctaaatacactaattggacccatcaccgaaccttgcatatttgcgaatgcattatataaaaagaggaggggccagtcatttgtacacttggtgaatggattgaataagacaagagagtctcacctctagactttgtatctccactttatacactgaattatacaaccttgttggactactctgtagcatggggttatataatatgttgaaaaaagaaaaaaatagatgaaattattaaattaaatggataatagttgtacttatttaagacaaacggtacgtgaaaaaaaataaatctacgccgaaaatagctactccctcattgctttctactacgcgtttgcgccgttgcatactctccttcacgtccctccctgtctccctatttgccaatttgccacagcatacaaaactcgaaccacgacgagagatcgaccagtgggtccgacacgaaaaccagagagccacgtcaccgatccgccgtctccgtcttcgcgcgcacctccctccctccctcccaaaccgaaaactccgcccgtcttcccgccgcttccggatccaccgaaatccccgacgcgcatcctccgccgtccgtcccatcgcatccgacggcccacgtccacgatccgcgtgatcgcctcccattggctagccacccgcacccaccacccaaaaccaaccctatatatatatctctctctcgcccccgaccactaacatcgtctcatccgccgcctcccctcgcctcgccgcgcgcttcctccgcctccgccgccgcgtcgatctcgctcgcgcagccggtttcttctctcgtcggtgggtggggtataggatggcgggacgcgggaaggcgatcggcgccggggccgcgaagaaggcgacgtcgaggagctccaaggccgggctgcagttccccgtcgggaggatcgccaggttcctcaaggccggcaagtacgccgagcgcgtcggcgccggcgctcccgtctacctcgccgccgtcctcgagtacctcgccgccgaggtattcgctcctgtacccacccgttctcggattggatctgatttgatggcgattgatttggggatctaggtcgccattgtctccgtgttcttggatccgttcgatatgcgatattgccgcgaatccgtggggattgggtctcttgtggggatcgaatttgtgatacactagattaaatttggccttgtggtggtgttcgtcaggtgctggagctcgccgggaacgcggcgagggacaacaagaagacccgcattgtgccgcgccacatccagctcgcggtgcgcaacgacgaggagctcaccaagctgctcggcggcgccaccatcgccagcggcggcgtcatgcccaacatccaccagcacctcctccccaagaaggccgggtcatccaaggcgtcccacgccgacgacgacgacaactgagcccccttcctcctcctccgccgccgccgccgcctgcattcgtcatcttgtcttatgcactagtaggatatttagctgtttattttggaccaaggtgtgttgttgcgttaagcagtaggaagaaacaagaaaaaaattgcttagttcttggtttgttttggtggcctgattgatggctgtgaatatggtgaaatttttggctatttatctcagatgtaatcccggcgatgatcttgctgtgtttggcacttgagtggttgaagaaacgaggaacagactgaaactaaaactttgaatcgtcatcatctgagcattgaccactgagttcttgttgcgcttaacatcctatttgcttgggtgttttgagcgatctgttaaatgttttcttaacattggacagggattagttactctgcatctgttatgttatcaatccctgccatggccatctgttattttgcgctccattgtagttttgttaggattgggctgtgtttatgccatccttttgatgattttgtcaaaaatctgatgttgaaatttccggtttgatttgaactgattttctccgaattgaggggcagaagttgtttgagtcttgtcctgactgatattggattgaagtcagactaatttgatttggttgtcaatttcgtgtcttcgttcgagtgtgccatgaaaaaaacatgacccagttcatgaattgtgggtcatgttgaattcagctatcccatttttggtggaaacgctccatgtttgggcagctgttcctataaggtaacccagctgttcttgtgggactgcctgtacatttgtcgacaaatttttcctcaaaacaaatttttcctcaaaaatttgacagatataattatagtacaatcatagtgtaattacactgtaacttatatataattatactgtaacttgcatgtaactacagtataacttatatgtaagtttcacataattttaaatcgttagatctattacaagatttgttttggtgaggaagaaaacaaatcatagcacacacatatatgaaagaatttgttcccacgacctccattttaccgaaataacatgttacggagagatttttgaaagttagatacaagttacactatagttacagtgtaattacatgcaagttacagtgtaatacactacgattgtactgtaatt

SEQ ID NO: 21780 - DNA, 9690 bp, Oryza sativa
acaaatttttcctcaaaaatttgacagatataattatagtacaatcatagtgtaattacactgtaacttatatataattatactgtaacttgcatgtaactacagtataacttatatgtaagtttcacataattttaaatcgttagatctattacaagatttgttttggtgaggaagaaaacaaatcatagcacacacatatatgaaagaatttgttcccacgacctccattttaccgaaataacatgttacggagagatttttgaaagttagatacaagttacactatagttacagtgtaattacatgcaagttacagtgtaatacactacgattgtactgtaattacatctgttaaatttttggagaaaaatttgtcaataaatatttagcaaaatcgtttcttcaaactccatgcacacttttgtagcattagaaggaaaagaagcttatggcagtaggccgcgggccgcctcactgaaacaggcggaagcccaggatgcagcccaatagtactcgcgcagcaggcctcacggtacaaggtacggctggccgacgtggcgtgcgatcacacggttcgccatttttccggcccacccattgcttctgcttttcattttggaataagttcactttagttctctcaatttgtccttcagtctgaaatttgtcatgctggtatttctatcatgaatagctggtattgtgacatcccttaactcacagaaccatattaactttgatctctcgaaaatattgtgaccagttttagctgacataacaagtgtgacccacgtggacctcacatgtcagcgggccatctattcttcatcctgggccgaggctagtcgggctagcacgactcgacctacatgtcgggctaggccgtgcctgcacatgggctgcacgcacgacccaataagtctcgggtcgtaccgggccggcccgaaggcacgatagtccatcatgcttctccatataataagtctatttttccgtcctcatctctttatattgtgtcttatgtggctggaataagtctattttgtatccctgtctttaggcaatgccttatatattagatttgagtctattttggacccctcaactattttctcgactgtgcgtgccgcgctgggccggcccgaaggcacaatagtccatcgtgctcctccatataataagtctattttttcatcctcatctctttatgtttgtctcatgtggctagaataagtctattttgtatccctctctttaggtcatgccttatatatttgatttaagtctattttgggtccctcaactatttctcttcgaccgtgccatgccgtgccgggccagcccaccctgccaaggcatcggcccaagcacgggcccaacaccaatcgtgtcatgccgtgcttgggctaggccaaatggccgttcatgggctgggcgtcaggcctcggattttatagccatctaaaccatcctatgcctctccctcttcgttctctcttccccatctctcgagaagagtgcacagtgaggagatgggtagcgactggcgcgcgcggtggctggcagagccgacgacggaatcatcctgcgcttcaacatgtcgccgagggtgggttgtggcacggtgaggcgggaacccacggcttatcggacggacggcatggtcaccgcaccggcgacacggcgccgtggtggatgtccgagcacagctcccgccacaccagctcgagcgtttggagcgcgaccacgacggtggatgtccgcagcggaccccgacctcgattgcttgatccctacagcacatcgtcggcgacgatacctcccccatcctcaccgccaagcccatcaccacggtctccaaagggttggttggttaattggtggtagtagcaaagcctatggcctccggtgatcagcttgctcaagctcatgctcgtggtgtgcctccgtgtagcactggcacgacgcaggggaagggcaagtacctgctgttaaagggaaaattggaatcatgtcattataattttataaaatttaagatatgctattctgacccacatgtcattgactcatgtgggtcctacatgttattgagataccgatgacatatctcaaacttagctaaattataatggcatggttctaatttacccgctgttaaatgacgagctcgtctgatcgttgatatggttttaccgaacatccaccatctcgttcatgaacaggtgggtaccacacattgtcgctacagtgttttttcttttttttaagttattttattacctgtcgaactgccctatcgaactgccccagtttgacaggtacccttttgaactgccccagttcgacagggtgctaaacttacgattttgtctaaccgacctataattttgtgattttctattaaaataatattatttccacaaaaaattcactatacataacggaagcaggcgaagctaatccagctgccatgtgtaagtgcacaagtgcataggatcctagctaatagtaatacctgaaataagaggcggtagacggcagcggcagcggcagcagcagcggcgctaggcgatcgcagagtcatgctgcacctcgtgccctactgccatcgaccgttgtgcggagtagtggaaggaaaatgggaagccggccgccggcgctccgatgcgtggccttgcgctgttgcgccgcgcgaattcggcgccgtgaggagaagatcagaagacgtgggcggtggcaatcgcggcatcgtgttctattcgccttctgcttgtggctttcgcgcacaatgcgtttgttcgccttcgtgctgggccaggcctcaggcctgaggatgcctggggtttgggacgggaggccccaccaccccaggggggggggggcggcgtgctctggggtggccatgctgtggtacgcataggatgtttgtcttgacgtgcaaacataggttcaaagacgacgcctttcctgtttctctgatctcataaaacttgagtagtcaataagaagaagctaagcaattactaaaatttcgaattcacttctatattatgtcaaaaggcctgatataggcatgtaatttcacccaaaactatctacaatatacaaactgctactttgatattgatacattctttctaaaaaaaacggtaatattcgagttacactcaaatgtacagtgctcattgatttcaaaagcaagtagaagttttgcattccactttctaagtagtaccttaatatatactccctccgtcccataacataagagattttcagtttttgcttacaacgtttgaccactcatcttattcaatttttttttgcaaatataaaaaatgaaaagttgtgcttaaagtactgtagataataaagttagtcacaaataaaataaataataatttcaaaaaattttgaataagacgagttgtcaaacgttacaagaaaaactcaaaatcccttatgttatgggacggagggagtattattactgaaaattaattcagatcctatataataaatgattataaatgttgtattgcatatgtcatatcttcttggttctggtatttttttccatggtcagcactcagcagatgcgagggcttactattaagaagaccaagcattaagcattactatgcgcttactacgagcacatagtgaaacaatttaagaacctgaagatcttcaacaaccatttaacttaaaaatgtatatttagttctataggcctaaactcgtgataaatgttacattgttttgcatgatcgacaagtacaaaaccggacatctcaatcgggctatccgtgacggaggcgagcggcctgctgaacactaggtgagcaataggacactaggtacatgaaggagcacaatgactcaattaaagtggcacgtgagaagatgaacatactgaaagattttaccagcgagtggttgaatccaaattaacaatgtctattcaaagcacctattggagaggatattcaacttcgacaaggacgatggaattcatgtacaaccaagaggacaacttcacaaattgccgcaatctcaaggataccatccattcgttgctgatagagtcattcatgatccacatttagtattggcaattaacaattagttgtatgtccaattgatagtataatgtgatattagctcatccttatgaacccatggggtattttagttagtgtgtatatagtaattttggttgggtggatgagcctggatgggagatggccgcctgattttctgtggtgtttggttggatggcatggtgtatggggcggcccagaatagagaatattttcgcaatatgctggatgagtgcatccgaccgatttggctggatgaagccatccagttttggtctgggtgatgtgtcctgttctgattggctgtggttggtttgattttcggttaagcaagctccaaatgattttttgtcctaaaccgtttatctaatttatgatttgattacaccattatatttgttacaattaaatctttaaaataatatctcggatgattatattttgataaaaaaataatatataacaaatgggtctcactaacttttggctttttccatccatgctacatcctccaatcaaacaagaaattggatcgccatatccatataaaccaaataaaaaattggatcgctatatttaacaaaatatggatgccatatcccatccatgcatgaccgtgaaccaaacccaccctaagtgtcatatggggtactcttgaatataatctccattttggatatcaactactgtgtacactttagtaattaatcattgtccttggttgatcacattattggatgtccctttttctcatataaatgaagagtaaatattctgacctatgtatacatccagtatatatccaaccattattacaacaaaggtgttgaatgtggatagaattgattgagtacatcctctccatcttcctttggtctaaatggatctttctccacgtctagaaatcgaaccaccataggggttttggaaggatatgacttgtccatattaaatttctccaaaattttctgggtatatgcactttggtgcacaaggattccagaaggtaaatgctcaagttgtagacctaagaaaaatttggtttgacccaaatccttcatctcaaattccgtctttaaatgatgacgtgcttcattaatatcttgtgtattgccaatgatgttgagatcatcgacatataccgagataatacaaaatcttgtgggggactttttgataaagacgcacgggcaatcctcatttttagtgtatccctttagtgaaaggaattcacttaatcggttgtaccacatcctgcccgattgttttaagccataaagtgacttctacaacttaacacaatacatgttacgatttaccttctgattcgggatgtcgattccatcaggaaccttcatataaatatcagaatcaagcgacccataaagatatgctgtcactacgtccatcaactgcataaatagacgattttgtactgccaatgatattaaatatcggaaagttataccacttgtactgccaatgatattaaatatcggagacgattttgtactgccaatgctacaagccttgctttatatctcaccacctcgttgttttcgttccgtttccggacgaaaacccatttgtatcccacaggaaagataccacaaggagtaggcattacagccgagaatacatctcttttgtaaagcgaggctaattctacgtcaattgcgtcgttccatttgttccagtgagagcccttttggcactcttttatagacctaggttctggatcaacttggaggcactcagcaatttgttcagaaaaattagtatcgacaattgtagctcttctattaaaagattctccagttttagagtagttgatggcaatttcatcaacccttatagactcatcgtgatctcctgaaacaatgtgtctatggtcttccgaattcctagtctcaacattgtgcaccaccgagctaggttgtagactatcacgatctgcttgatatatagtatcaatttggtgtgtaccaactaaaggttggtttgcatttaccgtctttctttgcttattaacaattgtttctcgctgagtggccatacttcttcctctttttttagtgagtggaagttgagtggttttatttggtacctccactctttctggcgcattctgagcaggaattaaagatttagtcacacctttataattggtaaatgcatctggcagattattcgcaagtctttgcaaatgtataattttctgaacttgaagatcagtttcagtagtacgtgagtttgtggctggaataccatgggcatcccaattaatttcgtggcattctttctggtacttgaagtctccccctaatgccgggaaatgttcctcatcaaagatagagtcagcgaaccgggcagtaaatagatcacctgttaagggttctaaatactttatgatcaacggagatttgaatcccacatagatccccactttcctgtgtgggcccatagcagtacgctgtggtggtgagatcggtatgtatacaacacaaccgaacttacgcaaatgggaaatacttggaggattcccacgtactaagtgcattggggaagtttcatgatatgcagttggtcgtagttggacaaggtcagcagcgtgcagaactgcatgaccccaacacaatgaaggtaatttgcaattcatcaataatggtcgagcaataagcttaattcttttgatcaacgattcagccaaaccattttgtgtgtggacatatggaacagagtgctgaacctgaattcccaatgccatacaataatcatcgaaagcatgggatgtatattcggcagcattgtccatacagattgattgaatcctatgttcagggtaatttgccttcaaccttataatttgagacattaatttggcaaaggcatggttttgtgtcgatagaagacacacatgagaccatctagtagatgcgtcaatcaaaaaccataaagtacctgaacggtccagattttggcacaatagggccacagatatctccttgaatgcgttcaaggaatttaagtggttctgctctaattttgagataagatggtctcaaaatcagtttcccagtagcacatgcagtgcatacgaaatcagagggtttggaaaatttatcagtgatcaaatgatgaccaatagagttgccaataatttttctcatcatctcgataccggggtgcccaagtcgatcatgccaagtgtggaatgcatcaacaagtgggtccgttgagcagtattcgatgaacatatcatccatcgcagagagtggagcgacatcttctgggagaacattgaggttgctctctgggtcagcaggagcctggtgagaacttgcaacctcagggcactcttcatgtgtaagattgaagtgggcttcaaatcttgggttctcagaagatttttttgtccttgagggatttttggtacaagagaacaagatgtttcgggatgcggcagcctttagcgacatgagtgtcagatccacacctgttgcaatgcttgttgccattgctacgaggttgtggtgccttacccttcccttttcctttcttccgacccttgaatttgcgcctgttgttgttgcgtttgtgctttccagtcagattcttaggattattcgaagaatttcctttgaatcctttcttattctcagcattattctgtacattgaagtgcaggcagtggagcagagcccggtgggcgctattgggcattctttaaagaaagctcatggtgtctttttgcctgagtcaatgtatgtataagcagagaatgtttctggaaattgttagcgcgatactgttgagtcagtattctgtcctccggaagcatagttgatagagttttctctatcttttctacctccgttggctcttgttcacaaaacttcaacctggaacaaatgttatgaacagcatggttgtattctgccatagttttaaagtcctgtaggcgtaaatgaacccactcataattagcctcaggccaaatgagttccttttgctgatcataacgctcttttagagctttccaaaggttgagagggctcgtctctaacatgtattcatgtttgagatccttgtgaatgtagagtcttaaaagaaaaagggctgtattgagcttcctgggctcaattgctgggtccccatcattgggttcctcaattgtatttaaaatcccccgagaggcaaaattgattttgatatcagaagcccagatgggatagttagtcccatcgagggcgagttcgtcgaactcttttgttgccatgtccctacaatcatggttaacattattaatttacagaggtaaattaataaaaacatgatattgtggttgtaatctcaatgcgaaatgtaagacttcatattctgtaatgttaggtggcacaatgtggataatatccaagtaattaaacagtggagtagatctcttaatggtgggcaagttatacttgctgcctaaaacacggtctccaggcaaatatattctggtgaatataccgcagccaatgtttaggactccactaccttgtgttcaaccaaatttcaaataatctcatttttcaaaacatattctcggaaaataacacatgtgggtaatcatcgtgagatgtagacctctgtgagatgggcgaaatgctcgctgcctaggttatgaccagtgcggtcaatttgtaggactccatcgggtaatcatctcaaaatgtagaccacttgatgatgggcgagatactcgttgcctaagttatggtcgatatgaccaaagtataggactccatcgacatgtgattaatttccaagtcaaagtgtgaagtggaacatgtattaaatcctccattaattatgttgtacataattaagagaatttgctaaatcaaaatacagaatttatagaattttgtaaattaataaagcgagaaagtagagcgtgtcttgaaataatatgcaaaaggcatgttattaagacaacaaataaatttagtgaaacagggtatttaaataaacacctatgttaataaacacataacatcagtggtctataggaccattacataattgtttgtacaactgatgaactgcttcgactaaattacataaaacattagggactaaaatgtaattgctgctgaaaataaaattaaaaactaaaattaaatggtaaattgggtggtgggccgaaatctaaaggattcggcctaccaccgtgtggcactaggctggcaggcaaggggggcggtgggccggcccatccggccctcagcaaaaaggcaggggaagccgtcggggggttagggttaaccctaaccgcccccacgatttcgctgctgccgccgttttcgccgctcaaaccgccacccttttcgccgcacaccgccgccatttcgctgctaccgatgccgccgttgggcgccaccgacgccgacgaggggacgccgagggggcgctgcccttcctccgccgccgtggggcgccaacgacgccaccgaggggggcgccgcccttcctctgccgccgccgcaccatctgccgcccccatctccccgttacggcaccgatgcatgatgcgccg

SEQ ID NO: 21781 - DNA, 5049 bp, Oryza sativa
gtccaccaccgcttgcatccacaattcgctacccaccgttgtcgccatccaccatacactggcgccacggacgcccctccgtccgccggcggtttgccggccggattaggccgacggctcccgatcctcatcggaatcggaggccggccgagcccggacgccattccccggcaccccgttagggagtgtacggctaggagagccatggggaatggcgatgaaggtgtggcggaggccgggacggcaaacggcggcttcacctgcatgacgacgagacgaggacggattgaagaagggcggctcccccgtgcgcgcagccagggtaccggttctgccggaccccagtagcgcgggagtgggggaacggcgtcggcgtcggcttggtgtcggtggaggtggtgaaggggcggtcagtggtggcggcagcgactccatctccagggaaaggtcacatggctcgccgggcagtgtcaccactgccgtccatccgtggtaggcgcagtactgcaccccctgcacacagatacggcgaggcacggcggcaaccggagacggaggcggaggaggagcagccggagtagtggccaccacgatgcgtcggcgagggtggtggcgacggccaccagccctagcccgacgttcatggtgttagtggcgaccgtggtggtggcggcgactcctctccgatcgacggagaagatggtgaaggcgacgggcgcgctgattgcgagggaggccgagaacggcatccataatccaatgaaaggtaggcatcgtaccttctctgttgaatctcctgttcgcttttctgttagatcaaaagcgatgtttcttccttctttcacttcgcgatctccttcgcgagagcgaaagtgctgataacgtgttgaatgtggatagaattgattgagcgagagagagaattgaacacaaacagagcgaatcgatagatttctcattgatcaacagtacatttatacaatgtgaagcggtgtcaactgcaggggacgcgatatttaggaacatcgcgtcggttgtcgagagggacgctaaagggagagagaggagcgatctcctcttctctaccggttagtataggaaccgttgttcctatttccttgggtggatgagatcacccgtagtttcttaacaaaaggagcggaattgttgtgtgagaaaccaaactggtttgttgttcgtgtggacactggacagagctgttgactgatcgatggtggtgcggtggtgccatttcaaacttggcaaaagtaggtgacacggtagttgaatgttttgtacgtagtggccggccgctggggccacgagcgtgccacgccatcatcaaacacgtttctatctttttctttttggaggtttcgttttctcttggtcaacattaatccgctcgatcgccacgtgatcctgttgtgtcttaattactcgacgctttgatcaaacagcttgaccagcaacgtcgtgtggcatatgcatgcaggcacgtacacagtcagatccaccttggcaagctataatcctgatccaaacctgcctctggaactctattataaatacgtgccttgtatcggtgctctcgatgaactctacaagtcattttgtcgccatcagcttctttcatcaccaactcgatcagaccgtgagtggagtaccttttaattccttagttttccttagtttatactgcctctattttccttttaaataaactaattaaccaatgcaacaccgttcattaaagaatagaggaagtatattttgttctcatgtgtgtatatatatatatagctagaagttatttaactacctttaaggcatttaacttatcgatccacatgcaggcagagacgagggaagatgagctcgtcggcgaagacgtcgtggccggaggtggttgggctgagcatagaggaggccaagaaggtgattctcaaggacaagcccgacgccgacatcgtcgtgctgccattcggcacggcggtgccagaggattttcgcttcaaccgtgtccgaatcttcgtcgacaccgtcgccgagacgcctcgtgtgggctagctagcagaatatatatagctttaaattaaaattaataatggttagtagcgatgctgctgtgccccgaccgtatcctttctctaaaattgatatcatatatatgtattatatgtgtgtaaatcatcaatcctgggatgaaaaagatgaatcagctgtcaggaccactgcatggtcttcttgtactcctctcaaacttgttcttgcaacccgtctaaaaaacgaatttctaaaaaatgaatacggacatacatatatccacactagtacagaaccgggaatcacaatcaggctatctgtgatggaaatgagcgacccgttacaaagatagtcatctttatcaagctgcaaaaagcctcatcaaagatggcccaagagaggtagaattttagtcctcaggataggcccctcacggataaccaacattcatatggggtgtgatttgcccgttaaggtcattagtgacggcccccgttacctatgagggtcatccgtgacgagcctagtgttaaggccggataaagatgactgtgaagcctatcacggattatccttaatctttgttggggcttgtttgcggcccgttacggataacccatagtataaatactcccaaactttcgaaagaatagtattcctatatagcagactattcatagtttgggagggagggctagaggggcgaatttttgctcttcacttgaaaaaaaagtattccaagttaataataaattaccaatataacttcgatgtaataattactagctacatatacatatcattaatttcatttcatacattgcagatggatagaagatggatgtataaaagtgaccgatctagcatagagtattgaaggggcgttgctgatttcataaatgttgtagagcaagacaagagcagaacaaacaatgaatggatgacttgtccatactttgatcgtaagaatgagaagatgctttagaatagtgccaaaacacgcatgcatctgatctaccgaggcttcatggatggttactcatgttggactaagcatagagagcaatagctagagaatattggggataaagctggcggtggtctgaacaaggaagaacacaaacatgatatgtttgttcaatcctcgttggctggtgatcgggaggatgtcaataatgagactattccagtaatgttgcgtgatgttgaggacctaacttacaacgagagggaccatgagaagtttactcagctgatgaacgattttgagacacctctgcaagccagatgtacagtaaagcacacgaagttatctgcgaccttgtatctgatgaagcttaaggaagtaatggctggatagacaaaagtttcacacaactacttggatgtcacctttgaacctttggctgattgaaatactccattgttaaaataatggtgatgtctttatagccataaatgatagttagtgttaaaattttttatcacaaatattcacttttttggcgatgttgcatgtgaggagtaacaaaattccatcacaagaacttaaactcctaggaccaaagtttttttttcatgacgacaactattctaacaaaatgtaatatttttgtgcaacaccatcactaagaaatattttgaactcaattaagcccaatttgggaacaataatattcaaatatttattccgttagtattctctcaggttggagcttataagtcatactccaggcctttcatgagtatctagagatcacccaaatctcatagactgtgactagcagtcgaactcatataagtgtgttccttctaagatgttctgcaggtcaacatctctgcttaatgaaagccacccggaatacattgaggcataagccatcctaccatacagaatagaagagaagtacatcataaaaatgagcccatttaagggtctcttctttcggttacacaatagtttgtttcgccatccaaattcacgggatctccgatcacaattgacaggtttccactattgtgcaactctaagtgggtctcaagtccatttccctcgatgcactttctatcacattacgtggtagccccttggtaaactgatttgccagatttttagctgtctggacatagtccaatgctatcactccggagtttttctgctttctgacagatttcagtcttctctttacatacctagatgacttcatgttgtccttcgaactgttcaccttaataatcactgtttgattatcacaattcattaggatagctggcactggttttccaaccaccggcaaatccatcaggagttcacgaaaccactcagtctcaactgtggcagtatctagtgctgtgagttctgcttccattgttgacctcgttaagatggtctgaaacagcgccacctccaagtgtgaacacatatccacttgtggcctttatctcatcagcatcagatatcaagtttgagtcactatacccttccagtacttttgggtacacagtatagtgaattccatagctcactgtgccctttagatagcgtatgaccctttccagagcttgccaatgatcatctcccggatttgaaacaaatctgctcagcttgctcacagcaaatgagatgtcaggactcgttgcactagccaagtatatcaatgaaccaatgatatgggagtatctcaattgatcccttgctattcttcggtttttccttaaaagcacactagagtcataaggagtaggagatggcttgcagtcactataaccaaagcgactcaaaacattgtccacatagtgagattgcacgagtgtaatcccaccctcatctcctctcagtagcttaatgttaagaacaacattagctactcccaaatccttcatttcaaagctttgggacaaaaagtccttaacctcctcaatcacattgaggctggttccaaaaatcaatatgtcatcggcatataaacacaagatcactccctctcctccgccagtaccgag

SEQ ID NO: 21782 - DNA, 15316 bp, Oryza sativa
gtactttttaattgtaccatctggcctaagctttttcttgaaaaccaatttgcatcctacaggcttgcacccatatggacgctcaacgacttcccaagtactattagatataattgagtccatttcactgcgtaccgcttccttccaatagtcagcgtcaggagatgaatatgcctcttctatagttcttggagtgtcatccacgaggtatacaatgtagtcatctccaaaggattttgcaaccctttgtctcttactctttcgagtatacaatgttatcctcctcaggattttcctcaggcgtttgattactgtgttctatcggtgcaaagtgctcatggggtaaaacaggttcttgactagatgtgctaggtgtatttttcatgggaaattcactcaaagaatgtggcatctctggactcagtaattataccaacacgtatgtcgggtactccagagtttactattaagtatctataacccacgctgtggatagcataaccgaggaacacacagtctacggtatttggtccaagtttacgctttttggctataggtacatttaccttggccaaacagccccatgtgcgtaggtatgagagatttagtttcttcctttcccattccttgaacggtgctactttcttatgcttcactggaattttattcaggacatgaaaagtagtcaaaattgcctcaccccaccattccttgaaaagtcccgcagtgtctaacatggcattcaccatctcagtaagagtgcggttctttcttttggctaccccatttgattgggtgaatagggaggcatcctctcatgaataattccaaactcttcgcaaaaggacataaactcattggaaaaatactctccacccctatcagacctcaaccatttgattttcctttcaagatggttttctacctcagctttatagatcttaaagtaatacaatgcttcatcctttgttttcaataggtacacatagcaaaatctagtgcaatcatctatcagtgtcatgaaatatttctttccctctttactcaacacgccgttcatttcacacagatcgaaatgaacaagttctaggggtgccaaattcctcgcctcagatgcattgtgaggtttgcgaggttgtttccattgaacacaagtatggcacttagaaccttttactaaagtgaattttgcaattaaactcatattagccaagcgtgtcatacaaccgaaattcatatgacaaagtcgcgaatgccacacattgaactcatcattctcgctaatatggttcacatcattattattattacgcatgtcatccaaagaaaaacggaacagaactccgctgacataaccttttccaataaaagttccatatttagatacggcacatttattggattcaaacacaagtctaaaagcatctctacacagtagagagctgctaactagattcttctttattaaagggacatgctgcacgttctttagctgcacggtctttcccgaagtaaacttcaaatcgaccataccaacaccatgaacaaccgcaagcgacccgtttcccatcaacaaggaggaatctctcccgacttgataagaagaaaacatggaaatatcagcacacacatgaatattagcaccagtatcaacccaccaatcaggtgaatgaaaaacagagagaattgtaggtaaaaatttaccataccccgatgttcctccgccctcgctaataaccatgttggcagacttcttgtccttgcgattaggacaattcttggcccaatgcctaggcttaccgcacacaaagcagtcgcccttggcctttcccttgcctttatccttaaaattggtagtagcctttggtttgacatcaggcttgactttcttgttgttgttgttgtgggatgcgtgagggttcttcttttgcaccaaattggcgctagaacctccctcgatatttttgccctgttgtcctttgctctcgccttctcctcaacacccaaagagccaatgagatcagtaacaccgaactcttgcctcttgtgttctagagaagtagcaaagtccgaccaagaaggtggaaatttggcaataatgccacccgccacaaacttgttcggcaactcgcagttgtttgttctcaagttcctttgtcagcatctaaatctcatgagcctgttccactatagaacggtaatcgaccatctcatagtcatagaactgctccatgacatacagctcgctgctggtgtcggaaactccgaacttggcctcaaatgcattccacatgaccttccccgaaggcatgtgcatgtacacgtccactatattgtcagcaagtatactgatcaatgttccacggaacaggcaatccgaatcctcgaacctagcctcctcctcaggagagagaggcagttcacttcgttttttccgtgaaatatagaagcattgcatcgctgtcaaccacagtagtgcacgtgcttagcatctcttatagttagaaccatcaaaaacatgtggtttcagtattgcagcaaagccaactacctaaaaggacctatcaggtttttggattgttgagaatttggtcataattcggcatattttaatccaaaatagcaagataataaacatgatatttacaatgggatttgatccaatgatagtggcgaatgtaatcaatatgagtatgcttaacgtagaataagcatcaacaatcacataataacgcaatgttgacattgcgatgaacattaacattaaaacttctaagtgaaataatataagaaggttataccgaatggtcctccgctggagtttgaggcagtattgccttcattggtgttgacgggaacctccttctccttgtctctagtgttgccgttgtctccagtgctcgatatgttggtgaagacgaagtagacgttgatgaacagtgagtagtctcgtcttgcgctccccaaaaacctgatcgcccgcccgtccgtgcatacgtcgcagcagtgcgtggtttcggaggcctactctcccaacgcgtgtgcatacactcgtcgggatgggattaccgtagcagcaacagccttggaaatggatgaaagtgtgtctcacttctccttagggagatcaaatccattctcattttataggaggaatggaagatgaagagtaagagtcatggaataagaagaggaatagagtaactaattctcatcaattagccatcaaccatcctccactacacaaccatcaatcaaccatcaattaggagtaattagtgtaggttaccaatgcaatggaataggaagaggaatagagcaactaattgtcatcatctagccatgaaccatcctccactacacaaccatcaaccatccatcaattaggagtaattgatataagttaccaattccctaatcaaatggattaattctgaaaattcttcgtcccattgatgtcccataagagaatgaatacacatgaattcctagcataatgagccttgaaatttatttgatttaattgatttaaatggataaattacccaattaaatctaacagaaactccgttagaagaggcgaaggtgagaaatatatggctatctgctcatcaagtttttgactttttgttatactattctttcaacatttgtagcttgtcggtccactgttctttcgtaagatttcaactcctcatgttgagactgttgctattccggtaactaagcatttgtgaccgttcatatgtcgtcctcccattcgtacgctgggccttcctcattagtgtgaattgcaagagtggaacaaacggagacgatgtaaaatgagaaaggaatactcacaggtggcacattcccatatttccaccatatttatatgctatatagaacaactctcataaactatatatatacttccacgattgcatcagcttgaggttattgcttaccgaaaacaaaaaaaatgccatagaaatgagaggccacgggaaaagaagatgtcgctcaagaaatagtcgccgagagcattaccgctggagcgttcagttcaagtccatcgatcacttgacatcttggtgctgcagcattagtggcaatctggcaagcatggtcttaccggcttttgcgttgcggtcaggctgacactggcacagatttccaacggctgcgacgcgctgtaaaccaccatgggtctcatcactccttgaggttatgaacttaatttggtgtagacgcgtggatagttttcagggaaaaaaaagggggaaaaacatgtgattgatttatgtacatttttgtttcgttggttagatatgtaacaatgactactgaatattttgccaactcatgcatccagctatgtatctctaatttataaccgtaactcaatcgtataataagcgactgatgaacaccagctcaggaatgacctcaagctaagaattttggggctagcagcagtggcaaagtcgaagaaaaggcagatatcgcgattgacatggctgaaagaaggggatgccaacacaaagtttttccacattcacgcaaactcgaggagaaggaaaaaccacattcaccaactccatacaacaagtgctatcctgacagaacatgaggaaaaaagtgacgcgcttttcaaccatttcaactcaatcctaggcaacaaggaggcgtgaaattgcaccctaaattggaacgcgatggatctaccacaggttaaccccgatgaactagatgaaccttttacagaggaggaagtttgggccgctttaaagcagatgccggcagaaaaggccccaggtctagatggctttaatggtaccttctacaagaaatgctggcagctaattaaacaggatatcatggatgttttccagtgtttgtataacctgtcaggatgaaactttggagcactcaacagagcagcaattaccttgcttccaaagaggaatgcccctaccttggtgaccgattttaggccaatcagcctcattcactccgtcgccaagctgatatccaaagttctagcaataaggcttgccaggcagatggatggcctgatctctgttgcacagagcgccttcatcaaaaaaagatgcattcaagacaacttcctgtatgttcggaacgtgctcaggaacctaaatgccagcaaaaagccaacactttttctcaagctagacattgctagagcttttgattcggtctcctgggaatatctacttgaactgatgcaaaacatgggttttggcccccagtggagaaattggatctgtttgctcttttccaccgccacttccaaggtagtcctaaatggagaccagggggaatgcattgcacacagacgtggcttgaggcaaggggaccccctatccccctatctctttatcctggctatcgaccccctacaaaggcttctacatctatcgaccgaaggtgggcaactaaccaacatcggaagtcgccatgctagattgaggacttcgcttgatgcagatgatgcagctgtttttctcaaccctgtacaaagcgaggtggatgttcttattaccatgcttagggactttggcaaggcaacagggctgcacgtcaatcttggaaaaagtctggtggcaccaattcgatgccaggaagtagatctggacgacgtcttgcgtagttattcgggggcaagagccagcttcccactaacttacctagggctaccactcactcctggccgcctacgtaaggtgcatttccagcctctccaggataagatcaaaggtcggttctcgggatggaagccatcattgttgtacatgggggggcgccgaattatggtgaactcagttctaagtgccatcccaacttacaccctcacggtgctgaaaccgccgaaacaatctcttcaagaaattgacaaagcaagaaggcggttcctgtgggtaggtaatgagaatatgcatggcggaaaatgcaaggtcaattggcttaaagttttctcacctgtccggtacggtggtttgggggttccgaacttagaaaagtttgccagagctctttgactgagatggttatggttcgaatggaggatgccaaagaagccttggatagggactgaaacaccctgtgatgaattggataaggatcttttcgcggcatcaacgagagtccaaattggtgacggacaaaaggcgagcttttgggaatcaaattggatcggtggccaaagcctaaaaagtcaagcacctaatctttataggcattcgaagaggaaaacctgcaccgtctaggacgccctgcaacaaggaagatggattaacgacgtccgccacagcctcaccattcctcttcttgatgaattcttccatgtttgggaaattttagcccgtgacaccccacaactaacagagggggtacaagactcgattgtttggcaatggacaactaatggggaatacggtgcaaaatccgcgtaccaattccaattcaatggaatggtactctcgccatcaacaaagttgtcttgggaggcatgggctccggcaaagtgcaaaatctttagttggttggttcttcaaaaccgggtgtggacaactgaccggttacagatcaggggatggccaaataattatttctgccagctatgctttcgaaatctcgaaacaatcgaccatcttctgtttgaatgcccggtctcaaagcaaatctggtttgggattctcacatggctgcaccaagggcacatcatcccgaaatggaacacaagtagaaacctcttagattggtggacacaaggaacaagcgacccggaagcaacaaaacagaaaggactcagagctctcttcttgctcattgcttgggaaatctggaaggaacgaaatgcaagaatcttcagagcaaaggaggcgacagtacaccagatgattagtcgcatccaagaggaattaggttggtggagtatggccggcgctaaacacattgggagaatgttgccatgaggagctaggaaggctacgtgcaagcttgtttgcatgttgtcatgtacagtttttctcttttttagccctttggctatttgtactttttgtccttctatcaatataacgccagtcaattctgaccagccgttcgaaaaaaaaagactaaagcttgttataaaaattcaattagtttgttttggattagatgcatggaatttgtcgagatcttatggaagtatggatctgtcggtaactccaaattaagtgactaaaaaactggtaaaaatagttacattattgtcatattttgagcaagttagccatacatcttgcctgcatatcaacgtcatatgtccaagtaacatcatggtttcctccctgggctacggttcgagatcaaataccaatcagagagctgctagctatggtacactaaaatgtagcaagcctagcttttcttgtgcttcttggggtggacagaattgcaaagttctcatgttgccgcctcttgtctcaccaggaaaaagggaaatactcagacacgtaatgggataaaaactagaaaatgctccatcctatgaactagtcaactcttcacttgtgaacaggttttgagtgcagcacaaatttattcacttgtgaacaaaacaaaaactgagagaattattggagcgtatgatgttttgctgcgaatagatcgggaacatcttgctacagttagcccgattgaacaaggaagaatggaaggatgagttaaaaaaagtagtccagagagtagtagtcacagagacgggtagagagagtctgggggcagcagaatcagtatttagtaatgttgtttaattgtatcagtattttttttaaatagggtgagtgacatttgggaatgttactatgttatttttaattttgaaaatgcaagtctaatttcttaaagtgatatacaattatttaatctatattttcgatttgtttgtatcttttatgtatgatccgatagcataaatatggttataatacaactcaaaataacatatatttttacatatgagcttaaattattagttttgtttttcatctaatctaataagtgagaaagaagaaaaaatgaaaataaagacgtggggctgggcgtgcttatgtacgtaccgtacttttttattccttcctacttaccgatcagtggcaacggttttggggatatatttaattggtgacttttaagatagatataatggtgaaaacgaataatgataggtccatcagattaaatcaaaaccaacagttagatattttgtttatttatagaatttttaggatttattagagcgtcacgtggcggtttaggataaaaattcatttgtctaattatggaactcaaattgttaatttaatagaaatataatcgtttaaatttaacataaaaccaccgatgaacctcatatccatcaccgtacatgggacatgcatcagaatttctttggcaaccggttttgccttcgtgagagaagtaaaggaattaagttgaccgtcagttatattaatatgtaacaaatcatggattatatcttaacaaccgaaagatagaaagcgggtgtgtacgtttatgcctgcacatgtattcggataaatctaaattcttaaaaaaatagatccactatatttaacgaatatcaatggttaaatgttttcttttttcatagaatttttaagaaacttttgaatttataagagtgtcacgtggcggcttagaagcgtttttaggatgcgacgtagcagcttgaagcgtttgtaagaagtttaatggactctagtatataatagatagatagatagatatatgatctgtttggtacaggtctagctctagctccatgtctcctagagctggagttcaatcaaacagtttcaactatacgtaaaatcttagttattaagaccggactggaccagcggttggaccggggaaaaaccggaaccaatgccccaaccggtccggtccaggtaaaaagaccggcatgcaatcggcccagcaataaaccggttagaccgcctggttttagagaaaaaacgccattaaaccggggaataaaaccgcttccaaccaggcttggcggctgctgtacgcgcgcatgggtgctgttgggggaaaaatgagagaaaatgtgcatgggtagcattcgaaccggttagactgcctggttttagagaaaaaccgcctggttttaaagaaaaaacgccattaaattggggaataaaaccgctgttgggggaaaatgaaagaaaatatgcatgggtaggattcgaacctagaaccataaacaccccaaccaccaggctatcatgtcctttgtgtttagatagaatgcttaatgtatttaatagttattgaactggattaaaccaacggttcaaccagttgaaccagtgaaccattgaatcgagagcctcaccggttcgattaccagtccggtcttaataactatgcgtaaaatgggagtgagaggagctggatggagttctcttactaaatgaactatagaggtagagctgggcttaggcaactctaaaactccactccagacctaatttctagagttaaatttaggagttagaaatctactaaataggcccataaatttgcaattcagaaactaaaagtgtctagtagagttctgcactgtcacaccctaaaaatcccaaatatataaattgttgtctaaattggaattattagaatttattttaaaagcctagaagagaagatctagttttaattaataaattccaatataaaatggggccagataaaatttcattaaatactttgcttaattctataattcctagatttttctgggatttatttgagctaaggaagtatttttaataaatggaattgcatttcatgaataatttaaattggaaaaggttttaaaagttctcttttggctttgggccgaaagtcggcccaaaacctctctctctctccctcggcccagtcggcccagtccggcagcagccgcccgtgcgcgcgtccgcccgctgacaggtggggcccacctgtcagtcttcgtcttcctcgcgccgctgccgcgcccaaaccctagctgagcagcgccgccgtctccttccaaattcggccgcgcctttcctttcccggtgaaatcaatagaggggaaatgatccccgggatcccctctatcttttctcttatggaatcgtcgccaattcggtttggaaatccgtggattcgagttcaattcagatcgatctctctcctccgaaccctaaaccttccatcgcgtcaccggtcgccgtgggccttcgccgtcgcctccttgcccctataaaaggacccccaagcccgccgctacccgccgccaccctcgccttcgcctctcgtcgccggtagagccctagcaccctgtagcctagcgccaccgtcgctgccgttcgtccagccgtgcgccgccgccgctccggtcatcgtcgtcgtcgctcgggaaggccgccatcgtgatcaccaagtcgtcgccgacctcgtccgcccctccgccgtcgctgtcgaccgccggaacaccgccgtcgtcatcaagccgaaggtcgccgccgcttcttcctcgacgccatcgccgtccattgatcttccgccgttgttttggtcactggtgagttcgccgcgtcgccctctacgtgttggttccctccgttcgcgttgtcgtgccgtcattcgccggcgagcatgcacgcccgagccgccgccggtggtgacgtcaccgctgacgtcatcgttgccatccgtcgtaggcctgtcgtggaccgatagatctcggccgttcgtttttggatggatcggtctcggtcgttcgtttccgtgagccgtcgccgtgcacccagtccatcgcgaaccctagccgatgacgcagtaattcccttttccttttcaaaaataattcattattgcgtcataattcaattaaaatccatacaagtgttttaatccgatttaatcttttaaaattcataactaattcatcttagctcggatttagttggttcaagtctctaaatttttctaaaattgagatctacatgttagaaatatccacatgtactgttcatgcttgtttatgtgctgttttggtgattttactcttttctgtttagattccgacgtttccggagagtccgttttcgcaggagaagaatttgaagagtttcaaggccagcaaggcaagtcacacagatcccaaataaccctttgagcatgttgatcccgtttaaagctattgtttctattcaactattgcatttattttcgaatgtcattgggtggaattaacctattgtttgttatagcccttttgttcttgattactttattccttgataccttgggttattataacttgactagttgggctttatatattggttcagctagatattagatatgattgtttagccatgcttagaaacattagcacactattgggataacttataactcactattattcaatgttggcttaatgatagctcatgatggttaatcatgattggttaattaattaatttgccaactaaaacctgataatggtgggttgtgagcacatggttttgatggtcgtgctcatgacaattaaggaccggttcacgagttttggttgtgaaacattaaccgtgccaaccacaagccagcgtgggcaacggctttaccttttgtatagcatggttcattgcggggcaccagactgagaagtggcggagataagcccacgggggtcgctggggagtccatgccttgtttataagggggtgattatgatccaggaatggtgcgctgtggtggattgtgttgtgcgaggggtactgtcacagctcctttctgaggtaccgtggtggtattgaggcgcatggtgacatgttgtggggctgtgtcttgtgggtacagtggtacacctctggccagagtaaaactattcgaatagccgtgcccgcggttatgggcgggtctaacaatgtctttcgtgattagtttcacacttctcaccataataaaagatgctataactggtaataatttgattcgctcttggtttggaatggtatattcctggttttgagatagaactgtgcagccgggatggttgttcagaatggttgggcctatgcaacaggatatgttgtatagcgttggattaatattttttaattactacttaactattttattaaattctgaaatgtttattaaatgctatttatgcaaatgaaaccctactatgccatcctttgttatcctgtgcacttgcatatttgctgcgtggcttgttgagtatgtcatatactcaccttgcaatcattcatcagaggaggagttctacagtgatgctgatggtgtggaggattaggtgtagccctggtcaagctgcctgtggagtggagtcgtctgcgccgtttatcttatttttccgctgcttagatctttattgattgagaggaactatctacctctgtaatgacattttattcgcttattaattagagtaataattgtactctattatcaatttgttattgtgtgcctcggctgattcctggacgagggttcacacacatgtaagcgtttggaattttggatagaaattccgagcgtgacaagttctcatctagacagcatcaccacatcactccatgcctcattcttaccattccctgttctagccatggactgtaatcgtcatgcaccaagctctaatcatcttataaaccacaaacacaaaggatacggatgaagccgagtgtccccattgtacatagtattcgagtaatccaattgttttggcattaatagttacaaattctgaaattgaagcagtgacaaataagatggatattcctcatccaaatatgaagacacgaatgagatagcattttcttgggaagaaatgtttgaatcaaaacaggagcggaagctggcgaacaatgagcatgattatgaatgcattaaaacaacagcgaaatttcttcgtcttcatctactagtttacaagaggacatgcatcacattcaccagaaaatatataccccccacaatttccgtaatgagcaactatagggttggcgcacagtatagtagtatagtagtaaactacggtcaagtccgcaatgagcaaaatgtgatgccaaactttaatttttgcacttgcgaaagggtccgtagagaagtgctctgtaggcaccagcagcgcccaccccatcttgccattcgcacgggagtgccactattgcgaaattcttattggtgttggttgggaacaactataggtgttggtttaacagtaagaatcaacttggaaataccaatgcctaatagtatagatgtcgatttaataactggtacctatataattgataataggtactggttttgtctagtatccagtacttataattgataataggtgatgattttctctaaaccgacacctttaacctattatttagggttttgtagtagtgtgccgacggcattcaggtgccgttgcgtctgccagtttggttttgtattatactagcaagactttaaattgaattatttgagcactattttacgtattatgtattttgttcttttttgccgtgtacggtggcagaacaacatacatacgacaaatgttgggttgtttaatttcatttcttgctctcacttagtgccagacacattgcctagtaaatttcttcactacaagtaaattaaagcagaataaattgctctaccaaacatccatccctcttctagttatatacttcgtcccagggctgaatcagctggagggcttcctgagaaacggcgacagaaatagcatgggaaggttcttcgtcactcaaacaaataccccaaatttaggccttattagttttgaaggattcctaaaggaaatctcaattcctttggaataagcaatattcatgcattcggtttgtaggattcattggaaaattttccataggaacactatgccaatcctccaaaaatcctccaaaatatactaattccataggaatgaaaacattcactctatcctcttttgtttagctcggtggaggaaaaattcctgtgttccaatcctttgttttacacatggattcctatattattcctacgttttttctatttctgtgatttggaaatcctgtgaaccgaataagccctacttaggaagcggcaatgaaaaagaacgcgtaccatggcaataagagaaccttgtaaaagaagaaaaagctcctggaaatccaaatgttaccgacaactttagaacatataaaaataaaaacaagatctttttactaccaatagagaacaccataaaatggatttttttgtacggtggcgctaatacgcgcgctgcgcgtggaatattagtttgagcaccgcacaaccctctctccttccggttttctcttttttattatcactccaccttccatgtttcttttttctcttttccatctcatccgtgcttcatcaaaaggcccggaaaaatattaaccatccatattttttcctctttcattccttctctgcattttctttagcattttagttttctttatctttttagtaaaatatttatcgtgtagtttttctttccgggttttctgtttttctagtgtctatccacgtttcaaaagcaatgaatttactccatagaatttttcatttactcccagcctaccacatctgctcattcaaaagtaacaaatttactcgcatgaatgcccgtcatcatacaacaccattcctagatgtccgtaaaagaattactaccagcttgcaatgctagtaattcttttaccacagttatcaatattgtttagacttcgtgatctacgagtaaaacaacaccttcctctcgttatagcctatgatctcgtagccactatgcagtaatatgttactgatgtgttcaatacacagtataagagtaaaaactaatataggagtattgttaatccgtatcacaaaatggttgtacgaatgaaaaacattacaggctcaatcacacacgactgttaatataactcacagatgaattaaactaaaaaagaaaaaaataattcagccaaaaattcatgatgacgttgggatcctggtggctttgctggatctttctataaggatagagaggttggtttgtgtcatgtgactggtagtggagagggcaaccaggtgaccagcagtagtcgatgatggaatcatggaaagatgtagcggcgtggtacatagatgagctcacatttgcgcagtagcaaccttccatcatctagcgagcatgaaataa

SEQ ID NO: 21783 - DNA, 1121 bp, Oryza sativa
ggccgtgtatttggccacctttccggccagagccaactcggcctgctgtttgttgccccagaggaggacaacatggagacgatcgtcgcgcaggatgcgcttgtatcacgtggaactcgtcgccagacaccgcagatcttgcccgtggcattctgatagacactgagagtgcccgccaaggtggtctccagttgatgctcctccaggattacacccgcatcatcaacgaattgaatggcacgcggacgaccgattcgcgatgaggtgtagaaggagtagtatagattcttcttgtggaacaggaaacgggcggtggccaccacattctgcggattgtaggtggtgtacatggacttcatttcctcacccttgaggaaataggaggtgcggcccgttagcaacgcagcgtaatctataaatagggatcaaatgaaaggtggagataatccaggtgttagataaatacaatagttctcttgttaattaaatgtaggagctggtgaatgggattacaatttcccgcaggatttggcggattctattgggatctgggtgggtgtccggtacttttgtacttacgtttcatgttgcgctcttcctcttcattgggcacgggcacatccaaggctacatccgtatctgaaagatggagggaatacaaatagagaataagatgatgctgggcgataaggtacgaccttaaatggaatttagatagcaacaaatgcttcaaagcaaccgaaccgccgccagccattcaccatccatccagccagccatccagccagccatccagccagccaaccaactatccatccacaatttgtggacacaattccggcattcaaccaaaattccagttgaatgggtgaatggtgaatggctgaatggacgaatgccaggggatcatcatgaatggcaatgcaactatcaggtagagatcccacctccgaataagaccttccatttccacctctcgcttccacccaggtggcattcattaatcgtgcataaattgagggcaggtagaaggtagagtttctcgaacgggaagtctaacctacatctaactagggaagtgctttgtatttgaggatgtgcggactactggggttctgaat

SEQ ID NO: 21784 - DNA, 31593 bp, Oryza sativa
tattaatcatagcacttaacgtgggccaatgaaatttattagaatttaatttggtctacccattaatctaacaggcgcaaccacctacgttgcacagcgcgccctcgcgtgcggtgagtccacatggcacgatagggtagcatacgcgagacgggttgcgatacatggaaattgtgttgcggcactcaacaggagcagcgacggcatgtggttttttttttttttttgactcctatgtggttttgttcgggttgatgcaagctcgtgccgtcgtgcggtgtgggcacaacaggacgcagcactaccggctgggcttggttcatgccggggagcaacaacagcgagtagctccagcagatggcgatgagacaacggctgtgcaggcggccgtaacaggcaattccaacagctccctggtaatggcggtggcgacaggtgccaggtggcttcgctcgacaattaccctataccctatttgaaaaacttaagactataagaattgatagttatcttgcgagaatctagagaagctggatttttcagcttgtaacttctagtttattttatggattttacaactacaaaaaatttttaaaatctatataacaatcagaactgtttaagggaaggaagttgaagattgtgcgggaagctgcggttgctaaaaccttcccaaacaggcccctagccagctgctgtgccggaatctctagtggtccggttcggcctcaggttggttccgtgaactggaccaacagatagaggagccatgttagacttctggttatctccaacttaagcttgagcctaggcatggataaagagatagactttggggtagatgtagcttgggttaggtcggttaaggcctaagaagaagttagactttgaacaaagtgcaaatatatttttattgaagattttgaattgaattttgtaaaatagctttgttaaatattgttatagtggtgttaattcgtaatgataattctaattatatttgtattcgaatttcatatttgaatttgatttattttaatttttggcactagcacaaacagaaaaatgaaaaactaattaaggcccccttggagccaatttgaaaaattttttggatctttcaaatttttggttacgtttttagggtaaaaaattttaggatgttacaaacttcttaaataaacacatttataagacacgtaacatttagcagtttagaaagcgtggtaaaaaaaacgagcagaattttctcccgatccatatggttaattttctcttctcttatctggcctttgtattctcagatctgtttgtatcgtacggttgttgtcatgttggggctctgaagacatacagccttattgcttggcttatgtatacgtgtatttgtacgacttattactccctgtgttttatatttctatgttataagttgattgaactttttctgagtaccaaatttacatataaatttagcaacatttacaatattaaataattagtttcattaaatataaccttaaatatatttgaaaaatatgtttgttttgtattcaaaatgttgctatattttcatataaacttgatcaaacactaaaaattttgacttggaaaaaaaataaaaatgacttatagtacgaaacagagggagtactaactaaaaaataatttatagttaaaacttttaatatatgttcttaacgattaaaaataaatgttgtaaaataaaatatggtaaaaaactacaaaatcaactctaaaatttttaaaatttaaattttggcctataaacataaaatatgcacaaaaaaaaatgagttactgtattagacttggagtctccttttagagtcatgtttgcattgagcacttcttttaaatagatcagcgctacggaggatcctaaagaggctgtagcgatttagacccagatgacacactatgacacgtttaaaaactgctcgtgcactttactcttttaaatatatataccacatgaaattcctacgttaccataatggccatttgatcccagtgtgaggctgctagcaatgcctagccgcgtaaaagaactagtccgtttgcttttgtgccccacatcccccccctcgacatgcaactattttttatatttataaattgttgtgaatttcgtaaaaaaataaattcagtaagaaaatgtataaattttacggtagcacaaatccgtgcactacagcgcacaatattagttcgagcgccgcacaacgccctttcctccgcactacgtctagttttcccgtatttttaccaccccacctttcctccgcatcccacctttttcggttcattttttaccaccccaccttccgtgtttcttttttctcttttctatctcatccatgcttcatcaataggcccggtaagatgttaaccatccagatttatctgtttttcgctccttctctgtagttattctgttttcgcgttttagtaaaatatttaccatctagtttttctttccgagttttccgtttttcaggatctccacacatttcaaaagtaacgaatttactctgtgaagtttttcatttactcccagcgtccgacatctggtcattcaaaagtaacaaatttactcgcatgaatgcctccacatcgtatgacgccatacctagatgatcctaaaaaaattactaccaacttacaacgctagtaattcttttaccaatattataaatatagtttagatttcatgttctgtgagtaaacaattactacattcctcttgatatagcccatgatctcgtagccaccgtatagtaatatgtttactgatgtgttcaatacacagtataagagtaaaaattgagatttcgtagtttgcgagtaaaataattactaccttcctctcgatatagccatgatctcgaagccaccatgtagtaatatgtttaccgatgtgttcaatacacagtataagagtaaaaacttattgtcgacggtgggtacccgtagaccggatatagagggcattggggtacgctggtacgagaatctacgtagtacgacatcaaggaaacaagagacaaagattatactggttcaggccccttaataggtaatagccctaatccagttgatatgggattatatggagagaaccacaaagtacaaagggaataacagaactcgatgataccgatgagatcgtagttgagttgattcgactagatcacccggcgacttggctcctgtaggctccgacttcgtagactatggtcgttgtgttggctatgagattcgatgccttaggtcctcccggggggtcccttttatatcgcaggtcaggtggtctccaagtaggactcggagacatcggaccctacacgatatagtgacgaccaagtcctatacgggtaggaatctttccattagtggacttcgagatgactttccttaacatatacggagaacgtccgtacacgcaccgatgtgtcgtattgccgtatagcgtacatccaagggtagagggtataccttatccgtaaccctgacagtagcccccgacttctgcttaaatgaactcgtgtaaccgatcgcgacttctgatgttggagttgttgtcgttctcgactagtcgatctcagtgtggggatcgtagagataaggagtgatcgacaacaccatgcgaagttcaacggttatgagtgaatttaaattgaagtccaagaaaccgcctcgcgcaacggacccaaaaatttccggcggccatctctctcctttccttggaattcgcaccgtcggtagtgcgcctatttaagggagttttgagaatccattttagagtccggctgttgcgaaaactttctagcctccaaactctcttcgtcttctccgtttccacgcaaaccctaattcgctcgcctcggcttcttctccgacgatctccaacggcgatgaacctcgacaagtccacctccagcagtgcgtccttgaagaaattgcaggaggagggctatgttggaagtgaagaaggaccaggccgtggaggcactccgaggtcgcgaggtgtggttcaactcgtaccttaggagttgttgcaccgccatggccgtcgtctgcagggaactccgagtacctcgcgggaatcccgaggagtcagcggccggctatatctcgtggctgaacggggcatgcgctcagctcgaaggtatcggcaagcgtacgacgaggccctgaagcaggagtgccgtcgatcgagccggtatgccggagggcacgtgctggcatgtatacgagatcattgtccgcagctgcacctcaagttcctccacgaggggttttcttgttctcggaggactcccgcggaggtagacaacctagcgaagttgatggtgccgctggcggagaaagtgttccagtcgatggattggcgttggccttactggtagtctttgtatattctagatgtggtgtgcacgagtgtcttctcacttcgcgacttcgatcagtcacttgagttgtacactctccctagcccccagccttgttgtcggagaattcttctcggaagataaggctcttagacctttgacttgccttagttgaataagcactgatcctagcacccagccatgaagttggaaaatccatttctgattacacggcttggttaatacgcacggcgagaactcttacacgaccagatcttacatggtctttcgtctctgaaggatccaacaaggccttatcagctctgggcgtccccagccgaagttcccttaggttcctcggaggccttgtcaagacggcgtaaagggtcatgaggataggtttcaatgctaggtgtcatctgggtaagggatcatcgggaagggacactttgattgaaatctgcatcttaaaacaggctttattgaagttgtaagatgtcttacaagtatggatactattgacttatacataaaatttacgcaattggtcaatgttccacgaatttgctaactcacgaccgtcgccgtctacaatcttgaatacgcctggccgcaagacttgtgtgatcgtgtacggtccttcccatttgggtgagagtttgttttgccctgcttggcgttgaactcgccggaggacgtagtcgccgatcgaaagtatgcgtgctcggatgcgcttctcgtgatagtggcggagggcctgttggtagctagctgccctgacgacaacccattctcaatgttcctcgagtaggttcacgtcattgtttcgttgttcctcctaatcctcgtcggagtatttctgtactcgtgtactctgatgtcgtaactcggtagggagcatggcttctgaaccgtacacgaggaagaaggttgtctccttgttggacgttgtcggtgtggtgcgcacggcccatagtaccgaggggagttcttcgacccactttttgtcatctgacatgagcttgtcgtagacacgggtcttgatcccttgtagtactatgccgtttgccctctcgacttgtccgttactctgagggtgagaaatcgaggcgaagcagatcttgactcccagtccgatgcagtaatcctagaaatcgacgctgatgaactgggagccgttatccgttatgacgcggtgaggcaatccatatatgcaaaatatccccttaatgaatttgatggcgttgtcggccttgatttcccccatgggtgttgcctcgatccatttggtgaatttgacgatcgccacgaacaggaatttgtagccgccctgtcctcatgggaatggaccgagtatgtcgagcccccagcacgagaacggcgaagtgagagggatggtttgcagtgcttgcgctggtagctttgtgtgtttgctatgaaattgacaagcttcacaccgttgtaccatgccgcaagtgcctttgagggcggttggctagaaaaatccatgtcgaaaggcttttccaaccaatgtacgaccggcggcatgtgacccacagaccccttcgtgtatgtcgaggaggaggtgtttgccgttgtcggacgagacgcatttgagaagtaccccgtttggcgccttcttgtatagatcgttgccgatcatacagtagatttttgcttgacgggttattttatcggcttctgcattgtcctcgggcaactcgtcgctgcttatgaatttaatgagtggggtccgccagtcgtccgtggtctcgatgtcggcaacggcgcgctctgcctctgtagcccttgagctaatgtcgggggtgactgggctatcttcgtcgtttgcctctttcactgatggctttatcaagatgtccagaaaggtggctctcgtctggacacacgccgtgctagatcgtccagctcgatgttgtccttgcgatatacgtgtcggacctcgatcccatcaaatcttttttggacaactcagggctagagcatttgtaatctttgtgcacctggtttgtgactagttcggaatcccctttcacgatcagtcgcttgactccaagtgtagctgcagctcttatcccagcgagtagcccttcgtactcagctgtgttgttggtcgccctaaagttaaggtgaattgcatgcttgaactgatttatcgaaggtgatgtcaagatgaagttgacgcacatactccacttcccgttggccttccgcaccatgactgggttggctagccactctggatggagtacctctctgatgaaaccagctttgagaagtttatcgagctcttctcgtatggcttgtttctgatctggtgcaaatctccgcagtttttgctttactggcttggcatcgggtcgcaccatgagtttgtgctcaatcacctccctggggacccccggcatgtcggagggctgccaagcgaatacgtccgcattgtcgcggaggaaggtgatgagcgcgagttcctatttctcgttcagtgatgccccaatcttgactgtcttgtcggggttggtaatggacagtggaatgattttgattgtaccgtctggtttcggcgtctttgtcgttatgatcactttcttgggtggctcggctgtggcgggtgggctgggtatgtgctcaaccatgtcgaggctccgcttgtcgcattggactgccagctttgtgttcccttaaatagtgattgttcccttcagcccgagcatcttgagtacctgatacgcgtagtaagatgcggccatcaacttcgcgagtgcagttcttccgatgatggcgttgtatgatgtgtcaaactcagcaacatcaaatgttatctgctctgttcggaagttgctcgcttggccgaaagtcacaggaagcgtgatcttgcccaatggcctggacgaagactgaggagtgattccatggaagggttgtcgtgcctggaaaaataccttttccagaacgctagtgtattgatccccgtcccaggaaaagccggggtacaccacacaaacatgatataaaagacacatctttattatatcgataatatttacattattacgaaggcacttcagggctgaaaaacaaaaataaacagcagcggactagcgggcctacggctccatcttcacaggtgctcaactggggtataagccaggactccacctaagacttcttctctaaagcttctcttactgaagggggaaaagattgagcaagaatgagtacaaccacactactcagcaagccacaccggctgatgcatgattaatgcaaggggggtacaaggggataataataggggttaagttttgcagtaaacagcatttaaaagacacttagttgctcaaagctattttgcaaggacgatcctagagctatataatattattattcaaggccgtgaacccacacgaacctgccttaacccaaggcctacgatgattcagaccgaactggcaaccagacccaggtcccagctcgtcccaagccaacccaggtcaaccattccacattttagttgttaagaaggttttaagaattaaaacactaacttaggtacattgctaggcttgcccataaccgaggacgcggctattcgaatacattatactctgatcagaggtgtacatctttacccacaagacacgtcttcctcacgtgtaaccacgtgcgacataccaccacagcatacggacggaagacgtgacatagttcccaacccatcctagccataaacaagagtaccgacccaaccccgcctacggccggaacccccgagacaggtaggtaggattgagcccctagcagcagaacaccggccctgtgccatgacatctcgactaccgagcaacagctcgtgtagccttcatttgtcctagagatgtccatcgagccccgacttcgtccatctccatccgtgtacctttgtttatgaccggactgagccacaaactaagccttaccaactagacatgtggaagtacggtagtgctttacaacagaggcccgaacttaatccttatagtacccgaggtacgactaacaaaacccaaccacgcacctcgagcccagcctaaaaccattttgggggttttgaatagagggggaggtgtgtgtccaattccaacataagccaaccattccatagcgtccaagtgatatgagaattcccaaagtctaaaggatgatgtgacttgccttgctaagagaaaacggccttccgaaccttcggcgatgaccacgaaccacgcttcaggaatctccggaatgacagaagctacgcgaagcacacaagcaaagctacaagcctaaaaagaagcaataacaatacataaaaagaaagcacatggttctttaggttataacaaacattaagagacttgaacatggtcatccgaagtttaatgctgttatatggagatttgcggattattataattaagttttgcaactataaaacatgtgtaagcgctagcctggaaaagacaggaaggctgcgctgttgacatgcggaccccacatgtcaacctaagggaccacggcagaccgggtacacagagacgggtcaacggaagcggaccccgtgtgtcaaccgagacgagtggccgacaaacggactccactagacaccatgcgggctgcacacaaacacagtcaccacacgcacacacgaacgactaccgacaccggtacaagggtaccggggtcgacaaccgcacgacgggtacggggcgacaccgaaaggacgaggacgggagcagcgagaagggggatccttagcaccacgcgacaaggcgtgggaacgatgacggcgaacgggtgcggagacgaacgggaacgacggagacgaacggcgaggggacgacctcggcagcgatccttggatgaaggcgagacgcggccgacacaaggcttgacgacgcggagccgaggacgaagacgatgacggggcagcagcagcacactagacaaaacgtgggcgacgaacgctatcggcttgacggagggacgaatgccacgacgaccgggaacgacgagaggacgacgacgaccgggggccgacgaggacgaacgatgacgaggaaacgacgaggagacgatgacgacagatagcggaggggtttggatggaggggaggcgatgccgaggacgacgtcgccggctcgccgctgcgatgccggaggtggtgttggcgcggccgacggcgcacgggtggaggaagggtcgaccggggaaattccggcgaggcggatggagaggccggcgcggcacggcggtgttccggtgaaattcgggcaacgctgtggcctggccggggaagaggacggcgttccggtgccgggagaggtggtggcgacgtcggccggtgcacaggagacgcgacagaggcggccggaggcggaacagtggcggcaacgccactgttgccggcggggatgcacttccggaggtctccacgggaaacggagggcaggccggggaaggggaggcgactgcgacgctgggggaggcgacggcatggccagccagcgtgctgacgctgcggtaggggcggctggaggctgttggcgccgggagagagagggagcagcgacgggaggggctacggacttgggagaggccaaaacggaacgaagggaggaggagggcttcgttttatagggcaaggagggagtgccgatcacgggagagggcggaaacggcaccggaggaggttgctggcggcatcaatggtggtcaaagaagggattaaatcccgacgattggggatgggattaaatggggaatgttaggggaaatagagaggaagggatgtggattccatttctctaaccaatttgaattaatccggcatgaatggagcggatttgggggaggaattggtgcaagggttaacgggagagaggagagagagagaagccggccgggaggtagaagacgaccaggtgggtggacccatcggtcaggagcggggcacgcacgtgcacctcgcgtgcagaggggcgcgagggagaggagggaggcggcctggggcggcaggtcggctgggccgggatagggcaggggtggcccaagagagagagagggaaggaaaaagagaaggagaagatggagactttgggctgggctcggcccaaaggaggaaggagggattatttttaattttctttttaataaactttcttaattgttgttgttccttaataaatatttccggtgctctgaaaattcaaataaaatttaacaaaaattctccggaccacatttgaatttttattgtacgtattttagtgtttgccaatttctttttgaattttaattaattctattattccttttagagaatgatttttattttgggatgaatttatcaggatgtgacaaggattgatcggtaggtgtcaactcgcttcgtggaatccccatcgcgtccaaggtgctggcgaagagaaggttgatggagctgcctccatcgacgaggattcacactaccttgatattccgaatagtaggttcaaccacaatcggatatcgtcctgggataacagcagccttggggtggtcctcgtctaagaactcgatcttctgttcagaccacttcatcttgggtgcaaccccctgcaatgtcgaacaaacctcacactccacttttttgtattctcgctttaaagagtacgctgtcgaacctccgaagatgtgcgagacatgaagataggaatctaggtacgccaagtccgagtcctgagtggtttcctcagtggccttctcgactacacgtactcgcttgcccttctccaaagccagttgcttttccagcgacttcttgaagatgaggcactcctctagagaatgtatgtccgacttgtgtatggggcaccatattctctttgtatcactgccttgtgggtctgggtgtttgggtgggcgctcgtattcagacgcgaggacttccgcttgagctttcctcttcccactcttgccgcttttcttcttgcttggtttgggtgtgtccttggctggcttcttatctcctcccgcctttggcttgtcgttcttgcgtctcagtgcgtcgtctgcatgggcgcatcgatcgacaacctcgaacaaccttcgagtagttgtgattcgccttgttgccaactcctgggtagtatagcaatctctgacaccggttttgaaagcatgaatcacagaaacattggtgatatcggggatcgtatttctgcactcattaaagcgccgaacatagtccctcaaagattcgcccggattctgtgttaacgcgtgtaaatcgtcttcgatcgcgtggcgcttgtaagttccttggaagttagcgatgaattgctgccacaaatctgcccatgaagagatcgagtagggtgggaggtgcatcagccacgaacgcgtagaacctttcaacgccattggcaaatagtttgctaacgcgttgtcgtctgccccggcagcatatagtaccgtggagtagacctggaggaattcttcagggtcagtactcccatcgtacttctctattgctccgggttggaatctctcgggccatcggacatcacgtagagaacggttgaaagctctacacctagcgctgggggcggtgggttgtcggtgatcgtgtgtcctccgtggatgtctatcgaatgacgaaaatgaagatgatgacgatgatgacgatggttcactcggctccggtgtgcgattctgagggcgacgttcaggttctcgagaattctgttgtcatccaccattgttgtcctggtgccgatccacattattgtcaccgtcatgttgacgccctcgaccagcatcgtctggtgtccgctgttcgcgatcgtcgcggttgcggcggttgtgacgattatggtggtgttggtcttcgttcgagcagcctcctcgctcttcgttctcgcgacgtcgtgaagaaacacgatatcgggaatgattctcgttgtctcgcgcgcgtcgtgcttctcggcggctattcagatggtcgcggagctcgccggtgccgcgaggtggaggggtagctcgtctaggcgacgtccgctgctccggtggttcgccgtcggcaccgccagctgtcggtcgttccagttgtgctctgtagcagcttcctcgaacgcttactgagattggctaccgattcccgtagtcgttctgtccatcgtgtgagatcatcgttaagcacggggtcatagggagcttctctcaatattgcgttgacggtgccgagtagttgggccggcgtgaccgtctggttctccgcctctgcgttagcgtgtgcaaacgtgctagtcctaccgatggcaaacacgtcgcgtggtgtactggaagatgacaagccatagttttcgagcaagtgtaggactgatggctcatggggatcaatgtcgattactccaacgaatcgatccgaggtcaacatcgctccttgttccttgtttgtatccttaagggaggttcctgactgctggactttaggaagcgtcgttttcatggcgcggagaaagaccttgcagcttgagaagtcgtgattcttcgtcttgtgaataggacaatagacatcacgagttggagaagtacgctggattccacgctccttgcaagcacgaatttcggcttgtgcgttgagaaaaacccagcatgcttgcaagttgtgcttcctggacttgtggataggacactagggctttgttacctcggaagttatccttgtcagctcgcagttcttgtcagaaggacaaggtttggccgcactaggaaccttcgacaagggatcgtctggggttatagccacggcgttctcgtttccggtcattgatggaccagccgagattggtaccgtggtgtaaaccgggaagacgatttcgccgacttgagtccacaccagcattgttgaagtagggactccttgaatggggccggtgttgacgccgttgtcgacgaagcttgatgtcatagtagtagaaccttgagcaccaaggccccctacctggcgcgccactgtcgacggtgggtacccgtagaccggatatagagggtattggggtacgctggtacgaggatctacgtagtacaacaccaaggaaacaagagacaaagattatactggttcaggccccttaataggtaatagccctaatccagttgatatgggattatatggagagaaccacaaagtacaaagggaataacagaactcgacgataccgacgagatcgtagtcgagttgattcgactagatcacccggtgacttggctcttgtaggctccggcttcgtagactgtgatcgttgtgttggctatgagattcgatgccttaggtcctcccggggggtcccttttatatcgcaggtcaggtggtctctaagtaggactcggagacatctgaccctgcatgatatagtgacgacccagtcctatacgggtaggaacctttccattggtggacttcgagatgactttacttaatgtatacagagaacgtccgtacacgcgccgatgtgcagtattgccgtatagcgtacatccaacggtagagggtataccttatccgtaaccctgacacttatactaagagtattgttgatctgtatcacaaaatagtcgtatgaatgaaaaaattacaggctcaatcacacacaagcgataaaatcactcacaggtgaatcaaactagaaaagaaaaaaatgattcagtcaaaaatccatcctgtggctttgctggatcttgctataaagatgaagaggatggtctgtgacttgggactggtagtggagagggcaaccatgtgacgagcagtagtcgacgatagaatcgtggaaggatgtagcggtgtggtctagagatgagctcgacgttgtgtagtagcagccatccatcatctagcaagcacgaaaaaaaaaagcaaaaacactctcgttcatgtcaatagagatgacgagcaaaagaaaaattgcaaacaacctccatcaccggcggactccaccctatcctctgcgaccagccacatggagcacgatgtgcaaatgtaggacccgtacaacccatcaattgagataagttaatattagagattgcacgttaatttgatttgcaaaaaaaaaaagcttcatgcgtgaagttgaaggagagcacgcagatccaaatcagagtgtcagttccttacttgcttattgtatcaatgtcgccaacgtgaagcagccgctggttattgctatttggcctaggtgaacacctccttactggttaaggtgctgtccagtgtccgacagcgaggcccgaagcagtgccgtcgcctcaaccaccgccggccactgccatcaaccgccacgatgtcgtcgtcctcctccagggtgtgttgccaatctgtgggctagggtggtgtatcgattcagataaaaaaaaggaaaaaaatgaagcaggggcgagagtggttggttgggaacgggaaaaatataatatataccgaaagcagagaagttgttttttatcgaagtaaatcatttactccgataatggtgggaacacgatgcgggacgtggggtgggatcgaaagcaagaaagttatttttattatcgaagtaaatcgtttactcgaataaaggtaagtggtagaggcccgcgataggagtaaatcatttacatcgacaacggtaggagtgggatgacggcacgtagggtggggtgggtctgtgctgatgcatgtttggcgctcggaatgctgcgctcctaatagtagttctgtagattttaactaatttagtgccaaaaatttccgaaatggtaggacgggtagtggtggaccttacggtcagtaagttgaacctaatcacttgcacggttgcaccacaaatcagttcatttgacaagccaacacagtgattagagtgtagaaaaagaagctcacctaacttgttcatataactcagctgcttccaaagtcgaaagccctatttgaaaacgaagcctgagctgcttccctagaccaaaagctacagatgcacgatggatacatatccgatagcgtgcttccttgccttgcctcgcctccgcccccttttatgccaccccgtgacatcaccgttggcattgcacgaaatccaaatgaatacaacgtaaacagcttctgcccgccgggcccccatggccccatcatcggccatccgagtcaaccgagtgagccacccaccataccagcagctcccactcgaggcggacatcacattatcgtctcgtcttcccaccagcacctgccgcgctctcccccctcgattcccatttgatcccacacctccaccaactagctgccacgctcgctttcccctgcgacatgcgtgatgtgtgggcgctccacttgttaaccatctcgcgcgcacgccaggctcggctcctcgatcgacgccatgtcgctgcgccggctctgcttcgtgctgcccatggacgccgacgaggtggtggtggtagctggcgctgctggtgaggagcagcctcgacgacgagggatggcagcgagcgggaggctggcgtcgtacgtccgccgcaaggtcggccgcgcgctgcggtgcgggctctgcggcgcctggtgccaccaccgctcgtcgggagtctgcagcttcgaggacatcgccggcgtggacgcggtcggcgcggggaagctcggcggaggcgcgggcgggagccccaggatcttcagctactcggagctctacatcgggaccagtgggttcagcgacacggagatcctgggcagcggagggttcgggcgggtgtaccgcgccgtgctgccgagcgacggcacgacggtggccgtcaagtgcgtcgccggccgcggcgaccggttcgagaagtccttcctggcggagctggcggcggtggcgcggctgcggcaccgcaacctcgtccgcctccgcgggtggtgcgtgcaggacgaggaggagctgctgctggtgtacgactacatgccgaaccgcagcctcgaccgcctcctcttcagaccggcggcggcggcggcgcccgccgcgtcggctccggcgctgagctgggaccggcgacgccgcatcgtctccggccttgccgctgccctgttctacctgcacgagcagctcgacacgcagatcatacaccgggacgtgaagaccagcaacgtcatgctggactccgagtacaacgcccggctcggcgacttcggcctcgcccggtggctcgagcacgccatgtccggcgaggacgcgccgccgccgcagctggaggtgtccccgtcgcctcattccgcgcggtcgtcgtcgtttgcttccgcgaattaccagttccggctgatggacaccagccggataggcggcaccatcgggtaccttccgccggagagcttccagcgccgggccatggcaaccgccaagtccgacgtgttcagcttcgggatcgtcctcctggaggtggccacagggcggcgagcggtcgacctcgcgtaccccgacgaccaaatcttcatgctggattgggtgcgtcggttgtccgatgaggggaagctgctcgacgccggcgaccgcaagctgccggacggcagctacccgctgttcgacatgggccgtctcatacacctcggtctcctctgctcgctgcacgatcctaggtctcgtcccagcatgaagtgggtggtggagaacctctccggcagctgctccggcgacctgccaccgcttccgtccttcctagctctcccaaagtacgtctctctcacttccccctccgattccggcacgacgacgaacgccacggacagcacggtcacctctgcgtcgaagctctacggcacggcggccgggacgaccatttacctcaccgcggagaacggccaccgctccagaggtggcttggctgacaacagcggcggcagcagccagcgatcgacgcggccgctggtggtgatccccagcgtcgacactccccgtgagatatcgtacaaggagatcgtcgcgatcaccaacaacttctccgagtcgcagatggtggcggagctcgacttcgggacagggtacgagggcttcttggacaacggctatggcggcaatggcgcccgccgcgaccgcgtccatgtcctcgtgaagcggttcggcatgaagacgtgcccggcgctgcgcgtccggttcgccaacgagctccgcaacctcgcgaagctgcagcaccggaacctcgtccagctgcgcggctggtgcacggagcacggcgagatgctcgtcgtctacgactactccccggggaacctcctgagccaccacctcctccggcgcgatggcgcaggcgccgccgccgtcctcccgtggcgccaccggtacagcatcgtcaaggccctcgcgtccgcagtcctgtacctgcacgaggagtgggacgagcaggtcatccaccgcaacatcacgtcggcggcggtgttcctggaccccgaccgtaacccgcggctcgggagcttcgcgctggccgagttcctgtcaaggaacgagagccacggcggcgcgggcgggcaccacgttgccctgcccgccaccagctctgctgcgcggggcatcttcggctacatgtcgccggagtacatggagaccggcgaggccaccaccatggccgacgtctacagcttcggcgtggtggtgctggaggtggtgaccggcgagatggcggtggacgtgaggtcgccggaggtccttcttgtcaggagagcgcagcggtggaaggagcagagccgccccgtcgaggccatcgtggacagacggctggacggccaggttgatcgcccggagctcgagcggttggtgaggctcggcatggcgtgcacccagtctgacccggcggcgcgaccgacgatgaggaagatagtgagcatcatggatggcaatgacgagatcttgaagaaattcgagcagaggaagcagcagagcaaggaagagtgggagaccacaaatgctgctgctctgtccttagtaagaagactccatgctcttgcgatacactgaacacaacgtcaatatgtatatattttctctaatagagaaataaattctgttattatagttggacacgatatttttatatatatttattaatttcgttcttcaaaaccgatctaacgcatctcagcttgtccatctgattcatattataggttgattcctttttttttctagtcaatttttttcaagcttaatcaaatttatagaaaaatataatactattttcaacacaaaacaaacatattatcaaactatattcaatgtttcatattataggttgttttctttttttctagtcaaattttttcaagttttattaaatttatagaaaaatataatactattttcaacacaaaacaaacatattatcaaactatattcaatgttagatttaatgaagctaattttatattttagatgttgttaattttttctataaacttggtcaaatttaacatagtttgactaggaaaaagttcaacctgacttataatatgaaatggagagaatactttgtactaatgaacttgtgtcttgtggtacacaatcaactacgtctcgtaaaaaaccaacttaggacgatatatgccgtttagtagtactacaaaatatcatattcttattttaggttgttttttatgggacggacataatatgtttatgtaagaataaaaggggctatgagctgttgcatgcaaaaatgcaattcatcattcgatttcctagggtcgttagatctctgtatccaaaggccgggagcctgagatcactgatccacctttgttggcccgtggaccaccgatccacctaacgggttaggccgtattaatgggtctttttttttgtctggtttgttaatttgtttcccttttggatgaaaatgcacccgtttgttttttgggtttcttttgtgtgctctatgtgtcggctaggctgacaattattttaaatctatcaggctgttcgagtttcattttttttgccctatttggatgtgtattttgggtttcccatgggtcatttttatacttctcaaccttgacaactgagagcatgacaacatcagacacaatctctcgagttcttctctctcttcattctagagtatatatcaaagtttccgagcacaaccataaaccacatttatagtgaagaataaacaactaatagcattcagttgactgcgtaggacaatttctatccgacaaaatagttacaatctattttatttcgagaacacaaggtcagtataaaacctatttcttttacaaatggtcacattcgaagatataaaaaaaaattcacttctttggagaactagtagatttaaattcagcaaaccaaaaaaacttcatctcccataagttgagctcaggaaaaaaacacatgtgcgactttgtggagaaaatatgccttatttatctgttgtgacaagcatgcgacgacagacaataaaaaaataacaatagctaaactttaatctaaatacaacccgagaaactcttaaaatataccaagctaattaaggaagtgggaggccgacctagggtgtctatggttgtgctccacctggttgtcgcgcattccacataggcctcaaagctagagtctcaaacaagttacaagctcactcatggaattccgaggtcactcgaggtggcacaatatcttgctactaactcttggaattccgaggtgagaccagatccgttggaaagaggtttcaatatctttacattaagtacccataagcccaaaacagagctcatatgcacatttagcggcaattttaagtcaatttctgtaggtggctgaattggactcggaacttatacgatttaatctcgatatcttctagttaacttatgatgtgagcaatggttatatctatagtagccatgatcacatcatgcatgttgttatattgctcgaaattatggtagcagaattatggacttacaagaatgttgaccttgccctcgaacgaagtgtgtaccctgccgctcctctttgtcggtgcgcactgacacgttgcagacggagacgatgatggtgagacctttggtcatccgctcctcctggtatctactcaactccacctcatttggcacaggtgtgcactgttgcgctaaagcccgcgagctcctccacgatgaaacggctgcacacgcagttgattataatggacgattcggtagatagatgttatatagcgtgtgggtgaataaccactcagattttgatgagtaacctatgctttcactgtcgccggtgacaagcacagtggcgctagctagtgagctagggcagtgctagaacaaaatggaggaggttccactcccattcatcgtgtatttgctgcattaggacacggttgtcatcttcagggtctcaaccttgtccacacgtacgtctccagcgagcaattgattgagagatctctgaacatagcattgtaaatagacaaaatttattacaggacaccatacgaagtgacttttgaggaagacactataaacatggtaattttccagcgaacaccataccattaaaataataattttcggttggagaggagagaaaaatcgtgtgaaatgtcaaaaatacctctgcacctacatgtcagctctcccatctctcttctctctctatcggcgaacgaggagttgttgggcgtctgctacttggtgttcgatgtaatccatcggcgccaaggggggttggctacttggccgtggattcgctgcacggtgggatggacggcacgacgagatggcggttctcagtgttcgctattgagtcagctatccggtgcagtaacaaggtcaagcaggtctggatagtggcaggggtgcgggatcttctatgcgaaggagaaggcggcgccatgaggtggtcgcacgtggtgtgccgtgtgcggtgttcgggtcagtgatttcgctgcagcgatatgggcgaacgggtccttgtggtcgaagtggcaggaccggcgacgagactcgacgctgaggcagggccggctggtggcgcagtggtttttctatggagcggattgctactcgatgagatggatgcacggcaatggcaatgacaacattctgaaccattgttggtgtttggtagtgatctgctatggtagtgaggccggggatgagcctcgaagatgaggtgttagagtcaaaggaagaatagcggtgaggagggtgacggtggtgattggtgcagcgcatggggaggggcgaggcatatctgcacggcgcacagtcgggtttgacttggtgcagaagatagcggcacgccgtgatgctggctcgagctcagctgagagagagctcaacgacctccctctatcctaccgcgcgcgctgcttcctgtcggtggcaatgacctctatggctctgacaaaggggagagagagaagggagatgtcttctcctaaaagtctttttgtacggtgttatacaactaaaaccgtgaagttaaaatattatctagcaattatagcaactcacctttagatgttttttggtgatctctctcacacaaatagctataggtacttcacgggtgctcattgtttgtgtgctaagagttaggaggggatttatacgttgttgtgcaacagtgcaagtagccaagtgtagtgtactgtgtacattcgtgttcgtttccgtatcatcggaaaaataaaaaaaacttctcatgtactgtaaactcgagctctcgttgctgggggaacgccgttgcttgcagctgtctacacaaagcccatgtgaccatgtctgtttgggtcctcaagaaatgttcatgggcctgatgaatctgtccgtgctcatctcagcccattatgacccgttctaagcaagccggctgggccgcataggcattacgattcgtaataagtccactttgagccccttcaaatataactccaacttaattcatatctctgaaccacaaccataatacggatgtcttaaccctcaactattaaaaatggtataatttgactcctgtgacaaattttgaagaacggtttcactgacatgacactttgacttgttcaacttgctaagtcactatgtggagcccacccatcagtgactcttatctttcctctcacttttctctccatcggatcgacgccgggccgacgacgcctatttgctgcacggctcgtgctggcccctggcacgccgccgtccaactccaccacctcctacaacatcaccatgacgctgtcgctgcgcaaccccaacctgtacccaggcatcagctacgagcccgtcgcggtggccttctccttcaatggcacccgcttcgtcgagtccgccaccatgccggcgttctaccgtaccataagccgaggaagacggctacgttccacgtcacggtgggcagcattgacaagcccttcagcaagctcaccgcagcgggggtggtggcatttggccggctagctgtggtctgcccgctggagctatagcttgtcgactcggaggtcgccgccatcgcgttctagaggaccaagtgcaccatcctccgggccaacaagtccgcggggtgctagcttgttactaaccgggactaaagattctatagcgggacgggactatgtacctagtagtaaaaattctttttagtcacggttcttataatagccttaatatttgtgttttgagccattcgatgaaagatcagttctccagtagtggagaaaaacaaaaagataaatagccatctatttatcatttttatttgtcgttttgtaggtcatgtttagagacttcatttttttgtccggtaggttaatatacttcatgttataattttctttaaaactttttatgatattttgtattatatattagagcagggggattgtttttctaaaaatacacattacattacaaacgattacaaacgtagatattgataatgcatgctaactcctttaaatacacatgtaccttctatccctatgaccaacatatcttaaatttgaaaatatcatcatctgctactaactgtcaagaagtgtgaaatctataacttaaatctggatatctgatctcaccacagagaatccaattaaacaattaaactttgcttcacggtcgggagataattctagtccttccttcgagacgggtaaacacccgattgattgcaagtgattcttcttgtgagcattccacggtggcgtttggatccagggattaaattttagtccctattacatcagatatttcgacactaactagaagtactaaacatatactaataataaaactaattgcataaatgagagttaattcgcgagaaaaaaattttaagcctaattaatccataattagcacatgtttattgtagcatcatataggttaatcatggattaattaggttcaatatattcatattgtgaattagtccaaggttatggaatagattttgttattagtataaatttaataattctaattaattaatgtcaaacgacctccgctgatcatctctccgtggaaagctgcatgcatgcagatcgtgttaacgacaaaggcagcggtaacgacactgccatgcacccttgcaggcttgcagcgtacagaaacgaggctatcgagtgtatctcgcactctcaccatcacgagctctctgcatcgcgtgcagagcatgcgttccatgcaagttcctttttccttctcttatcttatcggaaactatgtgcgccgttttttgcacactcctcctttctaatcattatacggacggacccattccaacatgtactgatcagggttttccaaaccgctaaatccggagttactgtactccggtggtaaccacgattaccgcggtaaccgtgaaaaaccgtacaaaatttattaaaaatttaaatcatttttttaatttatttgaatttaaagaggttatcacggtttttctattaccgtaccccgcagtaaggccggtaaccgcggtaaccgcgcggttaccgatggtaatgtaaacccgggtaccgatgtatacgtggtagcatgtccgttatcttgtaaattgcaaagtcaaaagaatcaaatgagcctctactatcactactggaaatcgattttccccggctagatgcttatatttttccacgtggacggatttttttccaccaccgatccggctgcaaaatgcaggaggggggttgagatggccgtccgcatgcgaagatcaatcttcctaaacgaataatataaggcgttgcctaggaagatgcaacttcgcaggcgacgcctatgaattttttctactaggaagatgcaccacgcgcatgcattttttttcgttttaatgcttttttccctatgattgtggtggacctatatatatatgcaccttgatggcatgttgtcctctcatccattgtgcttaaatatgatgcttttattagccaaaatatatgtgtattggtcactttaataatcacctagatcaagaggagagagagaaaaaaaaatctattgttcacactccccacatactagtagaaaaaatatatctacgctaaatttgtacaacaccatcccctagttatttatatttctctttcccatagcgagcaaactttatttgtttgtaaattttattattctgttaatttaatttttaatataattgtaaattaatctactgagtgcaacaattcggtctgtcagcttctgtacctcccgtgcattctttggcagttgcatcaattggattacttcgacttttttaggattttttcttctaggcccccttcggacactaggaatcccagcaactggcccgctcaaacaccgaaaacgcatttttcggggtttaacttgattccggccaccctcgggttgtcgatggtctcctatagattggcggcgtgatcgttcaccttctgactcttgacgacgatgtcatcgacataagaataaatgttttgcccgatctgcctcttgagaaccttgtaaaccaatcggacaaaggtttgctcctacgttccttaggccgaagggaattctaacatagcagacggtgccgaagggtgtaatgaatgcggtcttcgcccaattttcgagcatcatgaatatatggtggtaatcggagtatgcggctaggaaactcatgagttcacacccagctattgaatctatcggctggtcaatccgtggaagtaagaagtcgtcatttgggcaagccttgttcaagtcggtgaagttgacacacattcgccatttgtcatttgccttttttactagtgctggatttgccgagcactcggatggtcaatttccgtattactccaaccatgagtaacttgtagactttagttttagctgcttcttggcgatctatctactgacatcttgcgaacgttctatttttggggtcttgcatcgggcttgaccgccaaatgttgtaggatgatgtcgggcgaaacaccgcccactttgtcagggctcaagacgaagatatcgagattgttcatgattacacgcatgatgcttcgcttctcttctttgcctgcctcgtaaccaatggagatagttgtggtggacaactatgtcgaacttgttgagcgtggccctgctgaagatcgcattgtagtggtacgggatgtccaccatgttaaacatgatgagttacttgcgcttgttttcttcagggctgaaggacaccctaagttggacctgacccaatgcctacagagatatgccatcgaaaccttggagaggggcggtagcttgcgaaagtgctagcgtaggctggtccattttcatgtaagcgttgaagaagatgatgtccattgagcttcttccatccaccaatatatgacgcacctcgcatccagctactacggccgaaataacaaggggatcttgatgtgggaagtgtactccctccgcatcagctgggtcgaaggatattttggatgcctggtattccggttctccgctccccctggagcccatggttatgtacgttctgctggcacttcgacatgtggccctcggggttcccccatgtgatgacttgtttaacccttcgctgcccgtctagtgcgactctgaactgtagcggcttattagcatattcgctagtctagggattcgtctagggaacttgaggctggccttggtgatgaggacataactagctcggatataaccatgactaccttatgtattaatcaaccaaaggtgcatatgttctacattagatttacttgttatatatttgaacaaacgttgctacacaatgagttttgtgtgttttcgtttgcagaggtacttgcttggccgaaggaaaagagaccaagtataacgaatgcatggatgatcaaagaagttgattagggacaaaaccaagaccttctccaagtctacttctacctcaccatgtcacttttggtccatagaagacaagagatcaagttttacatgttttggattcggattcgggcctcctgacagcatcaacttcaaacggatctagccactgatctagaaggaatttcggggcccatgagtacttgttggaaagattatggagtctaattttagatggttttggttccacgtcaaatttcctatcgagctgccgggaatctgcaaaacaaaccacgtatgtcatctagtccgaatctgatttgagttttgggccttataattgtgtcgtgggcttagcctaagggggtgtgcaccctagggcaaccctaggacgtccctaatcatatttatttggtagccgtcatcgtttagactcgggttttgcttagattaatttgtcaagaacagtttcgtcgctagattagtttgtggaaccccaaattcgagtgcttaatcattcatatgcaattgtgttgcaatctatcttgttcttgcttgtgttctttgattcaaatgcagggattagccttctcggtgaggttaacctggtttcggcatggttgataaccagaggagacgtggtgctgcgattgcgggggctcagtaacgtgttcgttcagaaggcggatcgagttgtgtcgcgactccacccaaatcgactttttatcaatacctatcggaagatcgggacctaacatcctcatcaaatggtgtttgatatttcgacgctcttcagttgtgtgggacgatgacttgccgtggtacaaacagtatttgtccttcttgcatttctttcttggcggcaagccttgttctccccccttacttggcattgaagttttttttgaaggttctcgacttcttcgatagttgttataggcttgacttgtctgttcaaaatttttgccatgccattgggacctaagccggccttggttgacttccgcttgcttcttgttggaccgctttggcctgaactacagctttgtcatactgggcttatatttcgacctggcacttcgtatcctattcgcctcgcgtgtacctgtcaatgatatgaaaaaggtggccgatggtttggggtttctcccagtgattttccacgtccgttagcttggtcgaagccctgccgaacggcatttatgactgaaacttctgtgatgtcttggacttggcatcttgcttgcgaaaatcttcgcatatactcccttgtggattcgctaggtttttgtcgaattccgaacaggtcttgttgggtcttgggttcttcatacgtttttacggctgttaaataccaaatttatgccgtcaattaatacctgcataaatctaaaaatataaaacatccaacatagttgtagggtttatttctaacaaattccatgagtgttggtgtatatttggatgcaagtgataaactaccaaaattgagataaaggaggggaagaattacattcatatccaagccatggagttttgggcccacaaacccaacgaaataccagaaaatggacccaaccactatgccactggaccaaggacccacctgccagggcccaggagaaaacccagggccaggcaggggcggccgacccccaggcctgacccatctggccttcaattttcacatgccggtagttaccgactatccaaggcggttgtgaccgtttctaccggaagaaaccgccattgagggacacttggtagctcaagagagaagttgctcctttggatgcttagcatctccacactccgaaggcacctcttggcctataaatacccttctcctcactcattcgcaacacatcaagatgtgagctgaattataagaggctctttgtatacttttacgtatacttagaataagggagagagcgaggaataaagagttggaggagttccggaattgtcggtttctctatctctttcttttgtaccttagcaattactttgttttagttgagaatattttaattaagtaattgagattcatcttgtgtgatatacttcttagttagttcctatttagcttgctcgatcattgttcactattgttcattaagaaatagtgattacttcagtgtttagctaacgctagagtagtaattatttgcatagacatggtgtctaggtaattaattaccaatgtttgctgcgtatgctatagtattagagattggtgtagaggtggtgacagccctcgagatcaccgtagtcctccctatgcaggtacggagtagagcgcgttctggtagcacgagcaagccagtgcctgaaaaatagttataggattgaagttaagctttctaaacaaccatgtaccacattagaaaatcctctccaccctttggtctacatttatcttgtgtccttagatgaacctaaagaagaccaaatacacatgttccctgtggaaattcaataccttcgaatactacaaggtgaagtactacatcggtatatccgtacgcttgcggattttatctgtgaacgtaagaaataccaacagtacgtcccatgaaatttcattacgaagacatcccgcaactgctcccatgagtaaatgttgcttgggtgaatgttgaaataccacgatcgggcgaagctgtctaggacaagatgtgcgaccttcaccttggtgttctcgtccccgtggactgtttggatcgttgacttgtggaacggcaagatctcgcttggttctgatttgcccgaatatcttgttatagtttaatactcgaaatgtggtggaattgggtgatttcgcaacccccaactcaaaggcaacatcttttccaatgcttgttgtcggaacttgctgacattgtggcgaaagacttgggtaaaggtcgggtgaaggatgaagctattccttatgcttgcgcttgcggctggccttacaatgtagcttggaccagccaaagctccttgaaacatgggaggtggggtttgggcgggcggtcgaacaatcgtcgggtttaccgttggccaaaccaccaccccttgacttgctcctcctgcggtcagagccgcgcttggttgggtcgcttgctgcggtgattgtgtgtgtggctcacccgaacttagctgctggacctaagcttggaattgggcttggagggtcgaagcagcttcggccgtggattgggagggcgagatcagttgtgccaaaggctgtgttggtgcaaggcggacctgcacctgtgcaactgtgggtgatgccaaggcttgagtcgaaggtactaccataactttagtcgaaggggctgcctacggtgctttggtcggtaaaatggccgatacagcccaggcttgtatggccgcctcttgagtctgttgctgctgctgctgcatctgtcagagtatttcctatagccgtgtcatgtcttgcctcatggattcgtgcttcgtcctcggcactgtggacgctttgggctcaggttgctgacttccttcggctatggccaccaccgaagcttgggcctatgctgcctacgccgcttgggccgcatcgattcgggccccttcttcggcttcggccccagcttcaacttcggccttgtcctagtcttcatctttgtacctcctcgacactgctcttcccctcacggacttcctcttgggtgacatcagtttgaactgaggttccccatggtcggtgccagctgttgtcgatggacaaatgcgtctatcgaaggacagacttcacccaaaggttggaaagtaaagtggtaaaatgtcctgattttttaaaaattggatctccattacatgcccttggggtttatatatataacagcgagtttacgtgggtgcccttatgacaaggtcacttacaggggtaataacaatattttagctcagttacacggcccatgggcctagatatctcctccacgtagtgttgttgggccttcatgattgactggcctagtggctactgcatcggcttcagcttccacctcggggtgcttcgctgtctggcgatcctcttcgacgattgccacctgatcggcttcaacctccatgtcaaggtgcttcgctgtctggcgacccctttcgacggttgccggccgctggcctcctggctgtgcgcctgtgcggcactgtcttgatgcctcgacggctgatgtttcagcgggctcggtcgaccttcataggatgcctccaacaacttctatttttgaaaaatcgcagttttgtatcactaatatcgatcagaaactaaaggccctgcgacatgcgacatgcctgaacaggcccttctggaagaattcagctgcaaaagcaaaagcggagatgaagaactggttaagagcacataggaaaaaaattaaaggttagccgtgactgtgatcgtggcgttaattctagtacttcgtaggtaatatcctgaggtgcatgcgactctcactctcaaagcatccaattcctctcttctttttgagacagcatagcacattagcagatttgatgcaaagcctgagtactccccagagatgtcgatatctctctcgacctcttttactgtttatctgttttttccttcatccttgcagtaaaaacttgaaacctaccactgttgtcttggcagtgctgatcttgtttctgcaagtgattaatgtgctgtatatatcaagctctctcaccgcagaaagagaaacaaaggggcttgcaggacaccaggagggtgcaggacatggtacatacggcatgaaaagagctctgccagta

SEQ ID NO: 21785 - DNA, 5622 bp, Oryza sativa
cagtggatttgcgaagggggcggcgccgcgtccttcccccctccccctccgtcgctctccccaccaccacaccgccgcgtccttctcggcaacggcgccggggcggaaggtggccgaagcggggaggcggctctccctccctcctcgccgtcgcgcttcctccgtggcgctgatgagcaggggacctcgggggttgtggggggggggggtggcggaggacgactccgaggcgggcacggcggcggaggaccccgaagcgggcggcgacgaccccgaggttggcgcggcagcagacgcccccaaggacccagccacctcgagctccccctccaacgcggcagcgagctcatggtggtggcctcgccggtggccggagctctccctctcccctccgacgcccgtggcagcctctcccctctccccttcgacacccgcatcagcctctcccctatctcatccagcaccggcgcaaatcggggagacgggccacgaagcgcgaggccacagccgcacggccatgcccttctcccccgtccatttactgacgaagaatgcgtagccaagattggctacgcgaacctgggttggtcacgcagaaaacctagctagcagagaatctcctacgtggtaacagtaggtcgaatgccacataggaacactgtgaacgcccttaaaatccatacctttgtccattctcgtgcaacaaatatcgatcatgcacattcaattcaacagaacaaattttaggacaagaaatcaagtcatagatatatatacccgcgcaggaaaacttatagtacaaaatactgcaacctcctatggacaacaaatcattttgatatctctttgttattcagaaaatattgaagaacaagataagacttatttctccacccacaaactaaaaatagataaggtgaatctagtgggggatcataaccatgttcacgccattgcaattttattaagctcttgtactccctccattttttctaagggattttagcacgagactgtgctattttcattaaatatagcaggagaaaaatataacccctaagggcaaagaaaaaggagaactatacacaatgacgaggaggcctccttgtggtcaaagatcctccggttacgctcattccaaatttcctaaacgatgaggaggaatcaaggtacgcaggcccttctggggacgcccaccgaagcggccagtccctcccaccactcttggaccgtctgattctctccattttaaagcgcaagatttgttttattttattagaacggagacaatgaaatcctagtgtatcaccagaaatgatagagcctatagaatatcactcctcttcagaaagtaaggaattcgaactattgaaagaaacctccaataaaaccatacatcgataatatatgaggtcaaaaggaggctgggatgttatgacaaatacatccatggctctcgactacaaacgtggtacctttggtatttattactcccttcgggctgataatacttatcgttttagatacgggtcaggtcaaactttagaatctttgattatgaattagttttaaaatatttgtctttcaaatatggtgactacatgtatagattagtcttaaaaagtactttaacaaaatcatatatttgttaacacttttatatatatataataatggaaaataatggtcaaagttgtttatttagaccgtgccattgtccaaaacgacaggtattatcaacccggagggagtactatcacaaataaattcgtaagagcatggatatcgttgtagcatttcactcgggagtatttcaagagtattgttatttgtttctctgcaaggaaggcggcaatgtaaagaatgggccatcataatcataatcgtatgtagtatgatcaataatattgtagtctagctagggcaaatgacaatgataataaggtactgtgacacatcgaagaatcatttctataaataacaaaatagactaaggagaaagacaaaacataactatggtttcatatgtacttctatacttacaatgcttagattatactcaaacaaacacatgattatacaaggtttggagttggttctatgcacccagtggcgttatacaaggtttgcagttggttctatgcacctaggcgccgagagaccgctccttactagtctgctaatgtggttatggtattttatgaactcttaagtcatacccgaacatgaagtattacaaagtatggactaggctattaccgcacgttgcctacctctacggcccgtgaggcacgcacgcattcaacaacatttaatcaacccaagtaccatgcttgcattgctaaataatatgactagttccctggggacttctattctttggatggacaagtaagaactagtacaacccgttaagatcattggaccgatgtcgtgacatagatcgactagcctaaacatataaagcatatgatagaggtataaactactaatttacaaagcaatatatgaactatgaacaccaataactaaataagataatttcattactaggctcgaaatcttataaagatataaaagtactaaagatataccttaatctctgagaagactaggaaaccgaagaactactcttagtctaaactcaacttatctagatagtaatacaaatgagaaatacagagattgcttgttgagtgtgtgttgagagtgagagctttctcacattttatagctcccaaggatgattgcaaatgtcagtgaattaagtcggttcacccctaactgccatcaaggaccaaagtggagctggcacgtggaagacagagatgagacaggccagaactggtttggccgacccctggttctggtttgagccaatccagggccaccatctcttcaccgaccttctcccagagattgacatgtgggcccctagaatggcacatggtggattagccttacgtatgtcggtttagtctaaattgtagccttcaatccgtgtgcactctcgtgattggtcggatgtgtgtttctttgcacactgacttattttctccttcattttgtagaaaatccttgcatccatagtattttccgtggacaagtggaacaactatattatttaaaactaatatccgtgtaataaatgttcgttgtattttatttatttagataattgatggtctgagatcagtatttataatgaccgtcaacacactccacctaacaaaccagcaccatttggctgtcgatctctatggaaaaacactatttgagatccattgttaagctgtagattttgtataaggtccccggatttaaaaaaaaaatgtcagggattttcccttaaaatatgaaaaaacagggcaaatttcttgttgggtcccaggcaagaacccatagaccaatgggcaccatgttatatcttgcatgcatcctttttctcttttcactgtacaattaacagaagtgaataaatgatactgtatttaaataagaaccaataggtacagcttgggctagagttacttcattagtatgatctggaccaacttatctatacctaattttgcattgttgcaacacttccatacgggtttacataaggagtttgcattccaccttgacatcactgtcggagggtctttcatgcataaaaccccatctgaaggcaaggaaattcttggtcgtatgtcagaaaatacctccttcgttggacgatgctctgtacacctccctaaggcattagtgtcaggtcaggaggaaccctgtatagccaaactggaacccgaaccttccatataatcgggttcgactaagagtcctccctggagccatctccgaataccaaagaaattcaagctccgggttgcactcctgcattcagggatgatctttatgaagattatggaaacaccctgaattattccagcaaaaagaagcctcgtcccaagcataagacgttcgaggaggggatattggtatttcgttggtttcttctgaacccattgccattttaaagaaatgaagaccttcattgccctcataaaagcctaagccttgtccctctaatcctcagaacgttgttattgtttatcatcaagaaacaacctggttcttgcacgatgcatctcttgagaaggagaaccttcaggtcatgtacaagcttgagacatcgactctgaagggcgagagaaaacattccacaaatgagcattgaagtttttctttcaaaattctccaggattcatgctcgcatatggtatccccagagacctaccgcttctctgtgcgaggatcacaaccaccttacggtcctcatttttaatatatttagaagtgtggttgtggatgcttatatttatcataaatgctgcaaatctcatatttgtttgtggcactaatctagcatatcgatgtccacatggtcaagcttgtgaccataaacaaagcactatcgagagatagcccgaattactacggtaagtttcttttctaatgaaaataagaaccagtttttaggatagtatgcaccttccggtattcttggtcgctaactatttcaggttgatattaagaacgagggtcatgcaatgcctaagaacacggtaactatatcaactatacactttggtgatccttggtgttagaacacactttataagagactccaacattagacacttgagttttgatgtcttgcgacacaaaagtccaactgtggggtgttggtatttcttaacgacattacaagaaatataattcccagtaatggcgcagaaatactcctggtatattatggttacagagttcatctgcaagcgcacggatataccattgtagcatttcacccgagagtattccaacggtatcgtatttatttaatcccgggggaagattatagtagagagatcctgactaataatttatatgttacttgtaataatcatagtctaagcaggggttaagataaatctaagggtagagtgacacacaagcaggaagctactaattctcatactaaaatatctaagctaagtggaaagaaaaagagaaagagaatctattcctatagttctagtatacatagtatacatacatcctagttatctgacatactagctaataccctctatccgataccttcctggtacttcgagaagccacccctgactgccgagttccttacgacagcccatcatgaccatacaaccggggctaaatacggaggagtaccctccccaggaaattaacttaggactatatcacaagcggaggaatacccatactgagctgtcgccatcagcggcccacctctcatccgcagcatataaccccaaataatgatatcccgtaatctagacaccacgcctaaactacctgatactactctaatatcatcgtcatgacatagagtaattacataagcaaacactatacccataccaaagcatctcccagataaactagcagtataatcagtataacatgcacataatgtaaagttgacattcatatactcggaaagtattccaataccataaatgtataaagaagagtattccaataaaagtacaaagcttacaaaaagagaagataagagcaactagagccataccc

SEQ ID NO: 21786 - DNA, 19383 bp, Oryza sativa
tatcttacgtctcaacagcattgtgccaacggaacacgccttcaaggcacaaggttcctgcactagaggtgtgtgcataaccaaaccactcgcctaagatggcatggtcaaagtgccttcctccgttacaactcgcatggagacagacgagagatcgacaatcatatgtgaccatgccactgctccagggattccaacatacctatcatgctggcagtaagtacactcaggtatgtgaaagatagaacaaggttcaccaaacctttattcaatagcaccaccatgtgaacatggcttgctcatatatgttatgcttcttaagtcaattttttgtatgacgtggtttgggtattctattgatgtacacccataggctttttaaattaaatgtggtgtttaggttgaaatagtctgctttaatcaaattagacatggtgtcgaattcgattaatgaaccgttagagctagtactttcatgggcattggatgtatatcttctatggactaacctctgcaggaaagttttcaatttgacgggtaagtcctcatgttcaattcacactagagataagttagggcccgggaaacatagcgataaattgcaaacatgcaaaggagtaacacatcaccttttaaggtgcactgtgagtatactgtcgaatgctcgttggttatattcgtgcaattttaccttagccctatataagttttgcctaaacgaaaatttggtgagcaacaaaaaaaattaaaaaaaatgtttttagaagtgtctctcaaaaaaaaataaatttggtgagcaaatttatgggacccatgcttctcaaaatttttttttgatgcaaacgcttctcaaattttgaacacaatttctctttagcgtggatgtaaacaactaatcttgaggcatgataaaatcttttcaattttttgtagtccaccgagtatttgttgtccactaacctcttgcacgaaataaaatgacaactaaagagcagcatacgataactccaataccaatactgtcgacgtttgatgtcgcgattccggtatttgtatggtatggggatcattgatactaggatatatgcgagattgtagtaaaagagatggagacgaagatttttatacaggttcgggcccctgaattgtcaggtgatagccctacatcaggttggccaaagccggtattgctcttattcaccataatcacaccagtacaatatttagggtagcctatctaactgttgtcgacgtggcgggctgtagtactgactcgtagttgacaacagggtagccctactcctcgaatccgcatccggcgagatcagagacagtgctatatctctcctgacggtagccataggcaccgtaggggactagccatgcctatctctgaaatcgatatctggcgtcttgtcttggcgtatgttggcttgtatgttgatcttctgtcttgatctattgttccgtgtcccctctcctcctaggggccttgtatttatacccataggtgtccccttgtccaagtagaactagggaaaccaatatggatacaacccgagtagttcttgtcttttccatgtagaactctattcatccttccttatacggaactcctcctatatccgtaggtcatttccgtataagacattgtacgtggtggtcctgccaagatttagtcgactactattaggtatgtggtatctataaccctgacagtagcccccgacttcaatgcaaatgaacaaattcatattctcaaccgcagaccttggagtaactgttatcgagctcacgtaaccgttctcggtgagttcagagataacgttggacttccttatcagcctcgtgcgggcacctatagggtttgtctgagtcaatctccgacgtcaaccaagaaagtacagagcatatgactacgtctcccgtcttgctgtaatcgagaatttggatggaagtcaagaaattttatcacggcgggtacaccatctcttcattccgtattccttgtcgagatccaccaaccattcttcaagcaatcgagaaggcgtagaatctacgacgaagccttgtcaacatttgtcgtactcgccttagtcgatcttggtgtagaaccatagagacatggagtcttcgacaatgtcgaatagaattttcctaaaatcaatactcagaaaagaatattagatagaaatagcccccgagcgaacgctcaaagggtgacatgttataaaatgtatggaaaactaaaaatgaattaaatttacaaaccaatgttttgtatatgagcgtcttctcttttaccgacttcgatcactcagtttgttgagtcatacactttccctagcccctagccttgttgtcggagaatcgttctcggaggataaggctcttggacccttgacctgccttggttgaaaaagcactgaccctaaccccccgccgtgaagttggaaaactcaatttccgattacacggcttggttaatacgcacggcgagaactcttacatgaccaggtcttacatggtcgtttgtctctacatgatccgacaaggccttatccgctctgggtatccccagccgaagttccctcaggttcctcagaggccttgttaggacggcgtaaaggaacagtaggattggtttcatctctaggtgtcatcgtggtaagggatctctgggtaaaacacttggcaatattgtgtacgtgatatcaactttgttggagtagaggtaatgggaggatcgctacactgctagtcgaaaaccagttgtagccccaactcaaccacttgaagtaaaggtagtgggagaatcgctacaccactggtcgaggaccaggtagtagtcgcaactcgaccacttaaagtggaaatagtgggagaatcgctatactgatgttcgaggaccaggtagtagtcgtaactcgaccactagaagtaatgtacgagagatcgctacgattgactggttgagaaccagtgagttggtacgagggccgctatgctgccggtcgaagaccagtcgcagctgtccctcaaccatctgaagtcatctgaagtcgtggtgcgaggaccactacgctattggcgtagtcgtacctcgactatttgaagttaaggcgtgagagattgctacgatttactggttcgagaaccagcgagcgagtagaattatctctcgaacaccaatggaagttgtggtgcgagagatttctacgatttactagttcgagaaccagcgagcgagtagaattatctctcgaagaccaatggaagttgtggtgcgagagattgctacgatttactggttcgagaaccagcgagcgagtagaattatctcttgagcaccaatggaggcgctagagttggtttattacatatgcatctcatgtggccaacatgactcacatacccaacttgtagcatatccggatgtccatccgcaatcatgtcgggtgatcaagccgacatcgtttgcgagcaattatccgttaacaaccttttctcgaatagcccagccatggccggtgctatagatagatcgtcggtcttcgtcggcaggttgggcgcgaggactctgcatttgtcgagatcgttctcaataatagagtatactcgaccacaacctactcgagtactcaactgttcctgaaaaatattttctagaagacaagacatatagcaggtaatatcgagtatgtactcaaagaactgcaagaatcttatagtattatcaggttataacgagcagattaaatatcagacattatgtaaacagtaaacaagcatgatttatacataaggaaatagagcgagcccccagtgttaaaccgtagttggcctaacatcggtaacactcgcataatagatattgtataaccatgctctaggtaaacataataaattattgatctgacaatattatatttatctaaataaaatagatatggtaaattatatataaaatattgcatacatgtgtagatatatgccggatatatctacagaatcagtagattaatttaaaaatcaatcctgccaattacctatgttgttatcgtgtacatgtagtagatttagctactcatgtacgcgtggaaatccttttattgatgcactgacttggttgtaaagaccaatccatgcacgtgactccttggtctagtctgacatacgtggtttttgccatccatcattgccgatcagggctctgttttcggttttaaatgtccgagtaggatttaaaccaaaatacagttcggtatgtgtccggatgacaaccgaaatcggtcgaccatgacatccagtacctctgccgtagatcgctcatatggtcggcgtgctgcgccccggttgtccgtcttgagagcaaatgttgcggcgtcgaaggtcttgaggcttggacgatctcgacacgtcgaattgttagcgacgatggttccgatctcgtcggaaaatatactccggttgggttggatctccccacaaccgaagtcgtcgagtagcttgttgtcggagaatccatctcttaaacccatctcgtttaaactctgaagcaccaaaatctccctacctgacgcgccactgtcgacgtctgatgtcgcaattccggtatttgcatgatatggggatcgttggtactaggatatatgcgagattgtagtaaaagagacggagacgaagatttttatacaggttcgggcccctgaattgtcaggtaatagccctacatcctgttggccgaagccggtattgctcttattcaccataattacaccagtacaatatttagggtagcctatctaactgttgttgacttggcggtctgtagtactgactcatagtcgacaacaggatagccttcctcctcgaatccgcatccggcgagatcagagacaacgctatatctctcctgacggtagccatatgcaccgtaggggactagtcatgtctatctctgaagtcgatatctggcgtcttgtcttggcgtatgttggcttgtatgttgatcttctgtcttgatctattgttccgtgtcccctctcctcctagggggccttgtatttatacccataggtgtccccttgtccaaatagaactagggaaaccaatatggatacaatccgagtagtccttgtcgtttccatgcagaactctattcatccttccttatgcggaactcctcctatatccgaaggtcgtttccgtataagacatggtatgttgtgggtcctgccgagatttagtcgactcaattaggtatgtggtatctataaccctgacaaataccatgctccttggcctcaagggaaaatagatgctcagtgaaccaagcaaaataaatgcaaagctttgttgcattaactcttgcatttggtttaaagcttggtaagacctatctagtaagaatctcaaacaccttgtgcatcatatctccaccctgttaagttacccatcacctccatgatttccatggaaaaaaaagatatgacaaactaaaataaaaataaagtaaatttaggtacttcatacgcctagagttacttgaataaaatttggctcaccggtatttcaccccggttgtagcctatttctttttctatgtttttgttgaatgaagataaggtacaaaataagtgtgggggagtcttttttggaactcttgacatgcaacagtatcaactcaacatgtcaatattatgaacacaggcccacggccacgcacaaaatttagcagccagaactgagtcctggatgggtcgaccgaaccaagtgttcgtccgaccattgcctggcccagctctgtcacccctttgccatgtggtcaggtttgtgcatctcctcacctgtttgtgagttaaactttcgcagaaaaattgaatacaatttagtttaactccaaataaaaattgaaaccattaagtctcaacaaataaaattttcctatgactaatcatgcatactttttattccttgctaacacttgtcacttgtgaacaattatttatcacagggaaccttactcatctaagtaattgatatatgtgatctggttatgacaacataaattcttgtccaactgtcataatacctgagattttgtttttgcgaaaattaaaattcttttcgagcaatactcctcaatgactatattattacctaccaaggccatatatgattttcatttcaaaaccttatatatgtctagtctgcttgacattacattgagctttgtcaaaatattatgacccgtgtaagatgcttttcatgctttcatgatcaaaatcacagacatccaccacatacacgcacttgtactaaatttctacactggaagttagtatatctcttttctcattcattccaactatcatccacaaaataaatactccataacatttatgcctcttcctccaaagttctttaaaaaaagagagaggggcatggctatgcaaaagaaagaaaaacaaagttttgctctcttataactatgaagcatcatgatgaaaaaaaagagaaaaagcaagaaaaaaagatagccatgcacaatcccaaattttcaaagagagaaatatggaggagggggtataccaaaggagttgctattatctttattttcctttttccatccacaacacttgctatacacaaacccatacacatatcatgcacacgcacactcttgataaaaaactatgacttgctatctccttgggtccagtcttttggctttgcaatatatgtgatgcaggtatgccccgattaatccctaccgagctccacatatacaaccttttagaatggggacaatttggcaaaactatgccttggtgaggatccacaaatcaacaccacatgagtgatttgagagaaagtcatttgagaagtatagctactttgtgaaaatatatgaaaacaccaagtgattaacaggagaaacaagaaagaattgagtcacgaccgttccatttatcaattacctgagatggtaagttagacaccgcaaaacttcacaggtacaggtatgtggcttagaataatttgtatacttatattatatcttggaaagtttattctaaattaatccttaacctttagttgggacgatcaaagagttaaacgtggggtttttttatggctattaaataccaaattcacaccgttcataaaactaaaaatataaaatatccaacatagtggcaaggtttatttctaataatttccacaagtgttagtgtatatttggatgcaagtgacaaactaccaaagttgagaagaaatacacataaaggaggaggaaaattatattcatgtccaagccaatgaagtcttgggcccataaacccaaataaatacttataattgggcccaatcaccatgccactggattaagggccaacctgccatgatcctggagaaaattcggagccaaatgggctgaaaccgaaactgacctgttcagccccaaatttcactggcagctactaccgacctcccaatgatggttgtgaccgtttccggcgctccaacaatcatcaggaggacatatggcaaaaggagagtgaagatgctcttaagattctccgcactcccaaggcacctccacctatattacccctctcttccctcattcacaacacaccaagtatgagttgaattacaagaggctctattgtatcttttatgattagaatagggagagagtaagggagaaagagtcggaggaattctggagttgtcggtactttcctctctacttttgtacattttcaattactcttctttaattgataatatctttttcgagtaattgagatttactttgtgaggattatctcttacttagttcctaataacgtactggaatactgttcactagcaatagtgtttactttaatgtttgatcggcattagagtagtatttaatagtgtagacatggtgtctatgctattgagtacatgtatttgttgtgtatcccatagtttgttagaggttggtgtagagatagtgacccgaagtcatccctatccgggacggagtagagcacgtcctagtagcagcgagcaagcccgtgtatgaagtattgcgataggattaaaatttagctttctatagacattgtttctcattaggaaatcatatctatcctttgcccatttttgctttgtgttcttggatgaacttgaagaggaattgaacacatacattccctgtggaaatttgataccttggagtactccggggtgtagtgcttcaatggtatctctgtgtgtttctggattttatctgtgaccgtaagaaataccaacaatgttgtcaaaacaattgaatatggtgtactagaaactagtagtggactaaatcaagatatagggttatctagacccggtgagactcgatcgggttctcactatagaaccgttgttaatattattgctactagaaaaaatggtcagagacgttttattcagtgatacaatagctattaggagctgagcaataaattgaaacattaggatcagtatatacattataattgaaaaagtcaataaaaatattcattcgttttgggccgaaagcccattctttctttccttttcagccccagctcagtccgctacctccctccgctcggtctgcttttcttcgacccagcccacaagtggagccacaaacctaggtcgcacagccatcttcaacctccagacagcccgttgtaccagtatgccggagccaatcctccccgtcaaatctgaccgaatctttctcaatctcccaaaattacttgagggcttttgatcctctcgatctccttttgtggttttttcccaaaatcggaacgaatatgcaaaattgggatgaaaagggtcgggccagccataatcggggactaagattaaatctagtgaattaaagccaaattaaaggggaaattatgagaaaaatgataagggagaagtggaaaaacaaattttgaaatcaattgaaattaagaaaacgtaatgggagacaaatcgacgtggtggcggcgctagggtttggcccagtagcggtagcgggaggcgcactgcccgcgcgtggaacgatggatgagataaaaaagggcaagggaaaaacaggaaaaaacaaagcggaaaaaagacagaaaaaaccacgtgaactgaaaaaaaagtgaaaaggaaatcagatgagaaataaaaaggatacggaaaaaccgggaaaaacgaagggaaaaaagacagaaaaaaccacatgaatggaaaaaaaactagcgaaaaagaaaaaaaggatcaaaatactatgcggaagcctttcttattttaattaggtatagatgtatcctgcaattcgtgatgaacttataaaccttggagaagatactgcacaaaggaccgaatggccaaaaatacatgctatagttggagtttttttagtcattttattttatttttagtgcacccttgatgcttgtcattcttgatacacaaatgatttatctgagtgtttgtaaagaagagagcattatattcttaatgcaatgacactcgtgcatttgccaaggagtagaatgcaagagttgaggtctgatgggtgtgttgcattccttgaaagggtcactttgttctgcaatagatatggtcttgaatttcatgaaatggatggtgtttatgtgccttatggaagatctcaaaggtttgcacgaaatcaaacgaatgatgaccactttagaagagaagtatatattgggatcattgatcaaattagccaagaatttgacaatcactttgacgaggttaatatgaagttgctttcctgtatggcagccttgaatccaactaactcatttgcatcttttggtacacagaaggtatgtataaatgtataattgttaatttcatttgtatattgtatggtattcctgaatcctgctaagggttgactcattttttttattcacacaaggtgcgtcgacttgctgagttctaccctaatgatatttcaagtgctgaattattgagacttgatatgcaacctgaaaattatattgatggcatgcgaaaaagaagatgatttaaaaggcctacaaaatcttgttgatctcttggtcaagcttcgccaaacaaaaaggcatatcgtttatgatttggtctacctgcttcttaaattggtattgacactacaacaaaaaccttatgtagagactcttttgtagagagacaacttttaaaatgcctctaagttttgaagctctatagtctagagacactttttagaggcactttcaaaatcgcctaaaatatttttactctagagacactttagagacatttttagcatactttgttaaatttatctcgtagagacatcttttcggcactttaaaatttgcctcatatgtaaaggcattttctaaaggcatttaaaatgttgtaaaggcgttttttcaaatattaatatatatcaagtaactagatataagtaacacaaatcacatatttacatgtaattatatgaggttgagatggttagtgcattgaagataaaaatagttgacttaggaggtcatgagttcaaggattggtaagtgataatatttttattttttatattgatttgctatagttgccgcaacatattaatgcctctacaaagtgcctctatttgcatagagacatcttataaaatgcctcttagttcatagagacaattcaccaaaaggcacttatggagacactcttcaaaatgtctctatagcactgtaaaggcattttaaaaatgtctctatagtattaggaaaatgtctctacaaggtatatttgttgtagtgtgattctgccggttgcgacgacaagtgttgaaggagcattttttgcttgaaatttatcaagcataagttgagaaataagatgtgtgatgaccttttggatgactgtctagtcacattcattgagcgcgttgttttctttaaagtggatgaagaagataaaataaacaatttcatggccattagaagacgtagacccgataagaaaaaaaagtagtatggtaatcttcttcaaatttttatagccatattactaattttatctattttaaaatgctttattaatatatcatggtatacttttggtctattctattatctatacttgcattgtatgtattatcatagttagatttactgtgtcaagaaaaattttaggttggtgttggcaactttttcggcaagaagacaatcacgattggaacatctaaacgccttgcggttatatggagtcgtcagccaccccaatctagccaaaggccaaatcaagatgtgttttgtagaaagaaaagctaaaccggctagcggagctgatttagagatcaaaatcagcctctaggctgatttagatcaatatgagaataattacccgtcttgtgggcaaacggaaggtttacgggacaaacctacaaagggggaatcgcactctcgcagcaacgacggacgatttacagtacaaatcgacaaagatggactaaagctagagtaaagtagaaatcatggctgaaagtaaagataaaagaacgattcgattgtgttcggggggaaagagatcaatcgaaccggccttgtcccttaaataggggttggtcttgcctcccacaagtcctcctccacgtccaactcagggtagaaaccaatggaaacccgaaacatacactgctggagaaaccctttttaatcccggttcgtaacccctctagtcccggttatgcaaccaggactatgaatctgggactaaagatgcccatctttaatcccggttgaaataaccgggactaaagatccatctttagttccggttggtaacaccaaccgggactaatgtttttttttggattgcatgatttcgagccccacaaatcattcataaaatcatccacaaatcattcataatccacaaatcattcacaaaattcccaaatacatctactctatatccccttatacatcacaaatcattcacaaaaacatctccgaaatctacaacaaaataaaaaaaattatccacaaattcatccacacatcatacatcgcacatcgcccagatcagaaaattcatccacatcgcacaaatcggggaggggaggagagggtctcgggtgccacgccggccgccagccctctgccacctcgggctccgccgccgcccgccaccttgccggccttgccgtccggccgcccggtggccggatctgggagcaggctcggctgcccgtggccgccgccgccggtgggaggggcaaggggaggggaggaggggcagggggaggaggaggtggagaggggagggagaggaggagaggagaagaagttaagaagataaggtagaggaagaagataaagagatagcttttttttctctgtacctgtgcgtctctcctcccgcgtgcgattttttctagatccctcatgcacgcgttttttttttatctttcctccgggttgatataaacaaccggttttaaatatcaaacgggactaaagataatagggtgcctgccacgtcctgatattgaatgaaccgggactaaagatgatttcttagtcccacaccacccaggactaaagatcactgaagttctaatccaggacgaaaaatgatctttagtcccagtttctatttaaaccgggacaaatgtggtttttagccaacgtagccaagatggtttctccagtagtgataccttcccaagcaagaaaacccgagacctgacaaaagcaaacttgggcacagagtctgcaggtctgaccggccacacaccttcggtcataccggccctcaagtaacggtctgaccggccaacatacggcggtcagaacagccctatggaggaaaccgacgatttttccaactcttagcaataattccttaatttgaacctaggtgtcaacagaacggccctatggaggaaaccgacgattttttcaactcttagcaataattccttaatttaaacctaggtgtcaaatttgggtgtaaatagttggatcacctctattctatatcctagctccgccaatcctctctgcctaactactgcagaagcagacggcagttcagtagcctgtgccagacgaccaaggagctaccggcatatgccggcgggcggctgccgtcgtgtcgtgcctcagcgcttgcggagacggaccgtccactagccgaaccaagaacgctcgtgaagggttctgggtatgatggcacgacagcaagtgcattactcgacccttcagtctgactcataaaaattcatgacattccatacgggaattgtttttttctggaagaaaagccattgacgatcattacttaaaaaagaatttttgcatgcggtgaaaaagggttttcacgtgcggatgcatatttcgcccgcacgcaaaaataaaaaaccgaaaaataagataaaataaaaaatccgaaccctaaccctagaagctgccgtcgccgtcgttgtcgtcagatccgctgccgccacgcctcctcccgactgaccgccggccgccgccaccgccgccagatccgcgcagatctgggcgggccggtcgcccctcgccgccttccacgcgcccaccgacgcgagcacgccggccgccgcaatccgccgagccgctcgccgccacgcccaagcccatcacctcgcctcaacgcgagcacgctggccgccacctcccgcctcgtcgcctccccactcccgatcccgccacctagtcgcctcgctcgccgccactcccggccgccaccgtgtcggcgtcaccgctgagccgcggagaggagaggagaagctagaggagaggagagaagagaaagagatagagaggagaggagagagagggatgagtgggaataaaagagagagagatgaaaaatttaaagtgagtgagagggaaaagagggatgggtatttttgcgtgcgggccttttaagaggtccgcctatgaaaataggctcatttttcatacggtccatttaagaggcatgcgaaaatcaatttttccgtgcggtccttttgagccgcacacaaaaatagaggacgattttcgtaaacaactagttatggtccgtctgcaatctaaagatatccctgtacaggaaagtcattttttagtagtagatgaaccaggggcagtaacctcgtgttgcttattatgactaagagtaaaagcagtattatcaacaactaaaggctttttatcaagtgtttctctacctttttcattaaataaatccagaatgcgcctgcaagaatgacgcatggtgactgtcagggaaagacgcagttttggacatcaaaaagttattcttggcagcccagaccgacaaggataatctttttttggcggtactaactatcaagaataagtaatttccttggcggttcaactgtcaagaataaataattttcttggcggtttctcggcagcaaaggaaatatatatccttgttagtccagaccgacaaggttatatttcttgacgctttcaaaagctcgcaatcttcttaatttgcttagcggtccaaccaccaaaaagatattcccttacggttaccagccaacaaatctgaatatccctaactttctagacttgacagtttttacttggcggtcagccgacggaataatgaacctttgcaattttcatgcaatacttgttggttttttaccgccaaggaaattatggattcttgttttctcagcaagcatgtttcgtcactcgataagggtaatggtagaagatgagtcacattagcttttacctcagttttggcatccgtaggggagggaaacgcgatatcctcgagacaccatgtcaatctactttgtagcttgccctcaccgccagcataacttcctcgtcatggcattcttgcgttcctccaacagttgacaaacctcctcgggaagttgctagagtaagccgacgttcttagcgtcgacattggaaagatcatcctcactgttcattgtagtcgatggcttgcttttcatccctagcagagtcgccaaaatttttgttggtgcaaatatcggctaaatatctagttctagaaacaggagtatcctgtattcacaaactcactgtgaaaacctacatacataatagaaaaaaagcctgatcggaccggcaattcgaccaaaaaaaggccggaaccagatgtcagcacggcttggtttcctccaaagaccagacatgtattcaaactgttctggactggatgaactgatcaaggaaagttgcaatatgtgggaatcgaaccctggtttgttggaggctccaagtcctagccatcaggctatccaacaaatagaagggaatacatgcacgatgtgaacatcggttcgatcgcctagcccaccggtcaaactagtgaactagtgaaccaagtggtcggtcgggtcacccactggtctgtttattttctactaggcctacaaacaccgaccccattggagcaggtccaccaagggttgctctagggtccgcagaccacctagagcgccttcaatcgctgtagagacgaaggtaggatagaaataagggtttggaagggtaaagtgcaaagagatagaagtaaaaagtaatagattgattttgtcgattggattggatatgtcaatcggccatatgaccctttatatttatagggttgataggtcttaccatttatacaagttgaatccataataaaatcgtgaagaacacaaactttacttttgaactttctaaaaccggactatccggattagctaacagaagcatccggttttcttctgagatgaaaaaaagcaaattaagttgccatgtcattaaaaacaaagttatttaaatgtcaaagtacgtaataaaaccactgacgaccttaaagagatattttaaccatttatgattgtaggggagtataaaatatctactagatggactgtatttcgtttttggagtaaaacaaattttgcttttcatactagatagcaatcacatatataggtcgttgtacttagcatgagtaaagccaaaagtggagcgcgctgttcattcaggacgatgcctggtatagtttctgtgacttctgtctttaaaggtggcgtcagatatgctatgttgtcgaagaaacgagtctgcagaacaaatgtactgttatatgtccatggaatggaacagtatggctgtatgggtgaggtatgaaataaaactagacatagagtagaacgtacggtatggggtcccggtagagtacaacaatacgagggacccgaccacgccgcttttacctttgctatgctgccaactactgggccgccaacgcagaaaaaaacaatgggcgccgtcaggaccgtggtgatggctgactaaagttttcgtgtgagaaaataatcccttcattgttccaaaatagttttatctttgtcctatctatttgtctgacgaaaaaattaatttttaagcaatcattataatataatttaataagtaacaacaaatggatttatacttgataaagttgaggacaaacacattgcgacttgataaaatgaaagatattatagtcttttagatcctgtgtcggtacataatattggctaaaaacaaagttattttagcatggagataatatttttttttaaagatgtgctttagtccatcaaatatagctgaaaagttgtctcgctccgtggaaaccctaagtgccaccaggggatcgggagttggcctcattttccatcttcgtgatacggatcggactgggtggaaggaggagtcctgttcgacgacgatagtggctcctttaaatctctacctagtgtttgctagtagggtgcttgatgttcaatctacagacgcagtgaagttgatgtggtgacgacgtggttcgtagaaccatacatctcgccggctggtgtttggggcaggccatccgacgaatctattcggtggcatggcgtcagaggaggatatgcgggtacgcaataaggatgaagggggcgccgcaatcgatgaagaaccaattgaagatcagggaggggaatcagatgagggggatgacgaagatggtgaagaggccgtgagctagtagaagaccaggggcagggagggcgctgaaggttgccggcggaggggtggcgggcggctgccgtcgcctagaaggactcgaggctgacgaatgcagccgccgcagcggcaactgtgagcaaggaggagacgaggagtaaggggggggaagggcggggctcgagccatggctaatggccagcgagcggagggggcctccgcccatcgacttcgatatccgccgccctgatttatttctccactggctactctacgccactgattcgtgccaccaccgccgaccagctcttgggttcatcgtcctagctctgacgatggcacaccaccgtagagtcatctctgcggcaaccaccaccaccacctactattgcgacgatgtgggaggaggcagagatgtgggcggcggaagcatcgttcacgtggggtcgtggagggaggaggacaagcggcggcgctctagcggctcccgagtgaaatagggatgggacgctgcctccggtgggtggtgaggctggctcccatgcaggtctggggaagaataggggaggaggggtgcagtgaggggaagacgacaccgtgctcccgggtctcgccttccttgtccgccttgccaccaccgtcgtcgacggcaaccgatggcgtccttcctctacaaagctagcttctcccgccggcccacgctaactcagcgctgttgaaattgccacggaggacaaaaccagtcgcatactgccttgggacttatattacacatgttttaatagttgagagacccgttttatctggttttccggttcgacgaaaatcggattcgttgtcaaattaagggacctcaaatgaacttattccaattttgtatgcattcataagccaagcccggcccatccctagctaggcacgagggtaaactaaaggcaacaaataagtacatgtgcgagactagttataattatgacatcacatttttatcacaaaacatttcagttttgtcttacgatgtaaattagaaaacttacatttataatgtcaaatttcacactgcaaattctgaaataagtttacatttataatctcaaatttcacactgcaaattctgaaataagtttacataattatgatagtgctttttggcacaaatctatacatatcatttgttttgtttgcaaactaagcatttaagaagttattgatggtcagaatttaaaaaaaaatctgaattttatcttaaaacatcaaatatgtttaaacggatggagtatatcacagcaaacttttcatttagccacaatcctcacgtacttgtacgaattgcacattggcatgtatagaggattgatacgaaaacacgcccaattattttatttttgtaattttaaaagtaaatatcatgatttggtttgaaaccaaatggttgataataaattataagacatctacaatgtgctataagaaagagccataagatcttacgagtagccatatacaatgttagcaactgtcataaggcattaaatactaaaaaagtcattctattaaaatataaacatggtcataatgtgagatagaattagtgataatgtttaagactaaaatcatagtatagaatttgactctcaattagcatcaattggacacactcatttgcaatgtcattctattaaaatattgataagagataagtactaaaccaaataagtctattgacctattgtttcggtattactctcttctttccaaattaatcatcatactctgcaccaagacaaagataatttaaatcacatcaatctaaatatcatgcacacatttttccacaatacatgcatcgattaaaacaccatatcaattacaccttagaatgcatatattctctcatgctgcattaattgtattctgatgaaatccgtgtccatgtggttatatgatgatcaatttaaataattttaaattttataacgatcaatttaggaaagatggagcattaataaagtccctctataaccaaatcaaccatgcatacctccgcagcgagctttatcaccggctcacctcatcatatatacaacccataaataaataaatatataaaaatatgtaaaaatatgtgtagtcaaacactacacgtccagtctccctccgccgctagccgtcgcctttcggtttaccctccccactgcccaagttaaaaacagcaattcgagagagacaggccaagcagcagcagcaggaggtgagagagtgaagagagagacacagccaaagctca

SEQ ID NO: 21787 - DNA, 31186 bp, Oryza sativa
tcgcccgtatgtgtaccacttaattaattaccacccctcctatgaatttttgcctcaaactctcatctcatctcttctccctatatatatgtcgtcgaaggcggtgccgcggcggcaacgggtgcaaggtcggcgacgacaacggcagcctgtaagtgagcaattgagcatatatacgcacgcacccccaaccaatcgatcgatcgtgtgtgtagttatcaatctggggatatatcatatatgtatgcaggatgctgatgtgggaggacgggttctgccggccgcgggtggcggagtgcctggaggacatcgacggcgaggaccccgtccgcaaggccttcagcaagatgtccatccagctctacaactacggagaagggtgggtgctgggtaggtgatgcagtgcgtaatcgtgtacagtttcgagtgttttttgcccccttggttctcgtggagtcagtcgacgactcgatttggtagtcatgtcagcctctctatcgcatcgcagctgcggatttcttcgctcgaccgtgtcacccgccctgttcttggattaggacccctgcatgcgcgattaatgctaatagtttccccatgattcctgcgtcgtcgtcgtcgccgtcttagagcaagtttaatagtagagttcactactttctattagtcaatattaaagctaacatgtatagtaggttgagtataaggttatctttattttcttcgtcctctctctttctctcactatgaatttaatgcatattttttagagtttgtatacagttagcccttgcatgagaaccaacactccccacttttatttatctctctcttccacataagcatataacttgcttatagactactgttatcctcgctcttagtgtgtgaaagtgcaactctattttggcccaaccagctagtactacactagtacgaccagtcaccagagagaggaggaaaggggaggagatcgatgggatgggcgtgtgcttttttttcatctttttcgctttaaatttggttccaatatttatctaccgttccttgctcgcctgctttgcttttgggtttaaatcagtgtgtgtggtttgaattagttaacctagggtttggttgattttcggatttggtttggttttgacgacgccggggcatcacatcacgcgtggtgcagcgggggtcattatgcgtgggcagaggcgtgggtaaactacaaattaacagccacttaccccctcctaagtcagtggctttaggcgagggctgtcacgtgcgcacgttcgttggggtgcgtgggggcggtgcctcgtatcgcataaacaaatcccggcgcgtcagtggcttaattgcgggctttgtctgcggattaacaacgcccctctgctacgcgcacaacaaaactctacacagcagcaggagcagcagaattgtaaaaaaaatgtttcaagcagatggaaatgatagaatttttttttctgtaccttttcttgtgattctgcgtccatctgtacgtctatgtgagcgtgtcgatgactttagcacagtaatatagtaatatctctgtttggctactgtattggggattaatttgggtaattactactggtaattgcgttaatctggtcgctttcactttgttctactactactaccgagcttttgagcgtgatgttggtaagacgatgattttgatctggaccgctggtgggtgctgctgcaggctgatgggaaaggtggcgtctgataaatgtcacaaatgggtcttcaaggaaccttctgaatgcgagcccaacatcgccaactactggcagagctcttttgatgccgtatgtaccatctcctgcactctcctcctttctctttctgcagagccccctggcccccttgcttttggggggaagagaccttattactgctactactacacacctcattaatcacttgcaaaaacaagctcagcacactgccacagcaacagtggtaggtctcatgtttttactgcgggaatgaggcaaaaaaaaaggaaaaaacaggtaaacagtaaaagagcccgagagagatatatcgacatgtctctggggagttctcaggctttgcatcaaatctgctcgtctgctctgctcccccaaaaagaagagaggaattggatgctctctctcactctctcatcaggatatcaccaagctagtatagaattaacgccgccgatcacagtcacggctaagctttattcctgtgagaacttaaccaaattcccctctcatgcttttgcttttgcagcttcctcccgaatggactgatcagttcgcctctggcatccaggcatgcacttctgttcacctagatcttttacatgctcgtcttagtttgtgattgatatttattagtgatgctaaacttttgcttaatttgcttgtagaccatagcagtgatccaagctggccatggccttcttcagcttggctcttgcaagatcgtgagtacagctatatattgctccctctatttttttaatatataacattgttaattttattctattatatcttttaaacttccatcatcaatagttctctgaatgttcagttaaaaaacgtaaattatactccatccgttctaaaataaactaacatcatactataatgtgatgcatcctattacaacgaatcgaatctgggatgcgttatatcttagtatgaccttggttttttttaagacggatggtgtactacataggtagattttacattataaatggctgtgcaacattacaattttattggatattactccctccgttccataatataatataaggcacaactactttttttagatgttacataatataaggcatgcatacaattaatttctcttctccattaaactattatttttttaaattctccactctcgagatctctaattctattggatgcatgtattatatttattagggtgatctaaactaggagatgataataattgtttcttggtctttggattaagagtggttatacattatattttggaacagagggagtatctttataggggcaattgttatatatatatattttttgatacgaaaataacggttaaagttactccacgcaacagaccgaataaaatgtgtcatatgcatttagtaccgagaggtacagtgagacatggccctttcttgacttgtttttgtcgcgttggtcaaagacgccgacgtggacgtgtttgtggggggcactagctaattgggcaaaacgtacgtacgctaactgtgcagataccggaggacctgcacttcgtgctgcggatgcggcacatgttcgagtcgctcggctaccagtcgggcttcttcctctcccagctcttctcctcctcgcgggggacctcgccgtcgccgtcgtcgttcccgcttaagcagcagcagccgccgccgccgcagctcttcaactggccgggccacgcgccgccgcagctcccgcccggcgcgtcgccgctcttcccgcccgggccggccgcgttccacccgtcgtcccggccaatgccgcccttccccggcggcggcaaggatgagagccacctgttccatctcccgccggcggcggcggccaagcagccgcagcacatggacgagcaccaccaccaccagcagcagccgatggcggcgccgcagcagcacggcggggaggcgcccgagggcgacctgaaatggcccaacgggctgtcgttcttcaccgcgctcaccggccggaccgaggacgcgaagttcctcttcggcggcggcggaggcggcggcgcggacgacgggagcaagacggcggcggcggcgcaggacgcggggcacggcggcgcggagaacgtggaggagtacctgagcctggagagccactccaacaaggcgaggaggatggagagcgcccagagcaccaagttcaagaggagcttcacgttgccggcgaggatgagctcgtccaccacgtcgacgtccccgtcggtgtcggcgtcgacggcgccggcgccgccgcagcagcagcaagggatggagtacaggggcccacacgagggcggcgtctactcggacctaatggagacgttcttggagtagcctaagctagcttagctagcgaccacaccaagctagcaaacatggaagcatgatcatgatcaagtgtttgttcttgtcacctcttagttttttccttcttttctttctcccaaactatgtttaagcttttgagcggtctggtttggagtttgcttctgtttaattaattaattaattagatcatgtagtaatcctttttgttcctccctagttgtactagctctctccaagtgcaaaaacatgaaacttgatactacatggggagcgtgcatgcatgcatgcaaagatgggcatgagtttgcttccgagatggctggcaagttatatggtgcaatgatggcgaggtacaagcgacatgcagcacctaataatttgctcttttatactctcaaaagtgtgtgctgcttggtcacaacactgtccctgttgcctacttattgctcaggctgcttttcgcgcccgtatttctttcttgtcgtacgtacaagttacatatgcatacggcaagggcctgtttaattcgcgactggaaacgtttgtgtgtcatatcatatgtttgatcggatatcgaaagagatttttgaacacaaatgaaaaaaactaatttcataacttgtctggaaactgcgagacgaatctttaagcctaattaattcatagattaattaggctcaaaagattcgtcttgtgatttctccctaactgtgcaattaattttcttttaatctatatttattgtttcatgcatgtgttcaaagattcgatgtgatgtttttagaaaaaacttttggagaactaaaccaagccatatataggacaaactcattcaaacaactctatatgccttttctgcgctctacttttacttactcactcctccgtttcggatgaattataagtcgtttaacttttttatcaaattttttttaggtttgacgaaatttctagaaaaattagcaacatttatgacaccaaattagtttcattaaatttaattttaaatatattttgatacaatgtttcttttgcattaaaaatattactatattttttacaatggttatactctaaggagtttgactaagaaaaaaaaatcaaacgacttataatatgatattataaaacgaggggagtacatgaaaaaaagatagctccattaattcaatatatcactaacacacaaattatttccacagtcaccctttctttaatgtttttacagggaacttaaaaaaaaactgtcaggttacgggaaaggtataccctctgcccttcgatatatatatatggtatacttgcgtgtatacggacgttttcggcatacgttaaggaaattcgccacggagttcacagatggaaggagtcctactcggacaggactgggtcgtcattgtatcgtgctgggtccaatgtctccgagtcctacttggagaccagttgacctgcgatataaaagggaccccccgggaggacctaaggcatcgaatctcatagccaacacatcccccacagcctacggagttgaagcctataggagctaagtcgccgggagatctagtcggaccttctcgattacgatctcggcggtatcattgagttccgctttccctttgaaatatgtggtttccaccatataatctcatatcaactggattagggctattacctatcgaggggcctgaaccagtataatctttgttttctgtctgcttgatgtcgtatacgtagatcctcgtaccagcgtaccccaataccttctatatccggtctacgggtatcctccatcgacagtggcgcgccaggtaaggggacttggtgctcaaggttctactactatgtcatctagcttcgtcgacaacagcgtcaacaccaacctcaaccaaggagttctcacttcaacaatgctggtgtggactcaagtcggtgaaatcgtcttcccggtttacaccacggtgccgatctcggctggtccttcaatgaccagaagcgagaacgcagtggctacaaccctggatgactccatgtcgaaggatcctcccgccgaagcggagaacggaacgtcgacgacatccgagcccgagaaggatcctagtgcagccaaacattgtcttttcgacaagaatcacgagccgacgaggatgacttccgaggtgacaaggtcctggtgtcctatccacaaaactagaaaacacaccttgcaagcctgttgggtttttctcaacgtccacgctgaaattcgtgcctgcaaagagcatggacttcagcgtacttctccaactcatgatgtctattgtcctattcacaagacaaagaatcacgacctctcgagctgcaaggtctttctcagcgccatgaagacgtcacctcctaaggtccagcagtcacgtatccccctcagggatgaggacaaggaacaaggagcgacgatgatttcagatcgatttgttggggtaatcgacatcgatccccacgaaccatcagtcttgcacctgctcgaagactatggctcatcgtcaacaagtacgccacacgaggtattggctatcgacgggaccagcacgtcagcgcgcgctaatgcggaagtcgaaaattaagtgactacaccagcccaacacatcagtaccgtcaacgcaatactgagggaaaccccttacgatcccgttctgaacgatgacctcgcacggtagacagaacgactacgggaatcagtgaccaacctcagcaacgcgttcgaagaggccgctgctgcagcgcacccagaacagccaccaactggcggtgctaatggcgaaaaccctgaacagtaggaatcacctcatcgagccacccctccgcctcgcggcaccggcgatctccgcgatcacctgaatggccgccgagaagcgcgacgcacgcgagacaacgagaaccgttcccgacatcgcgtctcttcacgacgtcacgatgacgaagaacgaggaggccgttcaagcgaagaccgagaccgtgataaccgccacaaccgccacgatcacgacgatcgcgaacggtggatgctgggcgatactggtcgaggacgccgccataatgatgacgacgatggagatcggcgccgggacaacaacgagagacgacgacaggattctcgagaacccggccgacgtcctcgtaatcgtacaccggaaccaagtgactcatcatcatcgtcgtcatcttcctcatcctcatcatcagatagacatccacgaaggacatacgatcgtcaacaacccaccgcccccagcgctgggtgtagagctttcagtcgttcgctgcgtgatgtccgatggcctgatagattccgaccaggagcaatagagaagtacgatgggagtaccgacccagaataattccttcaggacggtactctacgcggccggagcggacgacaacgcgttctcgaattatttgccaactgcattgaaaggctctgcacgttcatggctgatgcatctcccgccctactcgatttcttcgtgggcagacctatggcagcagtttgtcgccaacttccaaggaacttacaagcgccacgcgatcgaagacgacctacatgcgttgacacacaacccggggtaaatccttgagggaatatgttcggcactttaatgagtgcagaaatacaatccccgaaatcaccgacgcttctgtaatccgcaccttcaagtccagtgtcagagatcgatatactaccaagagttggcaacgagacgcgtcacgactactcagagattatttgaaattgtcgatcgatgcgctcatgcggacgacgcactgagacgcaagatcgacaaaccgaagatcagaggagagaaggactcagccaagcacgcacctgagacaagcaagaagaaaattcgcaaaagtgggaaaaggaaagctcaagcggaagttctcgcaacagaatacgcggaccctccgaagcgcccagacccacaaggcagcgacacgaagaaaacatggtgcccgatacacaagtcggacagacactctccagaagattgcttgttttcaaaaagtcacacgcaaaacacatggcattggaaaaaggcaaacgagtacgcatggtcgagaaggacgctgaggcggctactcaagaatcggactcagcatacccagactccgatctccatgtctcgcacatcttcggaggttccacggcatactcctcaaagcgagaatacaagaaagtggaacatgaagtctgttcgacgtggcagggagctgtgcccaagatgaagtggtctgaacagaagatagaattctctgaagaggaccaccccaagaccgctgtcatcccagggcaatatccgatcgtggttgaacccactattcggaatatcaaggtcacgcgagttctgatcgacggcggcagctcaatcaaacttctcttcgccagcacattggacgcgatggggattccacgaagcgagttgactcccaccgatcaacccttccatggaatcactcctcagtcatcgtctaaaccattgggcaaaattacgttgcctgtgactttcggccaagcaaataacttccgaactgagcaaatcacctttgatgtcgctgaattagatacagcatacaatgccatcattgggagaactgcactcgcgaagttcatggccgcatctcactacgcgtatcaagtgctcaagatgtcgggaccgaagggaacaatcactattcaagggaatgctaagctggaagtgcaatgcgataagcggagcctcgacatggtcgagcacacgcccagccctcctgccacagctgagccacccaagaaagtgagcaaaacaaccaagacgccgaagccggatggcgcagtcaagattgtccactctccagtgccaaccccgacaagaccgtcaagatcggggcattactaaacgagaaataggaactcacgcttatcacctttctccgagacaatgctgacgtgttcgcttggcagccgtccgacatgacgggagtacccagggaggtgattgagcagaaactcatggtgcgacccgatgccaagccagtaaagcaaaagctgcggagatttgcaccaaaccgaaaacaagctatacgagaagagcttgacaagcttctcaaagctggtttcatcatagaggtactccatccagagtggctagccaacccagtcatggtgcagaaggccaacgggaaatggagaatgtgtgtcaatttcaccgacctcaacaaggcgtgtcccaaggatcacttccctctccctcgaatagaccaactggtggactcaatagccggttgtgagttgttgagctttctcgacgcttactccggctaccaccaaatcagcatggcgaaagaggacgaggagaagacagcattcatcacgccgttcggggtattctgctacgttaagatgccattcggactaataaccgcaggaaacactttctagcacacggtccagggcgcacttagcaaccaactcggaaacaatgtcgaggcctacgtcgatgacattgttgtcaagaccaagacaagcgactcattgattgatgatctgcgggaaacgtacgacaacctcagacgatatcgcctcatgctcaatctagagaagtgcatgttcggagtaccatcgggcaagctgctcggtttcctcgtctctggcagaggaatagaagcaaatcccgagaagatcaaggcaatcgagaacatgaagtcgcttacaagactcaaggaagtatagaagctaaccggatgcatggcggcactaagtaggttcgtcgctaggatgggagaacgaggacaacctttcttcgctctgctgaagaagcaagacaaatttgtatggacacaggaagccgaagaggcattcattccactcaagcgctacctatcaaatccccctgtacttgttgccccccaacctaatgaagaattattcctctatattgccgccatgccatattccgttagcactatcattgttgtcgagagagagagggtgcaacaaccagtttactacgtcagcgaagctctccacgacgcaaagacaagtccatagatccaaaaactgctctacgcggtaatcatgacatcaagaaagctacaccactacttccaagcccatagggtcacaattgtatcctccttccctctcggtgaagtcgtgagaaacaaagacgttatcggccgcattgcgaaatgggtagtcgagctaagccaatttgatgtccacttcgtgccacgaacagccatcaagtcccaggtactcgccgacttcgtagccgattggaccatgcctgataacagatcagacaaccaaatcgacaacgaaacgtggacaatggcgttcgatgacacactcaacagccaaggagcaggggcaggattcatcctgacatcaccttcgggagatcaattcaagcatgcaattcacctcaactttagggcaaccaataacacagccgaatacgaaggactactcgctgggataagagctgcagctacactcggagtcaggtgactgatcgtgaaaggggattccgaactagtcgcaaaccaggtgcataaagattacaagtgctctagccctgagttatctaagtatctcgcagaagtcaggaagctggaaaaaaggttcgatgggatcgaggtccaacatgtataccgcaaggacaacatcgaaccggatgatctagcatggcatgcgtccagacgagagccactcgaacctggcacctttttggacgtcctgacaaggccatcagtgaaagaggcaagcggcgaagatagccaggtcgccccaacaacagctcgggggctgcagaggcagagcgcaccgttgctgatatcgaaaccacagatgactggcgcaccccactcattaaattcataggcagcgaagagttgcccgaggacgacgcagaagccgagaaaataacccgtcaagcaaaaatctactgtatgatcggcaacgatctatacaagaaggcgccaaacggggtactcttaaaatgcgtctcgtctgaacatggcaaacatctcctcgacatacatgaagggatctgtgggccacacgccgccggtcggacattagtcggaaaaacttttcgacaagggtttttctggccaaccgccctcaaagacgcttgcgacatggctcagcggtgtgaagcctgtcaattccatagtaaacacacaaagctaccagcgcaagcactccagactatccctcttacttggccgttctcgtgctgggggctagatatactcgggccattcccacgaggacagggcggctacaggttcctattcgtggcgatcaacaaattcactaagtgaattgaagcgacacccatggaggaaatcaaggccgacaacgccatcaaattcatcaaagggatattttgcagattcggattgcctcaccgtatcataacggacaacggctcccagttcatcagtgccgatttccaggattactgcatcagactaggagtcaagatctgcttcgcctcggtttctcaccctcagagcaatggacatgtcgagagggcaaacggcatagtactacaaggaatcaagactcgcgtctacgacaggctcatgtcacatgacaagaagtgggtcgaagaactcccatcagtactacgggccgtgcgtaccacatcgacaacgtctaacaaggagacacccttcttcctcgtgtatggttcagaggccatgctccccaccgagctacgacatcaaaatacatgagtacagaagcattccgatgaggatcaggaggagcagcgaaacaacgatgtgaatctactcgaggaacatcacgaacgagttgccgttcgagcagccagctaccaacaggcccttcgccgttaccatgagaagcgcatccgagcacacacgctttcgatcggcgactacgtcctccgacgggttcaaagccaagcagggcgaaacaagctctcacccaaatgagaaggaccgtacacgatcacacaagtcttgcggccaggcgcattcaagattgcagacggcgatggtcgcgagttgtcaaattcctggaacattgatcaattacgtaaattctatgtataagtcaatagtatccatacttgtaagacatcttacagcttcaataaagcctattttcaggtacatattacaatcaaagtgttccttcccgatgatcccttacccagatgacacctagcgttgaaacctatcctcatgtccctttacgccgtcttgacaaggcctccgaggaacctaagggaacttcggctggggacgcccaaagccgataaggccttgtcggatcctatagagacgaaagaccatgtaagatctagtcgtgtaagagttctcgccgtgcgtattaaccaagccgtgtaatcggaaattaattttcaacttcactgctgggggctaggatcagtgcttgttcaaccgaggcaggtcaaaggtccaagagccttatcttccgagaaggattctccgacgacaaggctgggggctagggagagtgtataactcaaacgactgattgaagtcgcgaagtgagaagacactcttacacactacgtccagactaagaaagcttagttatatagatttcttttctatttcacaagtacttcttacaattccgcaaaaatccaaaattatattacactcttccctaagatatttgtcataggacacggagactaccaggaaggccaacgccagtccatcgactggaagaccttctccgccagcggcgccatcgactttgccaggccatctatctccgtagaagttctccgagaacaagagaacccttcgtagaggaactcgaggtgcagctgcagacgatgatctcgtatgcaagccaatacatgccctccggcatatcggctcgatcgacggcactcctgcttcagggcctcgtcaatacgcttgccgatgccttcgagctgggcgcaggccccattcaaccacaagatgtatccagccgccgattcctcgggatcctcgcgggatactcggagctctctacagactctggtcatggacgtacagcaactcttcaggtacgagtagaaccacacctcgcgacctcggagcgtttccacggcctggtctttcttcacttctagcatagtcctctcgagttccgctacttgaaattttgtcctccaatattggatgagacgatcttggtcagcaagctggaactcaaatgggccggaacgatcactggcaactcaggctgcccgcgctgctggacatcctcgacatcaacatctctacaaacgacaacaaagtactcgagatcaaatgctaaagaaaactaaggtgatgactgcagacacgaaggcggttggaaccaatgagagttttacaaagcatgactaaagagtacaagggagccaaaatcctactcttcaaaaagcgggagaacggagtcccccagatcgccgacttcctccatcacatccttgcgcgcgttgctagccgccccctgatccaagatcttctgcagatcgagttcagcgtgcaccagcctcacacacgcaaggacatggcatgccctggtatagatcccgttagacgtctcctctccgatcctggccgcgtgcttggaggggattgcctccatcgccgtcgccagttctacaagcaaagacgtcagcgagaactcgtcgggattcgccggtatggtggtcttgacgccacactccccagcgagctggtgcagaccagtgtaggtgacccggaacgagccacggatctccgacaagttgttctcgagctctgacatacgatgctcgagcccttgccgttgtcgctcattgccggccaccagctccctcatcttctggaggtcctcgcgaacctccgtcagatcacacgtcagccggtcggcgcgctcattcgctgacgacgacgccgccgccctcgcctccacgatctcgcggtaatgccgcgagcaccagcttcaaggaggcgccccatctcgacctggagctcctcccaggtgaggacggtagacggcggacaccgaccagccgcaagatcgctggccgggccactaggcgtcgcctcgcggctcctgggcacaaccgcgacatctgtcgaggccacagtaggggacgtgctggaggtccctccagatccgtcctgtgctgcctttgcccatgccgccctgcgaaaggttgcaattgagacaggctgcaagtgtttgacgaagtgacaaaacctcaaattcatccacttacttctcgccaagcgtcacaagccgctatcgtcgcggaggcgggggagacgcgtccgaggccttgagtacaacgggtatgatgtgaggtggaagttttccggctacgcgatgaaacaccaggagagcttaccgagggggtgggtgtcttccgacaatttccgatcacggaggagattttcctccccttttcggaacgttgccaccacttattgtggcagcagcggcagcgacatcggacgcctccttgacgacgtcctccttcagcgacgccgccgcctgatgatccacgagtggcccgatgatatcagtcagagagagagaacctacgcttcatgaagttacaatgctatctcggaagaaaaatgcaaaaggaccgctgagtacactcacattgatggcagtttcgtgttcggctgcccccttatcgcaaagggggacggggacgttgttcgccattgtcgggccgctgatcatcaattggccgacgcggcgctccacggattcactgctcaaacctgtagatcgagaaccagaattcgataagtcaggaggaacacgcacacaaggaagtcaatttaaatacaagaaaaataccccaaggagaaacccgggtcgcgtcctcaggtccagaatagtcaaaggctaggtgggctcgagcctggagcggctagatccgtctaccaatgaagtcggcagcgacttcataccccgacaacccccgtacttggaggtcatcaatgatatcgatgaaagactggagggatggggccaaggcgggtttcgcggtccaagacgaaatcttgtctggtcgttcctcaggaacaacgaagactggatccgaattttctatctgaagatagaaccacctcgcccgccatatgctacaagaagaagggcactggaacgggatatagtgcgacttcaggccatcccggagttggaaaccgacacatgcggataccctgttgggttccatccaacgcaactcgtagtagaaacgaaagaggtcaagaaacggctctaccccaatgtaggcctcacaaagatgtgaaaaaatactgaggaaggcgatggaattggggctcaaatggagcagagaaaggccatagaaattcaagaccaagagaagaaattcagaaggcggaggaagaaaaccacagagaatgtagtcctcgatcgcaaccatgcgacccaggacaggctggggttcaatacctcctgcttctctctccatggtcccgcgaccgggaagggcgccatccgcctgtagtttctttagcgacgcgctggtggaggtggacttgtcgagatccattgccgccggagatcgccggagaagggaccgagatgaactagctagggttcttgcgggagcggagaagacaaggaacgctcggaggctggagggtcttttcacaacaggcggacttcgaaatggatccccaaaactcccttaaatagtcgcacttccgacgatgcgaattccaaggaaaggagagagatagctgccggaaatttctgggtccgttacacgcagcagtttttcatacttcaatttaaattcactcatgaccgttagtttcactgggcgttgtcgattaatcctcgtctctcggtcctcacatcgagaacgacaacaacctcgacatcagaagtcacgatcgggttacatgagttcatttaagcagaagtcgggggctactgtcagggttacgggaaaggtataccctctacccttcgatatatgtcacatatcgatatggtatacttgcgcgtatacggacgttttcggcatatgttaaggaaattcgccatggagttcacagatggaaggagtcctactcggacaggactgggtcgtcattgtatcgtgccgggtccgatgtctccgagtcctacttggagaccagttgacctgcgatataaaagggagcccccgggaagacctaaggcatcaaatctcatagccaacacatccaccacagcctacggagttgaagcctacaggagccaagtcgccgggagatctagtcgtaccttctcgattacgatctcggcggtatcatcgagttccgctttccctttgtaatctgcggtctccatcatataatcccatatcaactggattagggctattacctatcgaggggcctgaaccagtataatctttgttttctgcctgcttgatgtcgtattacgtagatcctcgtaccagcgtaccccaataccctctatatccggtctacgggtatcccccgtcgacaaaaaccatctaaaatatataatggggtgcctagtcattgtccgtatgtgatttttacaagaggtcatcttaaagaaccgtctataaaaaatagaactttattttacacataacatctctagtttattttgtgctaacgctccacccaacccaactccgctcacatttcaggtcactataaaaatacgatttttctatacgaggacccatttaggttgcagacaacccatttaggttgcagacagaccgtaattggcatcgaccttcattttcgcgtacggctcattaagagacccgcatgcaaaaatctatttttgcagacgggcctcttaagggggccgcatgtgaaaataagacctcttaagtggtctgcatgcgaaaataccaccccttcacatttttttttatcttcctccactatcttttccctctcactacttcaattttttttttgaactcctctcctctctctccccctctcctctcctaattatttactctcctctctctcccggccccacaatgggcggcggcgggcggtcatggcgccgcggatctggtgttggccccgcgacggcgggcaacatggagcggctggcagcgcgtgtggatccagtgatgacagcgggcgaccgggagcagagcagccgaaagcggcgagcggcaccgacgaggtagcctagagcaacgccaccctgtgtgaattcgacaatgacgacgggtgccggcgaccgggagcgggcggcgatggctcgtcccctcgtggaactggcaccagcgacgacgacgccgaccgggagcgggcagcggtggtggcccatccccacgtggatctggtgccggcgatctccatcgcgtggatctagtgccggcaacgacggagggaggtgggtccggtggatccgatggcgccgccgctgacaacgatggcgggcggcggatctgatggcaccgacaacaacgacaacggtgggtggtggatccggacggcggcggcggcaggcccgagttcaccctggttatttttatttttatttttttcactaaatttatttttgtatgcggctggtatatgaaaccgcatgagaaaatggaatttttgcatgcggttgtcctggccgtatgcaaaaaaaatcccattttcacgtaccttttggtgcatgcagttgggatggccgcatgcaagggatcacttttgaccgtttgtaaaatggtttccgtagtagtgagtgaggctaaaactatttgactgagaggtggagttggagctgtgctaaacagcccggagtatacactactgcactatatatgctactccttccgtcttgaaatataagggattttgaatagatgtggtatatactagtactacgaatctcttatattttgggacgggtgaagtatttattgaagagactgtgcatggattgggtcctctctaaatcctaggtattgtttagatcagggactaatcacatcggatgtttgatactaatttggagtattaaacatagagtacttgtaaaattaattatataaatgagagctaattcgcgtgaaaatttttttaagcctaattaatccataattagcccatgtttactgtagcatcatatagggtaatcatggattaattaagctcaatagattcgtctcatgaattagtccgggttatgggagttttagtccatccaagccccccaaagttggctgcttacaagggtaacctacgtacacgtcgatacatcatacatggaatgggtcctttttcaaagaaatgattacgacgttcggtgcgcaaagaactggacagacataagaacacgaaaggcagaccaacgcatgctagaaaaatttaaacgagaagattagaccgtgtgctcaccaagaaatggtttcaaaacatcctgtgtatctcaccactatatagaaataactatctggaacgtctgaacgtgtcgagtagaactgtttgtgacgtaccataccatcgtggctaattctactgtctgtcacgtctacaagacccttgtatatatgtatcggtttttagatgttggctcatttaaaatcagcatatagatagttttccatcttcgagcaatgaaaatatatagaaccgacacctttgagaaactataggtgttggttcaataggaaaaaatcggcaccactactataggtgcagaaattttaaaacaaccgacacctataaatatatggaataattgctcatttgaccatgtttggaagtctaactattgatctgaccttgcttttcatagtttgcttatttgaccatgcttttcaaaatctaataccccatctgaccctctttccattacaccgttagtgtttcatttagaaaaaagaaaaaaaatatatttactatttaaaccgactaaaataccctcaagacactttaaccctacccagcccaaccctatatatctctctctcctctcctctctttctatcctctctctctctcttcatgtcctctcgtactccgagcgggagtgggcggtggcgggcggcagtcgggagtggcttcggtggccgcgaggacgggggatcaagcagcgccacccacgggagggctggatctaccgtcctagggagcggcaactggcgacagcgggcggcgagggtggtggatccgacgacgccgtccccgggagggcctgatcctccaccctagggagcgattgcgatgacgacggcgggtggcggatccacctacgctgccctcgagggtggcggatccgccagctccccctcttcggatgtggtcagcagcaacaggaggggcgtgtgtgccctccagccccttcccggcgcgcggcggcgatggcgatagctggcgaaggtgcatccgtcgacgctggcctcgagggtggcggatccgcgcgggctcctcctccgatgaggtctgcggcgacgggagggacctgcgcgccctcacccccttcccagtgcacggtggtggtggcggcagttggcgacggcgggtagggcggcgacggatggatgctcccgatttttcattttttatttttattttttttggccgataatcattttcgcagtcggaccacctaacacttcgcatgcgaaaatcccgtttttgcatgcggttgggctggccgcatggtaatatcgccatttttacatacacctaagtgcatgtggttgctacatccgcataaaaaatgcaatctaactatatcaaaaagggttcctgtagtagtgttagtaataacgagtgtaaaccgcttctagataaatcatcttataataagtgccctatattaaggaaacaatcagtatcggactagctcatttggattctctactagtgtctataacttccttagaccttatcaaaacaaacgggctcatatattacaacacgagactattcactcaagagataggtgttgcagccacagcagtctgtgcagagaaaggcagtagtgcatggccgttgcccaagatattcttctgtgctaaagccggccaacgcaatgcctagaggacagtgtgggcgtggatttggaggcacgggacgacggtgccgtctagaaccaaccctgtccgttggtggtaacatctcaaagtggcagccatctttcactctctccctttccttttaacaccagagagatgtcacagagagggtgcgtgcatgctgtatagtagtaaaccggtggtccaaacggctccccatcccgtgcacgcctttgcatatgtaatcacccaaaagttggggccttttgggcgagccatatcgaagagatatatcacgaactctcacgcatgttacggtcgatctgatctgacgaccgtcgtccaacctacgctttcaccaaagacagccgtggaatcgtatagattccctactccgttctaggtcatcacctcttatagattttagctattgttaaagatataagaggtcagtgataacttcacctcatctctaatgaataaagacatgtcagtgatgatcaatacctcggatgtgtgtaagcagtccgtcacattaaccattgacccagcggtgttgccacatactccctccgtcccaaaaaaagacaaaccctgatttccgtgcccaacgtttgaccgtccgttttatttgaaaaaattatgaaaaaaaattaaaaaacaagtcacgcataaaatattaatcatgttttatcatctaacaacaatgaaaatacgaattataaaaaaaatttatataagacagacagtcaaagttggacacggaaatccatggtttgtctttttttgggacggagggagtatcatagatgtgagctcacaaaccagttctaacccgtcacaggtcatgagcttagctctgatggattttaccattaatgatgtgttcttcggaaaaacaaaacccacgtccttgataaacccagaaattccttagatctgggcatccggcaacatatccacatccatacataggagaactcacaactgtcaggtttgtacatgaagcttggtaggtgcaaactctatacctgtcgcaagtgagaggttacctctggcggacctatgtgtttgcccgttagaagtgatttatcaggtgcaaattaaataagaggcccatcacatataacctagctcttacctgtaatgagccgcaccctacagcttcatctattaccctaattgaatctgtcacacatgtgatcattcacgatgagacacttttatccatcacaaataaatcgatatatagcgtaatgatattctcgtggtcatgctagctgcagccgcctgtagatcacttgcagctagctagctagctttgggtaagtaggtaattggataggttaggtatatatgtcgctgcacttttgtgttggggttcatttcgccatcggttaaacggaatgtgaactaacagcaacacgaagattaattaccaaacagattaacggtgaattggatgtacggaaacagctagtagcgagtaccttgttgcccgggcaaatttcattcttcgagcacagctaactggctaattaacaagctgtttgggtttggagcattgtaccgctcaactgaaacttggcaacggaggttggcaataatcatgaaaagctgtaatactatacgtgaaaggtcattagagtaggtataataccagactataaagctagctataaacatattttaagaagataaagagaagatagaagagttgcgggctatagatttatagccagctacagcacggactataaaatacatctgtgtatgatagatgggactatatattaattatgaagtatatgtttatatgtatctatctatctattataaactaaaagtccattaaacttcctaaaaatactcttaagccgccacgtggcactcctataaactctcctagaccgccacatggcactatctaatctcaccgttaattttcacttaaattggtggacccattaatttaaaccattagattagatctattattaaaaaggtgatatcttttcatgcaaataaaatatgcaactggtggcttggggaaaggaaagaaaacaaaaaatgtccgtacgtaagtataatcgaaaaaaagaaaacaaatgaaccttcctcccattagccggaaggaaaaaaatgacatctgcgataaaaaataataaaaccaaaaataaaagcgtacttattactaggaaaaaacgacggtctaaaataggattttgtataatataatataaatatcaaatatcaaatcaaagtctctaaacatcatcttttaaattatttataattatatgcccaatttatgatccattgtattcgtttaattatataaactatcgatgtataaaagttattttttagtcttaaatacatcacgacacatcgagtcgacatataatagttaacgttggaaactaaaagtccattaaacgttatataaacgctcctaaacagccttaggacactcctaaaaacgcttttacgccaccacgtgatgctctaataaattagagaaaaccttataaatttagagaaaaaagaaaaacatccaaccctcattttcattggtggacctactatttttaaaccattaaattatatttatttaaaatacatccatgtaacctccccgaataaaaaaaacaaccgtgaactactcacgaaaaaaaagataaaaaaaaatgtaattacaattggagaaagaagaattagccctgccacggtcccacctaattgtcaagagtgacacgtacatacgttccgttcacccaaaaactgaaaaaaaattctcacatgtacaatacgtactattattcaccggattaagaaaaaatgtactattattcacctgattaagaaaaaataaatttccagggtacgtacatactacgcaccgtacttccctcattgaatcttatacatacaagaaaaaatcacccgtcccctaataaacttatctaaattagatgtacatgggaaaatattaggactacatttgatattaactatattttaatttaaaaattatcacatggaaacatatttagctcttcgtccattaaatatccaataaacactattaagcagccatgtagcacttctacaaacgcacatacaccgccatgtgacattttaataaattagaaaaatcagaaaagttatgagaataaaaaaaaaatccgtttatcgattttcactaatatacagtggacccatattgtgcggacgtatctctccacctatttcctttctctccttttttttccagtttatgttagatggaaaaactattttaggataacaaatttaaataattatattatctaaatcatatagctaactttttattggtgcataccattagattatttactataaaacttaaaattgaagatccatgttaactatattattaaaaaattcatgctttgggtcatatatattctatggactagttattgttcactcatccatactttttcaaggaaaaaatcatatagattttaaaacctttcgattaataacgtactcttaacttagaataattttaaacaatttaattggtttaattaaaaatacaacacccaaagtacttcctaaaagatttatgattaaatgtatttatgaaaatagatgactcaaaactaggaccgacttgatctattttaaaaacaataatctcctctgatcctcctgcctcgtgtatatctctgaccttccctatctgcctcagccatcaactcctctccaattcaattatctcctcttctatttttttaacttaacacaatataaaaatattcataactattgttttatttataattaaataaataaatcgagatcgcattagccatattttacttatagaagttaacatacaacatttgatggtagaccttatcgtttgcttggcaactaaataacaacgataaattaattgaacatatgtattatgttatactaaatcactgtatataacaaaaatcaactaaacacccctatagcgctcatgaattgctgtataatatgtcataaaattataagaaaaaccaattaaattgacgtatccatgatttttaactattagatctattttttttaaaaaaatattaagttgcaatgtgtcacatcctataaaaaacaggaaagacaagataatgaaacatcccgttattggctttcacttaaagcacttagaaaaattagaaaaataaaatctccaccacctcctcacatgtacaaaatactatcgtcccctccctattattttatgtattaaattaaaagagaaacaataaataatatttgatactctttttgagaaacaaagtataaacgcagacgctcacaatgcgcgtacatttactcctatgaatgtagacataccgctatgggtacttccaagagactaggctgacatattttgacattgacgaagtcgccacatatacctcgctgtcgacgggtacatcgcctaccactaaaagaatttgtcaagtccgggacttaaactcgagtgggcaagttccaccacaaggaataatattagatattaaaacaatcataatatttaagctacatttctagaatacccctatgacgtttaaaccggtggaactattatttctaaccgttagatatatcttatataagaacaaaaagcgtgtattcatggtacatcacatttcaaaaatattattgtgtaattatatttcgtcgttattgtattcacgtctacctttgtttcaaatgatgaataagattataaataattgcttatagatattacttaaatataatataatatagttagaaaattataaaagcatgccgactaaaacaatttagggagaaatcgtggtaaatgttctccggttaatatttcactcgtacaagtgtctcaaacttagtgtacgatgtatatccacgtatccgggcgggctacctttctattgtatgaattgtctattgagttgtacttgctcttaggacgtggtttttgatgtggacttaattaaggacataggggtgctacgtgcgcacgtggcgtggcagtgggtcgcagcctcgatcgtcacacttaaacaaattgcgatggccagtcagagatgctggatcactttgggaggagcgcggaaactatacttaggaggagctgatagtaatagcaagtttaatagtatagccaactcgctgcaaattatctatatatagtcaacttaatagccaatttatataatagttacctataaatatatactacacaattaatatatggtcccacctgtcatacacacatgtgtcttggagtccgtgttgcagctggttacaaatctatagctcgctgctcttatctcttctcttttacctctttaaaatatatttatagttggtttataatttgttattaaaatatatttatagttggtttataatttgttattgtacctgctctaatactctactagaaaaaaatttgcaaacaggctaaatcggtctatccaggcagccttcggatttgcctgcaggcaaaggcctgtgaacgcaggcagcctttggatccgcctacgaaaatcattttgcaggtggcctcttcttttttgtagccaccaaattcacccgcctgcgaaaacattgccagcgcacaaaaaaaaaattgcctgccaccacccctacccgccgccgccctaccaactccggctagatctagggttttgggagggagagggaggggagggaagtcatactgctgttggccgctgccgccggagctggaatggagggagggaggaagccgcaggccaccaccgtcagatctggaaggagggagggagcaagccgcatcgccgccgtcctcccgccccctccggctagatctgggaggtggggccgccgccgccaccaccacagctacaggggggccactgccagatctggaaggagggagggaggaagccatgccgtggcaaccctcccgccctcttcggccaaatctgggaggggggctgccgccggatctagaaggagggaggaagttgccccgccgccgccctctccgaccagatctgggatggggggccgccaccaccaacgctgcaccctccgatcggatctggagggaggggagccgctgccgctacaaatgtgctccgcgccgccgagtgacgaagggagccacctccgcgccaccaccatcgcgtgcccgcgccaccgcccttgctgcgtccgggggagccgtcgtcgccacgcgtccgtgccgctacctttgacgtgtccaagccgctgccgttgggatgagagagagggagagccgcctcccatccacgtcgcgccgccgccaccctccctcctctggtcggatctggaagggggagggagggaggggaggggaggggaggagggaaggggcacagtgaggggaggggaggcagcacagttagcagaggcaggtgagcgactgtaaggggagggaggtgaggagtgatttttataactaaaaaagccttttgcaggtggtatttttgcaggcggagctcttagatggttcgcctgcaaaaatcgattttcgcgggtggacaataatctcatcccacggatgagattttcgtaggcggcgaattagctccaagagacctacccacctgaaaaaaaatgccatcaactaaaaaaatggtttttctagtagtgatagatggatcgattatcaattggactaactgtattgggcgagcgcttgcttacacgggttctttatatatatttcgattgatctgtaaaatatatggagaccaaacaaggatccaggttgaaaccgatatagccgtagaaaaacctatagatgctggttctaatgagtccatataggcatcggttccggtatcagcatcgattattcggcaccaatgacacaacacattggtgccggttcttaaactggcacttatatgacaccataggtgccttgccggttctaaatttagaaccgacacctatagtggtgcaaccttttaattttccaagtgctaaaaaataaaaaaatagtatttaattaggcacctatacagtcacagttcacttcccacaagtcatatgattttctcaacccatatcatgtacatgctttaaggaaaattcaaagtcaagacctttctccgtgtcatattatatgctgttttgattttttatagtcaaattttgttaaatttgaccaagtttataaaaaattagcaacatctagaatatcaaattagattcattaaatctaacatcagatatattttaatagtatgtttgttttatattgaaaatactactatatttttttttaaatttggttaaacttaaaaaaatttgactaagaaaaaagtcaggatgacttataatatgaaatggagaaagtattgtcttgagactattgttatccaaacttataatccatatttaacatcatatatgagcttaaaagaaaattgtgtcaactacaaaaaaaaattgtatgtcatctatacctacaactttcaactttcaaatagattttgcatccatccgagatcgtttttagaaaatttaaatattcacttatgtaaatagatctaagaccttataacatattttcggacatccaaacaactatcaactacaacttttgtagatctcatcgagctctacaaatttgatattaagtttatctttatccgaatttatataataaaaaagtgagataaaaacacacacatatgagttgtgttatcataggtgacaattttagttgtgaactgaaatttttattaagaatcggcacatatatgattcccatacgtatagattaggagaaatttactgagctgcctcttcttagtttgctagttgattaattacacattattatttaagagagaatcccttatatgccactagaatttggccagcttccttatatgccactcaaaattggcttctcccttatatgccactagttcaagtttttccaccattttatgccactcccaccactatagtgttagttgactgttagtcaaaggttagttttttcgtaaatgaccaatatgccctctcaactaaaaaatgtgtaaacttcaaaaaatcataactaatttattttaaatcctttttgagtgaacaaaattttgtcagaaccagtgaaaaatgctctttatattaaaaatattgttggaaaactgcatgttttatgcttacattgaaaatttatttgtgatggtaatggctaaaattgcatgtgatgcagaaaaaatcaattttcatatgttgtatcctagctatattagtactaaaatatctattattggttgtatactaattctaaagggcaaatgcgtctttttacaatgaagttaacggaggagaaacttgaaccggtggtataaaagggagaagccaatttgaagtggcatataagggagcccgttaatttagagtggcatataagggattctctctattatttaatccatcatattagatgtattctctattcttatttagtgtacatccaaacagtcctgctctgatttatggccaacttagttaagtactccatatgtatgttttgcatctgttgcttttagtttatttgagcatacacatcaaagctaatttgaagcactttttcatgataatattaatgtgtatagtactactctctccaagcaatagctagatgtctttttttagtaacttgaaggacaatatacatatatgcctaatcttacatagttcttttggtctgtagagttcctcaagatgtattgaacatcctaataatttgccttataatatgttacaacctgtattttgatcatatgcattcttaatatttgacatctgatttttcctttacgttactaggtagtattggattgatcatggataagggatggatagaagcatctaggtcgagtgttgaatatagtatcggcgttagtatatttctagagctcgccttgtccaattcagccaatgacaatacaattcttgttggtgtttattacggtcacaaataaaatccgcaagcgcacggatataccgatgtagcacttcaggaggaagtattcccatgtatggaatctgcagggaacatgtgaggttatctcttcttcaggtttatccaaggacacaaaataaatgtgggcaaaggatagagaagattttctagtaagaaacagtgtttacagaaagcttggtttaatcctattgcaatacttgcaatactttaggcactggcttgctcgcagctaccatagcgcgctctactccgtactcgtccagggaggactgcagtgatctcgagtgctgtcactacctctacaccaacctctaactatctgtgggatacgtagcaattgctggtaattaactacctaggcatcgcgtttatgcaattaattaccactctagtgttagctaaatactaaagtaacactattactagtgacattaatccagtatgctaataggaactaactaagatataattctcacaaagtaaatcttaattactcaaaagaatatttctattaaatcagagtaattaacaagatacaaaaagtaaaagtaagagtagattagtgacaactccggaattactccgatttcttctaccttactctctctctctctattccaagtatacaataaagcatacaaagagcatgttataattgagcttaagctatatcttggtgtgtgttgtgtatgagggaggagaggggtatttataggaggagtttgcttgagaggatgatgatgctccatggaatccaaagggcatcttcactcttgagcctccacctatcctctctatgacggtttctaccagtaaaaacgctcccaaccgtcatagcaagtcggcaagtaattgcctctgaaaaatggggccgattgggctccttttgggtttggccaaaccatgggttcagccgaacccttgccggctctttttgccccgaattttctcgtgggctctggtgaagaatccctcagcccatatgtatggtggatgggcccatttgaatgtgttttgttaggtttgtgggtgcaaaactccataggcttgaatgtggaagtttaattaacctccttctttatgtatcttttgtctcaactttggtagtttgtcacctgcatccaaatatacaccaacactcgtggaaattattagaaataaaccctaccactatgttgcatgctttatactttcatatttatgtaggtattgacgacgtaaatttggcatttaacagccgccaacaatcctttgcccttgcaaaaatcgtggaaatagatattggttagtgagcatctgatttgtgatggattcttggttgtgcacacctcatgtattcatcatggaggaagcatgtttacttccaagccaagtgttgcctcaagttcacacctcatggattcactagcctatgccgtcgtacattctcgcgaccctaaacattctattatgttacatggtacgtgaaagtcacagtatatatattgctcacaaaaaacgtgggtcacataagtgatattatcttgatatatatatataatgaatggcttaatatatattgcaaactttacatccatatgagtcatcatcttataactgtatgtattgttgcatgacccccttatcctctgcttattttccgttggtgcgtatgctttatatgtcatacacatattttctaaggtttttaagcatttaggttattttaattttaaatttgtatgaaatcattaaacctatagaaaaatcattatgaaatcattctaaaaattcaggtgatcatgcctgtcttgttagagggaatgtgtatctccttgtagcgatttttttttctcaaacatgttaaatattaattgttagaaaaaaataatatttggtcatatatttcgaatatgccctgaatagtgcaatattgactaatgaatccttactaaagaatgagggtttatttgtaaaataattttctattatatgtgcaaatcgtaaaattat

SEQ ID NO: 21788 - DNA, 10790 bp, Oryza sativa
aataaatgtgtcgtatctaaatatggaacgtttattggaaaaggttataacagcggaggcttgttccgcttttccttggatgatatgtgtaataaagttgtgaaccatgtaaacgatgatgacgatgagtccaatgtgtggcattcgcgattttgtcatgtgaattttggttgtatgacacgcttagccaacatgagtttaatttcaaaattcactttaatcaaaggctctaagtgccatacttgtgttcaatcgaaacaacctcgcaagcctcacaaggcatcttaggcgaggaatttggcaccactagaacttgttaattccaatctatgcgaaatgaacggtgtgttgactaaaggggggaagaaatatttcatgacactgatagatgattgcactagattctgctatgtgtacctattgaaaacaaaggatgaagcattacattactttaagatctataaggtcgaggtagaaaaccaactggaaaggaaaatcaaacggttgaggtctgataggggtggagagtgtttttccaatgagtttacttctttctgcgaagagtatggaattattcatgagaggacgcatccctattcaccccagtcaaacggggtagccgaaagaaagaaccgcactctaactgagatggtgaatgccatgttagacactgcaggacttttcaaggaatgggggggtgaggcaatattgatcgtgtgtcatgttctgaatagaattcctactaagtataaggaagtaacaccattcgacgaatgagaaaggaataaattaaatctctctcacctgtgcatatggggctgtttggccaaggtaaatgtacctatagccaaaaagcgtaaacttggaccaaagaccgtagattgtgtgtttcttggttatgctatccacagtgtgagatataggttcttaatagtaaagtatggagtacccgacatgcgtgttggtacaattactgagtccagagatgccacattctttgagaatgaatttcctataaaaaaaatgcacctagcacttctagtcaagaacctattttatcccctgagcactttgcgtcgatagaacacattgatcaaacgcttgaggaaaatcctgaggaggataacattgtagaaactcaaaaaagtaagagacaaaggactgcaaagtcttttgaagatgactacattgtatatcttgtggatgatactccaagaaccaatgaagaggcatattcatctcctgacgctaactattggaaggaagcggtacgcaatgagatggactcaattatgtctaatggtacttaggaagtcatcgagcatgcatatgggtgcaagcctgtacgatgcaaatggattttcaagaaaaagcttaggcctgatggtacaattgaaaagtacaaggcagtcttgtggccaagggttatacccaaaaagaaggcgaggactttttcgacacttattcatcggttgctcgcttgaccacgattcgagtactacttgctctggcagcctctcatggtctactcgtccatcagatggatgttaagacagctttcctcaatggagagttggaggaagagatctatatggatcaaccagatgagtatgtactagtgtactagaaggtcaagagggaatggtgtgcaagctgttgaagttcttgtatggtctgacaatacacttacatctgctggctttattgtgaacgaagctgacaaatgtgtgtactatcgctatggtgggggagagggagtgatcttgtgtttatatgtcgatgacatattgatctttgggaccagcctcaatgtgattgaggaggtcaaggactttatgtccaaaagctttgaaatgaaggatttgggagtggttgatgttattcttaacattaaactactgagaggagatgagggtggattacacttgtgcaatctcactatgtggacaaggtcttgagtcgctttggttatagtgactggaagacagctcctactccttatgatcctagtgtgctattaaggaaaaaccgaagaatagcaagggatcaattgagatactcctagattattggttcattgatgtacttagctagtgcaacgaggcctgacatctcatttgctgtgagcaagttgagccggtttgtttcaaatccgagagatgatcattggcatgctcttgaaagagtaatgcgctatctaaaagggataatgagctatggaaatcactacgctgggtaaccaaaagtactggagggctatagtgattcaaactggatatttgatgctgatgagataaaggccacaagtgggtatatgttcacacttggagggggcgctatttcctggaagtcttgcaagcagaccatcttaacgaggtcaacaatggaagtagaactcacagctttagatactgccacagttgaggccgaatggtttcgtgagctcctgatggacttgccggtggttgaaaaaccagtaccagcaatcctgatgaactgtgataatcaaacagtgattattaaagtgaacagttcgaaagacaacatgaactcatccaggcatgttaaaagaagactgaagtctgtcagaaagcagaaaaactccggagtgatagcattagactatgtccagacggctaaaaatctggcatattagtttaccatggggctaccacgtaatgtgatagactgtgcatcgagggagatgggcttgagacccagttagagttgcacaatagtggaaacctgtccattgtgatcagagatcccgtgaatttggatggcgaaacaaactattgtgtaactgagagaagagaccctaaaatgggcttatcttcatgatgcacttctcttctaatctgtatggtaggatggtatacaccttaatgtgattcgagtggcttttcataaagcagagatgttggccaacagaacatcttagaaggaacacacctatatgagtccgactgctagtcacagtctatgagatctgagtgatctctagatactcatgaaaaggccaggagtatgacttatacactccaaacagaggggatgcaaacggcagcctagtaccagttaagggtttgagtgaaacctgaatcacacaagactaacaattcaaggcatagtccattgttcagttgtgatctggtgtagctcttttcctaggtggaagttaaacttaatagtctccaccgaaatactggtataacaaacaggattagaatcgagagcatttcctgtgagccatgaaatttggtggggattgttagattaatgggctaggcccaattaaatcctaataaattccattggcccacattaagtgctatgggtaataataccaccttggaaatctaagtgaagaggtctcaacttaaatacggagctgttgagatggtgcgcggacaaccaggcggggcgaggcgaggcgaggcgaggcagacagttgttgctgctgcgctctctcgttttgtaacggacggtaataaacacggagaatcgatttcatatcaatgaacgcatcggttacggaattaaacgtcgtaaatttattccgtcggttacgaaattaaacaccgtgaattgattccgtcggtcacggaattaaatgacgtgaattgattccgtattaacgagcacgtcggttacgaaattaaacactgcggttgatgactccgaacattactctcgcgcttgcatatatatactccgcagcgaccagaaggacagaagaagttttttctgacctctcttgcacttcgagttcctcctcctctgttcctgagctgcagaatccttccctggttctgttcacctgcgcacacaggtgtacgggacgagcaggtgcctccgaaactccgtccgcttgagaacctgcacgggtaggcaagcgatcaagtttttgggtagcgcttcaagcgcgactacccttattcttcacggctactgctgctgcatcgacgccttcaccaagatgtcgacgaagattagaaacaagatgatgaacgacatcaacggaggcaatacttcctcaaaattcaacggtgggacgttctcggggtatactttcattctcccgattctattagatgtttctttgttaatactcttcgcaatggcagcgcattgcgttactatgtaaatgttgatgtttatttcatattaagcatactcaagttgtatacatctagcactgtcactagatctacttatattgcaactgtcatgtttattgtcttaatattttagattaaaatatgctgaattatgaccaaatttccaacggtgactgcgcggctgcgccgcacccgccagcgccagtccgctccataggctggctctgttgcggcggcacagtgtcagcctcgcctcgcacagtatccacggatcgcacccgctagccatcacctccgtgggcccgcctgtcgtggaaaaaaaattggtggagactgggtgtaaaccggcctgctctggaaaaaaaaagggactagctatatttatggcgccatatttttcacaaaatatagtcggtatgtgtttacattgtaagtcactaaattacatatgtaattttagtgtatttacgatgtaagccccaaaattacatatgtaagtattaaaattacatatgtaaatcctaaaattacatatgtaaatagtgtgttagtgatgtgtaactactatgtaaatttatataaatatataatttacaacaacaacaaagtttaaaaagcatatcagtatgcatctacgccgtgtcagaaccaatcatagcaaagcgtgtgtgctgatgccccatgagcacgaatcttcatgccaatcctaaggctgaaaattcgactgcgtttgtgggaaaaatctgtcgtcataattatagccgatccgaaaaaaaaaaattgatggagactgggtgtaaaccagcctgctcctgtccagcccggccccaatgattgctgcgtggatacaaacaagagatcaatcatctagctcgttgcggctccaagcgtagcacaaataaagtttgatacgttaccgtaagtatagcgcggaaatatatacatcggcgttgaggcataaggacatcgttgctaatagtgcttaacatactattgatcgatgcaatactccatacgaatattgttattgaatcaggaattaaaattgcgctctaggctaatcctggctaagaggtacgacctcatcgatgcgggactcatcgttcaacacaatagaggaagaaagacttggcggctacagccagctttgcctattagagtggtattcatgcctaggttttaaaggtgttatttcattgataggtagaagtggtatttttaagaatatctatatggatttggaaataagtgagttataaacggtgatgtaagtagtgatatattttagtgtattaatgatgtattaggtcttttacatatgcagtttcatctacttcctccgttttacaatataagtcattctagcatttccacattcatattgatattaatgaatctagatagatatatatgtttagattcattaacatcaatatgaatgtgaaaaatggtagaatgacttacattgtgaaacggagaaagtattaaataatactcagcttttaaataataataataagtagtagtgaaaatagagaaatttatatgcaaccgggactaagtgattttttttatctggacatattctattaagtatataaagtgtacggtctactttactttgtagaaatggtgagacttttttttttacgaaaccgcatatctaggcggcttccttggttcgaaaaagttggtcagcaagattttctttattttttctaactaagaaactataactgcattctcaaaagaatctcaacacgaatcccaatcctaaagtttgacgatttttgttaatcttttattagatattctgggattaaggggattaaattttatgtattgttagccgtgctcctcaaaaccactccttgtaaaaaaaaaaaagcaaatgcaaaatgcgcgcatgaatggttcccttctctactgtaaagtacggagatggatctctctcggatggatatcaacccgtttcttacatacaatctaaataattatgaaaaaaatctaaaaaaatatataagatatgttaatatgtaacatatcacttcacaaacatacaagttcaaattcgatttctacaatttataacaaaaataacaaattaaactctaactagtatacgtatattcacagtcaaatttgttatttttgttataacttgtagaagtcaaatttgaacttgcatgtttgtgagatgatatattacatattaacctatcatgttaatttttttgaaaaatttttataactatttatatagcatgtaatatatataatatacagatagacgaccacctgagtgtttaaaacagtttcctataaagtactactccaaactccaaccatacgtcagggggcctacatctagccacatcaagccgtggaacaaaactagcagagcaaacaaatacttcgctggcatcagctaacaaacagatcgacatgcactccactcaacatctgaaccttatctccgtctaatataggagtattaggttttgttctattttcaattactcgatctcggccattccgtgctttttgtgctctaaaagaagccagtacaacagcactagtacatgctaattaaacacttctattactacgtacagagcagggttacgtaggcagatactagaccacgcccggttctcaatctgatcgctattaccagtggctggcactctggactaggtaccggtgcggccgcgcctcgccgctgtgccggttgtgatgctgctgctggtgcagaacacgagcgggaggagacgacatctgatgcgccgcccaccgggatgcgcacgacggcgcgctgccagtctgacggtggtacagggcatggggtaccgtcctggacggcggcggcggtgtcgttgtcgtcgtccttgggaacaggaacgccggatcttgagcggctggaggcggtcccggctggccgcgtcgtactcctccagcaggttggcgaggtcgtcgtcgccggtgacggagacgagcgcgtccaggtcctccgtcgggagctggcaccgcaggcacaccgcctcccacccgcacatctccctcagcttccgttgcaactctggattcacaatccaaacgtacgttgtaagagctccgatcgatcgagagatcgaactaccagtctcactcaggagcaggttgcaggtgtaccgtggaaagggagggagcggtcgacggagacgacgcggttgtcgccgccgacgtagcgcaacgcgccgtcggcgtggcgagggaggatcctcccgccgtagctgcagaggaacttgacgaacgtcccctcggctgcggcgtccgctgccttgacgacgcacgcgacgacgacgtcgtcgtcgagagagccgagcgacgacgtgcacgtcgaggacgatgaccaggaggaggttcccaccatggctctccttccttggacggacgaacggccggggacagcgagaatctcactggagaatcttggctagctatagctctttggccttgctgcccccatgagcgaaccgcttccagcctcgtctcgtcgacacgaacgccacatttataatgtgtggagagcgtgacggttttggagatgccaaatgactggttgaaacaaaactctctgaccggccaattttgtgaaacggcctattgggctgaagcagaatcgtgtcaattgcctacaagtattcaacaagctgtagaatcaatcgaccatagtggatgcacatgcacgcacgcatttcctgcggttaggacttaggaccactaggacgagctggatctgtaacagacggtccagagcaggcgcggctgcgatgatacgaatatctcgtcattcattcactcgcagctgtgaacctcctgtttgtttggttcggcgatatctccgtccgtgtgaattgaagatgtgaataacggtgattatactagtacacacggaacgtcatggaaccggacaacgtacactacacacgtcgcgcgtccgggttcctcaaatattccgaggcttatcctcccggagatcatcaagacatatattgcaagtaggaacaggacgaagatgtgaagcaatcggtgaaggctggagtccggtccaccagcagcgccgggtgacgacagtgctacagaaataatgcagcggggccccgttgcccacgtcaattctctgaggagctagctgatgacgacgaagagataaaagctttcagctcgccgcggggcacgaaaatttcaaaataattagagtaaatttcacaaaattataaatactttgatcaaatcattataaaaacaatagatttaagatggcgtatcttgaaactacatatttgaaaataaatttatcataaaactacaagtaagtttaaggttaagcatggctaaaagcgatttttctgtacgtggacctatttagattacagacggaccataattggttgcgcccgggaaaataagttcattttcgcgtgtacggtcctcttaaacgaaccacacgtggaaaggagattatttttacatgcggacctattaagagagccacacacaaaaatacccactctctctccctctctctccatgctactcactttaaattttcccatctttctctcctctcgtctctcgtctctcctctctatatcattttcttgactccccacatctctcctctctatctctttttccccgatctcttctctcctctcctcccgagtcccgacggcggcagcgggcgtaggcgacgacagcggtgcatggcggcagcagcggcgcgcgggatccggcgggcggcggccggccgccctctcccccgcgggaaccagctcccctcccctcccctccccttccttccctccccagatccggcggaggggaagggcgtcgacggtagtgcggccagagggaagcacggattaggcggcgagccgccctccccccctacgagatccggctcccctccccagatccggtggaggagaggggcgttggtggcggtgcggccggaggggagcacggaggccagtggcgggcggcgcgaaggccggtgggatagtagatccggcagcgggcgatgcggaggccgccgacgagggtgggaggtgtgtcctcagccgacaacgatgacgaggaggaggaggaggaggcagccgggatcgcgcggtgccgccgccggattcaaggttttcatttttttttgaaattttattttttttagatttttgtttttccgtgtgggtgcgccacccacacgcgaaaatcggatttgaccgcatggaaaaacctttctcgtagtagtgaagtatcgcaaaactgctaattttataataaaattatcacaaaactatatattttaggcattaaatttccatcacaaatgttatgtttgatttataaaacttttagttttgtgataactgttagtatttcgtaatgttcacagataaagtccgcaagcgcacagagatatcgctgtagcacttcacccgtgagtattccaaggtatcgattttccatagggaaacgtgtgtgttcaacttctcttcaagttcttccgaggacacaaggcaaaaatgtgcaaagggtagagaggatttcctagtgagaaacaatatctacagaaagcataatttaattctatcgctatacttcaggcgctggcttgctcgttgctaccagaacgcgctctaattcgtacctagacagggaggactacggtaatcttgagggctgtcactacctctacaccaacctctaactatttgtgggatatgcagcaatcactggaaattaatgacctagataccgtgtctatgcagttaattactactttagtgtttataactctccaaagtaaacactatctataattcaaatgaataatagtccttgtcgttgcttcatgcccctatcttcccctcacagatctagcaagcatgaggccggatccggtgagctcaaagtccacaagctcagcaacggttagggagggagccttgatccgcaccgacaacgtcaaccgggagggaggagtgggagctctagatggcggctggggagggaatctcatcgctggacagcaagggatgaaaatggattggaagctagctctatcttattcgtttcattttttttccggaataggaatcggaaatccggatacagaaatagaattgaatagaaatacggagtgaatacgaaacggaacaaatagggtttaaccaatatttgctggaatataaatgcccctcctattgatcttgtaatgtttgttttacacttgaaatatttacaaatacaaatatcataaactacaaagtggtagatccattaaattctacaattttgatatcgagcacgtctacatcggatggtgtttaagttgttgatttaatattttgtaaaaacaaatatggtattttgtaatgaatatttagacacctaaacgatctcaaataataaagttgtcaacaacaaagttgtagatctcattgagctctacaattttggtataaatattgtcttcatcagtgataacgacgtcacttcatcggattcgtgcatatctccacaagttatagtgacaactcgaagtccagttcggcctctagagacaatactgacttcaaacggacttagcgtcgtcttcatgtcaactccgatttggatgatcttgga

SEQ ID NO: 21789 - DNA, 7054 bp, Oryza sativa
tgaggcagtgtatagttttaaaactgagattgagaggagatctcctggtagtatagtggagatagagtatgatgtgattaatgagaagcataggttcattagaatgtttgttgctttgaagccttgtatagatggatttttgaatgggtgcaggccatatttaggcattgattcaactgtgttaacaggcaagtggagaggacaattggcttcagctattggtatagatggccacaattggatgttccctgtggcctatgctgtctttggatctgaaacaaaggaaaactgggaatggttcatggtttgtttgaataaggcaattggatctccagaaggcctagtactgtctactgatgcaggcaagggcatagatgctacagtgacaagggtgttcaacaatggagtagagcatagagagtgcatgaggcatttgtacaagaattttcagaaaaggttccatggagaagtatttgaaagaaatctgtggcctgcctcaagagcatctgaactctgcatgcagagttgtggttagggttgttgcttatgttgagtatatggataatggtagccaagattatcatgtttcatcttcacataagtgggttgtagataaagacaccataagcttgatagatttgatgaaggacttggatgatgaaatcatccgtggtagtgcgcaggagcttacagtgactttctgggacaagagagtgggaccatgtaatgtagtaatgagatgaattgtgatgaatcaaaatttgtgcatttaatgtaatgaagtagaactatgtaatgcagtattacaggaaatatttgtttttgcccaaaattgagatgtaatgcaggaaatatttgttgttgacatttcagaatcatatggcatatgaagtagcaattatctgaataataaccattcctccatttcagcagtaggactttcatagatagctgaagtcatgtcttgcaacatatacataggttgctaaagtaatggcttgcaaaataagggatatctttcagctggcaatttcacatatacacaaaagacaagtcttggtactacttcagctggaaatttcaacaaaatagcctactctaatagcattggattacagcttctttgcagtcctggtaaccacagccttccttttgttggctttaaatggacttgcatgtactggggatgcaacactcctgctccttgtaactggtccagggctgtcatccacctgcatagcaacttgtgcaggggcttgatcagcagcagcagtagcaccagcaagggcttgatcagcagcagcagcatgggcttgatcagcagcaggggcagcagtagatgtggcttgatcagcactatcagcaatagcagtaggaggcctgtgaaagagatattgaacaaatatttaaaaaacaaaatggcaactgaaattgttgatcaaaacatgacacacttacatagtgttgttaccacaagtaggcacttgttcaggcttagatttcttctttctaactctcttaggcttgggtggagctgggggagaggcatctggatcatatacaggttcattgcatgtcttttgtaggtggccaaagccatggcacctcttgcatctccttcttttctttcctgaaccaccttcttcaacaccaatgaacttccttgttctaggtcttccagctgatctcttcagtattggtggccacatcttgaatcctgtgtccactttgtcccataggctcttgtctggcattggaggcacagttgtggaacaggcagtcctgaacatggccactgaatagtaggggctgacatagtcttctagctccacttctctcagggatccaataaaagagatggcatgcctattttgtgggaaccttttttgtggtagcatctctggtaggaacattgtcagcctgacttgcttgtgtgggtaaaaccatactcagtggaaccactgtttcagcttcatccacacaagacacaatttgggaacaaggctcactcattgtcacatgcaatggaagcttcctaacatccctgtattggttaaatgcctctaataacacagcatcagaacaaatttctacatccctacccactctcttgtcccagaaagtcactgtaagctcctgcgcactaccacggatgatttcatcatccaagtccttcatcaaatctatcaagcttacggtgtctttatctacaacccacttatatgaagatgaaacatgataatcttggctaccattatccatatactcaacataagcaacaaccctaaccacaactctacatgcagagttcggatccatcctacaatgcgacggcaaatgaagagaaaaatgggatcccaaatcagatccaccaaaccatgcatctcaattgaatcaaagagagaaaaaacgaatcaaagataagaggaatccaaacttaccctttcggaatccatttcggcatcggcggcgctgccgccagcgcagattctaccgcctcctgtgacggtgaagctatcaccgccggtcaaacttgcatcccaccggcgacaatgcctgggcacaactagtatcgagggtgacagaatcggtggaatgggcactgtttcggtggaattgatagagctagggttctaccacccgtactgcttgcgaatggagccaaaacgagtggataagaggagtctccaccgtccatgtatatggggagtctcctttgaggtcattttcaaattaactgtacctagggatgtacttagcagctagctctacttaaacactcttaatgtctcaactaaaccaccacatctgacatcacacacgggaagatggcagcgtccctgcttttggagctcctgccccagcaatggcagctctcaatcaccagcctcatactcctcgccgtctccgtcgtcctcatcttctggagccggcgccgaaggaaccccagcagccgcctcaagctgccgcccggcccgacgaggctccccatcatcggcaacctgcaccagatcggccgtctgccgcaccggagcctggaggcgctggcggggtggcacggctgggcacggtgtcggtggtcgtgctgtcgtcaccgaaggccgcgcgggaggcgctgaaggtccatgaccccgagtgctgtagccggtccccgtcggcggggccacggatgctgtcgtacggatacaaggacgtggccttctccccctatagcaactacgtccgcaacatgcgcaagctcttcgtcgtcgagctgctcagcatgcgccgcgtccaggccgcttgttacgggcccttctaatgggcgatcgatcgccagcaatcgcactgggcgataagttggcgccccctcccccctttcctatactcctccctcttatcacatctttctcctcccctttttctcttcctattacagtataaaccacacaaaattttttaaaaaaacaaaaagttagaaaaatttatgtatagaaatactatatataaaaaatttgaattcaaattcaaatttgaattcgggtacgtaaacttttgacttataaactttgggtctataaactttaggtgtataaacttttagatgtatagaaatactatatatagaaaatatttgaattcaaattgaaatttgaatcgggtatgtaaacttttgacttataaactttgggtccataaactttaggtgtataaactttagatgtatagaaatactatatatagaaaatatttgaattcaaattcaaatttgaatcggatataattcaaattcaaatttgaaacgggtatgtaaacttttgacttataaactttaggtctataaactttaggtgtataaactttagatgtatagaaatattatataaaaaaaatatttgaattcaaattcaaatttaaatcggatatataaaattttgacttataaacttttgctatctaaactttagatgtgtaaacttgaggtgtataaactttaggcgtataaatttactaaaatagaaaagtaatgcggtgccaaaaaagaaaaccatgtggaggggtggagggagggagggggaggggatcgatcgctacctcatccccatagcgatcgatcgcccatcagcattcccggcctgttacgctagggaggcccaggtatttttatatgtgcatgcctttctgttttacctatctatcctagactcctagtgtatagctatatctatatatctattattatatctatacttaattaaaaaaatacgttatctatatctatatctatacctatatatacctaatatatataattaaaaaatacgtaaggtttccgtaaaaaaaatttcgtccgtcccttttttttcgattcagtttttccggtgatttttcgctgttttttttccgattcgtttttctttcgtgtttttttgtccttctctttttttttccgaatcagtttttcccgtgactgctcgctctgttttttccgctgtttttctttttttttctttccgattcgttttttttcgtgttttttttgttgtttttttcattcggtttttatctcatccaatctattgcacacttgcacttcaatctacttcctcttgtgttttctcctcccaaaaatcgataccctactccactcttgttatttttctcacgatttcctcaccccactctattcttattatttttctcatgatttcctcttttaattcactagatttaatctcatttgttgatgatggtcggccggccgtttttatcccaatcccaaattttatggatccgttcacctatcaaaaaagatttagatttgatggagaggatcggctccgcatacgggcaaggtactatgccaccggatctacatgcgggtagccgccagatacgccgccgccgtcgtagccggcgtgagaagccaccatcgccgccggatccgccgcgaggagccatcggcaccatcggatccgccgcagaaaggcgccgccaccaccggatcaagccgtaggaagcagtcggcgccgtcggttctgctggatctacccgcgggaagccaccacactccacccccctctctccttatccgcttgcgaatagagttgtgccctcgtcgtcttcacgccgcgccagcgtgataggagggagaggaggagagggactggcaacgctggtgaggagaggggaagggggagcaggagcggcagagagggggcggcgctgccggtcgggagagggaagggggaggaggtgctcgcgatggtgggatgggatggggaagtgtgattagggttagtgtttttggcaatgacggtttgatggatatagaatcgatccgacccgtccatcaaaatgaatggcacagatcgatcccacgtcgagccggcctccatctcgggccaccgcactgctgggccacgcacgcttcatgggcaaggtgcgcaatagcaggccgatagggtccaatgggccttttctttttcttttttagcacttttttatttctaaggaatatattttttgaaggctcgtatcatgataaactaaaccgtaatcatctaatatttttatatttattataatttcagtttacccattgcaacgcacaggtattttttctagtatatataatatgattgtttctagtgatacttagggtcgattcttttctccccgttactctctcatatatcatacacacgcttcccgaactttttaaatggtacgttttttaattttttctatagaaaagttgctttcaaaaatcatattaattatttttcaaagttgctttcaaaaatcatattaactcatttttcaagtattttaaaactagtacaatacttaattaatcatgtgttaatttgtcactccgttttacatgccgaggggaagagtttggtaggccatttggagtgggacttttccatagcacgtaaacgataaaatcattagcgcatgattggttgtattacaaacttaaaattatgtttatttgattatgtaaaaaaaaagtttctatataaaaagtttgaaaaaaaatattgtgtagccatgtgggaagtgtactctcgataaatgagtcagttgtaaaagccaaacacactaccgaacacagccttataatgcttggtttgtagtttgtactagtaaccggccataataatacctagccatgttgggatggtaataaaaatgtgtagtttgtacaagtcttcccacatttttggctcaaaaacagttgacttttcatctatccgatgacgtaagtcgagattcgtgtattccttggcctttagtacacggaagtctccatggtttgagttgtgtccacgctgatttctagtataactcctagtcacgagggagttttaactcctagtgacaagggagcttaagattatgagaaacaatggattagtaaccagcttcttataatttagaaaaactaggtttctaaaattatagtctctagtttatctctgaattctataactatatattttaaaaatttagatgagaatctacactgtttgaggagctggagatcctagaaaaaagttataactacgagaaaacccattatctcttttctacttcattaacgtgaactcacgtatttttttcactaccgtgacgggagccaagctgctttttcagtgccaaaatagtgaagttgtgtcactacaagaatccaagatttttttttggcggccaaataaacaaagccgccaatagtttatctctggattctataactatatattttaaaaatttagatgagaatctacactgtttgaggagctggatatcctaaaaaaaagttataactacgagaaaacccattatctcttttctacttcattaacgtgaactcacgtatttttttcactaccgcgacgggaaccaagctgctttttcagtgccaaaatagtaaagttgtgtcactacaagaatccaagatttttttttgcggccaaataaacaaagccgccaatagtttatctctggattctataactatatattttaaaaatttagatgagaatctacactgtttgaggagctg

SEQ ID NO: 21790 - DNA, 26135 bp, Oryza sativa
  unsure (1)..(26135): unsure at all n locations
ccaatagtttatctctggattctataactatatattttaaaaatttagatgagaatctacactgtttgaggagctggatatcctaaaaaaaagttataactacgagaaaacccattatctcttttctacttcattaacgtgaactcacgtatttttttcactaccgcgacgggaaccaagctgctttttcagtgccaaaatagtaaagttgtgtcactacaagaatccaagatttttttttgcggccaaataaacaaagccgccaatagtttatctctggattctataactatatattttaaaaatttagatgagaatctacactgtttgaggagctggatatcctagaaaaaagttataactacgagaaaacccactatctcttttctacttcattaacgtgaactcacgtatttttttcactaccgcgacgggaaccaagctgctttttcagtgccaaaatagtgaagttgtgtcactacaagaatccaagatttttttttggcggccaaataaacaaagccgccaatattatcttggcggtcataactagttgtgaaggatacactactggaggagcatctctcccggttcgcaaccccctttactcccgggtagcgaaccgggagagagaattcgggactcaagatgacagtctttagtctcggttcaaatacccaggagtaaatatccatctttagtcccagttggtaataacaaccgggactaaagttccccagccccccgacaggggactgacatgccctgtcagggggcgaaccctttagtcccggttagtatccctttgtcccgttgaagttaagaaccgggactaataaaccactttagtcccggttttttttggaaccgggactattgtggaaatcacccgaccttctaaagatcacttctccagtagtgatataattattttattgagggttatatatgttgaatcaccaaggtatatgaacatttccttgtgcgtcataggagatggaagaaagtaaaagcataaaatggtaaatagagaaattacatcatagctattatgatgatttgtttgtaatattaaatgcatttacactaacttttttagatttgcttgtgatattaggtgacaaatacattaggattatgttaatgatttttattgcttgatattctttttatgttacaatttgttgttaatcatgtacttcctccgtttcacaatgtaagtcattctagtattttccacatttatattgatgttaatgaatccagatagatatatatgtctagattcattagcatcaatatgaatatggaaaatgctagaatgacttacattgtgaaacggagggagtacgtaaaaattgactatttttgtctggaaaatatgccaaatcgcatataagcaggcccttatgataaagtcaactcagaacatttcccaaccttgatggaaataaattatatcaaagttgtagatgcagccattttgaaagggtcaggtgacatcgacatgcaggattagattaatcatcgagcaaaatagtgataattactagtatggagtagtagatgtgaactcataataattactgctccctccgtcagaaaaaaactcaacttagaaggtgtataatggaggggtacaatgaatatagacaagaggcctaattggcacagctccatccctcctggagctggagctcagccaaacagttccagctccacaaaaaatgggagtggagctgggtggagctctttcacaaaatgaactaaagttgtagagctgggtttaggcagctctacaactccactccagacctaactccttgagttaaatttaggagttggagctgtcccaaacagatctaaggttaggctttttgggacatagggagtatgtattaaaaataacctaagtactcatatgtgcagcaccctcacacaaacacatttatttttcctattctaggtaagtgtgtataaaaaattagaattgtacaaacttatcggatcggactatcactatcgatttgtgaaacagaatgtgatgattgtatgagttctgttttctcaacaggcagtgatgctccccgactattactgctgcatggttagtgccaattcaaaagtagacagtgatagtaaaaaaacatacaatgatattaaacaaaacagacagtgattttatattataaattgttttgacttttttataaattattttttaaaagtttatggagaaatatagtgactcttataacatctttcattaaatctaacattttcattaaatctaacattgaatatattcttataatatatttgttcggtgttaaaaatattattatatttttctataaattgagtcaaattaaaactcgatttaaaagaatcaagataatttataatacaaaaaggagggagcagcaatttcgaaccggtgcttagggtgtttttctgtagtaggaaatccatggaatgacatttggccatgtcatgttttaattaggtcgagaagctcatcgagaagctgacccgaaacgggcggaacgcggtggccatcaacgagcacatcttctccacggtggacggcatcatcggcacgttcgcgctcggggagacgtacgcggcggaggagttcaaggacatcagcgagaccatggacctgctgagcagctcctccgccgaggacttcttccccggcagcgtggccggccgcctcgtcgaccgcctcaccggcctcgccgcgcgccgcgaggccatattcaggaagctcgaccgcttcttcgagcggatcgtcgatcagcacgccgctgccgacgacgacggccccgccgcggctcgcagaaaggcggacgacaagggctcagcagggtcagacctcgtgcacgagctcatcgacctctggaagatggaaggaaacaccaagcagggcttcactaaggaccatgtcaaggccatgctcttggtaattaagtgttactgtaaacctccaagatcacggtggggtttccggtatctgtcaagttttcttgtttattcatctgatgaaacgtaactcaatttcaggacacattcgtcggtggcatcaccactacctcagtgaccttgcactgggcaatgtccgagctcatccgcaatccgagggtgatgaagaaggcacaagacgagattagagccgtcgtaggcgagaaggagcgggtgcagcaccacgacatgccaaagctaaagtacctgaagatggtggtgaaggagaccttccgcttgcatccccccgcgacgctactcgttcccagggagaccacacggcacttcaaggttggcgggtacgacatcccggagaagaccaaggtcatcgtgaacgcgtaggcaatcggcagggacccgaacatctggaaagatccagaggagtttatcccagagaggtttgaggagatggacattgacttcaacggggcacatttcgagctggtgccatttggctctggccgtcggatttgcccggggctggccatgggagtggccaacatcgagttcatcttggcaagcatgcttttttgcttcgattgggagcttccccatggggtgaggaaggaggatatcgacatggaagaggcagggaagctgacgttccacaagaagataccactcttactagtcccaactcccaacaaggcaccaaactagtgatcgaactgattaattagcaaggtgatcagaggcttgctgtgcaactgtgttgcactttttgccacagttaatttcagtattattccagtaacttttgtataagtgcttcgccatttctgtctttataaactgttgaatgctttcaagaaaaaaaaataaaaatgtaagggaaacaatgattgcacttcagtttatgaaaccatccttatagggcgacggcgtgacgtagttcctgcagcagagttgctggtggagatggggggcggtgcggaggaaaccggtaggaagggcaacgagcagcagagtggcgagtgaaggggcaattggcggggtgggagtgcgggttggggtgtggtttgcggtgcgtgacagaggggggagggggagcgattgcggtgctaggggaggggagcggagggatttcatgattgggaatcaggaagaaaagtgcaacgtgatttcagggatgctaggtgagagaaggtgatgcttgcacggaagctattccgaacgttagacctcaatgaaataatctggaccgttccatgaggaatgaaagaattattaatgagtgaaatcatttgttgaattataaggtagatatgagagagattaaccgaacaaaccggctttagtaaaggaaagcagcatggaaggataatgttgaatatgatggtggaaacaccatcaggtctaccattacatccatcaatggatatatatgtttggtatatagagattagggggaggaaggccagttaaaaagttcaggagtatatcattcatatacacgtaccgtaggaagttaaatatttaattcttttacattgttcagacatcagaagtgcactctaaagaattacaggcgaaaaatggctttgctgatcactggacttacaatgaaactccacaacacaaatctgtcgtagtcttagagtataacaaaacatgcttcacaagcaaagcctggttcactctttcttcggtgggatatggttgccaccagttgcaattttgaacaggtagaacgcagacatcaaagcactgcaataacgtaaaagttagcttcataatgcatacatattgtatttgcaagaggaatacaaatgaaatatctgcaaactcagaaagttttcagaatacagcgatggaagtgtatactagttcggagagggttttacctgaggccagcaacgacaccagctggcattatctttgaagtctcaaggtatctctgccccataacataagtcaaagctagtgcacatactgttcgacaaagcaaaattttacagttaataaagacaaaaggacaaagcaatgaggtaaagtgcaggaaaaggtggacgtaaggtaagaagacagaaatgaggtgaagtgcaggtctgcaggaaatggtggatacatttttcggacaaagttcattccgtggtatatttccttctcagttcctttcgtcaaaactgatttattaacttaaagcaagggtcattagcttaaatgaatcattttctaaaaaatagcttaaatgaatgatactgatgagatcttttcagctcctactagaagcaatactgcgataactaaatattgctaaaaggaagatctgaagatacagtcaaagcattaaacacaggcaacaatgctacaatttatattacagtccattgagttagcgaatctagatctgactgaaaggtggaatgtttcaataaaacatgtgcacattaattaaactgcacatacttttactgctttccattgtcaataaagatacgacaacatgcatagatgatctctctagcaacaaatttagaactgaaattaacaaaaacaaaagtatatacagtatacagttacaaactctaacagagatctaaatagtatatcattctttgcactaattggaggccttcctagaaaggccccatgttaatcctagattggtaactaagaggcaagaattcgtacattaataaaaattatctagttgataaaacgaaataaaaccagccatataatatatttaactattacatcctacagatgtccctaatcaatatgatgagtttgttcagattctatgcaagtgtcgagactcaaaagtcccaccaaacaagaaaataatcaaaccaccatgtgcacatacttaacggagtccgagttgatcacaaaagctatctggcatgcaaactaattttcatcagatatcaatctgcaaactaaatacaaacatcgtagaaaaaaattcaatatctaatatacctacactaaaacatgctttccatgccctggttgactagtactaataaaatttgcagagaatgaatgaaaaatgagctaccatgtaaattcaataaggcattgagaactactgcaaatctaaataccatactctgttagggaatatctgagagtgattagcaactattcaggcattgaggacaaatgtgttcaacattctccaatgctagattcactaatttggctatgatcaatgcctattgagcaaaatctgtaaatcttaacaatcgcaccaatgcaatcaattgccatcgttgtaagggagcaatttagatagcaatgaattcagtagctaccagcctttattatggtgtcccatgagatgaaatgcctccttgctggagactggggagtcattagtagcactagattatcagacaatgggtaattgaagctatgactaccggattcagaaaaggtgtttagttttgtcttcatacaaatgcaggactatcacatagagacagatttgctgccgcactgcctttggcagtatgagaggaggatcctggtatccatttccctgctgcccacaacaatctgaacgaaattgacaggaattcccaagtgcttaccactgagaacatccctcccttgaaaatgcagccaaagtgatattcctaaacacatctatacgtccataagtgccacagaatcctaaccttaacaaagtcaagttgctagactactagagacgccaccatcgccatctatcactccatttcaccactaaactgcacatcccgacatggtataacacccaaaatacatgcatagccttttttgggggcaaaattatgcagcgatccaccactgcgcaaattcaaaaaatgcgatctgtacttcacctccatccatagcacgattccaagaaggcaggatggagaagaaccaaccatggaacatttgcaccgagggcagcgaaaaaatggaggacgaggagggggcgtacgggtctcgagggcgagggcgaggtaggagttgcggcgcttctcgaaggtcttgaggctgacgaagcccgcgaggaggaggagcgcgccggcgcccgcgccgccggccagggaggcggtgctgccgcggcgggcgtagcccagcacgccgccggccaggacggcgaagccgtaggggatcgtgaagcagaagtcgtgcatctcgctctctcggcctccctccctccttctctcttaccagatctcgccccgcctcgccggtgagatctcgagagcagtttcttctctctctctctgactctctctctcaatctctctcgtactcgctctcgcttatttttggctaatccgtggtgcgccgcggagagaagtcgtcgatcggtggtcggtctggtctgcggcgggaggcgcactttcgtcatttcaggcggctaatcgatgaccgggagggagacggagagaagagaagtgtgccacccactcaccagccgccttcattgcaacgaataaaaaatgcggcgttcacatgcatttgcatttcttttttcaaaaaaaaaaaaggaaagagccactatatcaaagctgggcatgtgccatgggcagccagatttgagaaaagctagtttgaggcacattatctgtgcaattttcatgctcgtgtttaattacgccgtaaatttcaatactcactttgttcttttcaaaaaggtatattcagcttatacagattaagaataagatggaaatacaatcaaatgttgaatactccctccgtcccataatataatataatggattttgagattttgcttgcaatatttgaccactcgtcttattaaaaaaatttgtgcaaatataaaaaataaaaagttgtgtttaaaatactttggataataaagttagtcaaaaaaaattgaataagacgagtggtcaaacagtacaagcaaaaatttaaaatcccttatattatagaacagaggaagtattaaacaaaatgatagtattactcttgtttgaatactatgggagtatagtgatttgtaggaaaagaaaattttgtcaccatttttaattggtttgatgttcacgacgtcatagatcgtgagtcgtgacactactaattccatattacctcactcaactgccataatacctctgtaaactttaataccgaacacaaatgtacatatattaaaaacacattcgctttaacctggcttgtctaaatgaaaaaggttttcaccaacgcgtaaatgcataatgacagccagtcaaaaaaaatttaagaaatgagtactccgtttgttcgtattataactttgtgtttgttattggggttagaactaatcctctaacagaacaatagattaatatataattaaataaatattagtcaaaaaaagcttaaaaatatattagattaatatttaaaataacttttctatagaaaatatttaaaaaacatagtttatcagtgcgggaaacatacgcgtgaaaaataatatagtggaagttgggaaggggtcaatgttttaaatagcagactaagacatttagcggttagcttctcaaacagctatagcgggctaaatggagctatagcggctaaattgtacattagagcaaaaaaaactagaacccttctcaaacagctatagcgggagatttaaaaccctaaaaggggtatattcgaattcacctaagtcgctttgattgatttttaagttaaacttcgattaagtttatagaaaaatttagcaatatctaaaacaccattttagtttaattaaatgtaacattgagtatattttgataatatgtttgtgttgattggaaatattgcaatttttaaaaaatttaattaaactaaaaaaattaaccaggggaaacaaaatatcctaatcccattttattaccttggttcccgtcaaatccttggatgggaaccaatgttcccattttattaccagcacatcccatgataccaaaacgccctaaaaccctaaaatcgagcaaacaccctcgcccaagccggccgcccccaatcccctactacaggatacagattgcacaccgggtcggccggtccatccatggcggcgaaccagggcgaggcgcatcggcgggagcccgaccagcgccgccccatgtgcggcgtctgcaccaagcccctccgcctctgcctctgcggctgcctccgccgcccgccgctcgacaccgccgtcggcgtcaccgtcctgcagcacctcatggaggcgggccacccgctcaactccacccgcgtcgcccgcctcggcctccgcaacctcgccgtcgcgctcgtcggcgacgtcaaccaccgcgccagcttccacctcaggacgctcgacgccgccgccgccgccggcggtggaaatcatgaccgtcccgacgggcccggggagattcaggtgctggagggcgacggttttggcggcggaacgggaggccctgctggtcctgtgcaatgcgaaggtgaaacattagattctgcaatatgctctaatggaatttctggcgaatcgggtggagcagttagttgtgcaaggcgtgattatgtgacgaagggcatcaatgcttctagtgatttgggtgtgaaagctgcgaatattcgaggttctagcgatatcggtggtgaaatattggatcttgtggatatccctgataggattggctttgatttggatggagagatctgtagtgttaaaagcgacttaggtggaggtgaggaattggggtttcagagtatgaagaggaatggatattgctcagattctgaaagactgggctcctcagctaaccagacaggaaactcctttgttgatggtatccacggtgaaaatcatcacagtattggcgaggtaaatggtaatctccctcgtcatttagtagaaaacgcctcagaatttcaaatggcaactgcccaaaactgcaatggtatacctagagaaaatgttggaactgttgctgctattggtcaagactggactgtgaaaaacatggataagtgctctattacctatacggagaaggaactcaagattgaaattgagcgtggtgtgaagcccaaaatcagatggttgtcaagaggaccacttggtcagtcagctgtctccaacggttttactgtcacgaaaatacaaatgaagaagtcaaaacaaactggggaagtttcggtgtttgaggaattctcaatcaccataccaccaaagtcagctctgctattcccgtgccagcgggcaatcagcattgatgcttcagactgtcagttacaacatttgattgtgttggatggaacttgggcaaaggcgcaacgtatgtaccatgagaatccatggctacaacttctgccacatgtgaagctagaatcagatggtgttagcttgtatagtgaggtgaggcatgagccaagggctgggtgcttgtctaccattgagagcatagttgttgccatgaggaaacttggagaggatgcaaagggactggatgatctgctggatgttttcgagtcaatgattgcagatcaacggagatgcaaggatgagaattggaaacaaaaactcgagtccaagacataaggtggccctgtttttcttttgttgtctaattctattcatatgatttctggatgcatttttctgtccagatgtcatctatatcatgattttatactagggattttcgtttgctgaaagcaactgtctgagatattgtacttttgaactgtcaccattgctttcaatcatagtggcaaaagctgaccattaccctagtttacaaatattttgtgttggatacaaccttttccttgagtattgcaacactttctagtctacaatatactgaatgagttcgttagacatggtctaatcaagatttcttcatacctttgtttggtcatgatcgatcgaaatggtctgatctttttcttgaaatttggttgatatatcgtgtgtcctactcaacttttgctctccatgccatggcacatgtgttcttctgtctcgaagcaataaagcaactatgactagaattttggtttgtattgaacgtgtcttctactgaatttcaccttagagacattagcaaaatcagctgtaacatatatttcatatcatgactcgtccagttacataagctaaacattactgagaatgtcattcacttggcgataaccttgtcgcatacatacagaaatatcttgcacaagctacagtatcttcagattaggcaatactcaaatacggtaaaaagcttcttacatgcattcaacatcaaaatctggttataaaggctaaatatgttttataacataatagcttgattatttttcgttcagcattcacaaatgtatagaaaaacatggtctgagagtatgatccaagacttctaaatacattagaattaatctgatacagaaaaaagaatgtctaagagtagtaggataactgattggtcttcatgctactctatatgataactcaatgtctgagagtaggataagttaatacattaccttttgatttagaaaaaaaatggttttggatttagcctggataactgaatgggatggccccatcttttcgcttatacttatcagccttaaatttagagttgattttaaatttttttcatcgtagtttatttttcagcctttgcatttagatcgttaaaaacactacataaaaattttattcataattttttttatttgcaaatatgccgtttcgcttatgcttaaaatcagcgaatcgatggagctgttcaatgctactctatagggaactccgattgctttttagtttacattttatggtatcattcatttgagatccattgcaatgaagtatgatgaccaaagcttgacatcgctagctggtattggctcatcattgagaagctttagcaaactgatcatctacttaagaaataacttcgataagttcacgtttgcatgttggatggaacgtcacatgcaacaacattctggctgcacctgcacattaaacatgaagtcaggtatatcattcaaatatccaaatgcacatagcctttaggacgaggacttgtaaagaaaaggaacacacccactaccgccctgaaacttgtacagctgcattgctggtgcaatctgtacgaaaagtgaggctacaccttgatgctccatcgtctcacatgtgcatattgctttgatttctgtctcatgtcctgatgtctatcgaatgaaaccaaaccgttcagaaaagcaaaatgaactggtattgataattaccagatgatgtatatatctaattttgcggttaggtagaaaattcatactcgagttgagagaggtaagcagtagactttctcctttccaaacattttcgagcgtcgccttgtcaacatattccagcgggacggttttttatctcttttttttaattatttttaccaacacggtgtactttaataagattacattcgccattacaaattagtaaaacttctatttttctaatcaagacagtgatttcattataaacgccccacattttctactgctgtaccgtagagcaaaatttttgcccaaaagaatgctgaccaggtgatatttttcacgcaggtagtattagtattgcacactatcaaattatcggttgacattatttttcgaggtgacatggcccgtataaaaatctcccgtgaccactggacacgcttccgaaactactagacagtgtattttttttttaaaaaaaatatgtgcatgttgctttaagaaaatcatatcaaccaatttttcagaatagctaatacttaattaatcatgtgctaatgagtcactcctttttatgtgtgtgaaggattagtttccaacgtagaaaaaattacaaggccaccaccatgggaggcagtagacaggaaagaaaaaaaccaccaccacacactaacaacacctacatagaatctaggagaaggctagcactggaccagccgccgctagatcaacaaaaaaaaagagctatagctaaaccacccaaaaccaatacctaagagccgaacaacgcactcaactatatccacgtctttgggattggaggggagagggtgagagagaagaatggaaccgctctcccccacaagacccaccaatatggccagtttgcattagctagggcatcgtcacaagaggacaaatatctagagagagcacacacaaactgtctgagagaaattttggtcaggggcctcctagacgatatctctagggagaaaagcgtcaatgagcaccgacgccactgtccgttcgaggtttcaaagagaactaagacaagttttcactcggcaactccacaagagggagagggacggcttgataacgccacaagaaggaaaacggcacccaaaacatcattgttgttggcccggtaaaaccgagttaggttttacactagccgcatgccaaatgtcaatccacagccaacgctccattgctccaccacctagccaacctccgtcagcgcatggacatcgctatacaagcgccccccaccaacagcctctgcgtgcctccacgtggaaagcagcagacacgtcgtcccgggcctctcccttccccgtcgtgccggccttcttgccatcatcgcatggcctcctacactgttagctggccggcctccttgccgttgcccacgtcaacctctcacgctgccacccgctcaccgcttcggacttccacggtcccgtcgcctccgggcgtgccacctcacgccacgtcggcctaccaccgttggtcgcgtgcctctgtgcttcgccagcattccactgggagtagccatcccgcacgacagcaagcatgaggaatggagagaggacgccttctgctcccaggtagcgccacacgctttctctcatgcctgtcgccacttccacgttcctcctgacgttggcactgcacggccgtgcccgccgtcaacgcccgctccaccgcacccttcgacctcgctccacgtagttgcatccgccgcctcgtcacgctgccgactcgagtgcgtgcaggggagccggtctcccgcgccggggaggccagatccggacgggagggggctgaatctggttggggacaccatatccggcagtgctgcctcgccgtcgttgcacgggtcaacgcctcctcaccggtccttgctaccactctcctcttcgccaccagtagccagctccttgaggcgtcggctccagtctagcgtcatcctggatctagtcacggtcgtgggctccgaccccgctaccttgggaagaaagaaggtcccaccgtcactgtccttggagccacgcggtttgcagcggctcgctcgggcggagggtgcctgccctatgagcgacgcaaggccgtataattgagggagagagctctcttattaaattcaatcgtagaagtcgctcccgctgctgctatgttcctccactcgtccaagagaccaagtaaagtaagcgagaaacaaaaaaaaaagcaggggagaatctaaacagaagctgggaaagctccgcgacgttaaatcacacctcgtcttcttctcggcaaggcgaggtgcagtgttggaaaatggcacaggatcgcacacgcaaatcttgcctactgttgcaaatctgtcaagagctttgcaaggaaaacagaggaagaacagagcaaactcgcaaggaaaacattttggggggcaattttctacttcttttgttaggaatcaaacaccatgactcctttaatacatgttctagcttgtgctatatatagactgtgtttagttcacactaaaattggaagtttggttgaaattggaacgatgtgatggaaaagttgaaaatttgtgtaggaaagttttgatggggatagaaaagttagaagtttgatgaattattttgaaactaaacacggcgatagaccgatcgaatcaccacgtaaacgcgtacgctcagtcgctcaccatgtcagccgttcaccgtggtcaccacttagaagttactaggagaaacatgcggccaccattgcatgcaccaccggaacgcctcacagccgtagtcttcctttccggtcccgtgcatgcccaggacgccatgggccacaaccgagaatagcatcaaccttgccaccgctgctgcttcgccggcgccaatgccgatgtgagcccggcccggccgccgcacccccctccccctacggcgacgacgtcacgcgcgcgcgagatgccattgttgcttctgtgaggggggctcaccggaacgcgtcggcattgacgacgacccggacgaacgcgcggcagcatgatgccgcgcgtcctcatggcgtctacggaggacacggccacggcccctgccggtgggccgccggagcccccgccgcagtcgtcgtcggcctcgccgtcgccttcccctcctcctcctccaccgacaccgtcctcgcctcagcggcctcccccgccgccgccgccggccactccgcccccgcctcctccggcatctccaggcaaaaaccagagtcccgcgtcgccgtcccaagattcacctccgccagtggcgtccccgtcagtatcctcacctcctccggcaccgacgacaccgccctctccgcccccaccaagcaagtcccctccaccgccgtctccgcctcctactacgtcgtcgacaccgccatcgcatcaatcacctccggaagaaggaacctcgccgccaccttcgccatcatcaggggctacaacaccttcacctcccccaaatgcgcagtcgtcgtcgtcgtcttccacacctcctgccggcgcaggaacctcgccacctgcaccgcgcgaaatgccatcgcccgggacgccaccatcgccgccgacgacgcttattacgacacaggcgccgccgatccagccaccaccaccaccgggcggtaacagcatgatcatgccgagctccctaactacagccggcacgtctcagagcccgcctgacgccaccaccgccggcgcaccaccacctccggctccatcggtgggagcatggggcggcaacgtgccgagcgggttgctcatcggtgtcgccttcgccggtttcctcctggcggcggcgtgcatgtccttgaacttgtgcatcaagaaccggtggaagaggaggctgtggtcggcacacttgatgaacctggcgcccaggacaaccctcctcctgcccgagcgtaagtgtagtagtccatctgtccaatgtccatgcatggattgacgtcggctcgtgtcctggcatgacatggcatgagatgcaggtgtggcgtcgccggaagtgtaccagccgtcgaacggtccgacggcgtcgccgagcgggacgagctcgtacgagttctccgggacgacgtcgtggttcacgtacgatgagctggcggcggtgaccggcgggttcgcggaggagaaagtgatcggcgagggcgggttcgggaaggtgtacatgggggcgctgggcgacgggcggtgcgtggcggtgaagcagctcaaggtggggagcgggcagggggagaaggagttccgcgccgaggtggacaccatcagccgcgtccaccaccgccacctcgtcaccctcgtcggttactccgtcaccgagcaccaccacctcctcgtctacgagttcgtctccaacaagacgctcgaccatcacctgcacggaggaggcctccccgtcatggattggcccaagcggatgaagattgccatcggatcagcccgtggtttgacctacctgcacgaagactgtacgccacaccttttttctttctttcttttttaaacaaacgcaattacacttaatttggtcttcagcttaattttctgcattcatttaaccgttcaatcgactctattgtatttgcaggccatcctaggatcatacatagggacatcaagtcggccaacatcctcctggatgacgccttcgaagcaaaggtgcgaacacaacttgttcctcctcagcattccacacagaatgacaaactgacgacgattgaatttcttgccgatcggtgaccaaaaaaaaaaaaaaaaaacaggtcgcggatttcggtcttgccaaattcaccaacgattcggtgactcatgtctcgacgcgcgtgatgggcacattcgggtaattaagcacttcgtacgtccgtacgtcctaatgcagatcatcatatatatcatggtttaattcgatcgatcgaaatttctatgtaggatgcatggctttcgtatgttgttacatgacacggattgtatatttgtatgtaaccttggtcgttgttgcacaggtacctggcgccggagtacgcatcaagcgggaagctgacggacagatcggacgtgttttcgttcggggtggtgctgttggagctcatcaccgggcggaagcccgtggactcgtctcagcccctcggagaagagagcttagttgaatgggtaattaagtatatatgcatgcgatgattctcaagttaattacagacgccgacgcgaaagcttttgtcagtctgtcttgttacatggtcacatggctggtgatctgtgtccggtggatgcaggctcggcctctcctggtggacgcgttggagacggacgacttcagggagctcgctgaccccgcgctggagcgccgctactccaagtcggagatgcggaggatggtggaggccgcggccgcttgcattcgctactccgtcaccaagagaccaaggatggtgcaggtaattaaactgaaatcatccctcaagggccgtatctatcgtttctgacatgttatcttaaataatcattcaaagatttcaagatgtattagatgtatcactccgacgaacatacaagtcaacttctattagttataacaaaaatgatttgataaatataattgccaatgtatatatgtatctgtctgtcaatgcaaatagtgtattataaaaaaactatatattggatatataggtgtggcgatcgctggacgtggaggggagctcgccggacctgaccaacggagtgaagcttgggcagagcatggcgtacgactccaaccagtactcggcggacatcgagctcttccggcggatggcgtttgccaacgacctctccaccgctgagctcggctactccggcaaggacgacgtacgccgtccgccacgctagcagcagctccaggaccaggcccagctgagcactaacggcacatgcgctgttgttaaatttgttgtcgtaactaacacgcatgcatgtatgtaagacggggtggcagaattggtgtatatataaaaaggctttgaatagcaatcctgttgatttggggaacagatttcctttttcttcttcttctaagctcggttgtgacttcgtacggtgtgtgcattgacattggcgttcgctagccttcgcggcgcggcgacaacctcgtccatcgatttcgtacttactgccacccttttcaggcgtgacgtgtgaccgttgagagtgtgcaagaatcagttagtacgttgttgttgatgaaaaaatcgaacacaccgatctagaagatctgcttagctcctgtgtaggtccaaatcttgatgagatgcgagcgtgccagtcagtttgattctgcaactgacaagatatgcaaatagtagatcaaaacagccgatcagctgacaagccgacagagtagttccaaccaatagccgataatagccgatgccgataccagccgatagcgatagggtttaagcaatcggctatatgtctaatgtagatgatgatataaaggcaatcgggtgatgatgatgtaataaaataacaatataatccagtataaaccaatcggcaaataatgatatgataaataagcatcgatccgaaggttaaaacacacatcggctggaggtccgatgtcatgaaatccacaagattggattaaacagtgaaacttttgttgtcatcagctaaatccaacatatatgtatatgcaattcttatgagccgatgcaacgtccagataactcaccggctgaaaccccgatgaaacccttattggcaaataaaaagcaggctagagattatggttttaagcacgacttagtagatcaaacttaactgatgcaacactaagtatgaaaagaaacatagtatctagacaatcaagccgttgactgagttttcagggtggtagatgtctaagctaatctaatctagcaacgcgatttagccgatactagcagaaaccctaaaacgagaagcagcagatagagctaaattgatatgctaagactagattaacagagacatatgataaatttgtaggcaaatatatcatccaaaccagagcaatccaagaagtcgaatatactgatgcagccttgaacgacgccgacgtaaacgatacaattgcccgggccggcggaacattggacttaccccttagccggagatcgaacaccgatgcagccccgcgtcaggtgccaagtcccgccggacaataaaataaagtagaaaaggtaaaaggtggcaatacgccgaattgtattgattgtgaagatagattacaatgaccctgggtgtacatatttatacccatgaatagatactagtccttgtaggacaagaaagaaactttcctaaagataaaaggaaaacataaagtccttataggacactaaatacactttcctaaagataaaaaggaaactaacaaattattcctagttaatagatacaactgccttcttcggacttgatccatacgtggcaatcatcatgaagcacgtngatgctacttnnnnnnnnnntcccnanntcacctagccagaatcggnnacatnggnttgccttgtccgattcggtaactgccgatgcacactgtaccgatgcggttttttttccccgggagaaaaaaaaggccccccccggaaaaaatttttttcaaaaatatttaaaaaaaccccccccccccttgtggggggtttttttttttcccccccccgggttttttaaaattccgggaatttttttntctncccttncnccaaatccnngcttcggccttaactccaaatccgatgtaaatttaccaaatttggtcgttaacagttgtaacataacatatgtttcatatcatgactgtcgtccagttacacaaggtaagcattcctcagaatgccattcacttggctggctacaaacattgttgcatacatcaagagatatgtcgacaagctacagtggtatctccagattagccaagattcaaaatacagaaaaaaagagcttctgagattgtattttagcaagtcgtaaacatatatacaatatacatggcaggcacttagactatgctactaactgtagtctgtatgtctgttcagatgttcttaaggggacatcagaattttcctgtactcatgactaccgtcctggatgcacccggaaccagccagcgacgttatccacacatcatccgttctcactggttcttcgtcatcatttctgtgccaagtccagtgagcatgcgtggcatttactatttttagttcaccatgcccaaagcttgcttcccggaagactgaccaagctggtttcggattgcggtacctgaaaataccgaaaagttgtatataatgacaccaaagtgatttacattcagagctctaaccatggtattataatggtacctgtgggccaagccttccctgtttccaccatccccaattgttatgtgaacagccccacaaggatcaagtccccccttgtagactcgctccttcatgaacaatgaaatcatcaaatggaattgtcacaaccatggactaaaaggtcagaggccaaagttttgaacaataatattgtgcagctaagagatctgataagagccataccgcacgttcataagcatgcacatgacctgcgattaccatatccacatgagcagcatagagcaaaggctccattgcagccatcatactgtcaccttcgccttgatgagcccaattgctattataccatggtgcatgcaacaatacgatgagccatggcgtccttttcctgtcaaccttagctagatcagcctgaaaagcagccaagataatccaaggaaaaagtaatctgctgtcagtaagagtaaggtggatttcaaagttgagcgcatctttttttaaaagaaaaacatagagaaatatgccagctaggagtgactaattgagtaactgtaacaccccatcccaaaatccgcactagagcaggcccacataggcatagtacccgactgacacttttgtccttgtttcgtgtaaaagggttaacccgtaggtactattgttggagcatggatcccaaacctatctaaatttccaatgtgtgactaatcccaccatacaagaacacttgggccacacgggcccaaacaagatcccacatatggaccgaactagaacacactaatgggcctaaaccggaattaatgggctggggtatttcactagcaactaagtaccccacaaagaaaagtataatttgaaagaacttcaaatgtagatgcaattgtcaacaggggcacacatggtatttctgggtcctgtggaacttctatgatgaaattgcatatagagaagttagtgccaatacttccagcattccatctttaaacatcattaacattatggctgaagctaactttatgatttaggaacacatggtcgaaagggaaaaaagagaagaaaagaaaagaagagcaccccatattacttccacaattccgtctttaaaaggaagatttttaacaaccaaatataatgcagcatgtatggttgtatcatgtagcacccagtatgataaccaagcatgaagcacactaccatagcaatgatggtgttgcagaaaacatttatgagcaaatttgctcactaccatagcaatccgtgctgacgtgcaacatatcgtcacaattcacaaatataaaaggttgcaaaaataccattgcagaactacaaaattcttagagaagctaatgctgttgcatattccatctaacatagctgctgcaagcccttttggggggagagagaggttcgggcaagttaaataacacccctatggatcatcacgccttctggtcatcaaaacgtatcacacgaagtccaaaattttcagaagaaagtcagtgatgcacttttgtacaactagagctcaagaaaatatttatagatgttcaatagattttatttaatttacaaaaatcaattgctggatgctagatactatgaaatgtttttctagttgtcagctttttattagaacaatacccaaagattcggaagctgaattaaataaactcaaaatggacatgtcatatgatgaaaaatggtgatggtttgcaatggtagtgacacattcactcaaaatcaagaaggagataacatctcgtagctcgatatattgagaattaaggcataataaataactgacattagcataacaaattgggaattaagatagaaatagttagttttcgcatgagtagagacagatcagttgtctttgtgtaaaaataagtgtatgcaaagagcgaaaaaagaggacaagcgctaggttgcagatggattgcatgtttataccaaattaattgaccattgagcaaaacataaactgaagaaagaaggtcccttaattggtggggccctttatagttgatcactttgcacacccatgctctacaggcctggtcgtgaatggttatctaatataaaaatcttcttatcccaaataaatagaattgatgctgtcagaaacgagcagcataggcaaatcaaatgcgatatggagataagagatacgaagtaatataccttaagccaagcgtactgatctgaactttcatcataatctgtataagaacctaacattatagcatgcacccctgcaactttgaaggagtagtagagatttgatgtggattcgctctcttcataaggcatcttccatcgtgcattgtatgattgaaatccagacttaaaaaacggtatcctttccttctcatgatttccttctgtcaccatccagggcctggtgctagcaagtggctccaccaatgtaccaaaagaatcccacaaatgttgcatataatccgcataagagagatcaccagggagtaaaagcatatcatgtgcacactgcttaatgtgattaagtgtcgaagttgtccaactggtctgccccagatcacctacaacagccaatgacaagggaaattgggagggtggtgtcttaaactggaattccggaccatgtcctccacaacggtagtagtaaactgtgttgtcattaaggggcccaataacaacatgatggatctttcctgaactatacattaagtagctgtatgatgtgctttctccttgagacgttgatgtgtatgtgcctgcttcagttccatagtctacaactgaagggacggagttatcatcagtgacaaatgtaactctcatgtgcttttctccagctagtgaaatgtgcacctgtaaacatattgcgcattttagtcactggttatctattagaaaaatgttcaaaacaaatacaagaattgaattctcaaaaaagactccatatatactcaaggatggcatgaaggtttagttgcatagagactgcaaattttctcagatattttttacatgcatttgagtgcaattctgtgctagtaaaggacatgccccccccccccaacacacacacacacacaaagatctattcgccaaacaagtgaagacagctgtattagttctaataatctaagtatctaatatagtactgtcacatctgatactgtggaaaccagagcaagtattaccatttgagtccaactgatcacacacatcaacgtggcaagtatctctaggtaaccatagttcattcagtcattctaatgagtaatgagatgcagttaaaattcaaaccatggaatgaggttgaaatgttatcactggtcaacaacctcttcagtcctttgcataaatacacaacgctgcatgcgaatgagcaagtgtatgaaaaccatttgaattttgaattatgattgggtacacttgcaaaaccacaacaagcaagataaaaggggggttaatagtgcatctggtatctcagcttatgccgatggctcaatttaggcaaaatatgtaatgtaactttggccaaacttgtcccaaatatccaaacattggctcaattccaccaaattagcatgtggtctcagtgttttgcacatggacccatcacctcagaagcatgaaagtgagagaacgggcaaagttatgggattgatttgcctacttattgtcctttgtgaaatttgaggaaaaactcagatatcacaacagttaatagtacaaggacagaactgagccattgcggcaatagttgaaggatcaaacgttatagagtttcttggattcaacataatcatctgttataacatacaattcaaatagcaaaaatgcactgttatagagttagcatgtcacatctaatacagaacggacgagttcactcgcctgaagcaaattgcagaaccagactactagagcacaaataggcccataagctgaaattggtaattttcgaatttagacatatttctagctaagggaaatgagctacactaattgaacacaaaataaatcagctacaaccagttcaaaatttgagccaaaactgtacaaaacagggaagttggttaccaagcaatagccacaaactgattgatcgatccccgagccgattcatgtgttttctaatcgatcgcttcttggattctcagaacataaccagacccgacaaaacttgacttatactccaacctacctcggaacaaatcgggaggcaagccaagccaagccgacgccgcggaagaatcaaggatctcaagagagaggtttcacctgctgcggatcggaggcggaagaggagtccttcttcttgctccacgggaagaggctgaggagggccttccggtggtggaggccgcagcgccgcgccgccgcgggcggccggacgtagtcctcgcccacgggagccccggaagcggcggcggcacaggaggagaacgaggagagcagcaggaggaagaggagaagcggaggcacggccatgggaggcctcctgcgcgctccggctcgctcctccattggacgctggacggcgtgtgcaaagctctcgatctgttgctgctgatgggggtcaggtcaacacaagtacacaacactgctttctagatcgggaacacctatacatttatccgtcgataaatttttttctaaaaatttgacatatataattatattataaacatagtgtaattatactgtaacttatatataattacactataatttgcatgtaactacaatataacttatatataagtttcacataattttaaatcgttaaatctattacaagatttattttgttgagaaaaaaaatcacagcacacacatatgtgtaaggatttgttcccacaacctccattttaccgaaataatatattacagaaagatttttgaaagttacatacaagttacactatagttacagttacagtgtaattacatgcaagttacagtgtaattacactatgattgtactataattacatctgtcaaatttttagaagaaaatttgtcgataaatatatagcaaaatcgttctagatcagcccctctaacctgctagtgtattttatcactgacatgtgggcttgatgagctcttaggttcaccgataaaggtatggtgtcattaaaggtataatcttaatccctgctttctagggtcctaacatttcaggcgttctgggcgatatataaccgtgaagttcctataaaacattttcttttttcattataacgtaaagtagatatttaattaatcggaaataaattaaactaggatgtgtggcaaattacattactacatccgttttagtttacttgtcgttgtagcacatctcatagcagtaataaaccaggatgtgtggcaaattacattagtacacgttaattacatcataaatatcaaaatttaggctgtgttcttggtggggttgggaaccctcacctcctgaaaaaaaaagagaatggattagcgtacgaattaattaagcattagcttaaaaaaaatttaaaaat

SEQ ID NO: 21791 - DNA, 6455 bp, Oryza sativa
taatgaagggtagtaagtgaaaaacttgtctaaagtgaatcgtaagaacaagaagtattttgaaaaaaaaaaagttgattgctagaatgttgaaacagggagcaattattatgaggatcatattaattaagaagtcctctcgtaaacagacttatcttctaacataagcggatgaacagactattcttgtgcggttattccatgtgccaaagggcctttcctgcaacatgtcgtctagctttttttttttttacaaaataaatattgcatcatgcatgtatgaacagggtattccattagtagcacttgatcaatcaaagccattggcaatttgacaaaatggctgtgtcacggcctcacgggcattggagctagctggccatgttttttttttcaccatgtcattgttacgtgggctgcagttaattaagtcttcaaattgaaaatagagcagcagtctaatgcttcgattaccatatagtatggcatatatacaattatagatgccccaaacgtccggggcgacctgactgacctgctctaggactgggcctgagtcgtacacttagttcggagcagagttcacaattttgataccagttactatgccgacactagcggaacattggttttcgtgaaatccaatcgaaaatcgatagattccaaacaaattttgtgggaaaaaaattgaattcatttatctcgaaatttcgatcggcaatcgaaagtgcaaacgaagtgaaaaaaacgtttggtttgtatcgagaactgatcaattttgttgacaaactggtaaggaatttcaaatttatttttgtttcctaaaaatgtagaaaatagtgaaaaaaaatgattaaacatttggggggaaatctaaaacttttggcattccctctcctataaatttgataacttgacattaagctacagacgatatacaatacatactcataaaaggcgataatttagagcacatatgacatatcacgcacaattcaatatgcatctcggcatcaatcaccaaacattaggcaaatagaatgcacgccacctaaattgaagtccattagtacaagtttagagtccagtacataaggtctaaaggttaaaactaggttttattctagcttctagcatgcggacacctccatataatttattgaacaaagtaaacatatgtggaattcaactttttaaaaaaattatataccaacaggttatattaatatcatactatttataggattttttaaaaatcctttttctcaaattaaatttgaatttggatggaaaccatggaaattttagagaactattgccgagccatgtcgagacgttgatttttcgcgaaatccaatcggatttcatcgttttgtgaatcctggttctctatattaatttagttgaatagagtgacaaaagatttgccacttgatgagaggagattttacgagagggattaaacttttttatacgaagtggcaaatgttaagagttaaatgccccttattgttagcctcgataacatcactcactaaagccctctttgtttaggcgtatacaccaacttatgagtcaaaaaaagtctgaacctaaacaaattaacgatactttcatttcacttttcatattattaagctaaaaactaggttgaacgtagactccaccattacacttagcacttcaaattcattggtttataaatcatactctccgtcccaaaatataataatttttagcactcatgattcgtccaaaaatatatcttcactaacattcaatttccaaccaataacaaccctccatcacttactttttcccacttacctctacttctcaaccatcacaacgtctccctatttaattctatctacttttttaataattatgtccaactataaaacttcttatattctgggacgaaggtaatataagccaaaagcaatctaagccaataaacctaagcataaacaaaaaggccaccggttcaaaaattagcttatcacattagttataaactagtactatgttagattcattgtgttagaatatgtctaatccggttttaggtggctatattttgaaatggagggatataaagataataaatatagaagaaagctatttaagtaatactaatatagaagaaagttttggagtagtatattttctgaagcatagctacgataatctatacctctatattagcatgaaatatcatggtgataagcgcgttgatggtatagttaagaaataatgtcaccttggcgaagaaaaaaaatattattatgaatagtcaaacttgcttaactcaagtctaatgaagtttagaaataaaacaaatgacgtgatcgtttttaccattctcgtgcttatcatcctggtgtgtccagtgtcccgagtctcctggcccatcaatgatatccattatccaccagttaatatgttagtatatcccgtttgcaatatggcaatttgttttttaatcttcgaagcagtttgccgagtacccccagttctccatattttactgacactttcacactgttttcatgagtaatcattatcaaccccatcgtttcggtatatttgtaaatgaaaaataatttataaagaaaacttgtgtgagagagagagaaagcaaaaacgaaaaaataaactttaatgaaaaaaaaatctcaaaatcatctttaaatttaagactgaaagttcaaatattggttgacaagaataagcataggtgaaaagatgaggtcctataatttcactcattataccaatatgtttactagaggtttaggagctgttcaagcaaaaataaaccttaccaaatttttgcaataccaaaattttgacaggagtttttatgcatttattaaagtttggtaagaaactaaatggattcacatatttagcaactctaaaaaaaatgatatggtttaaaatgacaaattccatcggttggcttattcataagcttattctatgaataagccaaacagcatattcacaaacgaaaattaatttgtgaataaaacttttatatacatgttcttagcgacctaaaagcaaatgctgaaaaataaacttcgatgaaaaaacatctaaatcaactccaaatttaaagttgaaaattaaattttagctgataagtttaagcataattgaaaaaataaggctagacatcaatctaaacaagccctcagtaagaatctagaacagcaaaagccgcactctggattatggaacctgccagatagaaattctttaagaatacaattgatcgacaactgcggaaataacgcaccaccagaaaagtaggttcaggggttgtttggttcgtgaccacatgttgccacactttgccacacctcaagttaggcagctttgagtaagttagccagacgtttggttcattgccacacttgtggcaagattctttttctagcactttggtcccacatgtcattgtctcagaaaagtatggcaatgttatagattgctagccaaagtgtggtgccaaatttgtttgtctaaccttatgcaaggttggcaagaaaactatggcaaccctaggcaatgttagtatataaaccaaacaacccctcaatctgcaccatcacaacacaaagtccactttgcagtttccctttctttttccatagcggaaaaccgaaagcatgcattactggagccatcgtttcgctgaataaccgaaacagcatatttgtaaacgaaaaataatttatgaataaaatttttatatacatattcttagcgatctaaaagcaaaggcagaaaaataaacttcgataaaaaaacctcaaaatcagctttaaatttaaggttgaaaattcaaattttagctgatatgcataagcgaaaagatgaggtggttaatgatactacttcacattgctgaaaagaaagtgcgccatcattcacccaccaaaagctggtgcgtcacatttacagaattagtacaacatagcattatgcacttcatagattagatattgatatgtttagcaggtgcatggaagtgggaactagaagcaaggaataagatagggtgttcaaaaatgccccatatgagaagggatagaagatttgtcacttgatctttcctttcaccgatctaaactgaaaaaaaaaagttgcttcctactgtacttgttagcttcctgcagaaacaagagagtttgtttgatcagcaatgaaaactgacgattgaaattaatatcagcacaagggctcaaatatttactgtgatttgcaggactgatccagaattatcggtcgtgcttctttttaagaacttcccttcccacgtataaatctaagtaaccctgcaacacaaaattatagctcattgtaaaatgcacctaaattaccagtcatggccatggaacagaagatatcaaataaaaacagggagagcattggcataatacctgaacgagtttctctagattctgagattcttctaacaaaaatctacaggcatctatctctgtcagagggacctttgagcccaacacggtggtcactttttccacagccttcctcactataattttgtggacttcccgggataacagcccatcttcccacaatggctttatgatattttttatgaattcacagaggttacacttgaatacatcaatggacatgctactttcttcaactatgctttgctgagatggtccactatgtgaattaggtgactggaacctatttccatctttcctttcgcaaattcctccagtaagttcaattggctcaggttgcttagactgttctttctgcagagtgggcttacaagaggaagctgaaagactcttgatattattctggggatttgtaccatcctcatttacctgaaaagtcacattctcaactggctctagctcatcatctgtattcatattaggcaagcaatttaagtctggtatcgaggaacatgaatcccaatcagcttgtctagtagtacaaggattatctctgtcagaatcaaactgatggggtatttgttggtttgatgccactttgagagcttgtgatggttccccactctctttatgatgtgtatcctgttcagagtctgcatgttgtgaattctcttgtttgattctcacaatgttgcaatccacggcgccccattggatgactctaaagttacttcctgtggaaagattgacaggcttctctaggaacttgtttgcagttcctttatccaattttgtcacaccgcacggagtagtgtcactgtcctgatttgaacacgctgacacatttactaccttcacactatcatcatccattgagcaaagaacagcagcttttttgtccagcaattccggaacagttgattgctcacctgatttggcaccatcagcttccagtgtattttcaatgtcacagccaacaaccaattcatgtctgctccttgcgttggaatgaccttcaattgctccctgctgagaaaacttctgatgcacactactttccggatgagaatcagcaactggtttcgtgctagtatcagaacagccattccaacaacatgaaaggtcatcttgttctttctgctgcataacttcactaggatttgtttctggtggaacatcctgataaaacattagtcctttctcagctattgtattttgtgggcttttcatgcgattgtcgccactaagggatttgaagggttcctctgactctctctcagttcttcctttgctacacttttgtgcttcactggatgacattacacctctacattgtttggagtcctcagatggactattactttcatcatcgctttctgagctaacagaagcactccctgatgtgctgctgttttcatcatcaaatcctgagctaggtcttccatttctcaatctttcgctcacagataccttgcttgtttgcactgtccgatttgtattggttttttttacattttcagcttcagcacaattatctttcttcaatcttctccatataatcaaacaatcacgaagtagttcagacggagaagcattatctgattctttcacaccattctccacataggtgactggagcatcttgtagtttaccattcgaaacctcatcactcttcatgtcttctgttttttttgtgcaaacaaccaaactaggcttcttatcagactctaacttaatgttctcacttccttcactttgttttggtccatttgatgacataatggttttacttctacacttaggacttaacaaacctgaattctcattagactttgagccactacatacaacagttggaatattgttgtttcgatgatagttccctttttctccattttgacctcctttcttgatttttttggtatttccctcctgattatcaccactctggcgtacatcaccatgagaatatgattgccaatccttcatgttcggatagca

SEQ ID NO: 21792 - DNA, 1809 bp, Oryza sativa
aaattatcacgtggagattggtgaagttgctcatgatggaatgcatgaaattcatcaaatgccttactggtgtgagctctccctacttcaaacctatgacatgttcgaccaaccaaggagtgatcagaaatattaaacatcaaatcttttgaacaggtgccctgatgcttcttgcaagtctggaacttttccatgtaagatcgatgccttgctttatctatcgctgagaaatgggcatttgggaagttaacttcagttggcagacgttgaacttcttgataacttctattttgtgtgcaactcccctgattagatgaaaagaagtccccaagtctttctgttgtacgcatatgtccatctgcaccttttgcatactcagacacacgattgagggaaggaacttctccctcagtcctagattaaggaacaaacaattgaatcagataatagtaatacacataaacaggtgcatgctgccaccgaaaaatctagatctgcacctaaaaaatattaccttagacaacttgtcggagcatgatcaggagaaagactatggttgccccattttgatgaatcgcgaggacaagcacgaccttcaccatgatatccatcaatcttatttccaaagggataactgtaataacagaagatagatcataacatggtgcacatatttattttgttaggaaggaaatctttaaggaatgcacagatcataaaatgcagaatattgaccaatacaacatgcgagaacatcaaagtgggaaataaaagagtaaatttcacaaaatcacatataattatggcaaaactagatttagagaaactatattgcaaaactagagtacttctctaccgcaaaactacaaattttagactttacaatctccatcgctagcagtgataacataacaagagggccccacctgcagcctcatgtctttacacaaatggaagcagaaaagaacaaagctccaaaagtctttcttcaaagcaggcttgcagtggcaagagcaataacagttacagtcatgaccctagaaaatggcttgcatgtcacggggcaatctagccagtggtagcaccttggcaggagatagtcagtcgcttggacagtaagtggcaacgtatgcaactcatgttttgcttccattggtgaaacatgctgcgtgatgctttgtgaggctacaagttgagccctcttgtcaggtcatacttcaaagtggtagggatggatattctaattcctaaatacggtcatctctcttaaatctatattttttgctataattttatcgactcaacaaaaaatatggcaggattaaccaaatttatgaatgtcaatagtttggtaacatatacacacctcttcatacaatatctaggggaggagctgcgcctgtgtcgctttgactccaggagtccagttcgatcaagaggttggtcccatatagcaaaattcttctcagtttcagcatcatcatgtgaggaggacacaagatccttagtttcttcctccctaaaagaatggctacaacttctatcattcaaagttttgccatgactatgcagcaaatcatgtcctctaaactgatgtggaatttctgtagcagcaacagaatcttctatcctgtctctgcatcataaattgcattagtgaaactactactggatagagaaactaacaacatgacgaccataaattggagaaaattgcatatgtaccatcacataagattggattcgctagaataccatcacataaattggcttcactagaatatcattctcaaccagggcatatttgcc

SEQ ID NO: 21793 - DNA, 32608 bp, Oryza sativa
ccacgtagcaaggcctgtacagttcgcgaaaaagatttagaagctacatgggatatttgacgggatgatagaaggatttttcagacacgaatgaaaaaaactaatttcatgacacgcttggacacggcaagacaaatcttttgagcctaattaatccatcattagtacatgtaggttactgtagtacttatggctaatcatagactaattaaactcaaaagatttatctcgcgttttacctctaactgtgcaattggtttttttaatatatatttaagagtaaagtgcaccagcggtccctaaacttgtgcgggtgtgtcatctaggtccttaaactctcaaaatgcatttttggtccccgaacttgtcttcggtatcatatacgtccaaacgggctccgatccgctccatccgctgacgtggcatccacggtagcgcctacgggtcagtggggacccacatgtcagctctctagtagccatatttccaccgccctgggagctgagagagagagagagagcaggaaagagggacgccggcggtgctcgacgcgtcacgcgtggccgggacgtggcaacgctaagctcctcccttttcttcctcagacgtgtcgccttctcttctacattcttctggagccaaactactcggacgagagagagccctatgcctctccgtcgcccacattctcgtcgtcgatcgcgaagaagatgacgcttgctgttgccgacgagtcgtctccatcgtcaaatctttcccgttccaaacttcccacatcatgccgagcaaatctcattttgaccccatctcgttttatccactgcagcaacggaaatgcgaccttgcccacgagagctccggaactcgcaccaggcgccgccgccatgatgtcgtcgctgttccgaccgacatggtccatctcaagccaagccatcgcgccaaagtcatcgcctcaccatcatggccaaaagccctcaagaaattttaagaatcgtgcacagacgagggatatcgctgtcatcttctccaactccggtcgccgagtgccatcgccaatccctctctccccggtgagccacggactaattaatcgtgcatgcaactctttagggacctcactaaccacccatgcaccttctctaagcattccaccgctcaagcgagccgtcgccgtgaagccgacgttatccaccaccgcagggctgtcttttccattgccgctgttacccagacctcgccatgccgcaatcaagttccagtgagcacccagggacctgctagactcgcatgcatgcatctttttgcactaaatcgggctgggactctacatgcacaggcgtactgaagaccaccaccgctcgcgacaccactggcatcgattccggccacctccggcgacgagaccaccttcaacaggatcgcaaggaagtcctcagcatttcttcttgtggttgtgtcggccgaagaatcgccgttcgccaacggcatcgtcgtgaaggaacgccggccggcgaactctgcggctgctgctgctttctccctgtgcctatgacaggtgggctccgctccattagcacgtacaggatttgattagagtaagtttaaaacatgtaaggttctttctgtaaatattgttatcatatcatatatttatttttataaatatgactgacatgtgagtccccactgacacgtagacgctaccatggcatgccacgtcagcggatggagcaggtcggtgcccgtttagacctatatgacacctaagacaagtttagggataaaaaaatgcattttgagagtttagggacctagatgacacatccgcacaagtttagggaccgctgatgcacttcactctatatttaatgctctatacatgtgtccaaagatttgatgtgatgtttttgggaactaaaccaggcctaatattggtaaccatctttactagatttagctcttagaaaaaattttagagagttataagggcctttttagatcacctggcaaaattttttaccctgtcacatcgaatgtttgaacacatgtataaagtattaaatataaatgaaaaaataactaattacacagattgcgtgtaaattgcaagacgaatcttttaagcctaattgctccatgatctgacaatgtagtgctacaataaacatttgctaatgatagattaattaggcttaataaagtcttctcgcagtttacaggcggattctgtaatttattttgttattagtctacgtttaatacttcaaatgtgtgtccgtatattcgatgtgtgttgacgaaaaacacgaggcctaggagatctacttaactccagtgcaggtccaaactcgcctttgggtatgttagcgtgccaattgatttgattctacaatcaacaagaaataaagacaaagaaaccgcgattaaacctataaacgatagccgatcggctaagtgccgatggcatatcatttatctttgagccgatgtcatatatgtatcgatcggcagtcatgaataagtaagaaagaactaaatctactcgatcggctgtagatgttaacgatatataccccttatatcgatatatacttaaatcaagtgattgggatagatcggtcgccatgccgagacagtataaatcacttagatcgaaatatatgttaataacaggactatatatattcatatcatagccgatcagataggtctagcatatatcggctaatactccgaaaccactctatactaagatattaaagcaagtaaaatatatcaaacaaaagcctaatatacttaaattcaacaagatcttaacgtagagggcagatttaacatatcaatgaagcatatagagtaaatatagttaaatcagataagatcggctgaaaccctgatactaccctaatcggcaaccagaaggcaggctagagattgatattccaagcacgacttaatagatcaaactcaactgatgcagcattaagtatgaaaagaagaacaatatctagacaatcaagccggtagtagtttcatagagtggtagatatcttatatagtctaaatcaacatcgatatttaacctaattggctgccttctaccgacagatgttagccgattgtaggttaaatagcgatattgctaaagattatgtaagatatatgataactcgatgaattacataaacaagattagagtatcataaagatggaagcactaatcccgagaacacaagccgtcataacaagttttacctcttgttgaagatcgaaaccgatgcagctcaacccgaaagcaagaactcgtcgaaataaaactaaagcaaaaagggtggcgatgcgccgagattgtattgaacgtgtgtgttaattgattacatggggtttggggtctatttatacccgaaaattacaaactatgtccatatcggacacaactcttatctctaacaaactctaatataccataagtctttacagcagacttttgcccaaacatatctctagggaaattatataaaatatcctaattaatagatacaattgccttctcaggactctatccatacgcggcaatcatcttgaagcatatcaacccaacccgatgttgtacaccaagtcgtattgtcggaatcggctgcaccacttaaccaagtctgactcgaacttagccgatccaatcatagccgatccggactccagccgattcttactctgtttccgcgataatccttatctttgattccgcttcgatctaatcttcctttccgatgctgatattaccaaatttggtcattaacacatgccccccaagtccggaacatttgataatgtttcggatttgccatatatcaactccgagcaagattcgcactctaccgtttcccgaccgttattccagtgctttaaatactaaccgttacccccgagaaatctcacaccgtcttcttccgttttcaccgctgaagcaaattttgccctctgtctctccggcgattccttcgacgcaaaaggcgatcccaaggcaatttcatctccggccagagtatgctgaggtgagttctcatcggctagatctccttttttttcgcatcggattgatttcccctttcctcatcttgttttcttcttctcggttcttttggattcgcagcatctttccaatcagatcgcaattccaagcctatctcacgagaatcattattttctcggtccaattggcaaccttgatcccaccgagttcattattggtgaaacaaataggatttctttcagattagtcaacccagatctaggtcactggaagaacacctttaaatcttggccatcacttgagaaaaccccacccgagaagagctggattacatggtacaagcgcgtatcggctagtaagaaagttcactaggacgagatcggaatcggccaaacgcttgccctcaccatagccaattcggctaaggatgaacctctgatggccgccgccacctatttctggtccaacaccatcaatgcctttctgttcaaccaaaggccgatgactccaactttaatcgacatcaccatgatcaccggattagatgtgacctcatcggctaaccctatgagtatgaacaccaagaaccaatttgactttaggaccaaaagcatagggggttggtctggatatgtagcagcatatatgggtaaagtgtctgtcactcctcgagaacatgtagctttcttgctaatgtggctagaaaagttcctcttctgtggatccagctgtggtcccacaactaattggcaatttgtagccgaagccctagaatcgaagaaacagtttcctttaggcaaaatcctcctcggctatctataccaaatgctgaataatacatcggccaagatagctgtcggctcagtagttggagcaggtggaccgtggtggctgctgcagacttggctaaatctgatggtcatgaaagttgtcaatcggccatctatgacagaagctgaatttccaaggttggagccgattgtggacgacgatggagaagaacgcactcattgtagatgcatgtcatatggagaatatgcatctacgccagccaatgctggggcaaaactatcggctgaactgctcaaggattggttctgcagcttttatgaaggcttccaaaaagacgcccgggtttggtttccttatgaagactcagaagaccttgagctcccatcggactttagatttgaagatatcaatcatgagagatatcaaaagtctagggaagttttctcagctgcaatcagcccatgcattcttcctgtcggcattcatcagggaagaaacattcaagtctcttatgaactttatcacccgatgagctcagctagacaacttggagtgggccaactcccaatcggcctattcttcgccgataaaatccaatgccgaggggaaatttcatcgaccttaatgatggattggctgctcaatctccaaggacctcctctgggtagtattgaaaatatcgagttggcgggttttaagagcaaaaactttgacagatggtggggcgagtggaaactgcatctattccaccaatcggcttctatgtatatgacagatctctttcccgatgttatacctcaggtaaactctgatctcattaattctgtttgaacaattattagccgattcataattcaactaacctgttcttctattttgcagacaacagaatcttcccctccacatcagagcaacagtggtaaagatatccaatatgccctaggtttaattccaaatggaggtggaccatctcctcctgtcatcggctacaatgcccccaagacctcaacccttcttcaagggctcatcagagaaccagccgatgcaggcaagaagagaagaaccaggtcatcagctgcagacacattagctctagccccaaagaagaaggctaaactcaagaagcctaaaccaactgatgatctacctgtcctggacccatctattgagcaagctctggacgaagaagacatcgaagacgatgttgatcaagctgcagccgaagtgagtgatacagaaaaaacaccatcggctttacccaagcagatccctccaactccttctgctccaactcatttttcaagggtaagcggctctctctgatcctttttgcaatcactttatttttcggtcgattaatcacagattttatagttgcagaagaagaaaactgttgtaaagaagaaatcgacagcaacaattctcaaaccagctccaccagtaagatattcttaatttttaccagttgatttcagccaattttgtctaacacttatctcttttacagcctcatcatcctccttctcctcctgtacaacaatcatcaagtgaccgaactccatcggctatgggaagtcaccatattaaggaagaaatacaaccaactgctcctgctatcctagtaaatttccttttgatgcaagaaattaaatcggctatatctactttgctctcaatattcctaaaattgtttctgcaggttttagccgatctcttctcttttgacattagagattatgttgatgaggcagaggaagatacttcgagcaaagccctagcccccttatccgatgatgtgaagaaaacgcttgaagatatttctcatcggctagaggcctcctctttagatagcttggtggtcgactgtggatcgattaggacacggttgcatgaagttcaagctctgcttcccgaagaattggccaacgtccttactccagctgcttatctcgaacaacatcaattcaagttagagaaagccaagcaaagactagccgaatgtcgggagcgcaaggagattgaagccataatccaagttaattgacagcttgtgcatgaagagaagtccaagcttgatcagctatctgagggcccgatcaaatctaacattgaccggctcgaggctcgcaagattgaactcttggcacaacttgaagaatgcaacgccgagctagacatagaacataaaaagctgaccgatctcccaaaatctgttgaagaacaaaaggctagattgagatcggccatcaagaatgtcgttgacatgaccaagtccctaaaggttatttttggaaccgatgctcaagacgctcaagccattgaagaagtagaacaaattaggcaaagagctattttggctatccagcgatatttgtctccgtgacatcctatgtaataggtcttagaaattttttgtaatcggctaaagataccctggtactttcttatcttgacaatcctttgtgccgacgcaatataactccatattttgctcaaaaatttgtaatttttcatatatgtgcccccctaatttttcaatgtcaaaagcattgataaaattataaaaacgactaagggcgatataacaatatcggccattgtacatcggcaaaccacaaccgattacaatagaaaagcaactaagggcgatataaccatatcggccattgtacatcggcaaaccacaaccgattacaatagaaaagcaactaagggcgatataaccatattggccattgtacatcggcaaaccataaccgattacaatagaaaagcaactaagggcgatataaccatatcagccattgtacatcggcaagccacaaccgattacaatacgaaaacaactaagggcgatataaccatatcggccatctcaaggcgatgtaatcatgcattaacccaaacacttggataatatttcttcaaatacttgccatttagtgctcttccataaactcctccatcaagtccttgcaacatgtaagcacccttagatacaactttgtggatttggaacggtcctttccaattcggcgatcacttgccgaatttgctatcccgagtcccaattagcaaaatcaacttccatacaagttcaccttccgaaaaatctttaagtactaccttcttgttgtaatgccgagcaactcgttctttatccttggtaacctttgcaagggctcttaatctagactgaaccaagtcttccctttcatcagccataaggttataatactcatcgattgttaaattatcttgtaactcagttctccttgagccgattctaacctcccatggcaaaacagcttcatgcccataaacaagcttataaggtgggacttggatcgatccatgacaagccatcctataagaccacaacgcttcggctaaccgagtatgccattgccgaggataataagaaatcttccttttaatcaatttgatcaagctcttgttagatgcctcggcttgcccattaacttgtgcataatatggcgaagaattcaacaatttgatacccatgttgtcagcaaactgaacaaactcatcggacacaaaaattgaaccttgatcggttgtaatggtttgagggataccaaatcggtagattaaatgttcttgaacaaactgtttcgcatccccagaatcaaccttcttcaagggaatcgcctctacccatttggtgaaataatcggtcgccaccaatataaacttatgtcctttactcgatggtggattaatcatgctgatcatatcaattccccaacctctaaatggccatggtttaatgataggattcattgccgacgccgggtgctcgctgaattgctccaaatttctggcaatcttgacaccctttgtaatatttgaaacaatcctccagcattgtcagccaaaaataccctgcacgccgaagtaaccatttcatcttatgagccgattgatgagtaccacaaatcccttcatgaacttcgccgattgcaacctaagcctgatcggcactcaaacacttaagcaacaccccatcaatcgtccgataatagagctcatcatccaataaagtatacttcaatgccttatatcttaatttctgagaagccgattgggatggattctgtaaatattgatgcacatcatacctccaatcatcggctgttattgctgcgacctcgaccttaacatctttgatcatcggcctataccccgatgccccttgggccaaatcattagcttcaatattttgctctcgagatacatgcttcaaagtaaccagccgaaattcctttattagttcttggcacttctcgttataaatcatcagtgtatcattcttgcactcatattctcctgccaattgactgattactagcaaagaatctcccataatttcaacagcatcggcttcaacctccttgagtaactgcaatcctttaagcactgcttcatactcagcttgattattggttgcatatgatttgatagtataagcaaactcaaaacttgcccccctaggggaaataataaccaagccgatgccacaaccatgagtgcacactgacccatcaaagaataaagtccacggtaagatctcaactgagccaattgaatcatcacgatgttctacaataaaatcggctatagcttgtcctttaatcgccttcggcgactcatacggaagatcaaactcagttaaggaaaaaatccactttccaaccattcctttcaaaattggggctgataacatgtatttgacaatatcggccttgcatatgacagtgcattcattggacaatagataatgccttaaccttgtacatgaaaaatataagcacaagcataacttctccacaggggaatacctagtttctgcatccaagagccgacgacttagataaaacacaactctcattttcccttcaaactcctaaatcaaaaccgagccgattgatttctcactggctgacaaatataaccgaaaaggtaccctcttctgtggaggaatcaaaactggaggagagctaagatattccttaatatcgtccaacgctttatgttgctctgccctccaagtaaactgttgatcggctttcaatctcaacaatggtgtaaaaggctccaatcttccagataaattagaaataaatcttctaacaaattttatcttgccgatcatctcttgcagttctgtcttgttctccggaggctgaatcttcttgattgcattaacactcctttgagttacctcgattcccctctcgtgaacaagaaatcccaaaaactggccagtcgatacaccgaaagcacactttgtcgggttcatcttcaagccatatttcctggttctctcaaaaaccttcctcaaatcggctatatgatcctctatctctttagatttaacaaccacatcatcaatatagacttcaaccaaccaaccgatcagatcatggtatatataattcatggctctttgatatgtagctccagcactcttcaagccgaaagtcatcacaacccactcaaacaagccgattgcaccaggacacctaaaagctgttttatggatgtcttcttcagccataaagatctgattgtatcccgcattatcatccataaaactcaaaatcttgtgtcccgaggcagcatcaactagctgatcggctactggcattggatattcgtctttcggggtagccttattcaagtttcggaaatcaatacataccctgaccttgccgtttgcttgataacaggaactatactagaaacccactcagcatatcggcaaggacgaataaaaccagcatcatctaatcgcttaatctcagcctttacgggttcaagcatatcggctttgcatcttctcggaggttgttgatgtggtcttacccctggtttgataggtagctgatgttcaacaatcgattgactgagtccaggcatctcataatactcccaagcgaagcaatctctgaattctttcaatagctctatcaacttggttctaaactccgaagataaattcttactaataaatgtcggccgtggtcgatcacctggacctatgtcaatttcttccaaatcatcagccgacataaaaccctgtccttgcttgtcatcgagatcatctactgtgtccttggtgtagacattcgaaccctccatgacgccctcaaaataatagcttgggttctccatcttcaattggctgtatatcagaatcggacacttttagaaaatctccatcccaaacttttcccgataaacaatcaagaccatccatctcccaaagagctaaatcggcactggcaacattgactgacctgtcggctggcacaatttcaatcttgtcgccttgccactgaattaagcactgatgcatagttgaaggaatacaacaattggtatgaatccaatcccttccgagcaacaagctgtaagaacccttcccatcgatgacaaataacgttgtagggatggttttgttgccgactgtcagctccacattcaaaactcctttggtttctgatggattgccgccaaagtctttaagcaccaagtttgtcttgatgagatcttcggcgtttctacccagctttctgaacgtagtgtaaggcatcaagtttactgcagccccaccatcgaccatcatcttggacatcggcttcccattaacataaccatttatatacaatggcttaagatgccgatgctctgtaccctctggcttctcgaaaactgtctgatctggtgacaaagttaatttagccgattcttcttcaacttcatcaacatcggcttgcttgaccccaaactcggcaggcaacgtgaaaaccatgttaaccgatgcagtcacaacactttttcccttagccaatcttcttgcttcatcggctgtggcttcatcggctacaggaacttgattcttaacacgccactcctgccttggctttgttttctttagtcaatgattgatttcctgctcgacttcctgaaagccctccctattccttaatctttgaacccttctcttctgattctttgtaaagataccagaaggacaccattgagttttcatgttttcattgtcctcctggccatgatcttggtttactggacccaatctttgatgaacaggaacccttgtctgccttagccgattgcccctactatacgatcggcttgagttttccgcaatgtcacagcacccaggacagtcctcaatagatggcagcttcatagcttcattccaacaaaatctaaagaactcgcaaccccaatgaggatcaaagccatcatcatcttcctcataatgcttctcctgctgtttgtcatacttcctctgatacttgttgataatcttagccgaatttacctgaaatcctcttgcacgaccttcatcggctgttcggccagctgtatgtaccatattgacaggaaaaggattgccatcaaccttcatcggcctcttagaattatcaaacttgattttgcctccttcaatagccgcttggatctgctacctgaagactttgcaatcattagtagtatgggacccagaattatgccacttgcaataccttttcttgcccaattctttagccgatggaatcgtgtgaccagcaggaagttgaatatgcttttctcggagtagcaagtcaaaaatcttgttaggcttggtgatatcaaaatcatacctctcatcttttctagaattcttcacccattggcatggtataacctttttgctccttacccattcggccgcagctatctcggaatcatcatcctcatcatccgatccatatatataaggacagacatgattaacctttctagaattcttcctagcctctgcaaacctctgttcatgcaaggttaccttctgtgtaagatgcgacaagctttcgaagtcttcagatgagaatttctccctgattggagcaatcataccctgaaaagccaaatcggctaactaggcatcagtcagatttaagctgtagcacttattcctcatttctctgaacctctgaatatattcatgcacaggctcatcatgtctctgcttgattgctgtcaaatcagacaatttcatctgatgtaccccactatagaaatagctgtgaaaatgcttctccaaatcggcccaacttttaatcgacccatatggcaaagaagaaaaccaagtgaaagccgatccagacaaagacaaccggaacaacctaaccctcaaggcatccacagccgatgcttcaccacactgagctaaaaatcggctaacatgttcataagttgatgtgctatcctgccctaagaattttgaaaaatctggaactttgaacagattaggtagaggaactctctcaaaccattcggggtaaggttgtcggtacaaatttgcagcatctttcggcctaagcccaaactgctccttcatgacatccgtaatcatatcggcccatggtcattgctgaggtgttccttgaggttgctgtggcatgggctcgaattgattgtattgaggaacaaactggggttgagtcgatcctgcctgctggtattgaacttgcggtgatagcggctgatactgataattcaaattgcccctggtaattctgaagattcggctgaatattgcgcaccaaatgttcgggaatagcttgaggtatcatcgtgccatctggttgcacgtgatgaaccaagtgctctaggacaactttatttgcagcatgctgcacaggctgaccaccaggtgtcgcaaacctagccgatgcattcattaagctttgctgctgaatcggctgaacaacctgttgccttaatggcgtctgctgaattggctgcaaaacctgccgtctctgaggcgtctgctggactggttgtacaccctgttggattgggggtgtttgttgggtcggctgcacaacctgctgccttggcggcgtttgttgaatcggctgctgctgggttggatcaccggtgtgttggggagataagaacatagacgccatctggtcttgcgttagccgattcacattttgtccgatgtgctgtggttgttctctcaccagcaaccggggattaactaattggcttggcgccgatgacggtgcagcaggtgtaggagccggtactggtgccatcggctgagccgatgtattggttaatattccagatttattgatcaaagcatggtgtacagcatagtcaacctgatcttggaagttgttgaactgcaactgtgctgtattgctgtcttgatcaacacctccaccttgaactccctgagtaccatcaccttgaactccctgtactccttgagagttgtcaccttgatttccttgagaaccatctgtagcacctttgtcactcggttcagccgagccatctggagcttgttttgcctctccatccttagaagaaccagtcccaggaacgtcagcaactacctttacatatacttctgcaccactgttcccttgcgtgtttgcataaatgaacttaagaactagttctgtgcttgctgcatcattgcttcaaaatccttcttttgatcaggtgtcagcttgtctggagtgatattcacgatgttgccttcattaacctcagataggcctagctgctagatcttctctttaacagaactggggctagccgaggacggtgatgctggtggcttctcctccgtagagaaaaactgttcttgcggttctgacttcttatcgggtcccaccgggcgtgccaaaagcgtgttgacgaaaaacacgaggcctgggagatctgcttaactccagtgcaggtccaaacttgcctttgggtatgttagcgtgccagttgatttgatcctgcaatcaacaagaaataaagacaaagaaattgcgattaaacctataaacgatagccgatcggctaagtgccgatgacataccatttatttttgagccgatgtcatatatgtatcgatcggcagtcatgaataagtaagaaagaactaaatctactcgatcggctgtagatgttaacgatatataccccttatatcgatatatacttaaatcaagtgattgggatagatcggtcgccatgccgagacagtataaatcacttagatcgaaatatatgttaataacaggactatatatattcatatcatggccgattagatagatctagcatatatcggctaatactctgataccactctatactaagatatggaagcactaatcccgagaacgcaagacgtcataacaagttttacctcttgttgaagatcgaaaccgatgcagctcaacccgaaagcaagaactcgtcgaaataaaactaaagcaaaaagggtggcgatgcgccgagattgtattgaacgtatgtgttaattgattacatggggttcggggtctatttatacccaaaaattacaaactatgtccatatcggacacgactcttatctctaacaaactctaagaaaccataagtctttacggccgacttttgcccaaacatatctctagggaaattacataaaatatcctaattaatagatacaattgccttctcaggactctatccatgcgcggcaatcatcttgaagcatatcaacccaacccgatgttgtacaccaagtcgtattgtcggaatcggctgcaccacttaaccaagtctgactcgaacttagccaatccggactatagctgattcttactctgtttccgcgataatcctcatctttgattccgcttcgatctaatcttcctttccgatgctgatattaccaagtttggttgttaacaatgtggcacgtcaaaacttgacatcgctgaatctaaacacggcctaaattatctttggcttcaagagtatagaaccaatacatcattctccctctctttcttcatctccttctctgcccaactagtttgaaagctgtcacgtcctgataaattcatcccgaaataaaaatcattctctaaaaggaataatagaattaattaaaattcgaaaagaaattggcaaacactaaaatacgtacaagaaaaattcaaatgtggcccggagaatttttgttaaattctccttggtctaaaaagagccctcaaattttagtggaattttcagagcacaaataataattattaagaaataaacaaagttaaaatgagtttataaaaagaaaaaccctaaaaagtctttttcgcccccttcccctcttgggccggctcggcccacctccctccctctctctcctctcccccgcggcccaatcggcctcctccccgcgcgcgtgccgctgacgggtaggcccgcccgccaccctcgctgacgggtggggcccacctgtcatccctgtcctcgcgccgcacccgccgcctcgtccgtgccctagcgccgccgccgccgcggattccgccgcatcccgccgtccccgcgcgcaataaagagggggaaatcactccccgtgattccctctccctttccccccacttttccctctctctctccctcggatttgttcggaaacgtttccccctaaacctcgccggcgcatcaatggcggccggatcttccgcggccgattccccgtcatccggccgttctctccccctcccaacgctatataaacgctccccgtgcctccctcctccgtttccgccgctcgccgctctctctccccgtcggaatcgagctcgcgccgtcgtgctctctctccgccgtcgccgccgagcttcggtccgccgccgtcgtcgccccggacctcctcccgcttcggcatcgtctccttcggcttcgacgcgtcctcgccgacctcgtccaccccttcgtttcgcccgccgaccgccggaacgccgccgtcctcgtcgacccgagccgcgccgccgcctctctccgcttcggtcgccgtttccgtcgtcgccgtcgacccggggtgagccgtggaccgcccatttcgcttcccccttccctcccctctctcgggcgccgctccgtcgcgccggtggtcgccggcggcgaccatcggggcgcgggcgcgtcgcctcccgtcggctgtgccggcgaggccgccttcgggcgcaccccgcggctgccatgtggggcccggccgtcagccgcccgcgccctcgagtgcggctgacgcgtgggacccacggcgtcggccggcgcaagccgcgtgcacccggtccaccgtggaccgtgaggctgccgcgtgggccccactcccgtggacccggtccgcgcgcccctcccctcggctgacgcaataaatccgattttaaattaaaatttaaatgaagaaattcgcaaatatccatttaaagagcatataaacttcaaatggccataacttggccatttgaactcggaattggaccgttcaagtctctaatttttccttaagaagtcaagaacccatttttttgctttgtttctgcttgttatatggagtttagtagagtaaaagccgtttcttttccgttggtcgtgtagacgctgcagcttcggaagatccgctcttcgtggaagttgaagccgacgtttgggaaagcgagcaaggcaagtcacatcatccttgaacatattgaatcccagtttacaaaattatgttgatttaaattattgcattatcgctttatttaaattcccgcgttatcactgttttatttagccatgcctatttacctttgttatgaccttattattgttattgttattatttccttgttcaccctagaataaacaaaaccccaactagtggacactctactcctggtatcactagtatgattttaggtagatgctacgctgtttaattaggtaacattaggtggttttacaactctagactttgggatattcatatcacctggacactttggaattgttggtttattgtggaattggattcacaccgccccctctattcaaaatccccaaaatggttttaggctgggctcggggtgcatggttttgatagtagcacctcggccatataaggaccggtcttcgggcctctgttgcaaagcactatcgtacttccacatgtctagtgggtaaggcttagtttgtggctcagtctggttataaacaaaagtacacggatggagatggacgaagtcgggggtcgatggacatctctaggacaaatgaaggctacacgagctgcggcccggtagtcgagatgtcatggcacagggctggtgtcctgctgctaggggctcaatcctgcctacctgtcccggaggttccggccgtaggtggggttgggtcggtactcttgtctatggctaggatgggttggaaactatgtcacgtcttccgtccgtataccgtggtggtatgtggcacgtggttacacgtgaggaagatgtgtcttgcgggtaaagatgtacacctctgatcagagtataacctattcgaatagctgcgccctcggttatgggcaagccgagcaatgtacccaagttagtgttttaattcttaaaatttgctcaacaactaaaatgtggaatggttggcctgggttggcttgggacgagctgggacccagggtcaggttgccagttcggtctgaatcatcgtaggccttgggttaaggcaggttcgtgagggttcacggccttgattaataatattgtatagctctaggatcatgtttacaaaatagctttgggcaactaagtgacttttaaatgctgtttactgcaaaacttaacccctatattattatccccttgtacccccttgcattaattatgcatctccggtgtggcttgctgagtactgtggttgtactcattcttgctctatctttctccccccttcagtaagagaagctttggagaagaagtcttaggtggagtcttggcttataccccagttgagcgcctatgaagatggagccgtaggcccgctagtccgctgctgtttatttttgattgtcaggccttaagtgcctttgtaataatgtaaatattatcgatataataaagatgtgtcttttatatcatgtttgtatggtgtaccccggcttttcctgggacggggattaatacactagcgttcgggaaaatgcaattttctcggtcgcgacaaaagcgtgccacgaaaatcttaatcttcatccaactcttgttggagaaaagaacgagatcttaggtccattggataataatatagtaccaggttgcgttcttttcacttcctcgtttcctcggttttcgcgtacacacttttcgaactgctaattggtatgcttttgtttaaaaaattattagaaagttcctttaaaaatcatatcaatttattcttcagttatttatacgcttcttgaactgctatgtggtatgtttttgtggtatgtttttgtttaaaaaattataagaaagttgctttaaaaatcatatcaatttattcttcattttttttatactactaccatccaggatgtaacaacttttagctatatatatacataacaaagccaaaagctgttatatttggagacgaaggtagtagctaatcccttctttttataaagctaatatccactaaacatctaaaactcaacgtgcaagcatagtatttattagcactcctaaaacctacatgtaagcatgccacatcaactcattaagcactcaaagctcaacatgcaagcatatagtaattatatctagtacaatttatttcattctaaaaccaaacatatacatgctaaatcattattctcaaattattttaataatatttcaatccaaatcatttcatcatttcttcaatatctaacatatatctcgtaggaaagtgcggtgcatcatctaatagttactaatgagccacctcattttgcatgcgttggagccaaccttctccgttggaccaagtgagtaagatatttcaaagtaaatttttccggtgataaattatgtgccaaaagaatatagagctggagtatacaaaaggtgtgtttaagaggagagtaaagaaaaagatcgagaacataaaaaaaatgaggttaaccattattgcatgagcattattagtacgttagtttaaacttgaaaacagattaatatattttttttaaaaaaaaactcgtttaatagtttaaaaagcatgtagcgtttaaaaactcgtttaatagtttaaaaagcatgtagcatttaaaaactcatttaatagtttaaaaagcggaaaatgaggaactttctctgatttgttgtctaaacaaccacaaggttagtacacttttattagcttaatggggtccctctcacccaaacaccctctaaaactatttcttatcgtgagcacacttcccaaataactacggtgtgttgtgtaaaatagtttaaaattaattaaaagtatttaaaaaattaaaatatttaatacataattaatcatccactaatgaacatttgcatcagtgaagtaactgtgtggaatgcagccaaagtatagttgtggttgtgttaagtggtaaatttgctactaccctcatcactaaggtggtgtttcaatcttctaaatatgaaaataaagttaaagatacagataaagataaaaattaagatttcgtgtttcatgtaaaacgagatggtaataacgtgtgattaattgagttttagttattacaaacttgaaaaatggattaatctgatattttagaacaactttcatatataaagttttcatacgaaaacaccgtttaaccgtttgaaaagcgtgtcatgagtattatctaaaagtttatccaacttttgttggagaaaagaacatggcctaactccctattttcaaaacaaatactgagactgtgggactagagagctcaaatatcaaccacccttcttaccagctccatactttttgcgcaaaggaaaaaaaaaggtagaatcatatactctctccatcctataaaagctaagatgaaatgtgatgtttatagtataataatgaatctaaacaaatgcatgtccagatttattatggtaggaaatatcatatactatcataggttgatttttttataggatagaaggaatatgttagtaacaaatacgtgcatgaattaagagatggtactaatgggtcaatgataatttttttctaaaagtaaattttactttgtatcatcatatttcaatttagacctttttaaccaatgtttttaatcttgcttctggccgagtttagttctaaacttttttttcaatcttctaatttttctatcacatcaaaacttttctacatacataaacttttaactttttcgtcacattgtttcaattttaaccaaacttctaattttaacgtaaactaaatacacccgctgttgcagtttaaaaagtaaaaaagttggttaaaaatggttaccggctcaggatatgaacgttgtatttagtaagattagaaaacattggttaaaaatggtcatgatatcgactagtccttggagtcgcggattcccgacgaaaagggtcatttatctactccgtactactgtgctccctagtagcctactcgtacagtactagtacctgtgagtacctgtaccagcagactgtactagcaggctagcagcttactccctccgtccaaaaaaaaagataaactctggtttccgtgtacaacgtttgactgtccgtcttatttgaaaaaattataaaaaaaattaaaaaaacaagccacgcataaaatattaatcatgttttatcatctaacaacaatgaaaatacgaattataaaaaaatttcatataagacggacagttaaagttggacacgcaaattcagggtttgctttttttttaacggagggaatagctgagggccatttctctaccgagcactcttgacaagtttgggtgtaatcatcaactatgcttgactaccattaatgcaacgcgtccattcgacgattttacatctcctctagggcaagtcttaggcgatgtttaaatctagttacttagctttagtctttagtctttggattagtctatgtatttagacactaatctagagtattaaatatagactacttacaaaactaattatataaatgaaagctaattcatgagataaattttttaagcctaattaatctataattagagaatatttactttatcatcacataagctaatcatggattaattaagctcaatagattcgtctcgcgaattagtctaagattatagatgggttttattaatagcctacgtttaatatttataactagtgtccaaacatccgatgtgatagggacttaaatgttttagtcatatctaaaaaggtcttaagggcaagtaatataaggggcctgtttagatgaggcttaaactttttactcccccgttatatcggatgtttggacgctaatttggagtattaaatatagactaataaaaaactaatttcataaatgagagctaatccgtgagacgaattttttaagtctaattaattcataattatcgaaagtttactgtagcatcacattgttaaatcatggcgtaattagactcaaaagattcgtctcgcgaattagtctaaggttatggaatgggttttataattagtctatatttaatactccaaattagtgtccaaacatccgatgtgacggggacttggaataagtccctgtttcctaaatagcccctaacggcccatttggttggagggagtttttaggagggaatgggagtttacagggataaggctattaagtgttttatttgattaggagacatgggaattttggtggaatggggatgaggaattgaggaaggaactccctccttttcaatacctcaataggggcaggtaattgggagggaattcctcctttactttgtctaagcaaatctcagccattcgtttttattaatgatctaatctctaactaaactccctaataatttccatcacctctaccaaacaagatattgggattaaaaatcaaattcccatcttaatctcatcatcaattcccttgtgtaaacttccaatccccttacctcgagttaccaaacaagccgtaagggcttttacagtgtgtttatgtggcatttagtctcaagcttacacataggagattctcagtcatgtctgtgtttcccatgaccaaaccaagaacgtgtgaccaaactgaggccctgtttagttcgcgaaaaagaaaatttttgggtgtcacatcggatgtttgaccggatatcagaagggcttttcggacacgaatgaaaaaaaaaatttcataactcaccgtcattagcatatgtgggttactgtagcacttatggctaatcatgtactaattaggctcaaaagattcgtctcgcgattttccccctaactgtgcaattagttttttcatttatctatatttaatgcttcatgcatgtgtccaaagattcgatgtgatgtttttgggaaaaatttttggggaactaaacggggcctgagacacacgacgttcttcatcaactttttgtcagcgtcgttaggcactcaagcaagcccacattcgaggctaacgctgaccatggccatggatgatatagatgagtcggcgccgatgccgcttcggtggagaagcgccattgatctcgtcgtccatcgtccctcgctcccacgccgccgacctcgccgtccccgctctcacgccaccggcctcaccgcggggaatcgggggacgagaggaggggtggatcaggccgcttttcaactgctcccactctgccgacctcatcgtcccccaccgccactccgcccggcaccgacgccgacgccgcttgggccaccccaccactgctccgctacgagttcgtcgccgctcagtgagtcgaggtggggttggtggaggaaggagagagggggagggagccgcctccgccggttggggatgagataggtgtggggagggagaggaggaggcgagagagtcgccgccttgtgtcgccggagacgagctcgcaaacctgcaccatcgttggggtgggggagggagaggagggaacatgggggagtcgagttgccgccgtgcgcgtgggagccgagggagaggaagagagaggggggaaggagaagaaaaggtggtggggccagcctgaaaagaaaaggtggtgagcccacctaaagctacaagtacgctgtggaaaggggagcttcaactgcttttcttccaatgtggacatttgggctcctctataaggcgggacgcattgctactgtcctaattctccatatgctgcccctaagagtaccacattggattgagtgatgaggtggaggagagaagtaaggagagagatgatgatccactcctccacacaaactttaaaaaagatgtgagagtattagatgtattggtatttgtgtactagaggtgacatattgtaagggttgcctcttagtttataagtgaatgatatgaataagggcaagttttatagtagggctattgtcatatctaattttatctatgtaagataagaggtgatacatacaatacaccatatctacactacctctaacatagtaacccaaatgatattttatattatttgtttgtccaatcccctctttctttcatcccctttttcttggggtttgtgtggaggttaccccttgcattaggggtggctcatcttctctttcctcacttgtttcttccacctcatcatccaatcctatgtggtattttaggggcagtagattttccctattacacttgcacttagagcatcctcaatgtatttggcatactagtctatagaagtgggacccaagctcgaagtctatagttttagaaaccaccacaatgtgagttattaaggtgggtcccacagtggtaaaaaaatcatattgagttacaggagttaatggaaaatatgtgtttcaaatggatgtttgttgctttcaaaccatgtgtagatgacttttcaatggttgtagatgcataggtgtagaagcatctagtttaattggtaaatacactcgtcaactggtctcagacacatctattgatggacacaactggcaagaggcagacacaatgcataatgctctcccttttcatagcatgcaaccatttcctcaacacatcggttaaggaaatcctcttgtatccataaggagcaagaggggtgatgcaaatgtaacacagctcaactcaactcaaccaaaaccaagatgaataaggtatctcttgtggtataggatgtgagcaccgccgcgagtttacggcaagcaaatcttaacttcggaatagaagttgggtgttgggagccatgaaggctagagccactcaaagctggtgtatggttcgagcttacacagtcgtgctatttgccaccttgggttagggatgtagaggaaagtggatgcgtcgggctgggtctgtcccctccttcaaccgaaggccgttgaggggggggggaggggtagaattctagtatacacaaaaatatgaagatgcacttaaacccccaagtgggttttggtgattaatgacaaggtggttaaaggggactaacgtgtttatcaagtttattcacaggagtttagtcccaaagcgagttgtgatggctaagaatgcaaggagaccccccaattcaaatgttcctaagtgcaaaaatcatcgaaggtgattagactaggtttttcctttcgaaattgagtttaggaaaagccgtactattaagaggggtttcaagtgtggttctagggtatacaaagtgctcttagtcttatccatgagtcaaaagatttttggaatcatttttgaaaaatgattttctccccgggacagagagggctacccggaggttatggccagaacttccgggcaccgtttatttgcaaaaatttcctaagtgctgcccagaagttcctggcacttttgcccggaacctcctggcaggtttccagttcaaacttgtgagtaacggctagatgacgtcacctagccgttatatatatggatttcatccccaggtcactttttggccattccacttctgttcattcatgttctagggttttctagccactcccaagcttcctttgcttcctccactcaaatctagagcctatcttgtgagattgtgagattagatgagagtgtatgagtgttttggagatggcttaaagattaggtttgattgagcactttggatatcttgtgggctgtcacttaggcttattactcttggagatcttctcctagacgattaggtgtcgcctgtgagcttccaaagatcttgtagatgtcttggaaaagtttgtgaaggttttcctcacctccgcaaggaaacgaggtaagtgagtaaagattcttgtgctgagtttttagaggttgtcctaggtagagcaacttgcacttgtggtcttttctagaagaaattttgagttggatcttggtggtcactcaattctagaaaatgacctagaagtgttgagttgaaggctgtggacctcttctgggatctttgcataagtgaggcaaggggttaatcgagacccggctctttggagcacctcaacggagagtaggattcgtctgatccgaacttcgggaaaaaatcgtctttgtctctcttgtgcatgatctttgtgtgaatctgctgatattctgcgatcttcatcttattcctctgtgtgcctaaacttctcttgctaggacctatttttcatctcagttttaatttatctcagctgcccggaagttcctggctcaagaactccggaagttcctggctactcatcatgcccggaagttctggtgttcatcaccaggaggttccgggccctgttaatttaaccgctgcaattgttgagaaaatttcaggaaagccaattcacccccctctaggctacatctctgcacgttcaattggtatcggagcgaggtactcttgattcaagcttcaccgctttgagtgatccacgatgtcggacttagggggaaagaacggggaaaatggaaatgaagatgaagcaagcagcaagggaactccaccacccaagggagctactataccttttgattatagcaaacttaccattccttctcacaacttcgtctccgtgccttccgggcgtgctcctcaatttgatgggacatattatgccgcttggaagcacaagatgaagttgcatctaatctctttgcatccaaatatttggaaagttgtttgtacaggtattgatataccccatgatgacatggagctcacttcggagcaagaacaacttatccaccgcaatgctcaagcttctaatgcaattctcttcgccttgagtccggaggagttcaacaagattgatggactagtggaggccaaggagatatgggataccttgcaattggctcatgagggatcacccgccgttcgtgaggccaagattgaattattggaagaaaggcttggaagatttgtgatggatgacaaggagacaccacaagagatatatgataggatgatgattcttgtcaacaagattaaaggacttgggagtgaggacatgacaaatcactttgtggtcaagaaacttctccgtgcatttggtccaagaaatcccactcttgtatcaatgatacgggaaaggaaagacttcaagagactcaccccaagtgacattcttggaagaattgtgtctcatgagatgcaagaagaggaagctcgtgaagtgagacaaatggtgaagaatgccgccatgattaaaaatcaagaagttgctttgaaggcaaaacaagaagaaatggcttttattgtcaagatattcaagcactttcttcgcaagagtggctatggcaaagggaggaaggatgatgacaagggaaagaggcaatcaaggagagcgtgcttcaattgtggcgaatatggccacttcattgccgattgtcccaagtcaaatgaagctaaggctaagggaggcaagaagaagccggagcatgctcatgtggcggaggcacacatggcggaagtgtggtactctggagatgaagaagatcccgaggtcaagcccaagcccaggtcaaaagacaaggttgaaggagaaggtggtgttgctaccgttgccttcaagtcatcctcttcaagcaaggagcgtctcttcaacaacttgagtgatgacgacgacgactcctaccactactcttgcttcatggcccaaggctgtaaggtgatgacacaaaagccctctcaaacttctcttgatgttgattctagtgatgaggaaagtgataatgaattagatgatgtgcttaagagctttagcaaacccgctatgcaacatttggctaagttaatgagagctttggatagtaaagaacaatcactcgaaaggcaagaagaattgcttattcttgagaagaaaagaaaccttaccttagaggagagcttagctaaaaaatgtgctaaaaatgaacaacttgctaatgagcttaatttggctaatggttcttcagctagccttagggatgtcaatgaaactcttcaagaaaaatttgctaatttagacaaaagtcataaagatcttgaagttcgatttgacactcgttggaatagcacctctcaaccaaatgtggtttctaattcttctaacccttctactagcaatggttgtgctaggtgtttcaatattgatttgaactcttatgctactaatattgatgctatgcaagctcttaagaaagagaatgaaaggttgggcacattggtgaaatatggatgtatgaagacataccattcaaaagatgccctttacaaaaccatcaccgctcatcctaacaaggatggacacgggctcgggttttcgggtggaagtcctgtgtctaagcgtgtgatggtaaatgggaaagaatgcttgatgtttgtgagagaaggtaaagcaccacaagcaagtgaggtgactagtcttgtgagctgccagggacccggaacatccggacaaaccgggagaaacttccgggtgggagtctctgtctctcaaaaattcccaccaggaagttccggccagtttgccaagaagttccgggccaatggccgtgcacaagacatgaccggaagttccgggcacaatgccaggaggttccggccagagggtctttactatgattcatatgtaatttccaaaaaattcaaagggcaaagtggttgcctattttaatgggaattacaatgatgagtaccgcacttgtgtgtaggtgccaaaggctttggtaactaacatcaagggacccaaacttagacaagtttgggttcctaaatcccaagcttgattttcttgtgtaggcatactcctccggtggttcaagttgggttgtggacagtggttgcaccaatcatatgactggagagatgagtatatttaccagtcttgatgaggaaaacggaactcgtgagaatattgtgtttggagatgatggtaaaggaaagataattggtctaggtaaaattgccatctccaataatcaatctctctctaatgttcttcttgtcaattcattaagctacaatttatttatccgtttctcaattgtgtaagttgggttacaattgcttgtttaccgatgaggatgtgaccgtctttagaagggatgactcctccgttgcattgaaaggcaagttgaagggtgatctctatcttgtcgatttcgatgtggatagagtgaatccggaagcttgtttaattgctaaatcctccatgggttgactatggcatcgtagactagcccatattggaatgcagaatttggcaactcttctaaagggggaacacatcctcgggctcactagtgtcacatttgagaaaggtcgtgtgtgtagtgcttgccaagccgggaaataagttgggaatccgcatcctatcatgaacatcatgactacaacacgccctcttgagcttctacatatggatttattcgggcccgtagccttcataagtattggaggtaacaagtatggttttgtcattgttgataatttttcccgcttcacttgggtgtattttctccatgacaagagtgaggctcaagatgtcttcaagcgcttcgccaagcaagcccaaaacctctatgatctcaccatcaagagggtacgaagtgacaatggaggagaattcaagaacacgcaagtggaggaattccttgatgaagagggaatcaagcatgagttctccgccccctatgatcctcctcaaaatggcattgttgagaagaagaaccgaactcttattgaagccgcaagagaaatgcttgatgagtacaagacttcggatagcttttggacggaggccgtgagcaccacatgccatgccatcaatcgcctctacctccataagattctaaagaaaacttcatatgagctcttgagtggtaagaaacctaatgtttcatattttcatgtctttgcgagcaaatgctttattttgagtaagaggcctcgctcatctaagttctcacctaaggtggatgagggattcttacttggctatgagtcaaatgcacatgcctaccgtgtcttcaacaaaacctccggtattgttgaagttacaagggatgtgacatttgacgaatctaatggctcccaaggagagcaagttgttgtacatgttatagatgatgcggatcctagagaagcaattggttctaaggctattggagacatacgaccagtcgagacgcaggatgaccaagaagatagggatcaaccttcgtcatcgacatccaatagccctacaacaagtcaagagtcagttgacccggaagttccgggaccagatgatcggaacctccagacctccccaggccaggaagttccgggtccatctgccaggaagtttcgggcagaggacagtcaaggcttgcctacgacacaagtggatgggattgatgccgtgggcactgtagagcatcctgatcaggctcaggtctcctcagtgcaccatccaagaatacatcacactgtccaaagagatcatcccgtcgacaacatacttggtgacataagaaagggggtaactactcgttctcgtgtcgctaacttttgtcaacactattcgttcgtttcttctttggaaccaaccagggttgaagatgcacttggtgatccggattgggtgatggctatgcaagaggagttgaataacttcactcgcaaccaagtatggacattggtggagagacccgaccaaaatgtcatcggcaccaagtggatcttcccaacaagcaagatgaacatggagtggttgtaaggaacaaagcccggttaattgtgcaagggttcacccaagtcgagggtctcgattttggtgaaaccttagcagcggttgcttgtcttgagtcaatccgaatgcttttagcctatgccgctcaccatgatttcaggttatatcaaatggatgtcaagagcgcctttcttaatggacccatctcggagttggtctatgtggagcaaccaccggggttcgaggatccaaagttgccaaaccatgtgtacaagctccacaaagcgctctacgggctcaaacaagcccctagagtttggtatgaatgtctccgagattttcttttgaaaaatggttttgaaattgggaatacgtacactactctcttcaccaaaaagtttgaaaatgatttattcatttgccaaatttatgtcgatgacataatatttggttctactaatgcctctttttgtgaagaatttagtagcatcatggctaaaaggttcgagatgtctataatgggtgagctaaccttcttcctcgggctacaagtcaagcaagcacaagaaggtactttcatctctcaaaccaagtacgtgaaggacattctcaagaagtttgaaatggaagatgccaaacccatcaagactcccatgcctaccaatggtcaccttgatcttgatgaaaatggtaaatgtgtggaccaaaaggtatatcgctccatgataggatccttgctttacttatgtgcatctcgtcccgatatcttgcttagtgtttgcatgtgtgctcgctttcaagcggagcctaaagagtgccatttgattgccgtcaagagaattctaagatatttagttcatactcctaatcttggcttgtggtatcctaagggttgtgactttgagcttttgggctattccgattcggattacgccgggtgtaaggttgatagaaaaagcacaaccgggacttgccaatttcttgggcggtcccttgtttcttggtcctccaagaagcaaaattccattgcgttatccaccaccgaagccgaatatgtcgccgccggttcttgttgtgcccaactcctttggatgaaacaaactctaaaagactttggctacaacttcaccaagatcccactcctatgtgacaatgagagtgccatcaaaatagccaataatcccgttcaacactctcgaaccaaacacatagatattcgccaccactttttgagagatcatgaaaccaaaggagacatattccttacccatgtaagaaccgagagccaattagccgacattttcaccaagcctttagatgagaaaagattttgcgagcttaggagtgagctcaatatcttagattctcgcaacattaagtgatgggtagttggctaatttatagccaaacatgtatcactaaaatgtaaattaaaaaaatgagcttttgtgtcttgagatcacttcttggttgaagatggtcttgctaccaggaataaaactcaaacattcccccctttatccaaaaaccccatttgtaaaaatttg

SEQ ID NO: 21794 - DNA, 2066 bp, Oryza sativa
attgttatataatgttgattgttggctggtcatatgcatcataagtctctgcaggtccatagttctctatttcccctcattgaattctcatcttctccttgtttttgggcctgactgccctttatctgtcaggccggaagttccgggcctccctgtccgtaacctccgggtgtcggggagtatatattctcagggggagttagaaaccctagtctctctcctcattcttctccctccccgacaccagccctagccgccgctacagtgccccgagtggtgattttctcttccctccaatcaaattcgattattctctgtggatttatctacattggtggctaggaggttctttctgtgatcgattcgcagtttcctctctcaatttagcacttttgatcttctcttttggttcgtcatgtttttgccccgatctctaaatctgtgaacctagggagaaaaccacttggatagtcttgtttctgctaccttgtagatcaccgatctataggatttgttcacatgcactggctatttttgaaacctctgttcctcttttttgccggccggaagttccggtgttcttgcacccggaaccttcgggtgctgtccagccagtctgccattcttgattctctcaaattttgcctaactactgcactccaatttgttgattcctgttgcagtaagcactctgcctcgtgagaaaagacagaaagcctctcaggatgtgtccggtgatgagagtccccctattcggtttcctcgtggtcgtttgggtaaagagaaagtgattgagggtggcagtggcagcggcactcgtacttctcctaggtttaccaggcaatccagcaatcgtccagttcagattcgggatgttgacagtggtcaaggaagtgatgctcctaatacaagaggtcgtgggagaggtggtggtcgcagttctggggctggaagggcatctcatgatttccctattggatctcgtgagaatcccgttcagctctacaagactcttggatttgacaccactcctatgcaccacattggaagacccaagtccaactaccttcatcagcttgccaagtgcagaagggaccgtttgattgatttagagactcagcctgaggagtcacaggatcctcgtttcaggactttcactcaattggattgatataattcagtgattacggctagagaaaatccaatggttaagatgaagtggattgattggacttacatgaggaagaagaacaatgaagtgttcaaccaagtgatgcaagtgtgccacaacaagaatcttggagatattcttgccttggagtatgattggaatgaggaggtcattgcacagttctatgcgacagcattctttggtactacaaggaagggaattgtcacgccctgaagtttcccctttcttctttctttaaaaattggttaaataaattgcccgaagaaattgtttaattaacctagagctaatcctcaattaataaatgcatttaataatcgaattcagcgtggtggaatttttcttgagttccccatgctccaatgcattaacaagatttttagtggaattttcagagccttggaaataattttaaccaattaaaaatcaccaaagtgcaattttaaatcccaggaaaaatcctttcttcttttttcttttttctttttcctcctttttcctcttcttgggccgtcggcccagtccaccccgccgcccgcgcccccttcccctcccttcgggacgccgacaggtgggccccacctgtcgggttgtccccaacctccagctgtgcgcccacgccggcaaccgccgctgccgccccacctcctccgctcctcccgtgcccacgccgcgccgttccccgtcctccccacgacgccgcccacgccccgtcactgccgccccgcgcgcgcgcttgagagggcgggattcgatttcggatcccaccccactctctctctctctccaccccacgtcgctggcgaaatcggagactttcccggccaagtccgcctccctctctacctataaattgctcccccgagcatcctct

SEQ ID NO: 21795 - DNA, 19228 bp, Oryza sativa
ccgctagcttcgtcgccgcgagagctacctcggccgccgctcactttccgtgcgccaccgccgtgccgctctccccacgccacacccgagctccgctgccgctgcccatctccggtcgcgcgtcgccgccactagagccaccgccgcgccgcgcagtcgccgccgtcgcgctcaccgagcccgcccgcacctcggccaccatttggttgtcgccaatcgtcgccgaagcgccgcttctctcgcacgccggtgagctctccatttccacccaactccggccggccgctctagtcgccgtggtcatcctccccttcccctaacccgttcatcgcctttcccaggttgtgcccgaccctgtccgccattgtcgaaagcgccgccgccgctcgtctcttcccacgccggtcgccgtcatcgcctcggtgaggaatcccctctcctccttcctttcctctctcccgtgagcgccgccgccctccgcgcgtgcgccgtcgtctttggccgccgccgccgccttcgcgccggccgccaccgtctccccgcgccaccggtcatcgccggcggtcgtgcgccgtcgtcgcctcgccatggccagccgacttgagccgtgctgagccagcagccacgcccctctcccgccatgtgccgctgcccggtggggcccaccagccgatagaccaccccctcccttttagctgctgccaatggggcccgcatgccggcgcccctccctctctcttgagccgctgacatgcggggcccgcctgtcggcgccgccccccctcgctgacgtcagccctgggattatattgcgcaataaataattaaggactttttctttattagtaaaaacatagtttatcttctaaaattcataagtaattcatccgagctccgtttaagtccattcaagtctcagtaaattcataaaaatccctagaatccattaaaaatggtttggttttctgtttcagtagtcttatatcatgttttgcttgtgtgctttgtttgtcgcgtagatttcggccgtttcgtcgatccgcggtttctcgaagacgttgctaaggtctcatcagtgcgagagcaaggcaagtcatgcattacaattgatcatattgtacccaatttacaaatatcccgcatttctatcaaatgttgcattcttttacaatgtcatgtgggatgggtcctattactcggccatatattgtttaccttacgccattgataacttgggtatcaaaatgattagatgttggtttaggaaatgcttagccatgcttagttcaactaggacacaaatggagatcacatttttacatatactttgactattagcatagctttggactggtgccaccgcaagggtgtcagttaattaaaatatactgaatggcgggctgtgggtgcatggttttgctggttgcacccatggcagttaaggaccggttcacaggaaaccctgggagacttaccatgcttaccacaagcgggagtgggtaactgcttgatctgaagtatagctcgaccctttcctaggcaccggtggcgagggtgggcgtgatggagttgggtcggccggggtgtccggttgtccagctgccggattcaccgcggcgcaagaggggaccacccattgccttttgaggggtgggggtgaaacctagcgtggtgtggagtaaaactattcgaatagccgtgcccgcggttatgggcgatcaaccggattcaccgtgattagtctcacccctagtttagcttaatgaactggtgtagtttaggtggttggttgggcctgttgcaacgtggtgtagcgttggacagtgattggttaatattgattaatttagtacaattgttttactgctttcaactactgcttttaaatgctagctttatgcaaaagaacccctagcctcctttggttatatcctgcaccatacctcctcttccggtatgacttgctgagtacagtgggtagtactcagtcttgctctcttttcccccacaccagagctaaagatctttctagttggagctgtcttgttgaagttggttttgtcgctgccgtcaaggattgcctatggagtggcgtcgccccgctgctgaagtcaagcttcccggtttaactcgtttttatcttttccgctgcatttgtaatattttctatttttgtaagacgtggatctgtatgtcaacaattgtcatttgtgtaccctggctggtcctggacagggatttaatgcacatttagcttagaaattctggttcgtgaatttctaggcgtgataggaaccccttatgtgaagtggttgactgagggtgttaggcacaagatttccatggcacagtttgctgagatgttggggttagatgatgaggatctcaataggcccaacattcatagtgaagcacccctccccatgatcaagaccaaattcatgtatgcaaaggatgctcctaggacttgcatgggatcaactcatggattgcatcccaactacaaggtgttgtactccatctttcattggtctttgcttccaaaggttggagatgctactgctctgccatccaagcatgctcatcttctcagtcgcatgcgctacaatcagcctcccttcagtgtgatgaaattgatttggtatgagatcgccaacaccattcttgagcctaagcggggttgcatctatgctcctttcattatgaagatgattgagacaatcaccggggtattctacatcaaagatgggcaccataattcttttcgccatcgtgctccaccttcctcttctccagtggtcccttgatctgttccttctacttcagctggtccttctactagtgccccaccaagttcctcgagttcttctctcttcaagaagacacttcaggcaattttctgtatgtgtgctaagactgccaagaaagtgaagaagatcgaaaggcgtcagaaggaagatagaagagaggctgggaaagaagtgtcagatgattctgaggatgaggtctatgttgatccatttgaggcttatgaggcagcccgcaacgttgccggtgaaggtccatccaccttcttcaatgaaaattcttcccattctaatgatgatgatgatgatgatggtgatgagggtgacaccgaggcagctgctgaggatgctcccactgatgttgatgagggtgacaccgctgctcagtccgatgagtctcatctctccggcgataccgagattgttccctctgatggagatgagtgatcctcttcttctcttcatagtttctcgcctttttggtgccttgatgccaaagggggagaagttgtgaattgaagggggccatttaaatcctttttgctgccttgactgttgtctggtcatttgaccggaagttccgggtcctgtgatccggaggttccggctaggcagatttcctctctattatctctctctatatggacatgtaatcgtattctattatggttggatgtaatgactgttagatgctttattatcctttttgtcagtaagttagaccatatggatgttgcattttgatgtgatgatgtgttcttttcatctttttgagtgattaccatgtcatctagtctttctttttgcatcactcatcattcgagcactttcatctgcatctcttctttgataagggtagtgtgaggtttcttttgagctttccttcatcttatgcatattgttttcatttccagttctttatatgcatatctttagggggagcttcacacttctctcatcattcaaattttaaattctatcatctttttatttgctttaaccatgttgtcatcaatcaccaaaagaggggagattgaagatgcacttaaaccccctagtgggttttggtgattaatgacaaggtggttaaaggggactaacgtgtttatcaagtttattcacaggagtttagtcccaaagcgagttgtgatggctaagaatgcaaggagaccccccaattcgaatgttcctaagtgcaaaaatcatcgaaggtgattagactaggtttttcactttcgaaattgagtttaggaaaaaccgtactattaagaggggtttcaagtgtggttctagggtatacaaagtgctcttagtcttatccatgagtcaaaagatttttggaatcatttttgaaaaatgattttctccccgggacagaaaaggctaccccgaggttatggccagaacttccgggcaccgtttatttgcaaaaatttcctaagtgctgcccagaagttcctggcacttttgcccggaacctcctggcaggtttccagttcaaacttgtgagtaacggctagatgacgtcacctagccgttatatatatggatttcatccccaggtcactttttggccattccacttctgttcattcatgttctagggttttctagccactcccaagcttcctttgcttcctccactcaaatctagagcctatcttgtgagattgtgagattagatgagagtgtatgagtgttttggagatggcttaaagattaggtttgattgagcactttggatatcttgtgggctgtcacttaggcttattactcttggagatcttctcctagacgattaggtgtcgcccgtgagcttccaaagatcttgtggatgtcccggaaaagtttgtgaaggttttcctcacctccgcaaggaaacgaggtaagtgagtaaagattcttgtactgagttttcagaggttgtcctaggtagagcaacttgcacttgtagtcttttctaaaagaaattttgagttggatcttggtggtcactcaattctagaaaatgacctagaagtgttgagttgaaggctgtggacctcttctgggatctttgcataagtgaggcaaggggttaatcgagacctggctctttggagcacctcaacggagagtaggattcgtgtgatctgaacttcgggaaaaaatcgtctttgtctctcttgtgcatgatctttgtgtgaatctgctgatattctgctatcttcatcttgttcttctgtgtgtctaaacttctcttgctaggacctgtttttcatctcagttttaatttatctcagctgcccggaagttcctggctcaagaactctagtagttcttggctactcatcctgcccggaagttccggtgttcatcaccaggaggttccgggccctgttaatttaaccgctgcaattgtagagaaaatttcaggaaagcctattcacccccccccctctaggcgacatctctgcacattcaaaatacagtacacaaaaaaacacgtataaacgtgattatgacgtagaaaatgttgtggaagtaatttcacttaaattgtaatggcatttttccaaatagttaaatagtggtatttttccaagcctacaattttcagtgacatgtatcaagctattctctttctagtgacatgtatcaaactattatcttctttcctttttttttttttgccaggagaggagattattatttctttattgggggaatgggcttaggccggattttaattcaaaatagaggccatttaagcatgtttttacaccgaataaaaaaatgttacggtccggaattttacactattttttcccccaaaacaaggcttgcaagaaggcccaaagtattttcctcagtgaggccattaagcctgctaatggtgcaaaatccaccccatatccaatccaatccacagcagctagcaatacacctccaaatcatcccaatccactagccatcctataaaatccaaaccaaccaaatccatttccctcgtgagtctaaaccgaaccaacccattcctcttttatgggcacaatccattctccgaaccattcaaacccacttcaaatccactttggtccttgcggtgggtgtcggcgacgccgacgccgccaacgtctgggacactgagggtcgcactgcaaagcatgagacgcatcgtgtgaatcctcttggagcaaggaaggacggcggggagagaggcgctcatggtcctcgacagcgctggtgtgatgtccaggggaagggggaggttgttgcgccaccggtcatcgtgctgtaggcgtattaggtgtcgcaggggcggatgagtttgttgccgccatcagagcggtagacgaagttgatctccaggtccttctcgtcaggtccggcgaggcagcaaccgtctcatcgagccggcctaacgtgaccatggctacaattgataaaaccattgctcacatcatggatcaacaagaagtcatcaaggccaagtcctccaagtgttggaatccaattcggccacttgatgcactgacgacttcaaactaccgccaaatctacatacgacctccgttttcagtccgtgagtacttgatggaaagctctcggagtcttctttccaacggatctagcctcatcaccaaactccatctcagttggcctcaatcaaagaaacaaagtgttgcgtccccaatagtgggcctatgggcatgtaacttcgtctgggaccctggcccaagtggggcccatctggggtgcgccccaatctattggagcacgaccctagggtagccttggtcgtcttcccttctctataaatagttaggtaccactccagggtttctagggttttgttagattaaagtttcgcgcgtgccggttagaccgcctgtctgcttgttcttcggaaccccaacttattgtgtgtattcattcctatttgcagttcagattgctgcttttatcttgttcttacttgtttcatcgatttgctcgcaggaatagggttgatctacaccagcaagatcaacaacccatgaagaggtgtatcgatcgctaaggcgcaacgcaacgtcatgtacggttgtagtcgggtcgtcaacgtttctctcaaatcgtagttatctcaactcgccgaaagatcgggccaatcctagccttgagtttcgagtggaactcagggttcatcacatccagcggcagagcgcggagcggaggtgcgcaccatgtctctcgccgccggcaagaagctaaggattattagcagcaagtcttcggtgaggttactgatcgtatcgtcgactactgccaccgccgttgaagtcgtctccggcatgtttttggagtctgtggaagtgtacacgtatgcgcacgccgacgccctctttctcttcctcttcctcatcctaaaaaattttccgccggtggagatgcaacaacacatgttcctgctctaccaggaggtgttcctcttcggctgcctcggtctcagctccggcggatgcgatggtgcggtggtgatgtgaccatgactactattgatacaaccgtcactcacatcaatatcaagttgaccaagtgctggaatctgattcggccatgtgcgacattgctaaattcaaatggccgccaaatctgtatacgagcttcgttttttacctgtgagtacttgatggaaagctctcggagtcctctttataacggatcctgcctcatctccgaattccatctcgtttggatgcaatcacagaaacaaagtattgtgtcacctgtaatgggcttatgggcttgtaacttcgtctgggaccccagcccatgtggggtgtgccccaatcatgtggagcacgaccctagggacccctaaatcatcctcccgtctccataaatagcttggtaccccttcagggtttcttgggttttgttagattaaagtttagcctttgctacttgcttgtagcgcgcgtgtcggctagaccgcctgtctgcttgttcttcggaaccccaacttattagttgtattcaattcctatttgcaatatcagattgcttttatcttgttcttacttgtttcttcgatttgcttgtaggaatagggttaatttgcactggcaagacaaacaacccacggagaggtgtatcgatcgctaaggcgcaacgcaacgtcttgtacggttgtagtcgggtcgtcaacgtttctcccaaatcatagttatctccactcaccaaaagatcgggccaacaacagccttgagtgtcccgagtggaactcagtgttcatcaggtggcgccatgcatggcctctccgccactgtcaccgccgctgccaagttcaggtcatgcgcgggcagtgcggcctctgacgagatgaagagaacgggagaaaagtgggaaaagcaatcggattcggtccactaaaggaatccattcagcctacatggattgaatccattttcaacccgaaatcaccaaaccaaatccagtccacaccaatccacttctttgtgtcatccaaaccaatccagtccatttgaagcagcaacccattttcgtccaaccaaaggcaatccaaattagaaaggaaaaagtacatcgaaggtccctcaacttgtcatcgagttacaaaatcgtccctcaaccacaaaatcagatatatgacatacctcaaattataaaaccgttcactttaagtccttcggtggtttgaccctggttttgtccaacatggtggctgagtcagcataggacccaagcgggccccacatgtcaggatgccacgtatcacactctccctttcccctcctctcccttcctcctcctccctctctctctctctgtcactttctatctcacttttctcctcttgcacaggctggtcgccgggtagggaggactgaggaggtcgaaacaagatttcgacaataataaagggggtggctgtcaagctaggaaagtggatgggtttggagacaaggaattttatacaggttcaggccttcttattaaagaagtaataccctactcctgtccggggatgattccgccaagtgtgttattgattgtatgattgaagaaaaaagaatcgtgccccaagaggcacacggaccctccttatataggggaagggatccgtaatacaaggtacagtctatatcctaacggaatatgggattacagataaaatacaatcgtaaccgactaggatcctgggtattttcttgacatacaagtttagaatctaacccgaatcctcataaagatattctatctatatttggtaccatatatctgactaaagtataactgtcatgcagatatggggtatccataatctccacagtagcccccgagaccttcgcagttgacgaaacaaccttctcgaaacaaaaaccagtagtccgagtgctttaattcaacttgctccagcttgtcgagtactaaaaatcaaaaactgtgaaggacgaaaataaaacatggtgcatcgagtagatgcacctaattaggtgtagcccctgactatgtgattagttgaaaaactaaacatatagtcaagaaccgagtggttttatagcgaagcacgcatggtacttagtaagatacccagccgactgcttctcaacttgaatatatcaaggacaaaaaatacaagaagggccgagtgacaaacactcaaaaggcccaaaaatagatatatttggtaggaatccgagcaagaaactcttaaaatgatccaccaaacataacagaaaatcatggtaattaatgagtctaacagcctaggctgtgacccttaccataaccaaaataagcatataacatgctaggagaatgactactgataaaccagtcatcttaaattaacccaacagctcttgtagcctaaaaaagcttacaaaaatggtataacacctttctgttgggcaccttttcatgtgcatcataataattccaaagaattattgaatcgcgttaaaaaggattttaacagcatcgggccacatcattgtgagcacatattgccaaagcaaaaagcgcctaagtccctagggatcacaatgggccgcgctgaaaacataattgggctgaagtactgtacagacccaggcccattagtactcccgataccctaataataccgaagtgaaaaacgtctcttcgtcttccccgccgagactctcgccattttccccatttcctgctacaatgcaaaactgcgccggacaaactagggttcatcaatccgctccaatccaccctcaaaaacttcacaagatttctccccgcatccaccgctccgattccccatccctttccagccatatctcgaactaaatcaatccatccagttcacattcatggcggaagaaagagaaagcttcgagagtcagtgggcgccctccgatgtgacggaagacaatctgaaggagatggtggcacacggcgttcttccagcaaaatagatcatcgggtggcgaccggcatttggtgaggctttcccgacccccgatacacatgaaatcgtggtatttgctcatttcttctatggcggattttctcttccaacttcgagatttttccggggcattctgaacttctacgggattagcttgcatcacttgaatccaaactccatagtacatattgccaattttatccacgcttgcgaagcttttctgggcattaggcctcatttcgccttgttccgccgcatattcttcctcaagccccagccaaacaaaaacaagtcgtgcgttgttgggggagctggtttccaactcagaggaaccttgagccaaaaatatttctccatgcccttcaaaacctcgaacaaaggctggcatgcgaactggttctatgttcagaatcctgagcccgcacttcccgagtactgttgtcttcctccggtttaccaggacacatggaactcattgcctatgggagatgaagctgctcaggcagtagaactgatggagaggatgataaagctgaaagaacagggtcttcaaggagagcagatcacccggcactttatcaagtgtcggttagctccaatcaaagaaagatcacgcacagcttttgagtttgatggcaagcatgatccaaatcgggaagatccagattctcttgactttaaggtcatgaaagaaagaatgtacaaaatcttttcaaacgctattgttgtcagctattcacatctgctgcccgttgtgccattcaacgcattcaaccctcctccaccggtatgcactcaaacatttcacccttcctcaaaatatgatcttgctttcctgttgaatcaattaacaatgaaagatattacacccaggaatttgctttgatgaagtcggatcccccaatcgctcaacgtcgatctccccgccaccaaactgggcaagggagcggaggaccaagaattcggtctgaacctcaaccaagtgcttctgatccagtcggccagtcagactctcgaaagaggaagctggttttaagtaacgacgaagccgatgatactaccaggcggcctagagaccgagagacaaccaagaaactaccaaaacaggctactctaaggaagaaaaccaccagtcgccctgcgccaaagatcaggaaatcttctaggtacaactcatataacgatctctcttgcattaatgtgcatccattgcggcaataacactgataatcaaatttgcaggaaaccatctgatatagatctgtctgggaaagattctgacccgactagcgtggacgcaagttcttccaaagaaaccgggccaactgccgaggaccgtccgagtgacaatcagacggcaaccgataacgtaggatccggtgatcaacccccgactggaaaccagtcggccgaagccgaagccggagttaattaggagcccccgactggaaaccagtcggatgcagggccaagccaagagattccagaagtcggagctcaagcaaacagccttcgcggtcaagacgccagcaataaccagagatctggatctcctttaaaggcatccaaatccactcgtcctcgtccagaaatcattacgggtaaaacactttgtctgaaaccatgtcgacccaaataactctgaccaattgtctaacctctgtcagtggatacattagggccaatgatcagtgatgaagaagaagttccccgcatacaagcagctgagggttcacgccctccgattctggtcaagtggtgggatgacaacatgcagcctcatgggatcgtgataaataagcaaaaagaggacgaagagttatgcctactgaagaaggcacttggtcaggcaacccgtatggaaaatgtaagccctctggtacctgatcttgaccatcttgtttgccatttaatccatgcgctaattaaactgtcttgcagaggattcatcttaggaacgaagctaaaacggcaaccttagagaggctagtccctcatctcgggaccctcgaagccaccaggagtctgctgcacgaaacaaaagagcttgccaggaaaaatgagcatgatctgaggaatcgaattgccgagctccaggaatccaattttgaactgagtggcttatcaaaaggttcgcacaaactctgcccaactgattcatactgttatctttgtgatcttgatttacagtaatcaatgtagtgcaagctgccaagatatctcagttcgagaagcaaattcaaactctggaaaacgacaaggcagaactggcaagacaaaaagacctggctttaaaggaagttgaaggtatcaacaatcaatacctcaaaagccattatcttccatatgctgacttattaatttgagtctgtcgatgcagaccgcaagatcaaatctcaagctcaattcgacgtcctagttggcaagatcaaaaaacttgaaggagcccgggatgaggttgctaacgctgctgccccaatagttcaagcgatgttcctcaataacaacggccctagtgcacttgatgcttctgaaattttcgacaagctgagagttgctccggatatatatttcaagaacatcaaagaagctggaagtatgggagcaagcatggcattggcgatgactaaatccctttatccgagagttgatattgacgccattgatggctttgcagacgggacgagcgaagaagctgctcttgacctcatcagtaatgcgcagaaagcggctgacaaaattgctgctgatgtagttgagagatttcaggacaccgatcttcgaccgactggtcttgatatttctgatgatgaaaagactgatactgattaatgtactgataatcttgatgattaataatgatggaggcacaatttgtacaatactgatgaatttatgctgtgcttgatatcttaacttagctcctgatttcttaaaagtttttgtcaaaccttgttgagcctaaaacccgcaaaagttgttaaaaaactttcagtcctcattgactaagccgagaaatcgaacagggcaatgatacatcaagtaagcaaattgaattcataaaaatcacactccattattattatagtagccccctgactgaaaacttcgaggaaaaacttgaagttagcagtcaaagaggaaagatacaaacgaaatgcctaagtgtaaaatcgacgaaggtgttcaatattccaagaattgttgatgatagtaccatcttcgcgcttgagtcgataagaacctggccgagtgacttcagcaattatgaacggtccttcccataagggagataatttatgccgatcctgtgttgtttgaattttccttagaaccaggtcaccgactaaaaaggctcgcgatcaaacatttcgattatgataacgacgcaacccttgcaggtatcgagtcgattgaattaaagctgcttctcgggcttcttctagtcggttgatgtcgtctactcggccctcttcatagccctcctcgttgaagttccgaaatcgtagtgattcaaattccacttcactcggcaacattgcttctgcgccataaaccaaaaagaatggcgactggccggtagcccgactaggagtagtgcgtaaagaccaaagtacggacggcagctgatctacccacttgccagcataggggcgtagtcggtcgaaaactcgtgctttgatcccttgcagtatcatgctgttagcgcgctcaacttgtccgttactcatggggtgtgccatggaggcataacaaattttaatgccgaagtcttcacaaaagtctttaaatgttccgccagtgaattgagtgccattatcagtgatgatccgattaggtaccccaaactgatgcacaatgttgatgaaaaaatctctagctttatctgctgtgatcgtgataaccggtttagcctcaatccatttggagaatttgtcgatagccacgaagagatgtgtgtaaccgccgactgcccttttaaatgggccgaccatgtcaagcccccagatcgcaaacggccaggacaacgggatggtttgcaactcttgggctggtaaatgagtttgtctggcaaaaaattgacaaccttcgcatgtccgcacaatcttatctacatcggacacagctgtaggccaaaaaaaaccttgccggtaagctttgccgacaatggtccgtgcagcagcatgattaccacaaataccagagtgtatatccttcaacaattgtttcccttcctccaaagatacatagcactgcagtattcctgatggacttttcttgtacagctcagtctcatgaataatgtaaagtctgctgcgcctggaaatccgctcgacttcatttttgtcttgagggagttcttgtttgctcaaaaactttataaacggttctctccaatcggcttcaagcatgcctacgccttgagtatccatggcttcagttatctcctttctgggtacggtcggttcgtaaagatgttcgacgaacacatctgaaggagctgcttccagttttgaaccaaaattggccagtctgtcggctgcctcattattatgtcggaggacatgggtgagctcgagtccgtcgaatttatcttccagcttacgtacctcttgtcggtaagcggtcatattaacatctagacatgaccactctttcgtgacttgattaacacccaactgagagtctccacggacgattagtcggcgaatacctagagatattgcaatccttagtccatggagtagggcttcgtattccgctacgttatgggacgcagaaaaatgtatccacaatacgtagcttaatctttctccagtcggggaaatcaagacgaccccagctccagtgcctgtaagcctcttcgacccatcaaaatgcatagtccaatattccatcttttcctctggcatgtcttcttggcactcggtccactcggcaaggaaatcagctagagcttgtgacttgatcgaagttcgtggtttgaaagatatatccaaagacatcaattctaaggcccacttcgcaatccgcccgtttgcttcgcgattatgaagtatatccccgagtggaaacgatgtgaccaccgtgaccgagtgactttgaaaatagtgagataatttcctgacggtaattaagacaccatataataacttttgaacctgaggataccttgtcttggagtcggctaaaacctcgctgacaaaatagattggtcattggactttttgaatatggccttcctcttcacgctcgacaaccaggaccgtactcacaacttgggaggtcgccgacacatataacagtagcggttcttgtggatgcggtgaagccaatactggtggagtggtgaggagtttcttgaagtcttcaaaggctttttgtgtttcgggtccccactggaaatcgtcagttttcttcagcagcttgaagaagggcatcccccgctcgccgagtcgtgagacgaaccggctgagcgccgccatgcaaccagtcaacttttggacgtctttttgggagctcggcggtttcatgttgaggatggcgttgattttctccgggttggcctgtatgcctctctgagataccataaatccgagcaacttccctgatggtactccgaagatgcacttttccgggtttagtttcatcttgaaagcacgaatacttgtgaaagtttcttctaaatccgcaatcaggtcatccctctacttggtcttgacgactacattatcaacataggcttcaacattgcgaccgatctaagttgaaaaacacctttgaatcatgcgttgataggttgctcctgcgttcttcaatccaaagggcatggtgatgtagcagtaggccccaaagggtgtaataaacgaggtcttcaagtagtcggattcttttagtcggatctgatgatatcccgagtaacaatccaagaagctgagtagctcgcagccggccgttgagtcaaccacctggtcaatgcgatgtaacccaaaagggtctttgggacaagattttttgaggtcggtataatcgacacacattcgccattgccccgtctttttccgaaccaggactgggttagccagccagtcgggatgaaggacttcctttatgaaacctgctgctaacagcttggttaattcctccttgatcgcatccttcctgtcttgtgcaaaacggcggagtcgttgcttgatgggtttggcgtcttccttaacatgtaaagagtgctcaatcacctctctggggataccaggcatatcggatggtttccacgcaaaaatatctttattattctgaagaaaggtgatgagcgcgctttcctatttacaatctaactcagcgcctattacagcagtcttatcaggatcggagggatctaggggaatctttttcgccttggcatcactttcttcggtctttgtcagcttggttgcaggcacttctccctcgcctgccgtggttgcagacagtcggatctcttcgcgagcaagagtagtctcgtgggtttgggccatctcgtagctttctttgtcgcatgtgacggcctgcttgatgtcgctccgtagtgatatgacccctcgaggaccaggcatcttcatcatcatgtaggtgtagtgtgggacggccataaatttggctaaagccggtcgtccaagtatagcatgatatgctgtctcgaaatcggcaacttcgaaacaaacattttctgtgcgaaaattttcccgagtgccgaaggtaactggaagagtgatctggccgagtggtgtagctgacaatcctgggataacaccgtggaagggtgcattactcggctttaattccgtgcgaggaatctgcatatcgtccagggtcttagcgaaaaggatgttgagtgcgctgccaccatcgatgagagtccgtcggagcttgacattgcgaaccactgggtctagtaccagggggtaccgccccgggtggaccactcggtcgggatgatccgagcggtcgaacttaattgctgtttctgaccaccgaagatactggggcgtgttaggctgaaccgcattgatctcccgttctgttagcttctgttttctcttggactcataagccaggggtccgccgaagatgtgattaagttctttgcgatgatcttgaaaaccagtcggggcatcatcttcatcatctttcttctttgatgtgccctgatctccgtctgcaggtttgcgtgcgttcttgacgtattgctccgcgaactgtttgtagacgaagcaatctttggccacgtggttggaattgggatgatgcggacattgagagttcattatcttgtcgaaggtgttgacgcggggacgttgtcgggaagatggagaggtggtcgccacaagttcttcgggcttacgcttgcgatccttgtggttgttatttccactccctcctgcagtcagcgtgtccttctttggcttccaagtggtgcccgactatttggacgcggtgatagcatcttcggcttcggcatactcgttggctttttcgaacatctgcttaaccgtcctgggaggtttacgtccgaacttactgactaggtcctcgtggcgaatgcctttagtgaaggtggcgatgatgacgtcgtcggtgatgtcggagatcttgttgcgttgctcggagaagcgtcggatgtaatctcgaagggattctccagacttctgaatgacgttgtagagatcaaactgtgtgccggggcgttcaaaggtgccctggaagttggcgatgaagtgatcacgaagtttcgcccatgatccgatcatgccacggggtagtccgtggagccaggatcgggcggagtccgctagggccacaggtagatagtttgccatggccttgctgtctccacctgctgcgcggattgcgagtccgtagacggtgagccaagactccagattggtggtgccgtcatacttctcgattccagtcggtttgaagccgactggccaatccactcgacgcaggtcattagtgaaggcagctactccatccacgtcgtcgtcgtagcgatttggtgaatgacggtgacctcgtgctgcacggcgctggttgatcgtgtcacgaaggtcgacgggacgctggcgaggtggagaacgaggccgttcagctcggcgctccctgtgacgttcgggaagcgagtgaacagatcgttcgtcgtgacccctgctcctgcgactagatcctgtgccggtgatgctgaggcttggctgatgatgagggactcggctaccagtcggggtgcgggtgcttgcggagttggctggaaccgaggtagcgatcatggtcttcgtctggttcaagatgttgacaacatgatcggcttggttgagggcgtcttccttgaggagggtgtcgaggagagtgattgctgcaaccacgttctgctggggggtgcgaaagaccgctgtcccgtcgacgtcttgttgcccaatgagctctctcgctcggcgcccagataccaaggcgcggtgccgtcgatcttcagcttcctttgcaatccgttcgcgatcttgttgttcacgctatagtcgttctcgctcctgtcgctgtcgctcctcctccagtcggcgacgttcagcttcttgccgtgcgcgatcttgttctgcttctcgggctcggcgctgttcttccgtttcgttgtcagccatgaatacgccgaagaagaggggcgtgtagttatcctcgtagctgtcgtcgaagttgtcgaagtcgccatggtcgtagtggtagccgaagtcgtcatagtcgaggatctcagttggtcgggaactgacgccgggggagctgaggtagccatccaactcttccgtcgagactgtcccaagaggttggagtataacgccaacctccctggatgtagactggatcggggccggtgccggagctcgcctagatctccgagtgggagatgttttggctgtgaagacggcggccaagtcatcaggaagtttcatcaagattg

SEQ ID NO: 21796 - DNA, 2123 bp, Oryza sativa
ctgctgaatcggaacgcctgcccgggaggaaggcgaagttgttgatgccagaaacgaaacccatcgtacttagtcggcgagacgcctcccctacctggcgcgccaactgtcgaaacaagatttcggcaataataaagggggtggctgtcaagctaggaaagtggatgggtttggagacaaggaattttatacaggttcaggccttcttattaaagaagtaataccctacttctgtccagggatgattccgccgagtgtgttattgattgtatgattgaagaaaaaagaatcgtgccccaagaggcacacggaccctccttatataggggaagggatccgtaatacaaggtacagtccatatcctaacagaatatgggattacagataaaatacaatcgtaaccgactaggatcccgggtattttcttgacatacaagtttagaatctaacccgagtcctcgtaaagatattctatctatatttggtaccatatatccgactaaagtataactgtcatgcagatatggggtatccataatctccacaggaggactgaggaggtcgccagggtgagacgagagaggaggtccgacggagccagcgagttggttgggggcgagccacccacctgaggacgagctcccgttggttggggaaggcggcggcggggagctcccatgcgccagttgcttaggctatggacgtccacgaattggactgcgtcgttgacgttcttgccgccgccgctgtcgtagaggcactacccttgaatccaatctatgtatagcccggccggactaatctcctcaagccgtatacccacgtcgtcgatcaaccatggcgtcgtcgatggcggcagccgctgctgcaggcttgtctcttgcgccgaccgcgcgcgtctgcgcggcggcgccgtggtcctcgcgcgccactccctccggctagccgtcgtgcggcactggccgtgtcgctgtcctcgccaccggccgcatggcggcgccgcatcgtcgtctccagctgctacgatcatcgtcgacaaccatgcgcacgcgcgtgccatcctgcatcgctagcaatgaccacaaccactccagcagctccaacgtggaagcggatgagaggttggcgttgtgggcggggatgagcgtcgatgagctcgcggaggtcaggaacgcgacgccgccgtggttcccgagcatggaggagatcatggagttatcatggtagttattctcgtcaaggacatccacaaaaataatacttggtatgcgccgtcgaagtagtcagaccacctgagctcgtccagcacgccggcatagtggtccatcatcgcgaaggggttggcgtgtcctaggtccagccacggcaggttagtcgcagcgacattggcgctctgctcggcgtcggtcgtggcggggctgaggctggccatggatgatggatgtgagcgtgctggaactagacgccgaggggacgacgaccgccagtggttcgccgcatccggccgtggcctgctcatgctcaggcgtggtggtaggcccgagagcgtcgtcgtcgtcgtcgtcaatgagggcgctgtcgccatcccgttcccggcgaccgccaccgccaccgccgcaggccagtagtcgtcgagcggcatcttggcatcttgatgccgtccaccagctacattgcacccacgagcggcgcctgctgctgcacggccgccgttgccgtagccgtcggtatcagcctggcgtcgccttcaggaatcaggagcgcgcgggcctggctctgtcgttgccccttctcccgcgtcatcactgccgagcggcggttccctcgctctaagaggagaaaagtgagatagaggaggaagggagaggaggggaaagagagacccagatgacgtggcatccttacatgtggggtccacgtgggttccacgctgactcacccgccacgtcggataaaaccggggtcaaacccacgaataacctaaagtaaacgattttgtaagttacatctggttttgtgctcgggggacgattttgtaactcgattacaagttgagggacctttggtgtactttttccaattagaaaccagtccatttagccctttcccatccagcccattag

SEQ ID NO: 21797 - DNA, 2390 bp, Oryza sativa
tgttttgtttttgtgcacataagtacgtacgggagaagacatcgtataaacctgtacgtacatgacaacagtagtagctcttaaatcatatacagagaaagttgaaattttttaataatagatataatccaatggtataaaataacgggtccaccaatttaagtgaaaatcgacggtgagatttgataatgccaagtggcagcctatgagcgtttgtagcatgccatgtggcggtttaggagcgtttgtaggaagtttaattgacttttagtatataatagataatagatagatagatagatagaagattgcatacttactgtatgaatgtttcgttcttgtaaattttatcagtgatatgcctcacaatcattaacacattatcagtgtactgcctgctgccactctgattcgagtcaagtttgttgtgcagagcactgctccagttaatatacgtagttcagtaattaatttcggaggtcaataatatcgtcataccacttattgtgcttcttgtaagtgtcacatggagccatctttgttattccaatgatattggcccaaatcgatttcatcaaatttcttggaacatgctcaaattttaagtggggtattaccgtattagtgggaaatgttcgatctttctatagatggtgctgggtacatatcccaagtggtgatttgttgctgaaagtgctcctccttttgaaagattgtgttttcagtagatgctatcactgaagaatcatttgatgttttaggtttttagctcttagcattatctggctgcagttgttaggccaccttgatttgatgtagatattagcctgtagccattatcatgcaagatctaatttgttgtgtattctcagagtttactgtactctcgatgctgtaaccgtcctttcttctgatttcttttagagatattaaatgttaagatcatttcagacttgcattctgtgattgctttggttactgcaactttattagtgaacagcaccttgctgtaatcttgctgattgaattctattttgatgtgcagagtattacccagttcagtaattaattcgtgagttgctcaatggaagttattctagtcatctcactcgttttgcttcttgtactaggagccatctttgttattccaaaatccaacaacaatggtaaaagttgcatcaattgcaatatttagttttagttgctttaaactaattggcactgactaatgtaatgcaggtaaagggaaggaaatacaatcaccaaacggtggaatggtgaatttctttttctatatttggatagtgtagttttctgtaaaagttgtacatgtaattttatttaacaaaaagatttatctcaaaaaaaaaaaaaaccccatgaggcttcagaattcagaataagctttctgtttattgatctaaggatacacttgactcattgttggttcattaaaagtacactccattctcactatttgcccatggaatttcacattcagaaatttaggagctatacaaagaaagaggtatcgactcacaacacaaggaaggattgttggatcatagtcaaggacaaggttggaagaagatgatattccagttttgcaattgattttgtgtaacaaaactatgaagtttgaaattggaaaatttgcactattttgtctgatgattgctgatttcgtgattgatccaggtgtatgacgtaacctcttatgtggaggaacatccaggtggtgatgaaattctaaacaatgccggtggtgattcaacagagggatttttggggtctgtatcttatcacctcaattataccatactatgtcaatattgttcttgaatcttttctggagcataatactatgttgctgctttagcatgaatcgcagaagtgtctcatgttactttgctgcatcttttccgaggtgaaatctaatttagtttttatagtaacttactaattgacagggctagacttatggatccctgtttactccatcgaaattactcaattgactaacatagtaaatgttgctaatgacatttataattttctgtaacagcaacaagcaaaggcaattacgctcttattttacctgtcaatgaatttccattctttctggtgtattccaatggtattgtgcaatggtttcctgtgtttgagtactggtcatgtatttttgtcatcattgaaactatttatgctcagcgacatacacccataaatccatatccgtgattttagggacatgtggatgttactgattttaatacatttaacattgaccatttcaagaaccaaaaagaaaatctagatgatggatgctccaaagggtagtgttactttctcaactgcgacactgaagggatctttcttctcatatcatt

SEQ ID NO: 21798 - DNA, 1416 bp, Oryza sativa
tacgcgtcatttttttatgactcaggtaaataaaataactcttacgcgcttttcagaccgcaacatggctttagagtcttcgagatcatcgaagatttctgcatcggcaaactgaaggactgatgatgatagagatgagaggctcaggaatctcccaaatgtgaacccttgcgttccacggatgttccttgaaggaatgaaactgtctcctgcctgtgatgaggactggccccaagctctgtggttctcatttcatctttgacctggcactcttactagtagcagtgtttggaccatatggactatatttatgtgagttcaatctcaatgttttcgtcgatttatctctttgaaaagatatgtttccttagatttatggaactttctcagataagacaacgaaatgtgccaacttttgtatttattgtttctactacaatgacaatgatatgcattttttacttggtccaattctccccctggtcgtgtctgaggattacacggctattgggtttcaggaaacacgtttggaattttcatgtgctcatgcttgtgttggtgaagtaatctgggtggctacaataagaatattttttttcaagatctagtccatttttcctgatgagaaaatcaagagtttgtacaactattttggttcatttgtcctgatgagaatcatgatattgtacttcaagagtataaaactgctgacaaaattatattctttggatgctcagaacatgatcaagatcttattttccttgacacaaatcaataataataatactaataataatacaaagaaacactctcatttggggaaaaaaaagagagaaaaattaagtactagtactactatttctcatctctattgacctaggaagaaagcttctgctcttcttccctcctctgttctttcatggcaacagctaaagaacagagggtggtcaccatgaactgcttctctagtgttcatcagctatgtgaggatcggatcgggttggattggattggattggattgggttgagtttggtcaccattgatctggttctgttcataatctcatgcgaagaagctggtgatatcaatggtgaatccggggtcgaactcgaaggcgtcgagggcggagaggtcggcgtcgaccatggcggtggcgggcgccggctgcgcggtcgccgtcgtcgtcgtcgcggcgacgagcgcggacaccacctcctggagctcggcgtcccgccacgcctcatcgccgccgccggccgccgcctggtggaacggcgcggcggccatcgagtcggaggtcgccggcgaggccgccgacgacgcggcggcggcgaggcggttctccggcgtcgacggcgcggagaacgggttgtgctgatccggcggcgccaggccgctcaccggcgacgacagg

SEQ ID NO: 21799 - DNA, 3616 bp, Oryza sativa
tccggcttgccggcgccggcggccaccgccttgtggacgcacgtgtgctcgccgtggtagatcacgtcgaacaccgtcgcgtcctcgtcggtgcgctgcacctgcttcgtcgccatgcatccctgcgagtggcggtgggtgcaacggtagtaacccctgaaaaaaaatgtttttagaaaccttgcaatcgatcaaagattcttaaaattcttcagaaaagtttgtgtgatttcgaaaacaatcaaactaattggcaggattatttgacaacacatccaattagatgcatgcaaacaaacaggtggtcctatgatcctatctgaatttctgacaggtggagtccaagcatttgagaacagaggaaaggctgcagctgctttcaccatgataaagaaaagacagccacaaacaaccaaaccaagcaggaaagcaaagcagatatatctttgatgatgccacagcacaaagcttatgaaaaacgcatgtgcagattaggctatgaaaaaggtggaaacaaacaccttttttgtactgaaatattggggggaaaaagtagagggaaatcagaaaaataccaaccttgggtgcttggctccaagaatctctttctgcccatactttctccagctatggccatcatctaccggtggattctccacccctcccgtcgagctcaccctaatctgatgcctcttcttctccgtcgacgtcttcctgcaaaaatcaatcaaaaaaattcgaaacaaacaaaaaattaaactcaatcaatcattcccccaaaaattcagctaaaaatgaacatgaacaattaatctttgtatatattcacctcttcttggtggccttgaaaggcaagtcggagacgtcgctgagggggctgggagtcgccgagtcgaggtcaccggcggcgacagcggcggcggagcgcttgcggtggccgtcgaagtggccggacctgatcatgccgatggagcgctcggtgacggagaagatctgcgaggccaggtgcttgcagaggtcgggggagccggagccacccaggtgtccctccagctgcctcacgagctccttgatgtggctcagctccgtcaccaccagccgccctcctccattgccctccatgctctccatcacccctcaacccttgatcgatctcttcctgctctcaccaacctagataaattgctagctagctagctcgatcttgcaggttgcagctaagctcgcttcgcggtacaagaatggcaagaacgaccaagaagagtgatcaagaattgggtaaaaagatcgagatggcgagagtgcatgtggagtgaggcgcagctgccaggggagctcgagcttataaagaggaggggaggaggggatcgagaggtagaagaagaagaagaagaagaagaagaagaagaaggggattggagaggtgaagaaaaagcgcgttggtggtgagtgggggagaagaggattttgaccggtgagagaactagatggcgacggcgagagggggttctttggatttgattggccaacgccatgtcggatcgatcgggctaagctacattagcttagctagtggacagtgttggggtgatgcaatgatccattaaacaaattttagattagtggagggttgtacccaaaagcgtcagcttggacactttggtttggaacaacatcaaataaaaaaaaaactagatttgaagggagatttgtacctctaaatatgttttaaaaagaaaatgtaagtgtattggggattgaacatgcgatctcgatgttaaaaccacacacctcttgcaactgcactatcaagtgcaaatcaaatgtgtatatatatatatatatgttggtggaaatacttttgtctgttctactttatttctggatgtttcggagatggtttgtaattaaaatgtcagctacaaagtaaccatggattaaattatgtggaagatagttttgtattagcacatatgtttgtgagcttgaacctatgcacaaaatgacattggttgtccgtaaattatttgtcattgttttatatatttttcaggtaaaaatttgatatatgctgcatagataccacaatcaactcgataatgtaatggccccatcgtttggcttttcttttaataagccaaaacggcttattagagaataaaaataaatttgtaggtaaaacttttatatatatattctcggtgacttaaaagccaatgctgaaaaagaaactacgttgaaaatacctcaaaataaatatcaaaattaagtttgaaaattcaaattttggctttttctttggctgaataggctattcgataggagcctaaattattgttttatatatttttcaggtgaaaatttgatatatgctgcatagataccacaatcaactcgataatgtaaattaagtgtggaggaggactaaagtccaaaatagctaaactaaggctagttaatttacttgggcgagaagttcactgatgatattatacgattctacgtggacacgtacacacagccctttgccactactcaaatctcttgtctttgtttttttgttttttggtggcatcacatctaaaagaaaaaggttattcgatatacaaacgacgaacgctaaaagcctatatatgtgacatattgcgacgctgtccagttcatattgggaatattttcatgctgtttcagttagacatacatctctttcaagtgctctggtcggtatatgtgctactggctcgttttttttttcttaaagaaaatgctagtagctttgttagttgcatggtgcttttttttgggttgtttctctaagaccttcagttgctatcatttcactctgtttcacactgaaagtactgcgtccattcattcattgtccgtatgaaaatcagtggaggcttttttttcctcatttcttgtctcttttacacttactgtgcctagtgtttattccaaattaagggcaggtaaattgtaccttttgaaaatgaagaggatcttattgaagttatgtatacgtatggcatctggaatgtacacctggccggccgcctgatgttgctgtatcatgagcacgaaggctaatgtcattcagatagtgatgcttaaaagaattgatattgaaacgtagggtagtatatatgatagaaacgcatgtgcactactaattataattaagtagtaccttttggaaatgtactaatatatgatcagttcattgttgatttgttgattagagcggaaagaaaaaggaaatttattgatacccaaaatatttttgttgtatatatatatatatatatatggtacgcgtggaattaaaacaatgaacgaattatttctgcataagctagaaataaccatgaaagcaaagcagcacaacatatcactaatgtaaaactaacccggtttaaaacatgggaatttttacaaaaacttcacacgatttttccaaatatccttttttctgatatgggcaaatattactacaaaatttcaaatgtgtgcgcgccaaatcctagtactctctatagacgagtcaaacacattcaaataacacttatttacaagtaaccatgcgtactaaattaaggctcgtcgacaagtaaat

SEQ ID NO: 21800 - DNA, 7528 bp, Oryza sativa
ggattttctttttaaggagaagaaagcacataaaagcatggagaatttattttggtggtagtatacaaatggaatggaatggataattgctaactctcagtgtaggagtttagcatttgcatatatgtgggtgtatgatcttgatcatagagcatgagaagtatctacacaagtcacaagaatttgataaagttcgatggaatagcaagtaaccaaaatttatatggtttaatcaatgaagcatatttttggctctagtaggaatttatatcaaatgaggaactttcaaatttatcatttcgaaaaacaaagcatccggaattcaagtcaaactaggactaggatcatagcaactcttatttactatcacatatctcacaacaacttagactcagattagcaagtgcagctcatttacctcaggttcctagataattgttggctacttatatttaatttttgagagagcacttacctatgaacccatatatgagagatataaaacaaagcaactattcatcatttcaacaaagagaactagtttgtcttacctagcatgacaaaaccttacctatctttttggtattttctattttgcaagtttttatgttgttttcaggtttataggatgcaattagaaagcaaacatgcaattggaaagggaaatattcaatatgatacaagttacctcagtggggggagagatgtttccccacaagcttggctttcgctcagggtccttggtaaggattgaacccctgaaagcggaagtatgtttgaaggtcatcgggcttttgctgcatcaggttgttgatgttggtgaactgagcatcagtagtttgttgccattcttgcgcttgtgctatgtgttcctcgaggttgtattggacctctcccatatgcatatcaagggtattcattctccgggtgatttcacccaagtcccaacgagaggaacttgagcgccattcacctggagatagaggcataccacttgatctgggggttgattgctcatgtccccccactgtatgtcatgaggcacatgccgtaggtcctcattggcacttgcccattttgagactccgatgctgtggcgtggagcttggctccatccggttacatccccagtcagctcccaacctgcctcatacgtttgcacgggtgttgaggatgatgaaccttctcgttcattccttgccatgttgcatatctccctgtatgttcgacctacacaagattcttctatggtctgcaagggaatggttagttcatggcagttgtagaaatgataccccacattaggcaacgggaattcatttgtacaatcgggaaaaaagtaagtcaaagatccatctactccatgtttaagaatatgcctttgcactagataattctcatcaatacagggacgagcggctgagatataagcaatctggtcattgacgtcccctagtcccttggctatccgagtaatcaaagaactgcactcaacaggagcagaaaatcttatactttctaaccattgccttatcatacatttcacagtagcaactttgatcttcctaaccatggcaaacatgataattaattcatccccctaatgggtctaagatcacttctaggaaacaaagtcatagcaatccatttgtgcataagcctaagtgtaggattatgaatatcattcgtcctaggtttcttgcaaattggagaaccataaatatcttcccaaaacctatttttctcaaacgcagaaattcttttctgaagatcgattttacaggaatcgtgaaaatcaagaagtatacttaatccttccatgaaagtgtgtattccttatggaaaaagcgaaaggaaattctatcttctatttctttcaaagtgcacatgaatcgcaaagtaagcgaacaataaccaggctcatctaccacagcaaatctctgccaaccaacaactttccagatagcacgaaagttagtatccatacctatcttttccaatagctccagagagtattctcgcgtgtgagtatactcccggtctcttggcatgtagtaggcttgtctttcctgatcgtcgacaaggtcgaagtcggcatcgctcaagagacgttgcagaatgtcggcatcctccatcgagacatcggttgatgaacgagcactagactcatcatgatgacttgatgaagggctggatcccttgcacagacgaggcaatcgcttcattctgcataatgaagcaagaacagactaactcggcgggggttagtatagcaagaatttcacccgccggttagttttcaccaaagcaacttttatgtatgcgactaagtatttgaatttgagggaaactatcaaagcttgaatgaatttacgagcaaagtttgaagagggaatgaaaatgaattggaatggggtgcattcccctctcacagctggccggcttatatagggcagccacaacggtcaaaaatgacatgtgggccccttagccgttaccctgtcaaaattggtaggtagccgttgcctggctggttcggccgaacctctggtgggcccaaccggccccacttttggccattggaatccaacggttagtggggtcgtggcatagtgaatttttgttgaaaattttattttggtttgctctgaaaaattcatttgaaagaatttcttcaaaattcaaaatcctaaatgcaagttttgaaattcaaacatgtgttgatgcaaaaattcaaattgttgaaaataaatatgcgaattcataccaatttacctgttggcgaaggtcgcgtcattttgggtccgacgtgcaagaccgtacctcctttcagtttagttcacggattttccacccgtctccggaggggatggagcgggtgtctttggcttttccttccacaccttctttggttttggtgcagaagacggcttcttttgagctggctgctcttgctttttggccggtgtactgggttttaccggcgtcttctaataacggttcctgggaaacgctgtttcattttccagcaaattctgcatgaacttcaccaggctgtccgtctcgggtggctccacttcgacctcttggatgttttgcaggtttggcccatacttgattctgacactcaaacttttcttccttcccgttaatatggaaacggatactccccgttcccacgtcaatgttggctcctacggtgctaaggaacggatgccccaagatgtcgcgtccaggtagtcacgggacatgggagtgagtccattatagatgttttacaagataagccagtcgtccatcccatgatgaggacaggcggccacatacttctgaagtcgttcccacgcctcaggaatggactcatcccccgtctgctggaaacacgatattctcccacgaagggcgctggttttgcccatcgggataacttcgataggaatgccgtagaacatttatcccaggtgtagatcattgcacggttggcatagaaccacagcttcgctttcccaagaagggaaaacggaaacagccacagcctgacggcgtttggactgacacccttcatggtgtatgtgctgcaaatctccaggaactgttgtaagtgagcattggcatcctcattaggtttgtcgcagaacaggctagcctgcgccatcgtgatgaggctggacttcagatcgaaatccacttctcccaggttgatctgcggcccaatggccacgttgtcagctgagggagcaacaaattcatggagggtcttgtgactcttgtcagccatattctggaaggtcggtggcgctggtatggctggtttctttgtcgggagagttttctgcggagcgacgactcgcggcttgacgctccggaaaaaaagcttctggattttctttaaagttttccggcaagttgaaaccagtcatgcaataccgtgtttccacaacaatagtgaaaacaaccaaggttagcctgcaaaggatagtgattatgtagaggtaaatataaagtattagttctggtaatctctattataattctttcccagcaacggcgccagaaatgattgttggtatttcttagcgacattactaggaatataattcccagcaatggcgcagaaatactcctggtatattatggttacagagttcatccgcaagcacacggatataccattgtagcatttcaccagatagtattgcaagggtatcgtatttatttaatcccgtgggaagatcatagtgagagaaccggactaataatttagatgttacttgtaataataatagtctaagcaggagttaagataaatcaaagggtagagtgacacacaagcggggaactactcattctcatactaaaatatctaagctaagtggaaagaaaatagaaagagaatcgattcttatacttctagtatgcatagtgtacacacattctagttatataattaagtaactaataccctctatccgatgccctcttgttacttcgagaagccacccctgactgccgagttccttacgacagcccgtcgtgaccatacaaccggggctaaatacggaggagtatcgtccccaagaatttaacttaggactatatacatgcgcggaggaatacccgtactgagctttcaccatcagtggcccacctctcatccgcagcatataaccccaaataatgatatcccgtaatctagacaccacgcctaagctaccagatactactctaatatcatcgtcatgacatagagtaattgcataagcaaactttatacccgtaccaatgcatctcccagataagctagcagtataatcagtataacatgaacaaatgtaaagttggcattcatatactcagaaagtatttcaataccataaatgtataaggacgagtatattctaataaaagtacaaagtttacaaaagaggaaaggagtgttactagagccatacccgaactcttccgaaggcatccggactccgatttctactctattcctactccactagcttaagaacactaagctaaacttgagagaatatgagagagctttgcttgaggtgtgtgaatgaattaagaagaggaggtccttaaataggctgccaatgacggttgtggcagttggaatggtcgatattgccctccaaccatcattggggagtgatccacgccgtctagaagaaaccctgcatccaacgttgccaagggggttcggccgaaccaggggccggcccaaccagcccggtttttggctagcagcctcctctgttgcttctcttcgcagacttgtgaattttgacccaattcatcatgtcaattttgagttcttggcccattcatgcataagtctgattctcgacatcgtccgattgatttatcgactgattggatgttgattctcctccactttatggttattctctgcaaaaggttagtgaaccaaatactagtggaatattattattctaacgtgaatatgcattgcaagcataactagttctcctctattttggtaatattgatggtcgaaactgatcgcaaacgaccgtcaacagcctgtttgcacgacggcagggcaggagcaaagccactgagagcaccaaccacctcacctgtcctcccaaagctgaacatatacatacacatgatttgatatttttttcttccccgttgcaatgcacgggccattttccagtcttttttagaaaataaattctgcttccacccaccgttttcattcgttcgtctccccaattaagtggatcactgtcgtccacgtatcactactaaaaaccgatttttgtggacacactccctattttatacaagcggaccaaaagagcgtccacatgcaaaaagatttgcatgctatttggttatgagttatgacccacatgaaaaaaaaatcaaatttcacatacagacctcttacgaaacccgcatggagaaagaactttctgggcctcctcgttttcccttttctttttaaccgtccccccgactcccttctcctctacttatatctcgctccctcacttagattttcttcccctctactcctcccccctatgcctcctctacttctccctccttcagatccacaaagggagccgatggcggggtagcgatggcggtccggtggatgtggcaacgacagtagtgggcgggagggcgaagctcgaggccagtggatctggcggcaccgccctcgagagggtcggatccgtagcactcggtcccgctatagctcgagggcggtagatctagtggctctgcccttgggaggggcggatctgctgccctacgcccgggggtttatggcgaggacaacagccttgagctcgagtggatgagagtgggagctagggttttgggatttcggtttcttttggaaatttttttgttattttttcttttcgcatgtgggaggtttaactgaccgcccgcgaaaatcatttttttgcatgagggagcgttgcccgcatgtaaaaactctgattttcacaaatagttatgtgcatgcggacgaagtgcctgtctgcgaaaatacattttggtagtatggaaaaagttttctgtagtagtgtatacagccatgtccgatacaattccatcctctttctcatcactcacgacctcattcgtacgtagactaagaacaaaccaaagtcacaatcgatctgcccagattgacacggctgcacatatgagtatgtcgagtaggaggagaagctgctcatggacgggttccctaaccaatctctgctctgcacgcatgtctcgcaagaagccaagcaatggccgcacatcgcggtatcacctcacaccgtcaagcattcaccccgacaaacatcgagaatctccctttgcttcacatcatgtaggtaagttctttttgcacatcgacgtggcacggccgtgagaattaacgcaaagcgtggatgaataagtgcttattttctctgtagagtatgatgggtttcggaagtttgtgtctaggttgaaccgactatttaagatgatttcccgacgaactttaaagtatgattgcctaaaatattttgaagagcagaagctagagctacaagatatgtccagaaactgtacttctaatgtttttgtgcagaaactgtacttctaatgtttctctaacaatggctatgtggacctcaaaccagactagaggatatatatgtataacgtggcactttattgatgctgattggaaggtaaaaaaaagatttttaaggttctcacacttaaaaacattgcacatggatgttgttatattcaatacaatcctagagaccatataagattgtattgtgaagataaattgttttcatcactttggataatgctaacaccaatagtgcaatgtcgaagttattgaaagctaacgttttgcaaaagggtctactgcatgggcaagggaagctattacattaacattgcatgtcacatgttttgaatttaatactctattgtaatcaacatccatgggagcattaagtatattaaaggataa

SEQ ID NO: 21801 - DNA, 1084 bp, Oryza sativa
catgcatgcttgtgcttattacagcatcaacgaatttggataaagaggtcactacatcttgcgaatgcacatcatgctaacccttcccttgaccatcgtcaagagaagtgcatttgccgaacggtccgtgaggaaagagattctaaaatagttgaaaaagatgacgatgaacaagaagattcaaagacaattacggagtctacacaagttatggccgtctgctccacactcattgcaactgtggcattcgcagcagcttttacattgcctggaggttatagagcagatgatcacaccaatggcggcacgccgacattcgtcggaagctacggtttcgatgcattcgtcttggccatcacatttgcattcgtctactccttgttggctacatttagcctcgtgtattcaggaatgaccaaagttgactacagcatccgcttggagcaccttaactcggccaatagcttggtctggctatcaatcaggtgcttgctagctgcatttgcattaggtttatacgttgtcctggcaccagttgctcacaagactgccttgcttatctgcctcatgtgttccgttgggttattgcacgggcatacgtcaatgaagacacagatccgcatggccgtgctcttacagggaaggattgggtttaaggtgtggtggattttgggcaggaagatacttcgaaactttctgcactcattttggcccttcctgattatctttggttggccagcttatctgaaatggaggcaccaacagtagttagactcatatatatgaccaccaaatatgtcgtatttgtaccgctgatcaccatagattgtatttcttatagtatcccttttgctattgtgattttgtttctatggtgacaacatactgtattgtgtaccattctgggaaaactattgtatttttgccacatcagttcaaattatgacaattcgagtccattattatatctataaatcctatataactatctgaacgcacagagatgtagcctagaggggggtgaataggttttactgaaattcacaaacaaattgcagtggtaaaattcagcagaaccggaact

SEQ ID NO: 21802 - DNA, 4637 bp, Oryza sativa
ctatgcaaagaacccagaagatgtgcaaggccttcaacccaacacttctagcaccacaagggatcatgtcttttgtgatgaaaaacttcatcactaaaaggctgtttctcatcacaattacccccttgtgacgaattttggggtcgtcactatgttgtcaccactactggcgtcacaagtagcatagtgatgattttttttttcatcacagataatggctctgtttgtgataatcctatcgcaactaataagcagtacattagagatggtatcgtggtcacaattacaggagacactagtgacaatagtgccctcacatatgtgaacgtgtagtgatggaatttttttctcacaatattgtcgacggttagtgctggtttgctcgtcactacatattactaattaccgataactcatcatcacaaatatacctttgctaataacttttctcacatatgatagggtttttgtgataagatattagtttatattgagaagtaaaaaccacaagaagtaagatatattgtggtgaaatgacgtgttatttgttgcgaaaactggtcattctttacaaatgtagtagtgaccaagctaatatgtatatgtgacaatacctttatcacatatgaagtaatgcatcagtggagaaaaaagggtattgctgtaaggaaaacttttatcactaaaaaattaaatatccagatgcaagttttatatatgtgactaaagtcttgccacaaacaacacgtcttttatgacaatattcagcatgtgaacaatgacaaaatctaatgatgaaatctcgatagagcaatggcaagttcaaacattcataactgagcacccctttattcatgaatgattacagtatgctcggaatagagcacttcagaactcaattgaaatatcacctaaactaaaaaggtgtaacgctccgctttttgtgagacgttaaaaactaattcagcaaaatcctaatttcaaaaattccgttatttgtgtgcgagtctaagttgtgccaagatctcaattcaatctccatctttgttccccctcgtcgccatcaaaatcgcccacctcaaaattccaattccgactcaagtctccgaaattcaatcgcctcctttgaatcctcgccaaatacctgtcccgattccaaaatgtccgagtccaccttgaatccattccttggctcctccgtatttcgctgagttcaaatatgcaatttgaattcaaatctcgattcaaatccaagctccaattcagtcttctctgtaaaagtctatttttgccttctccctgttttgaatgggccggatccactctccagcccatctctcccctttgccatctccctcacgtgcgctgcacgagccatcgccgagagaaggatctccctctctctcgttttctctctctcgcgtcgacgccgcttcccgccgtcgccgcccaaaacctccaccgccttcgctcgttcccgcgcgctcgcgcgtggccgactgctcggttgccgccgcgtcaagccctggcgtcgcctgcgtcgtgcgctgccgctctgccgctccacgccgctatcttccaaagccgagagaggcagcccccctcacttactccctctccctccttcaacttttcccgaaacagcaaggagcagagctccctttctcctcctcctttttcgttttgcccgaccaccatcagcgtcaccgcctgccaccaccttgaccacgcccgaccgacagctcctctccttgaacgacccaaggtcggttctcccaaaccaacatcgccacctataaaaacccgagcccctcccatctccctcactcgtttctctcgtcgccacaatcgcgccttgtcgcccctgccctgcagtcgcccttaccatccgtcgccgaagcaccagggagaccggtgcgtgtgaaggacgcgagaagaggactccgggcgccgtcatcttccccttccccggcccgaggtcggagaggttgctcccgcgccgtcggccgctcgtcacagcgcccgtcccggctcggcagtgcctcctcccgttccccttcctcgctctccctcgccccctctagtctgcgtgatagctcggtggcactcccgaacgcgcgtggacatcgccccgagccccgccgccgcctggcatggcctcgcggccattgccgtccactcccggaggccaccgctcgtcgccggccctccttggtactcctttgtcccatccgtcgccggaactggattccttgaaccaaggatatgcttccaccccttttaatcgaacccccgttgctccgatgaagtttcccccttttctcgccaccggtgtgcgccttcctccagcgaatccgatccggtggttcacttcctctcgtccgtcccatcgttccggtgtactccctctctctcgaatcgtcgcgacgagctccggtgaacttggccgccgtccgccgtccatctcggcctccccttcttcctcctcccgccggcccgcgtggctgccacgtaggcgccacgtcggcgccacctcggctttgaccgggccaagccagtcagttgccccctccctccgtcttccctcccgtgcgcgctgtccatggcaagccatgcggctgcacgtaggcccaccgccattcgtccacccggcgcgccgcgcccgaaccacggaaaaaccgaggccagttgagatcagtctccctccgaaaacctagcgcccgctcccgcgtgcgccgcttccaccgtgcaccgcctcactgacaagcgggcccactcgggaccccgcgaggtgagcccggtccacccggctccccttccccctctctctccccgcgcccctctcttgggctgcctccccgtagcccgcaccggcccaataagctcggctgagccgcgcaaatcctctcgggccgcgccaagctactcgggaaagtctggttcctatccctccttccttttcttatccaaagggattaataaatccttttccctttttcacaaatcaattccttattcccaaaattccatgaatcattttctttggtcccgcacgtcagtgactgtcaataatattcttgagaatattatttctataaattccataaaccatttctcctattccaaatattccaattaaacctccgaaatccatatctcccaatccgtaactccgtttgactccgttcaacttccagtaattccataaaattgagatctatataatggcactattatttagtctaaataggatctttattttggtcttttgtttaggttttcgattgtttgcgtatagttgcggttaccggattttcgtcgattgtggttttctcgaagattcatgaagcttcgcgaagacctttagcaaggcaagtcaccctttgatcaatatctcctataattgaaaaatcattattattttgtttgcaacttgaactattagaatcacacctataacatgcttggcctcggtttgcatgtcaaaccgacggacctacccagtagtcacacaaattcctgcaggccgtactaccctgattccttgtcgctccacccttgtggtacttcggtatccggctctctgagcgcgtataccaactactccacatacaccgttgattgtcgataatttgggaaatgggtttgagaagccttgaaaacccgacatgtggtgtcggtgtgtttgaaaataaaataaattgtgaaaactcgcgatgcgggagttgtgcctatgtggcactgtcccgtattcgcatataaggaccgattcctgtgggaaactcatcgaacataatcaaagtgcaaccacaaggtggaatgggacaccctggctaagtaactagtcggttcagggaaacctcgcatgccaatagttgggaacgccggggcggggtcggttggagccaaaccgggttcctggtaagcaaggaagagaagcttgctgaattaccgatcgaggtggttggagtttgatttgtgaaaactaaaatggcctaaatttatgtgaggatttgatccttctatgtggcatgaggtatccctaggtcggcttgggaaaggctttgttgcgaacctccgacaccgacgggtgttcggaataagttcgtatcttgggggtacccctctgaagaggttaactaactgttcgaatagccgtgcccacggtcatgggcggatgtgaggtggttcccgttgcttagatttgtttgcctgtgctttgtgaaaagttattatggtgtgggaatcataaccagaatcagccaatgtggccgatggatgacctgagtggtcagaaacgaatctgtgtgattcgggatgtctgcgggcatcatagactaggcttcccgagtagaagcggattgttgtgctgctgggcagcaggactttgggagtccgagaaaaaggaaaaaggctctgggagacgcttaatcaagtgaaatggctctgggagccgagaagtaatgatctgacccgggtggtcggtacattaccatttgagttgttgaaaagcatctcttaaagtcgaatcgagacgcaagtctcttttcggcccacacttagaaagaaataaatcacttagtgatttcaaaagtggtttcaaacaaaggatttgcaaaacaaccttgcctctcttc

SEQ ID NO: 21803 - DNA, 10413 bp, Oryza sativa
cccctaatatattatggcaacatgccctcctattttcagcattttcttaattaatattggaaaacatactttgtaataaattatttaaacaactatatcatctaaatagctattttttatccgtgcatgggacgagattatttacaataaaatttagaattcaatacctacattaaatatattttaaaagtaaaataaatgtatttctttgggtcatataatgctagagactacctattggtcactcgatatatattaagaaaaatcacatagatttttaaaccatatgagtggcaacattttgcttatattagtaaatacaacacccgacacattttctaataggtctaaaattatatctatattttaaaaatagataactaaagactacgacccgttggaatatgcctcagaaaaaaatttccgtcccttgtcctgctgtacatatacctcctttgatcctctcgccttattatttttaactaacaacctaatatttaaaaaacatagctaaatgacttataatttctaaaattatatttgatttttaatttgttttaattattgttttatttacagttaattaaataattcaatatccattatagttgtattttactatatagaaattaaaatactcctatgcagggcaactgaatgaaattgaaaaattataacagaatgaaaacatgtattatttcatattaaacaatctacgcaataaaaaccaaaaccaattaaagacctttagagcacacttaagtcaccatatgtcacattttaaaattataaaatatttcatttaaatcgatggacccattattttcaaccattagatttaatttacgaaaaatcttacgctgccacgcgtcatgtcctgaaaatcataaataatcttaaaaattttgagaaaaaattaaacctatcatcattggttttaagttacattatttggagaagttataaaaataaatcgcatctacctcctcgcccccttcacatgcgcgcagaccactgccaatcccatccctatttttgggtaggagtaaactaaaagagaaataatcaatatgttaaaacaaccatagtttttaagctacatgtctgatttctaatataattattgctctatttataattaaactaggaatttaagatccgtatccttatattttcctatatacaaaatatggcattcgaccacattgttgacgacaaacccagaagtaagatttaggatctgcacaggagttaagcagatctcctaggccagtgtgtgtttttcacatcaacacacattcagcccatgtgctttgcataccatccaaatatgattcaaataccttaaacaagttggctgcacatattacatcactatacatcattctgcaaacatgtatagctaaattaaatcaatagttatccaaacaaaaattacaaagtgaactatgaaacattttttttattaagggagaacaccctgcccttttacgtgtgatttgaattgctgtaaaagaattacgaaataatccaatacaggttgcatcatcatatgttgtttgtcaaacatgcatagctaaattagatatacattgtctcagcaaatacaactaactaaaatatgaagtccaaaccaccaatgcatagaaaatccaatggctttagttagagaaaatccgattacttcatgatttttttaaaaaatatgtgctaaaataatccaagcaagctaaatgatcttccgtgtatttgctttaaactatgttaccatctaattgactttagatggtgcttaatgcacttttagtatatcattgatatatgttcaagcgtgttgttttggccttctaagcattctgggtaactccgtttattttctttgctcatagaccattcaaaaggtgaatcatccctatatataaacattaatcatctgcaaatatattttgttgtatatatatacttaaatgattaactttggagtccatttagattttatgatataacaagacatggaaatattagtaactaagctccaccaaaaatgtgatcacaactgcgatgaatcacaaggcaacctctgtaggtgcaatgaccacatctcaacacggtgactaggagctgcataaaaccgtatggcgggggaaaaggaacaatgaatttagctaggtcttacattttcatcaatagggcccatagcattcaacaaacaaagaaaaaaaacaccttgcttttaattaaataaacatgttttctaaacaaactaggtctaactcctttttagatgatgatgaagattatatataattgcttatacatattaattaaatactatatagtatatagcatagagaaattatcaaagtgatgcaacgaagaatatttgctgaggaaatgcacttccaaaacatggcggaggctctctgataaatatgatccattttcaaatacagtgcacgatacatgcccgcgcgaatgcgcgggctaccttcctagttatcttaatgcgtctaatctgaaaagaataaaactaaaagatggacagttactgcatcggaagtacactaatctctggatgtagtaaagaaatttgacctttgcaaaatataataaccgcagcctgcctcattctagtacataatcaaagtgggcatgcgaatctaaaaagaaaaaaaaagggtatccttgcaaatcccagcagaaaatcagacaatgcgtcgcaaacaggtgaaaaacggcatcattctcatgccagaatatactgaaaacccgaattttagttcagaccgggtcctcaaatctgaggcggttttctgcaacgaatcaactcttgcgcgcaatcatcctaccgccgactactgaaagaccacagatctctcccactatttccccaccgagatccacgaagttggcgcctggcaatccgcattaatccctcgccataggacgcagcaaaaactacaggaacagaatgcagtagggagcatggaaagttctagaagcgcacctggagaggagagcccgcaagaagagattaccagtggagcttagctgactgagagtgagtgagtgagtgagtgagtgcgcaaccaccaactaggtacagaatctggatttagaccccctgaagaggactcgtttaatattcccaatcggactaaacaagagtgtcttctgatgtcgccatggccggagctccctgcatcagccaatgcgccagcagaaaacagaataaactgaaatggtgacagcagaagaggctcagctcatatgatgaggggatcgtggggtccgtttctttgatctgaactgggtactgctcgaaaccagcggatcagtaaccgtggcccccggtttcatgggcacgattgtgtgggcagttggaatgttgggatcttgctgaataaagaacaggatcagtattgaggcttgacagttgagaggatgggcctctttgggtaatcagccatttgtcctcagtctcaaaataggtacagctatggattttttttcggttttagatttttttttaatatttacagaaataatctatggacaaaaaaaaattgcagaaatagcccctgccgcccacctctggggcggcaagctgacgtggcaaacgggggaggaacgggtggtgacggagggagggttttttgcaggaaaacccttgccgccctctggtggggcggcaaggggcccgaatgcaaaaaagccagtcggggccggctattttgcaggcggccccttgccgccctctggccgggcggcaggcctcgctgcctataaaaggcctgctgcccagcccccagccctcattcttctctcctcaattccagtgaaaaaaaaagaagagaggggaggagaagagaagaaggggcgaagccctgccggattcagacgccgatttcaggtaatattcatagatcctatatgtgactattgagttaaatagtgtgtattctttaaaaatttgtttgaataaatgcattatatttttagggttttagttgtactaatctagaagtgcgtattgtagatatcggtaactacgtagatctgctagtttggaattaatacattaccgttgcattggcttacacaagaagatgttacgttgtagatgtttattgcatgaaagagtaatatgatctagttatttcgttgacagatatgtcgaacaaacaaatattccaagtttaccatggaccaggaaacgtccgttacgggccaactggggtagatctgtcagattttattgtatcagaaaggggaattgatagaccggctgagaggagtgtaccttctataaaaggatggttaatgaggggcttgagagttgatccacagacaagtgacataacaatcaatgttatagtaagtcgggcaactgagggtttttattgggaactaatgccagttcaaaactctcgagtgtggagatggtatttggaaaatgcattgcaacgcgggtggcctctagctttggttccgtttgttcacccgaaggatccaggtgtgcagacgaacatggatgatggcgagggaccaagtgctgaagtaaacgagacttctgtggaggaggtcaacgcacgagaggacgggggcgtagtagctccagtgggcattcaaccaggtggagtggctgacgagggggagactgtcggtgccattgtggatgaaatggagaggaaggattctgacaacgagcgtgtagaggaaggtgattcgtcagatgatgagacggatattaatccagcagaatgggctagtgaggatttttctgggctgatcgtctctgaagaggatagtgtgagatgggagtacaaagaaaatgaggttattcagggagcgatttatagtagagcagaagatatgaaggaggcggtaaaacattttgcagtgtcacttcatagagagttttgggttgccaagtcgaaccggtcgcaatatgaagttcggtgtgttaaggaaaaagattgttgtccctggagagtgcacgcgtataaggggaaatggaaggattattggacagtgtcagttattaccaagcatacatgttttctacctggtgttcagaaataccacaggaacattacatgtgcatttgttgcatctgagatgtatgcgcatgtcatcgataatctcacatatgaaccaaggtcaataatccgacacattgaagagacatacaagtatactattagctatgccaaggcctggagggccaaacagaaaataatagagatgagatttgaaacttacgaagcctcgtatgacaatttgccatgcctgcttggtgttatcgaggaaagaaaccgtaggagctcttacgaagtgaagaaattcccctcaattgaacatcctggcaagagtgtgctgcaaagggcgttcttagctctacatgtatgcaagatggcatttgtgaactgtcgtcctgttctctgcattgatgggacattcttgacaggaaagtatcagggccagatactaacagcaataggggtagatgggaacaatcaggtattgcccttggcatttgcttttgttgagagtgagaataccgacagctggtactggttcctgaaattggttaaaacaaaagttgttggtatgaggctaaatgtatgcctgatacatgataggcacgctggcattctgcgagcgataggagagttgcagtttgggagtatggaacgaggatacctcggtgtttgggaagatgtacagagtaggtggtgcatgcgtcatatgggagctaatttctttaagcaattcaagaacaaggagctcatgaacatgttcaagaggctgtgcaatcagaaccaggagaaaaaattcaatgcgctttggaagagattagatgagttgacagccaaatgcagtgatcagcgtgcagcggctccatcgaccgccgttgctgaccctcctcaagctcttggacctctcccaacggatagtccaacattggttagaagaactggattggagattcggaaattttctcagtggattctgcatgaaccaaaagagaaatgggccaaggcgtatgacacaggtggtgctagatatggaataatgacaacaaatttggcagaagtttacaactgggtgatgcgcggtgtccgtggactgccactagttggcatagtggagttcattttacatgggacatgcaggtaatttagggatcggttccaggcagttcttccctctatgccgaacaacagcattttgtttggagctttcatgcatgaaaaagctagaggagttgcgtaaaaaggccatgaaacatctagctctagtgcaaggtacccaacagcacaggtttgagatactatgtcaagataaggcaggcaggggtatctaccgcaagagagtgaagcaggagtgtgttctcaaagccgacggcacatgtcattgctcttgtgcaaagccgaagctgctccacagggcatgcacccatgtcattgctgcctcagaggagtgtctataccaaatgtaggatatgtgtcacagtacttcaataagcaacaatatatcatacatggagcggcgagatttatgggttcggcatagctggggagttcacagagactaacgatgaagtactcaatattcctgacccatcgaagctccgaggcaaggctggaaggaggaggactcatcgcatccgcaacgatatggacgagtcggaggctggtagggtgaagcgttgcagcaaatgcgatgaacatgggcacacctacaagcattgtcctaaagacaaggagaaaccaagtgcggcggaggcaggactatcaggatcagcagcagatggagctcgccctacgggtgaaggcactacctccactcgaccacgtcctaggcgtcgtcgtgccacgtctggctacgtggtgtagttcttatgttctatgtcggcatgtggatttgcttgtaattcgtttcgaacttatcgatgtgtttatgtttcgtcgtgtaatgtcagacttcggcatgtcatgtctttaggtctcgtgatgtaacgttggactaaggcgcctaacgtctttaggtatgctgatgtatgtcggacttcgatacgtaatgttatgttatattattgaactctacatatatgttaaattgcacgtcatcgttatgtaccattagtaacgtttgctatatttaaatagcctgtactcttgttgtacataattaatctcatgattttattactatttcataattttgcaagttatcttttgttttacagtactattttttgaattgttctaacacgaaacactatatttttcagagatggcacgtcaggatacacctcagttattggacccggcgatagatcaccgacaccggtctcaccttactgcggtgcagggggctcagcttgggacgttccgggcacggacgtgcggtgagctactcatggttcacgactcctttgtcgagaggtacgaacagtgttttactataagttagttgcactgtaatattttttataatgacatattaatttgttattgcaggctacgtgaggccggcctcctaccgatgtgtcggctggtggaggctgcggccggtgacgcggacccggccagacgatggtctgtggacaggtccctcctagcagctttggtcgatcgatggaggccagagacgcacacttttcacttgccgtgcggtgaggtagcccctaccctacaggacgtatcgtacttgttggggctaccgctcgcgggagacgctgttgggccagtgaccacggctgtggactggcaggacgatctgacggcacgtttcgcactagtacagcgcgcaccgcacctcccactcgagccgttggcacactaccgcaacaccggacctacgaagaggtggctgcttcagttcaccgtgagtgttttttaccgaaatgacaatcgtattacatatttagtccgtagttaaggtgcctatcattttatcgacggcttgtaggttgagcagctacaggcggaggccgacgagtactcctacagccgatgtttggaggcgtacttgctctggctttttggctgggtgatgttctgtggcggtcatgggcacgcggtcgacaagggactcgtgcactacgccaggagcatcgccgatgctgcggtaggcgaggtgcctcagtggagctggggttccgcgttgttggcagctctgtaccgtgcactttgtgagtcttgcacgaagacggatcccagcgcgacctttggtaggtgccctctctttctttctatctgggcagctgagaggattgcgatcggccgccctgaggtggaccagcacgcatacgaggagtcactgtacgaggagcgaccagaggtcgactaccctacgatgggtactctgtggtgccgtcgtcaggtacgttgcatcgatcttatcgtattgttaagttaattgctaagttcattgtacatcacatcgatcgtttcgtattgcagcgccgatgggctcacgtccaggttaggcggtcgtatcctgagtttgttatggagttcgaccgccttctgccgactgacgtcgtgtgggagccctacagtgccgcggctacccaggctcgtgcgccgttgggtctgtccacactctgcaccagggaccaggcgtactggatgactacggttccgatggtcttcgacatctgcgttgagcctcacgcccctttccgcgtgatgtggcagttcggcttccgtcagccctttccagtaccgtttccgaccaccgtcccagctgctgttcactggtaagatcttgcactacgctttcagttgttgcattaaaatctgcctgttcacaataatttgtaacatctgtcgtttcacactaatattacacattaattcgcaggtactcgcgcaagggtcagcagtcagctggcgactggcccgccaagttggcgacttttgttgaggactggttgctcgcaaccgaggaggtcgtggaccacgagggagagccacacactgaggagtcgtaccaggcctacctacgctggtaccagccacgcacccgtactagggtcaccttcgctcccttggagcagcagccccacgttgcgagcactagagacctatatgccaggcaccgcgaccaggacttcgctcgtgctgtgagtaccctgcatcgcaccattcctttatgttttcatgtctttctcttcgtcaaattttacgaatatttatgaacaaattaaccatgcaggtcgacgacatcaaccgggtcgtcgttgacggttcaacgacgatccaacgtttaggcgcggggattccggtacccgtagaggagcacctgacgacgtacacgcggatggtggagtcgatgcgctcgattctccgagtgctcacctgtcgtgcagacgacgttgctcgggcagacgcagctgtacagcggccacccgtaccgactggtccccgtccagctgcgcacgttcctaggccgactccccctccgcacggaggtaagtatttttattactatttctgtacatgcctcgcacatataagtgagccgtttcacttgccgattgcttcaggatttcgtgcaccgttcagcaccccgccttcctcggctaggccttctgttgtgccccccacaggtacttaaaaaaacaacattacttcgacaatcaatttacatacattttatgtcttagcttacaagggtcccgttgtcgatgtgtaggtttcgcccagttcgctatgacgtaggccgcccacttctcccaggctgcagggtcagcgtctcaggcagctgtgtcgacctcgcactcaacgcagttctggcagtacaccgggacttcgtcacaggcagccggcacgtcgagtcagggtccaccactggaccatgctgggacctcgtcggaccgcttgttgccttccaccttcctcttcgacatcactgacttcgacttcgcttcaggcttgacagaggacgtcatcggcccctcacagctgggaggcgcaccgccggtgcagacgcaggaccaggcgcaggccactcctccgtgggacactcgtgctacccgtgctgtgccaccggatcgttccacgtgcgagcacaggcccggaggaccaagcgtggtcgcggcgcggggcagggccagtagagcagtcttctctttgtttacttgcttcactttccagtactgtatgcttgtgtaatgactacgttgttgttatatgtgcacgatacctttcggcgcatgcacgatacctttcggcgcatgcacgactactttctgccgcatcgatgcagcctcctttattcgcgtgtgatacgagtatttgcccgccatttggcgcatacgaccaatgtaactttcggcgccgatcatgcatgtatctttcggcgccaatcaggcgtacccaccataccccaccacgt

SEQ ID NO: 21804 - DNA, 4213 bp, Oryza sativa
cccaggtattttattatctgcatatgcttattcattccgtatgggcaatcgctttattcttcgtaacactactctattcggcagacccgcactacggcttgcgcatacatcaagtgggtcgatacagaaaatcccgttctcgacctaaccacttgtttacaagaaggtcgctggtatttcgcatccgaaagtactaagcaatacttatagagaaaagcggcttatgaacgacaatgtcgtgaacaacagagcgactggcgggtgctaactacggcactccctccatgggaagcccgtccaagatgcaggtgtggtgatcgttgtcaggttcttcgttccataaatcctacaacattgggttgaaggttctttgtttgtccaaatattcttgacgacgatttcatggttagaatattttgattatatgaatccttattttctcacaacatttactaactttgcttgctttacatctattctttcctcccaggaaccaccaaggagatgtcaatacagagaatggatagacaccagaagggttctaactccacctagccgtgttgtgcagcttgaactaccagagcaatacagggttactaaaacgcggtttgagagaggagagggatcctcacgtaggggttagctattatcggacaacttggcatattgaaatttctactgtcatgcttccttgtcccattactacatcgtcgttgtgttcaactattgcactacctccctcctagttcgaatctaatatcatctatgtaaccgcaatgcaaatagttgtatcatgttcaaattgtactactatttcttcatgttacataattctccttgtttaagtccatataatgtttctacgacccagactgcgataggccgatataaattattcgagtactaatacgtcgaataaggtacaaaataatacctcacttaacatatgaaattgcgcaacaactaacttcaatacatttttataacaatattaacaagttttaccaataaatacttctttatttattattaacataacatagaaaaatcttttggccgtacttttttcatcgggcggcaagggacccagatgaaaaagtacggccgcaagctctttatgggcggccaaaattgcaattagccccttgccgccctctgtacgggcggcaagggcctaatcgcaattttggccgacggcggcagacggcgcggtcgacccaccgtctgccacgtcagcttgccgcccaccattagggcggcaggggctatttctgcaattttttttggtcgatagattatttctgtaaatattaaaaaaaaaatctaaaaacgaaaaaaattctacagctatgtagtattagaaatgggccgtgagcctttgctggtgttctatcagggctggaccatttcagtttgagaccttcataaagaaatatcagacagacgtgcaggtaaatggaatttcttgaggactgaggtcaggagctcactgaaaggaaaagaaaggggaacaagtggacatcctaaaaattaatctctaaaggcccctttgaatcgtaggaatgaaaaaaaatagaggaataggaaaaacacaggattcggacagaaatacaattgtaaaacagaggattgcaaaacacaggaaaaacacaggaatggccgtttgattggaccacaggaaaaacgcaggaatcagatgagagagatagatcagatgagagagatagactcagaggaaatgttccaagaggttagacctcttgctaactttcctccaaaatgtgcataggattacccattccataggaattttaaaggattggataggattcaatcctttgtttcaaaggccttcaatggatttttttccgtaggattgaaatcctccaaaattcctacatttttcctacaaatcaaaggggccctaaataaaatgtaggcaaaaggaaaatgatcacaagttcaattcctcatctccttcttttatggataacaagttcaattctgaacacagttttctgaaatttctaaatcacttcaaatagcatatcatgttgacaaaccaaaaaataaaatccacttgtcgcggaatgggggtaaaactgacggtaatgcttgaaggaggggggggggggtaaaccggaaaaggaattgatggtgcgtactcagtagtgacaaaatcgatggaaaagagtcagcaaagtagcaggggcgacgtcgaaacttagcagataggtaagtgtgtcgtaaggtccgattggcttcactgctacaacttattgggttttagccttaccagccattcgcgttgggttgataccctgtagccatagttgacgcagtcgaatgtgaccatataaataaattgttgtagccaaggaggtgtatatatatagttgggaaggctaattctcatggatagcgtgcggtctttatgtatcacatatacatgtaaggaaaaaaaaaatccgaatttccctcctagctatatggtagtatgatacccctcatttcaaaaaccagacattcttcaccctcaacttttcatatcgaacgaattaccccctgactgactccgaaatagttttggtcctacgcagttcaatcaacatagaaaaataaaaaaatggtgggatccacttgtcctcttctttttgtcatcacatgtgagccctactttttttttatgctaactagactgccacgcgtaagctacttcctccgtttcgtattataagactttttagcattgctcatattcatatatatgttaatacatctagatatatgtatgcctagattcattaatatctatatgaatgtggacaatgccagaaagtcttataacctgaaatggagggagtatgtaggaccaaaattgcttcagaatctgtcagggggtaattcgttcggtataaaaagttgagggtggagaatgagttttttaattgaggggtaatttgtactgccctgattgataagggataattcagactttttcctgaatatgaatataagtagcaattcgtgctgccacaaatttgcatataaatagtttgagaaggctaaaacaacttgcatttattgatttgcaaaaaaatagattgagaagattaaaacaacctgtgttgggaatgaaagagtggcatacaatatgcatataaaaagaaagataatgctttgtcttggagatttcctcttgagagatgaaaacatacacttttcaaaagaaactaggatatcatgaaaacatacacttcccaaaagaaagtaatattagttgttcacaatacaaacattaaaaacttgaatcctctataagggcataggcatacactttggtgaaggaactaattaaacaaagttgattaaaaaaatgtttgctgcctatttattagatttgtagtgtgctcctaacaaaaaaatgatttgtaatgttcatacttttaaaatgatacataagtaagccctatataggtctatatgggtcaactgcacaggatgttatagactttatactaatattaattatgtttaaactccaacggttgtagaggaaaaggtcgacatgtacaaacattaaaagttacaatattacaacttcaacggttattttgaaagtatgaacattacaaatcattttttgttaggagcacactacaaatctaataatctaataatgttgttttgacttattgttgtgttagaatgggggtctatttttttaatattgctcaaagttatgttcatattacttttattatatctattattttttatcaacgtatgcacgacgataatatatatataattatttttataattctataatttcttaagtggcacggaaaagtcggaagatgtagccctaactaacgtgacatatttattctcaaagttgaattaaattgtatgagtttttaaatgcaaaataatcaaaagaaataagcggatcaaatattagtattttgatttagatgttatatttgcttatttgtttcgcatagaatttttgtttttctaaaagcgtgaaaataggaaaagaaataggtaaaaaagaggggaaataattgagaggagggaatagacgtgtgaaacgtacgtatatacgtacgtacatgccatcaggcgcaggtgggcccagatatgggaagacggtttttttatagataaatctaatatggttacatataatgtgttcaccaaatttaat

SEQ ID NO: 21805 - DNA, 7136 bp, Oryza sativa
aggatgtcacatggcggtttaggagtatttatagcaagcttagtgaatttttagtatataataatagaagataatagattatattcagtttgttcgtcaattaaacttgaggcgggccgtactttggtgaaattgctgatggacgactaatcgcgcgccggatcaacctattagcatttttagcccacgtttttagtcttttctattttttgtaatttgtgtcatgggtaatttagctacagaagttgggttgtggagcacgcacgctttctaaacggttaaacgatgtattttttgtaaaaagtttttatacgaaagttgcttagaaaaatcatattgctccatttttgaaaaaaaattagctaataattaattaatcacgtgttaatggaccgcttcgttttccgtgcgcactgtgctgttgggaaatagctccagcaaacacaccctggctgtgttctttgctcctagttcccaacccctctctatcgtattccgcgcatacgattttcaaattgctaaacaatacttttttgtaaaaagtttctatacgaaacttgcttaaaaaaatcataatgatctattttttttaaaaaaaataagtaatacttaattattcacgtgctaataggctgctccgtttttcgtgtgaaggagtttggttcccaaccatccgaaacgaacacagactaaactcagctccacctttttaggttattttatgaggtgctctactcaaccccgctcgtattctagatgaagctagagtgagcttgagctcagcttgagaagagatggaaatatgccaaacatatccttattgggctgattcgattcaatgggtcaaatcgggcccttttctttttttaacagattgcacttatttcagtccatacatataaagtttacgtatacaagatttaaatatatatacatggtgtacgtacatatacacttatatctatgggtctgttcggattgatatcaaataaaccttaccaaattttggcattgtcaaatttttagtaaaattggcaacattgccaaattttgataggattaggttaataatgttgccaaaattctatatacattaccaatatttaataacaaactacatataaccacgtaactatcaattttaccaaataatagtatggtataaaatgccatcaatctgaatgggccctatgtgtatatattcttagtatgtaaacaagcgtacttatgcatgctacaacgtcgagacgtgtgagcaataatatagcgcattagtccactgctagctccaattcatctatagccaatcttataaccaatctattatattattaaaggaatagaaaaagttgcctccacgttcgctctcacggtctagaaattttcacattaatcggagaaaaaaaaagcagagtccatatagaaatacaatttagaaatagctgaaattcggaattaaaaaataagaaatattagaagaggagactacattccatatagaaatacaatttagaaatagttgaaattcggaaataaaaaataagaaatattagaagaggagattagagtccatatagaaatacaattaggaaataattgaaattcgaaattaaaaataaggaatattagaagtagagtatagagtccatatagaaatacaattagaaaataactgaaattaggaattcaaaaataaggaatattagaagtagagtatagagtccatatagaaatacaattaggaaataactgaaattcggaattaaaaaaaagaaatattagaaaataaggaatattagaggtagaatatagtctatatagaaatacaattaggaaataattaaaattcggaattaaaaataaggaatattagaagtagagtatagagtccatatagaaatacaattaggaaataatagaaatttagaattaaaaataaggaatattagaagtatagtatagagtccatatagaaatacaattaagaaaaaaatagaaatccagaattaaaaaataagaaatattagaagtagagtatagagtccatataggaatttaaaattaatctaaaatttggaataaacataataaaattaaagtagagtttagaatccatataaaaatacaatttacaaatggaagaagagcctaaagtccatatagaaatacaatttacagataacgaaaattcagaattaaaaaaaaagaaatattgaaagacgagtctagaatccatataggtatataatttacaaataactaaaatttgatattaaaaataattaataactaacacgtatatataatacaatataaatattacacattagtagtttcgtaaagttagtataaaatttaaaattatattgtcattttaatatatttgaataatacattgagaaaacatatatgttattacatgagagaaaatataatgatgctagctgcgcaatctgcgcgggctaccatgctagatcatataatagttgcttattatactattaatatatggtcccatacatacattgcgtcttggagtccgcgttgcagctagctacagatctgtagtctaatgctcttatctctcatattttatctcactaaaatatgtttacagctggctaatagtaacgtggacccttagaattggataaaattttagatagtcgcttgtcaaactgctaaatgataggttttgtatgaaactttctatataaaaattgctctaaaatatcaaattaatctatttttcaaatttataataattaaaactcaattaattatacttaataccatcgcattttacgtaatagacttgatcttcaatcttaaataacaccaccgaagtctctgacaagaagacccgtgctccccgccggccgccggtggacggagctctgtgtcaaccggagctcgagctgctttccatcaccggacatgatgaaagccttgatctgttgccggcaacgtagtttctctgccggccaacgcgacggcgcgacatcccctaatcactctcaatccattctgtggtaaggtagggcaaccgcaggtgattggagaggcaccctcaaaatctcaatccacccgccggcgtacatctccgctaccacctgctgcgcgtggcgtgatggctccaagctagctttccccgccgcgcccgcctgaggatccacaccacctgctcggctgtcacggctcgccccacatcgcgcgcaggatgttcgacgaattgcctgacccggacaacgtctcgccgttacgcgtcgttgaccagactgcgcctgcttcccccggcatgtgcacgcccacgccgtgcagctcgggcttttgctacagcacgttcgtcgggagtgctctgcagctctggtgcgcatgtcccggcggcgcagggtcagacaggcgctcggtatctctcttcttcctctgttagatgtcttgccgttacatgattcgtcttgtgctgatttctgttggatgcttatgctaaacagggaaatttacacggagagacatgttgcaatatcactgaacataccgggtggagatcatttctgttctatattgttggagggcgcccaggaattctttgattcattcagattttaccatcaggttgcacagatttggtttctggttcattataataagcaataaagcaacaagatgacccaaaggatgaattctttgcatctcccatctctccacaggtaccaccttttggctccatttgcttgtcttctttggcctaactggtttcctccacagctgcatagctctgtcagattatgtgataagaccaattgcatgtcacttgaagccggttatgactccacaatgcaacattgttgcaagcgttggactatgtgataagacatattgcatagcctactattaatgaatgggtttgggccaattatgaatgctaatagtccgccatttggaaggcttcaacctggttagccggccggccagtcagacagctaccccgctgtcttgcaaaattatggctagcagttctcccaagcatcagcagtggcagcaatgagctctcatcgccttctattcacacagcttcacctctacaacttgctgttgctcatccatgttcaccatgctacctcactcaacttcagatttgacttctccgagcctggttcgtactgtacccctggttcagagatcgcctgtgctggcgatgcctacccctacgcccatacgattgagctgacaaagaccgacatcagcgacagaaacctctgcagcatcggccgcgtgtggtatgcacggccggtgccgctctggaacaacaccaccggtgaggtggccagcttcaggaccaccttctccttccaaatcaagccggccaacctggacgtcagtgctgacggtatggccttcttcctcggccattacccgtcaggcatccctcatcgcagctatggcggaaacctcggcctcttcaatggcagcaacaacaagaacgcaacgggcaccgctaggatcgtggcagtcgagtttgacacctacatgaacaaggaatgggagaaggatggcaaccatgtcgggatcgatgttaactccatcgtctctgtcgcggcaacctcaccggacaagaacttagcaagcggcaccaccatgactgccgatatcagctacgacagcagtgcagagatactggcagtcaccttctggatcaacggaacctcctaccatgtcagtgccagcgttgatatgagaagatgcttgcctgaggtggtcgctgttggtttctctgcttctaccggaagctccattgaagtacaccgggtgctgtcatggtcattcaactccaccctaacatggatgaattcttcagtaatgccaccaggagcagcacctgtgcccccagaaactatcagctctgaaccaataatgtcaccaggagcagcacctgtgcgcacagaaactttgagctcccaatcacaaggtaaattacatggtataatagctatttcagttgcagtatcctttgtgctggtatgtgctttcatgggttttcttctacgacgtcgattagtatggaagaaatcaaatgaaatctctgatggagattgtcagattgaacttgatgaaattttttattcaaaaaaggaacttgatgaaattaagtttgcaaaaggtgttggccccaaaaggtatcattacagtgaactagctgctgcgacgggtaactttgcagaggagaagaagctaggaagagggggttttggtcatgtttaccagggcttcctgaaaactgatgatcaggaacggcttgtggccataaaaaagttctcaccagactcatctgctcaggggaggaaggagtttgaggctgagatcaaaatcataagtcggctgaggcatcggaaccttgtccaattaataggatggtgtgacagttgcatgggactcctgattgtttatgagctcgtatcagaaggtagtcttgacaagcatatatataaaaatgcgaggttgctaacatgggccgaaaggtacaatatctaactcatcttttgctgaatatgtttgcttttttcaatttagaacttcttggagaacagagataagagttgtactcatggatgtcagacttgcagtctaatggtaactcatggataacaaacttgcagtctcatggtaattcttggatgtcacacttgcagtgtaatgatatgttctttttaaagaaatcatacaacgagtccaatgaaaaaaaatagaaatcgtaataaatttttaaaattcgttattaatagaagacatatccttttgagtatcttactggataagtttggtgattaataaggtgtgcttctagatagagccactggcccacaatcagggcaattcacaggatagcccaatagattgcagaataaaaatgctgctcacatctacttgaaaattgattaactaattaaataccagcagccctttgtacttcgattgtgaagttgatatatagttttcttctaatcacaaggctatgaaggttaggccaggactcagtcctaatcaggtgtttatttttgctatggtatatctatccaactataacacaggactagctaaattttcaggtagatttgagtcaattaaggaactaaaattaagaccacattgcgtcttcagttggtttcttagaggttcagctgtgtataatctttagggataattttatcatccttgagaagatacctagaggcacaatattttctaatgaaaaatttggtacttcgaggtactaagtactttcaggtaccaaaaattttagtgtaaaatttagatacctcaaggtactttctgaaggactgtaaaaattctctttctttagaggttcagctgtgtagtttcctagaaaaatataaagaacatcattaaaatttagtatttagcatgtagaattcaaatccatccacattcaccagaagttagttttttgagttagtctccggtcctcgggaggtactagtctcttggtgaaaatagctacaaacaatcctctcttgccatccatatcattttcactacgatagtctttcatcaacaggtacaagatcatcattggccttggctctgcactccactaccttcaccaagagtgggagcagtgcgtcgtccacggcgacatcaagccaagcaacatcatgctcgactcctcctacaacaccaagcttggggactttggcctggcgaggctcgtcgaccatggcgccaagtcacggacaaccaaggtcgtgctcgggaccgccgggtacatcgacccagagctcgtcaacacgcgcaggccaagcactgagtccgacgtctacagcttcggcatcgtcctcctcgagatcgtctccggccgtcgccccgtggaggaaccggacgacagcgacgagctcttcgtgctgtcgagatgggtgtgggacctctacagcaagaacgccgtcgtggaggcggtggacgagaggctcaggtgcagcgacgatggcgacgacgagctgcagatggagcgcgtgctcgccgtcgggctgtggtgcgcgcaccctgaccggagcgaacggccgtccatggcgcaggctatgcacgccctgcagtcggaggaggcaaggttgccggctctt

SEQ ID NO: 21806 - DNA, 10557 bp, Oryza sativa
  unsure (1)..(10557): unsure at all n locations
gttcatggatggataattttgtcgttatacttgttcgagcggagcatcctctatccctatttttatcagtttatatgcattgaaaatttagggggctgctataaaaaaaatcccattcagacggatgaaaccggttacgtatgaggtcctaaccggtatcaggtgatttctatcaggttacctattagacgatatcctaccagataccaggcaatttcgataccaagaaatcacttgatatcgattaggtattaggggatgatatattagaggtattaggatctgttatttaatcggtcaaagtaacctgaaaatttatcaggtatcaggtattaggatctgatgtacgggatgccgttacgtagcattcctgaaaatttattagaggtcaaagtaaaatggaaatcatgaacgtgttcaggtgaaagtcaggaattttacatttgcggatggatgagcctgatggaatggatgagaaagtgcaatttgtttttgggtgaatagctaatttagtccttcaagtttcaacgaaggcttaatttggtccttcacgtttcattttatccacatagctcctccaaatatttgttttggcttgaaatcattcttgggcccacttaatatgccatatggctatttctagtcaatatttctattagaaaatgtcccttctgcccttaatttgtatacaactatatactagataagagaaaaccaagatgaataaacaacattgcatatgtacttcccattattttaacatgtgcacgtaaacttaagcaattgctatctcatacactttctagtacatattttattttcgttttacataatttaatatgcattatctataaaaaaattcaagcatacaatttttctcttatatatgtgaatgatgagggggtataagtgtcatttatcaagagaattgtcggttcaaggataagtttgaactaaaatgaaaacttgaaggattaatatggatagattgaaacatcaaggactaaaccaagccttaggtgaaacttggaggactactttggctattcaccctttgtttttcatctcgtgaaataccaatagcacaacattttttcagacaatatgtacaactgccctgtcagatcgcgtttacgacgacatagacggtaaggaaaaacgccacagcattcaagaaccagaacaagtacagaactaacaggtaaacccccaccgaccggaaacgccgcccgatgcgccgacgcgtccacccactgtcttctccggcgagggcacgaggcaacagaagcagtgtggtgaaggtcggcgctggcacggcccagacgaagctgagcgcgaccaagaaggcgaacggcagcacgaagatgctccacaggatgtacttggtggtcgtgctgtccagcccggagacgacggcggccatgaacgccaggatcatgctcatcagcgccatccagaggaagatgagggacatgcatatccacgccgtgcttgagcgtgccgcccccctgccgtaggtgaggagcatggtggcgatcacggaggacgccatggccacggtgtcgagcaccaggaaggcgttgtaaggcgtcgtcgcgcggaggttcgccacgccgtcggagttgtaccctcctggcacgttgaacatggcggtcagggcgatggtggcgatcagcacggcgacgatgccaaggttcttggtcgttttctcgttccattccttaacatttttgctgctccattgggatatgcaatcttgtcgttgcgccccgaaccgagctccattggctgacagtctgagcaaaaaaccaatctgacagtgaaaagaaaccaatttttagttcgatgcaatcatgaacaaagctagctacgactagtttcgaatcgagagtactaccatgtgcaagaaaccggttgtgtttgatgcgaggtcgaatggtgtttgcccttcgttgttaacaatgttcagtttgatgtttctgctctccaaaattgcgagacgcgggttcccggccttcaccgcgtagtgcatgggtgtgttccctttcttgtcttgctcattgaaaagctcagcaagagatggatcgccaaggatgtatgacactacaggttcatggcctctctcgatggccagatggagaatgtttctgccctcgttgtcgacaagctcggcagagtctgggcattctttcagcatgtcttggatgacatcaagatgacccatcttcgctgcgacatgaagaggtgtcaatccttctttgtctgggatgtacatagccgatggcatcgactgaatcaacatgctgatgatctctcggacgccatcagacgccgcgtagtgcagcggagtgctttccgattcatcgggttccttggccagattcgagttccatgacaataactcgcgtgtgatttctacatgagactgaaaattagctctgcaacaacattttcttggaaaaagtttcgtgtctctgaattctgaatagctgaagaactaagtgaagttttcagtaggtcaacggctcacctacgctctgaagaacagctgcgtgcaaagcgttctgcctcttggggccagacgcagacgcgtgcttccactggacgatggctttcacggcgccaatcgaccgcccgacgacggcgaggtacagcggcgacattccgaagttgttcacaccgcaagacaaggccggagcggccaccatcaggaccttcaccaccgccacgcgcccgtgccgtgccgccacgtgcaatgccgtgtcgcccgcgctgttcttcgtcaccagtagcccgggagcgccggatccatgcatctgagctagcctgatgagaagggacaccatgtcgcgcctccccgccctcgcggcgtggtgcaacgccgtctccgacttggtggtctctttcggcagcagcgccgccaccgccgccgcggccgtgtcgtcgccatcgcagagcttcctcacaagcccaatcttcccttgactggccgccaagtgaagaacggtgttcagccctgcggtggtctcgtccaggacgcactggccgtcatgccttcttccttgttcctctgtcaataaaatagtcaaattaatgtagacgattaatttcagattcgtagattgcactctgcaaattgggatgcaactcgatacatgaatgtacctgctgccgttccactgggtgaaacaagaagttcctggagcttgtctacagatccagagaaggcggcgcgatacagctctgggcacatcaacctgcgtcccgcattctgctgctccggctgggtggctgctgctccggcatggacggggtcttctacgggaagttgcagcagagggagttggaacgccgtgtcagccggtgagttcctcgcacgacgtaacgcggctctcaggtcatcgtcgccgagctcgtcggcctttctcaaagcttgctcgatttgctcggcaaattgaacaccagcaacatgatccatctctctcgtatggtggaaattacaaatgttagccaggctcttcaattcgatcgcttgatattggtattactgtcgcgtttaggcgtttaattaacaatcagcgccttgtaaggttacttggcaggtcaactcgaaagtagtcgctacattgtcatcgctcgcttgatcttctgtttttcagtattttacagaacacaacactgaagtatgtgcgcgcacaataaccccaatgaacacatactctcactggaaccattttcgagaagagaacttttatgttgtttgcattccaaaaaggtaaagatccaacggttctcaatcataggaaccatgttaaaagtatttaagtattgatataggtacttaggtactaagggtaaaattataattttgctagtagagtgaaaatggtataattatttcctaaattataataggtaccgcataggtacgaccgcacgtgttaacatctatatggtgtcagcgttgtgtgtttttatttgcgccattttctcttttgcgtggtttacgttgtattcaagttaagtcatttatcggcactaatatcaatcaaatattgtctcctgttcaaacgctcgaccatgccaaaagcttcttcttcgaccgtgcctcctgtggctgcacccgtttaaactctagaagaacaacataagaggagatcttgttttagtcccttatgcaaggaatttgtgaactacataaataactaatcaactgcataaataagcaaagggtaacttacgaatacgcttgcctagccatcgatcggccgatcccgtctcctccaacccttaaccataccggcgcttctccctctgtctccctccggtgaacaggttcaaaccctagaacacacaagaagcaaagggagagaataaaggagacgcgagtgttacgttctaatcgatcgctaaagatctctaaatcaatggagtatcctgatttacctttttctctacaatgatatcgagatctactatgatataccgatcattggttggaggtattcaattcacgtaaaaaaaactcatgttttactagctaattactcaattgccatcatgttacaattattttgttccctaccttgcccttcacttgatcaatggtatagattattctatctccaagtacctctaagtacctcgcaaacaccgtaaaagaaactgggccgatatggcttgagattcaaaaattcaccatgtacgtctcactatcaagaagcacatggcataccattgaacaaattaattatccttaaatgtgaacacccatgttaagtttttttctcgataactcatttcttaataactagatgatgcaccgcactttgctgtgggatatatgttagataatggagaaatgatgaaacgatttggattaaaatattatcaaaatgatttgagaatgatgatctagcatatgtatgtttagttttagaaatgaagtaaattgtagatataattactatatgcttgcatgttgagctttgtgtgtttaatgggttgatgtggcatgcttgcatgtagaatttaggagtgctaataaatactatacttgcatgttgaacttagttatttagtgggcattagctttatagaaagaagagattaatgatatttcttctcttaaatcaaagggattgtattattatttggctgcccattgatcgcatgcatgattttccataatcctttttaatggagagcctttttaatatagagtgactaggggatgggatcccgtcataggtgtgggtttactttaatgaccaagctcccatgtcccaccaagctgatctcccgcatgcgaagcactaggactccctcggcttcttgtttcattggttgtagcaacaacagggaaaggagggaggaatcaaggagacaaagggagaagagataggaggtgctagcagcatgtggcttgccggttgatcatgcaagacatgcatatacctcgtcccccgctttgacacttggtacctggcttcccggactttggaacctctaggtaccagctgatacctaggtatcaaactacatacacctaggtactagagcctggtacctgggtaccaagcttgatacctatgggtatcaaccatgatacttacaggtatcggcctgatatatgcggatacatgtgggtgatgtcaaagttcaacaagtactagctaagtatgttgcacccatgatgtacttgcagacaacactggtgagcaacacggtggtgacatcctccagatcccgaatctcctttgccatagggttgaccttggagagcatgtcctttgggtcctgcatgatctcctgcttgctggtgtccccctcggctaccacaatagttgcggccacggggggtggcgtagtcagcgaagctcttgatgccaacccgacaacgatcatcccgagcagattttcatggcaaagagggatggaaagttcatgatggaggggtggtccttagggggtgaattggaggaggaggtgaagaaggaaggtacagggggccaaaccatggagggagcactgtagcaaggtgctggttggtggtggggatgagaggagtgggaagagaggataagacaagagtggagaagaaaaaggggatggggagactcagttctattaaccatcccatccacgcaatgccgtagtctagtttttctgtttttaataacaatacatcaaaatgatataattactcaaacatcattcttgcgctctacatagttaggatgcatacaacctatgattataaaaaagaacgacatgacatcaaatatcatgccgacaaaattcatgcagttgtcatccctacccgttttcctcttccttggttctcacagtgatcccgagtccagatctagcaccaacacttgtgcctgcccttgctgtctccattcttcccgccaccaccgcctcctcctccttcagtatatcagcagcctcttcaaaagctctgaccaccatttcccgtagcacctctccttcatcatctctaaccgctaatgccaccagatccgcttttgcagtccccgcccatgcctcctagctaaatgatatgccttgaacgcagccactacccatcctactaccctcccccactcatgtagtttcatcggtgtcatagcctgctcgtatctacctcccacagtcggtcctccaccaccccagccttccctcacttcatactacccctcccactgccacaaactccaaaaagcttaatctggctggagctggtgacaagggctccatgaggaattcgacgtttttgtgtagtcatcctcaccatctctcttcctcatgcttaactggaggtaaaagacgatttcttgaccttagatttgtttatccaataacgttcattattgtgaatcaagatttggaatatgaaagctgcattattatttcagatttaactgtcagttttagaactcgttcataatttgcttgtataatgcctacatgctgccctaaagttgaaatataattaggataaaacctatccttctaaaaaaatatcttatatctgtatatctattgatatgttattctttattatattatttagatagttcaaattcaagccaccatgttcatgctaaagacctaataatcacagtgttaattgcaggacaacatttacaccattacatcattgtatgtctagattataacggtgtagattgctcaatatagttatatgcacaatacaattttatctcttaaaaatccaagggttatataacaaatataattctttaaataaaacatatctattatgcaatgaacaatattgtaactatatatgaacataaagtaggggttttatatgaaatccacatataatttcattaatttaggctccgtgcaaaattgtgagtaaatctgctagttattatattattgtgatggaacaaaaaaggccaccatatccggtttagaggctgacaaatttccacaataatcaaagaaaaaatagaaacaattgcactcactactacaaaaaccattttcgcagacgtgaggtcttttttttccaggcaggtatggtcctcggagccaaatggccgcctacaaaaatgtaaaccggggtagagctcgcctagaaaaatggtttttgcccgcctgcaaaaagcatttttctagtagtgactgttagattgatgtgcgtcgagattataatggtgaagattagtcaacatatattcatataaatacaaattgtatttgtattaacggaaccaagctaggttgatgcaaagtacaattgcatttaagaaaacaaaagtaagagttgtatgcgaaatccatctagctacgtgcaaagtttctagagtctaggatgccatactatgagcagggatgccacacaacaacagtttgtttagactatagtgctcattataagaagttctctaagtctaaattttgatttcaggttggaatgtcctatactggtcagagtttctgtttttctagtgaacttgattcactgattgctctttgttggaagtgatcagaatatggacgaattgtcggaatgtctgatccattgagcaatccgttatttcaaggaactcagttctctgttggggttgaaattttcgactggaaacttcggatgttgcatcggaatatctgacatcccaaacaatctgatattgcaaggacgtcgactctctagttgaggcagcatccaatctgtcctactagtcggaatatccgatggtccaaaatataattccaatttaccatgaaactcaagtctctgtttggttcgaattctgaaatcagtgtttatgatggcaacatcagaatatccgactagttatttttcaaagaaattggattgtgttctagctgttggggacctgacatatggatcggaatacctgacctcacaattggaatatccgaggtgggatgaaatattcttctcaacaggcgaatttggggtttcctatttaaatccaccccctagcctcttattggttaagccattcatttcattcagatattccatggcttgtatattagaggcttgtgcaagagtgccatgtatctttagatcatattcttactctctcaaatccctcttgatctccatgatttggatctttgagtgtggatatggttttgaggacctagtgttgcgtgcattctctcgattattgagcaccatggtttggttcaagagtttacgacttctagatgttgacgacttctagatggctacaagttgctaccaagccaacaatatgaaaaggttggatcttgctagtgtggatgcaacctagaggatatggttagaaaagaaccgagtcgttatgagctcctcaacagagacgtagaaccccctcaaggttttgaactccggaaaatacatcgttagccctaatctcagggaaattatttgcctttttcactctcctcactttactacttgttgtcattgttagctagttattgaatgtgcatcattactatgatttgggttgctccagttgttttaggttattggcttggttgttgcgttctttgtcatgtcaaaagattagaagatccatctgtttcgttcatatccgatagctatcaaatatctgatctagaacggaatatatgaccagccttcgttttactatttcacactaagttttaaagagtctctctatgtttcaagcgatccattcaagaagtaaatcaaatttgattaatttaaaaactagcttcgttcaaatcacgtaggaaaattcgtcgattaccataaaatcaatcaatcaatcaatcaatcaatcaatcaatctatctatctatctatctatctatctatctatctatctatctatctatctatccatccatccatccatctatccatccatccatccatccatccatccatctatctatctatgtttatagtccattaaacttcttacaaatgcttctatattgtcacgtgacttctaagatgttacatgacactcaaataaattaanaaggaaattgaaaaaggcgaannnacccatatcgtagttgattctcattaaatttggtggacccattatttacaactattacacttatcttgaataaaaaaagtcaagtaccaaaccaggccctgcctacgcttgtatgtaggtcatacatccaccctctcttcgctcaatttcttactcctctttaccacctattccttatatattatgttttacaagcaaaatacccatgctttatggataaaagaaaatatgtaataatatgctatggagatgtttgcttaattgaacacataatattcactagtttcaatcaaacattagactattatataatattagaaaacataaggcattaacctccaaaagtacaaaagtagtggtggtggcagaaccaccacaatcagtgtcttttctagtattatagattcgttagaaagcaaaattatgttaataaatttagcaaatatgacatctataccacatccgcttatgtgtttagattatttatgactaaatttacttaaagaccaaatttcactatagttcgattttgaaaacaaatatgtcacttttggacttttgcatgacattcaaacaattattaaaaacatgaagaatttatcatcgtgcataacttcacaataattaaattggatctacaatcacaaaatgagcctaactatgagtaatactcccaaagtatattagttagaaagtaaaatttgttctagaaaaaaagattaagtaactatgatatctaaatcatacaattttttatccacttatgtctttagattatttatgactaaatttatatttaaagaaccatattcaatataaatatactttgaatagagatatgtcacttttgggatatgttttttgactttttcatgctattcgaatcattacaaaattatgaaaaaaagatataggatttattactgtatataactgcaaaatatttaaattagatatacaataatagaactgaaataaaactaactattactcatgttataaaatattacttcccccattctga

SEQ ID NO: 21807 - DNA, 21442 bp, Oryza sativa
gctccggagccaggttttgatcatgaacagcacaaagccgccgttgcctctgtctgcagcggcactcaccatatcggtgctgacgccgtcgtggatgatgctgctgttgctctgagagggaaatgacgccgaggaagtcctctagcttcggctgtaggacgagcgccgacaagaaatagatggggtgatggggattggggtcggccggtcggggatggattggggaatcgatggaggattggggagaagaagaagggcaaaactgtcattttgtatgatttctctctcatcaattgggtggatattatattttaatgtgttcagtgtcctgcagcaaattaccacattttttaagtgtcctcgggcaaattcaaagtctttgcggtgtcccacagctaattacacattttttgagtgtcctgtagcaaattttgtcttaaaatatatacacgtgaattatatgtcccaaaattatgtggttggacttatatgtgaattgaaggcccgaaatttaactaaaaaaattttagtttccaattaagtaggtaattttttttataaaatttgtgaatagagatttgtatctatatagaaactacagtcccgtaactcgcatgttcattttcgggatccctagcatgggttcacgtaggatccaggccgtgttcgtgttcgtgcgcacgcgtcagacgaccccggggttcgctatagtggtgtacgcagatatctcttcctagttcatggtgcccgaccgaggcaatctgaaaccatgcaccataatggcatcagatatatagagatgtgaactgtctcccatagagccacgatatagccaggtacgtaccttgtcctagcttctacctatgaattgtttggctaatcggttgtgcacatgcatgccggtttaaatgcctgtaaatgtggtatgttttaattttgtgctaaacttaagggatggtagcgatgtatatttggttcagtgggtatcaacactatatgtgatacattcgactttaagtttggcatatacaaatttaaacggaacaaaagtaattgtaaatagtacactgagttgttccactgttaatatatgtttgtggagttatatattataaatcatatattatcaaagtttattaaaaaagcatataacaatttagaagatgaaagggcatcatcctcggggaaaagaaaccatttcccccttctatatccttctaaaagaaagaactgaagcgaggggaatatattgtatcaacaagatctgcgcgaaatatgtatgcatgtgttgtttgtgagctataagtaaccatgcatcgacatgttcctcttgctccttgtattatcgttggtcggatatggcggtatcaaacactcgagctgtattgctcttgctatcggcgtggccatacctaatacagctttgttatgcttctactctctcttacaatttctcggatccacaaagcttcacctcaggggatctacattttgaaggtgatgcatacctcggcgacacctcggtcgtcctggccaagaagggcaccggcgaagtcaacccaaaggccggacgaatactgtacaagcaaccgtgccatctctggagcaacaccaccggcgaggtaacgagcttcaccaccaccttctccttcctcatgaacggcggacagggcgggctggcattcttcctcacgtcctacctgccgatggtcgccggcgccggccagaacgcgccagcaggcggcggcgatcagcaaacggtcgccgtggagttcgacacccatggaatcctgggtggagcccgaccatgtctacgcacaactcgtcggagaagaaagcttacaaggtcgtcgctggcgaccttgccaacggtgaatcgaagattgtgcggataaactacatcaatacatcgaacgttctcgctgtcacgcttggtgatctcaagacgagcacttctctcatactcaacacaagcgttgacttgaggctgtttctgccgcaagaagttaccatgggtttctcggctaccactgccacagccacaggctcttcacaactcgtgtcccgtgaggtgctctggtggtcattcagcacatacctgacagaaggtaatctgccggcactgaaatccactcctcttttatctggtatgactaagtactcgaattaataagggttaattggatttatgccactgtaaatatgacaattagaaaaatatcactactattcacgatataggctgggtgtcactggaattttgataaattagatccataccactccgtcgcgttttccatcctttcccgttagtttcctaactccgtgccgccgtgagggctgagaccgagactgatcaacaattgctgaatatctgaaatcaaaaaccaaaaacgatgtacaactagctaatcgcaacatgtaaagatggatttgtgaaagtaattaatcaatcaagaggtgcagtgtgtcactgatgcgacggcggcgtcctcgaccgaccgtccagtttcagcggcagaactccggcgttcgacagccgccccgccgtcggcttgaacccgaccacgccgcacagcgccgccggcatacgcacagaccctgcaaaagcgcggcagcgtcggtcacagtgcatgcgcaagatcgaagagatcgagaccgagcgtgtatgacggtttatttacctccgccgtcgacgccgagcgcgacggggcagaggccggcgcagacggcagcggcggagccgctggatgagccgccggagacacggccggggttgtgggggttcctggtggagccgtggtgcgggttgttgccgctggtgaggagcgggtcggtggcgaggagtggaggatgacgccggccggcaactccgccgccggcctcagtggcggagctggacagaaaatcgaagggggccagccggcttttgacagttcaaaaaattagcaatttctcttttttttcatgcattggcaatacataaaagcgaatagtttgcaaaagtcgacgacaaagatcagctacagatgttagattttgaaatttaggattggtgggtacatcaagttcatagtgacgtaattgatatctcaaattggctctcttgttctaaaaaatcagcaggatagaactttgaagctagagagcacactttgtcaatgttgaatgaactgaatgaatcacttggatccaaagatatacacaaagtgagaacctttgttgcttgttcactgaatctgctatgatatatggaggtaataaaaaattttgtttttattgggaggggccatggccccagccagccccccctcagttccgccactggccggcctttatgccctcggcttcatggaaagagtgggaaagacagaaaacgtgacggggtggcatgatccaattttttaaaatttcagtagcatccaaccgatatgacgaatagtagtggctttttttaatctgccatatttatagtggcatggatccagataacccaattaataatagttgtgataaagatctcatatagatccactcattttgttgaaagaattctctatactgcatggaacatttggaatcaacgaaatgctctcatttttcagaatgtaccaccttcgtttgtttcctagaaagctctctttaagattgatctttctcttttagtctttagattaaaagtttctgagagacaagctttatctcagtggataaacattttgtaaattatttgtattccttcttcccctacagtgtttcccctcaaaataatagtcgtgacgttgcattggattcaactaaatttatggatttggatttgctataaatgtggcgttgcattggattcaactaaacttatcaatttggatttgctataaatgtggccagttttttctacgaaaattagtatattttttggccataggatatatatgtgctagcgcgtatagcagaaaaaatgtgcaaaccgcggtggctgggagtggaatcaatccatgctattctaggttgtagtgatagcatctaaccaattgagcatggtagcattgttgataagttaattcttctatttatattactacgtaaatacattgaaattacatatataatttagaaacttacatcgtaaatacactaaaattatatatgtaatttagggacttatagtgtaatatatattgtctttttttcatgaaaaatatggcggcataaatagtctccaaaaaaaattatcatgtacttcaaaattatcataaattgggttaaatatggagtactctctctgttcatgtcacgcccggaatttctatccaaaattccaaacgcttatatgtgtgtaaaccctcgtccaggaatcagccgaggtacacaataacaaattgataatagagtacaattattactctaattaataagcgaataaaatatcattacagaggtagatagttcctctcaatcaataaagatctaagcagtggaaaaataaaataaacggcgcagacggctccactccacaggcagcttgaccaaggctacacctaatcctccacaccatcagcatcattgtagaactcttcctctgatgaatgattgcaaggtgagtatatgacatactcagcaagccacgcagcaaatatgcaagtgcacaggataacaaaggatggcatagtagggtttcatttgcaaaagcagcatttagcaaatatttgagaatttaataaaacggttaagtattaattaaacaatattaatccaacgctatacaacataccctgttgcataggcccaaccattctgaacaaccatcccggctgcacagttctatctccaaaccaggaatataccattccaaaccaggagctaaacagattattaccaattatagcatcttctattatggtgagaagggtgagactaatcatgaaagacattgttagacccgcccataaccgcgggcacggctattcgaatagttttactctgatcagaggtgtaccactgtacccacaagacacaaccccacatcatgtcaccatgtgcctcaataccaccacggtacctcggaaaggagttgtgacaatacccctcgcacaacacaatccactgcagtgcacttttcctggatcataatcacccccttataaacaaggcatggactccccagcgacccccgtggacttatctccgccacttctcagtctggtgctccgcaatgaaccatgctatacaaaagataaagccgttgcccatgctggcttgtggttagcacggttaatgtttcacaaccgaaactcgtgaaccggtccttaattgtcatgagcacgaccatcaaaaccatgtgctcacaacccaccattatcaggttttagttggcacattaattaactaaccaatcacgattgaccatcgtgagctatcattaagccatcattaactaacagtgagtcaagagttatcccaatagtgagctaatgtttctaagcagggctaagcaattatatctaatatctagttgaaccaatatatataaagctcaactagtcaagttatattaacccaaggtatcaaggaataaagtaatcaagaacaaaagggctataacaaacaacaggttaattccacccaatgacattcgaaaataaatgcaatagttgaatagaaacagtagctttaaataggatcaacatgctcaaagggttgtttgggatctgtgtgacttgccttgctggccttggaactcttcaaattcttctcctgtgaaaacggactctccggaaacgtcggaatctaagcagaaagaagcaaaatcaccaaaacagcacataaacaagcatgaacagtacatgtggatatttttaacatgtagatctcaattttagaaaaatttagagacttgaaccaactaaatccgagtaagatgaattagttatgaatttttgaagattaaatcggattaaaacacttatatagattttaattgaattatgacgcaataatgaattatttttgaaaaggaaaaagggatttattgcgtcagcaactagggtttcggtggaccgggcgcacgggcgatggttcacgcgaacggacagccgagatcaacttgatccaaaacggacggccgagatccatcggtccacgaccggctcacgggagagggcgacgatgacgtcggcgatgacgtcaccaccggcggtggctcggacggctcggacggcgcacgctcgccggcgaacggcggcacttcggcacgaacggagagcaccaatgggtagcggacggcgcggcgaactcaccggtgaccaaaggagcggcggaggaggaacggacggcaccggcggcgaggaggaaacggcggaggagatcgggtcgacggcggcgacggtgctccggcgatcttcggtgacggcgaagcggcggacgaggacggcgacgacttggtgatcccgacggtggacttcccgagcgacgacgacggctggaacggtggcggcgcgcggctggagcgacggcggcgacggcggctcgaggtctcacggcgctagggcgattccgacgacgagaggcgaaggcgagggtggcggcgggtagaggagacaccggggagccttttaaaggggctaggaggcagcggcgaaggcctacggctgccggcgacgagaaggaaaggtcgggcttcggaggaaagaggccgatccgaatcgaactcgattccacgaacttccaaaacgatttagccgatgtttccaaaagggaaaaggtagaggagatcccgaggatcatttcccctctatcaattcggccggaaacggaaaggatcgatcgaatttggaagggaacggcggcggcgcgaaactagggtttcgggcggcggccgaccggaggaagacgacgaccctgacaagcgggacccacctgtcagcgacagcgagggcgcgcgcgcgggcggcggactgggccggctgggccgaggagagagagaagggttttgggccgactttcggcccaaagccaaaagaagactttttaaaacctttttcaatttaaattatttatgaaatgcaattctatttattaaaaatacttccttagctcaaataaatctcagaaaaatctaggaattatagaattaagcaaagtatttaatgaaattttatctagcaccattttatattggaatttattatttaaaattagatcttctcttctaggcttttaaaataaattctaaaaattccaattaaacatcaatttatatatttgaattctcagggtgtgacagttcacctataaaaaatgtgaactttgttgaaacaccattgaaacatttcattttcatggatgaaatatcaagcttcaagccactaaaacatcacaaatatgcaagaaaaatcgaaggttgatatgaaacaccatcaaatggagtatccattgcaattcttcaacgcaacccaaagaaacatccgaaatatattagctgaaacataaaaagatcacaaaaatgtaccggtctcttactccttgcgaccatcttcattggcgctgccacccctccaccgtcgttcgccacctcgccagctctctatctccgctgtgagcatttgcatgtaagagagatgagagataaagaaggacacgggataggtggaatgaggtgttaggaggagcccgatattttttttccatcgggcgctcggataggtaacgttttcgacattttccttcacgagccaaataggtgtatatatagatggccataagacccgctcggcacggcctgacccaggcacgggctaggcacggcccgaggccatcgggccaacatggcacagtcgacacttcgggccatgccgtgccggcccacgggctgcactttaggcccaggcacggcccactagtagttgggccgtgccgagccaacctgaaggcacgggcggcccatcacgtcttctttaaaataagtctattccctctcctctttgggctgtgacatatatgtagctaaaataaggagagatactacagatggaattccgttgactgacgggatagattacacaaatctgatgatcgtaattacgtgggtggacatacatgcactagacaagaaaaacgtggtctcgcttctcttcttaggcagcatatgtgcatgcattttttttctagaaaaagaggaaaaagaaagaagaaaaaggatacttgagagagaaaaaacatagcactgaccaaacaaagctactggtacctactcgtatcaggtatattgccaatacctgctagctacacatatcatcactgatacgtgatacttacatatagcatcgttattaactagtactacctccgtcccaaaataaatatagttttacactatttatctccaacgtttgatcattcgtcttatttaaaaatttttttatgattactatttttattgttattagatgataaaacatgaatagtattttatgtgtgactaatttttttaaaaaaaaattaaaattttttaaataagacggacagtcaaacattggacacgaattaccacggctgcactttttttagaatggaggtagtaccaacatgtatcatcaccgatacagatacttgtgtgttaagcatcatgattgatacctgcaagtatcaggtatcatcgttgataccttaatgtatcatcattgatacctcaatgtatcatcgtcagtaccaataagtatcattatgtagtatctggtacttataagtatcatcaccgcggcaacatatcctatgcacacaggccctcatgtgtacacacgtgcataccaactaaaaaatgtcacaaaaaaatctagaaaaaatcatacacatactttcaattgtattacacctagggttaaaatattaacgttaaattcattatattttagccgtaacaaaaaaaacaaaaaatctgacagttttaaggttgcaattttgtcagaattttatcttttttgttattctctatgtagaatgaatttgaagatgcgactttgcacgtagatgtaatactattgaaagtacatgtataaattttcctagaattttttgtgataatttttagttggtgtacacggtgtgtacacgcgaggacctgtgtgcataggatacgctcctcatcaccgatacttgtatgtatcaggtaccattgccgatacttgctagctacacatatagcatctttattaactaataccagcatgtatcaggtaccattgatgataactgtagatattattgtcgataccaagcagttatcatcacgtactatcatcgctgacaccaaagatatcatatagtatgggtaatatagatgttcgtgtatcatactagagttgatatcactgtacacgtaaataaaaattctaccagctaagtgtttcatcttaatacatatgattaacttaaataggattagaaaaacaaatgttcctaatatgatcattctagcagcctaactactagactggttcacgtgtggcctaaagtcatagacacagacgtggccaccactcataacgtaacttgctggataggtctaggctctaaagctctagcaccgtctatataggacaatatatagagtgtagtactagtaatagtcaacggatttgtgggccctagttggttgattgactgactaggcacaaatctcgacgctcagtgtgggcagttgtgcgcagcaccttgacttgggcagcgtctaatttattttattaactatcccattacacaacggtatcccgtgctgtacattttctctaaaataagtctattttacattcctactttttggagcatgctatataatatgtctatttttctccctatactttgtgccgtgccttacatatggttgaaaataagtctgttttgcacccttaaacttcgtgccgggccgtgccggcccagcgtgctgaggtagcaccccacacacggcattgctgttgggctgggccggcccaaatcactgggccatcgggcctcgggccatatggccatctataggtgtataggctgacttgtgtaatggccctgaaggcctggatgctgccctctttcttttttttttttcccaatcctcttccaatcagggaaacctagctgattgatgcctctactgagatttgggagcgtcgtccggtagccctgcggccctgccatcgggctggggccggcagagcaaaacgctcgatgcctcatatgtcaagacttgaaaaatcaggaaataaaattaccaaaaataaaaaaaacagtgcttattaagtcatttggctttcttttattttaacatatccttgtatatcgttcttaacaagggacgagccaactactaattatagtctcccctatgattgcttatttgatcgacatgtttatatccttatttttctctaagtaggtgcatgtgtcttcagatcggaaatgctactaggcgagggcgatcgattccccccctcctccctctccttctctccacctggttttcttttttgtcaccgtattattttcctattttagtaaatttatgtacctaaagtttatgcacctcaagtttacacatctaaagtttagagaccaaaagtttataagtcaaaagtttatatatccgattcaaatttgaatttgaattcaaatattatatatatatatatatatatatatatatatattatttctatatatctaaagtttatacacctaaagtttatatatccgattcaaatttgaatttgaattcaaatatttttcatatatagtatttctatgcatctaaagtttatagacccgattcaaatttgaatttgaattatatccgatttaattttgaatttgaattcaaatattttataaatatagcatttctatacatctaaagtttatacacctaaagtttatcgatccaaaatttataagtcaaaaatttacatacccgattcaaatttgaatttgaattcaaattttttatacataaatttttctaactttttggttttttaaaatttttttatggtgtactgtaataggaagagaagaaagggaggaggaagggaagaagtgggaggagtgcctataggggggggcggatccgatcgctaggcgatcgcctgttaggccccccctcttcagatgttatatgactgtgagctacattcgttagtcccgctcgatctatggttctttgtacgtacgtattcacgtattatattgtgttacccaatggatattgccttcatgtagtacatatttttgtaattgcaatgtggtttctttatggatttccttggattggatatattggaacacccgtagtcagctatccaatccaacaaactgtgtcctgtgaccatatgggagtgggaatcgaactaacaacctgtgtcctgtgagatgtaatcttgtggtactagtcatctgaccgagcattgatgaagacaaaaaatagacaagttacacctatatttgttttttactaacaaaaaactgccaaccttttttagatgatggaataaaatccggcctttgctcaacgtgctacaaccaattattacataaattcgctcgaaagcgaccacacaccaaagagttcacataaacacatcaaaatttaatgaaatgcaagcacacaaactaataaacaccaacacaagataaaaaaacataatttattgaatcctttttgtgaatttccacctgaaattggcagagagctacatgaccgtagacttaaagtctccaacatacattctctattagcttgatgtcgtcatcacacctttggtgaatatgtaatggaatgaatatgtcgctagttttcatctttttgagtgagtgctaggggatgctggaaaaaaatgtattccttacagcagcaattgcaaatgtttgagaaggcgtcaattatctatctgttttgttttttctgtttgaaacgtatcaacgatctatctatttattttgactaaatagaaagcttctatttatgtgatcaggtcaaaccctgttcaaaagactaattaaataaaaatttgagcagtctttatgtttttttttctcttttcggtttgttattttttcactttcaggatgtgcttttgactcctccgctgtctttgctagcaggtactccggctgatacagctaagaagtccaacaaatcactggtgattggaattgttgttgggaacttgggactgtgctacttatagtgacgatgctcattgcagcttcactttgccgtttaagtagatggattacgtcgaggcctccacccatgccccttggagaatattgtgcaggcggtctttggccaagttatgggaatgtaggcatgggcactggagaatatggttttgcgtcgccttcacagactccgttttctttcgaagtattatcggaagcgacgaataatttctccgaggaacggttgctccgtgaggaaggtcagtttagtgcattctacaagggggacctgacacatttaggcatctctgtagctgctgctgtgaaatggctgaaaataaagtcaggacaggcctttgcggtggagaactacgtgaaggagtttgcaaccatcagcctagcgatcagacatcgcaacattgtgccgttcctaggttggtccagcgagcaagataatctatgcctggtatataaatatgtaaagaactggagcctccacgatcatctctacagtccaggaagacttcttacatggcctacgaggtaagaaaaatttagagtgcttttctgaatgaggttttgtatcgaactatctcacggtacatatcctaaagcatgaaaagaactactttagaattgaagttaattaaataaaaagggaatagatagagtccaaaattaaattgagcaatttttatgtcccattagagatacattattttcagtctcagttttatttgtgggtatcttaatactaatgcaaagggaccacctatatatttgtcagtaatgtataatttcctccaacctaattctacctaccttttgattttaggaatgaaatataagcatccacaactaaataagagggctaaacacgagtaatgttcttaatcgtagttttaggctgatgttctccctgtgttcgtattccaggtacaagatagtatttgccataggctccggccttaagcacctccatcaggacgtccgccccacattcccgcacggcaacatcaaaccaagcaatgtgttgctggacgaagagatgaacgcaaagctcggcgatttcgggctgcctcggcacttctttcagtacgatggtgaaaccgcctctagctcatatcgacaaatgccggtcagctctcgaggatacgtggaacctgggttactccacacggatcaggcaaccacctcgtcggacgtctacagcttcggagttgtgctgctggagattgcgtgcggtcagccgcctattatcctccagcaagaccaggctgaagcaaatagccttgttaaattcgtctgggagtgccacaaaaagggttcgataattgaagcagcggacaagcggctgaatggcgagttcaaccgggagcagatggagcgcgtgttgcgggttgggctcttgtgtgctcgccgaggcagcagccagcgcctatccatgggcgacgcaatgatgttgttagagggggttggattttgatccctgcagaagatatccactcgttatttgcatgtcactaaaattgttatgaaaaaaattaaaaatatttgaaaagatgtattaatatacaatcactctgaaaacatgcaagttgaaattcaatttctacatctcgtaaaaaaaattgactatgaataaatagctgtagtttaatttgttttttcattgtgagagtcggagtttgcatgtttgtagagtgatgtatcacataacaatacatatttttatttttttcataattatttaagtgacatgcaaacaacaaggaaacattccctcataaaacaaaatagtttcccttcttaaagtttgtcgtccctgtgcccaaccttccgccaaggattccgattccggtgccaacagctgcagatcatgaacggtgcacatcgcctgcaggtcgtacatcaccattgtaggatcgaacacaagtaaccaagcctaccagagggggggaggtgaatggtagggaaaaccaaaaacccaaaaccgtttagcggaaataaaagttaccctcaaatcgatggaaatctcgacgtagtcctgtcgccgctgatcggaccgctcgcacgccgtcggtctaaccgccgccttgtcgccggttgaaccgcctgcctgccgcgggtgtgaccgccgtactcaatgaaacacaaatcgaagaactctcaaagtagatgacaactttattgcttctctctgtgtttacaaagtgcaacaacaacactccttacaaaaatcttgactaaactcgaaaccctaactaaactatcaactcaattgctctcaaagcgataccgggaagcctcacgctccctctctatttataccaaaaaaacctcctactcaaagtaggagaacaactcctagtcacactaggactctatccaaatcacaatctcctaaagcctgcagcctcacaaccaactacagtcaatccgtgtcctagccaacccgacatggacacatgtccgtctcatacgaagtcccggtcggcctcggtctcctaccatggcgtcgctcctgccttggactcaccgagccaaaacacatgtatatgtatacatgcatccatgtactgccaactactgcagtacacttgcatgcatcgatcaataccacacatatgcatgctacagtaccacgtgtactatagcaccatgtactcttcctcaatttctcactccaatctccttcgcaaacaccagcacttgcacgcacacctcgtgaagcccgttgtgaagatctcttccacacgatgtccatccaccgtgtgacatctcgtatccaacttcgtcacccggtatccttgaccgtctggacctcaactcctccctgagtttagtcccgatcctcaccgttgaccgaagttgtcctccaagaatcctgactctagtcaccttctcacatggtattccaaccgcactagacctctgctcctccccgagcattgtcccggtcctcaccactgaccaaggctgacctcaagtcacatgcacacaatcagacaaaacaaccgtttctgggcatagatattacaacctgacccacattagtcacacgcactcacaccaacatccacacatactctcaaatcaattctttgattaaatcatttgcagagccaattgttcatcacaaatattaatcatgacaatgatttcacaaccatcagcaagctagcttacgacttcggtgtgttcaagtcgcatcgttataaggaaagatcaatatgtgaagacagggaggtatagctcgatctatatatcatcgattggtaaagactgatttcttattgtatcaagttaatcttgtttggagtccaagttgcatttagatacatacactagaacggataccctcatctcaaacaggcggtaagccccgtctcaatcgggcacggcgtccgtaacagtctagaagtcactgatatgaaaaataatctcaatcaggcaaacggccgtcactgatgaacctatctcaatcgggccctaattgaagcccgtcaccgatagctttgactcagactaccagtcaaactatagcctgtcacatatgacctatctcaatcgggccacaaatagagcccgtcacagatgactactaacctcaatcgggcttaaactagagcacgtcacaaatgatactcatctcaatcgggtctaaactatagcccgtcacagatgactgtcatctcaatcgggcattaactacggcccatcacagatgaccatcatctcaatcaggcattaagttatggcccgtcacagatgagtataatccacaaaataaaaactttgttttttggctagcctcaggcctttgctagccatgctcgctgcaaaaatgacagaaacacagatatccaatatccccagctccctagcatcacccattcatatatatgcattcacatacacaaccatcaatatatttcacacaaccacattcacagaacatccattttgatctcatatttcacatctatttaaatatttatcatattgcacatgcaaaaccaagttaattggatcaaatatttatttagcaagtattaacataaacataagaaatatataaataaatataaaaatcacagttacataatcaatgttcatcattgcctaaacataaaagttcaacaatgttcatcattttagtttaagccgaaacattcctttgggattaattatttcgcggaggatgaagccggctatctcctcgcgaatctcctcaaagctggtaggcagagacttggtaattttgccctacattgtcatagatcgagattagttgatcgatcatatatatgtacttcgatgtagttagttagtctatcacaattgagaccaccgacctcaaaccctgtcaaagtcttcaccttttctttgtacagaaggcgcatgttgtggcacacatggaatccgcactggtcacctatttgttgcttcaccgggaagtcttttttgtggatgaggatgtgatgtcttgtcttcctgaggcctcctctttgcacgtattgggcccacacttcatctatcgctagttgaattggggtccaatcatatgcgttcttatcaattctggagttcaggtagtgacatgtactccacttaggtgttatgaccagaaggatccaatggtcactacggcattaatatagtgaaagttaatcagtactgaaggaacgtgtcatgctgttgtgtatatttagggaacacacttaccattgattataggtgcacataatgcactccttgtctcagtgggactacaaggtgtcgtagatgtagttgaccattccttgacggtcattctcgagatttgtgacagtgaccacttgtggatcaaggaaggcagcttccggtgcattctcctgacactattgccaatttaacctacacgcaagataaacgatcttgtaagcgagttaaaccgattgttattaccaaattgagttgggcgacaatacttacaaggagtagcacttaaggaggcttgtatccaccgctcggagccagtagaggtcgaatagatccttaaagtcgaccacgatataatttgttggaccaagaaatggatttccatcgtgctctccaaggatatcagtagctttgtttggtctcctggcgttagatttctccatgtagtatacgtgaaggtccttgcaagcggtgcccattgcagcaagcacgtcatctccaaccaatggcatgcctagttagaactcctgtggagcgacgtatttcttcttgacctctttgcccttagtcttttcctgccccttgcccagatctagcttccttggagctagaagcgaggcctgcacctttcctcctcctcctctcccctttgcatgggtttatcgagagtaattctctgaggggaagagtgtgccttcctgctcttcttcatcggtgggggttcatgaatcgccttgctgtcggcctccgttcggtcctcccaaaaatccgtgtcgtacttcaattgcacatcataagattgtgcatgacgatcttgagcaggaggggctgaaggagaagaggagggtctctttggcggacgaccgcctggttcaatggttggcctcgctgtaacccttatctcaatgaggtccttgggccattggatgaaggtaccacgggcatttcctagtgataggacctcgtcgttcggtggatactttagtgggaacagctcgtattcgggcttcaccgagttgacttgaacttttgcacagtcgcccctaagttgcgctccatgcactcttgtctctggggtcggcttgtacgcaagtccctcggctgctggaaccgtgaaggtcggcatcaccctaactgtgagtgtgcagctcgttggttcctgcgatagattcatcaatttttagaacattatataacatatggattcgttaagcctttcatgtattgtggacgaaacttttaccgttatgtggtcgacggcgctgtcgaccaatgttggattttccgccacctcagttgatgcgcaattgctgcgcttttgggtgggacttcctaactcttcgtcgcagcagcaacagcggcctgtgggttatgttgctcttctcggatctcttgcctaatcttggccctcatcgactcgagcttttcattgaattcagatgccagctccgctctgatcgacgccgggatcttggctttaaggcgtgcatctttctccgccttgttggaagtccgcttcttggactgccacgcgtagtctggaaatccaaacttctagggaatggaggacccaatgccccgtgtccttccacggtgttccttgttgcccaacgctttcgtgaggaggtcgtcctcgcgtctttgagagcaggcctcttgcgaggcttgttgctcggcaaccatctccttatgcattacaatttagttgggttaaataaactgcatgataggaaacaatgtgatcatctattttgactagacacttactatagcttcgtacactcgttgatcttctggatttggcatgaaaattgtgccattagcattcttctggtatctagccctggcccagttcctagcccgagggtgtgggatatcggcaaacacccgcggcgtgttcgattcctcctcttcttcatcctcctgctgccattcctcttccttaccggcatatccggcggtgccaagctagtgtggatactggttcaaggtctggagcatcgaaatgcctcgcttcttgctctggactcggtggtcgacttctttgcgtggaattcgtcccagacccatttcgtgatacaaggaaatttctctgttggatcgggattcgccgggttgaagacgaactcgccgactagcttactcttaaagttcttccaagcattgcccataaccttaaaagcagcctgcctgataaggtactcgtgctcctcaggataatcaaaactctccttgaatgttagccaagcactgtccttctctgcggccggcacttgcttgatgtcatcctatagaatattgaatttctgcctccctatgaccccgcagatagacctaaatcggctcaacattttcctaggacttgtcggcaagcctatttggttcactgcagttatgcggtaccgttccttagggattttgttccctgtcctaggagtacgtgcccttaaggacccactagttgttgtcgacattggttctccttactgagatattgtctattttttttcaaaatagcgagaatacgcgatttagtgcttcaatggctaagaattcaaatttcaaaaatcacttagtcacataaataaattaaattgcacatctcacagatctaacaaactgaattgaatatcacataaaaataaattaaacatatcatcaatcactaaaatcagctattcatccacatgacacattcatctattcatccacattcatctaatcatctattcatccacattcatctatgcatacacattcatctatttatccacattcatctaatcatctattcttccacattcatctattcatacacattcatctattcatccacattcatctatccatctattcatcactaaaatcattcatgcaccacattcatctattcatcattcatgcgcgatggaggactcacctgggggtcggcaccgggctcggtggaggcggtggcctcgggctcggcgagggaggacgacggcggcgaaggaggagttggcggcggcctcgatggcggcggcgctgggctccgtagagggtgtcaccggggtcggtggcggctgcgccgagctcggtgaaggtggcggcaggctcggtgaaggcggtgtcgggcgtcggagaggaggatgcgacgacaacgaggaaggacgtcgccgggctcggtgggggtcggcggcggcggtccgaatggaggacgaaggaggagaggcgggcagcgacaacgaggaaggccgacgccggttggtgtggaggctcggtggcggcgacggcgggcttggcgagggaggatgacggcggcgctagggttctgaggaggcgggaaactgtagcgggacttagaaaaattttcgatccgatatgaaaaaccctagttatagtaaagtgatttgtcatctcaaacgagaattaccatagagcccgacacagatgagtcatcggtgacgggctctatactaatgcccgattgagatgacattcaggctcgtcacggatgactcatctgtgacgggccctacggtaatgcccgattgagatagattagtctctatcgggctataactaacgcccgtcaccgatgactatttttctatttttccatttgaagtatttatatctgtgagtgcaatatatataactgttgtataaatgatttcaaatggaaatatggtcaacaacaaagttgtagagcttaccaagatctacaacttttattttggtcatttttctacataacttttttcccaacagtttgaaattgaatttgaatatataacaaatttaagcagcatttgtaaatactaaatgatttcaaatggaaaagtcatcaacaaaaaagttgtagagcttatcaagatctacaacttttgttttggtcatttttctatataactatattcccaacagtttgaaattcaatttgaatatatgacaaatttaaacaacatttgtaaatactaaatgatttaaaatggaaaattcataaacaacaaagttgtacaactcatcaagatctatcacttttgttttggtcactacttcatctgatagtaacactgtttagaaaattgacacatcagtattgatgttcataaaccagatgagagaaatgtgatttttgtgaataatattactatcactttgtcggatgaaaaaatgaccaaaacaaaagttgtagatcttgatgagttgtacaactttgctgtttatgacttttccatttgaaatcatttagtatttacaaatgttgtttaaatttgtcatatattcaaattgaattttaaactattggggaaaagttatacagaaaagtgaccgaaacaaaagttgtagatcttgatgagttgtacaactttgctgttgatgacttttccatttgaaatcatttactatttacagatgatgtttaaatttgtcatatattcaaattcaatttcaaactgttggaaaaaaatgaccaaaataaaagttgtagatcttgaaaggctctacaactttgttgttgaccatatttccatttgaaatcatttactat

SEQ ID NO: 21808 - DNA, 4478 bp, Oryza sativa
atgactcatctatgacgggctctatgataatgcccgatagagatagattaatctctatcgtgctataactaacgccctttcactgatgactatttttccatttttccatctgaagtaattatatctgtgagtgcaaaatatatagctgttgtataataactcatattattagtcataattttttttcggatagtaaattatttcaaatggaaatatggtcaacaacaaagttgtagagcctttcaagatctacaacttttatttcggtcatttttctatataactttgtttccaacagtttgaaattgaatttgaatatatgaaaaatttaaacattatttttaataaaacaaaattagccatataaatgactacacatatcaagtctttgtaataaaacaaaatacttcattcattacaatagataagtacaaaggcatcggtcatgaggttttgccttccgtatgatctgaacgagcatatgccacagcctcttggggatcatcgtcaaggtcgatgtgaggtcttacatgaagattctggttgtattttgcttcatcgacgacgtggtcaactccgacaattcggcgcttgccatccctcacgatgtgcagcttcttgtttgaggggtcttttatgtagaatatctgctcgacctgtttcgcaagtacgaatggttcatcagcgtatcccacccttgataaatctactaaagtgaaaccttccttgtcagctttcacacctgtgcgtagattcacccaatggcagcggaacaaagtaaccttgaacttgacgtactttagctcccagatctcctcaatgcggccgtagtatgtgtttgacccgacttgatcctggaatgcatctatacggacaccgctgttttgcactatgcttttgtcatcttgttggacggtgtaaaatgtgtatccattgatgtcgtatccgtgccatgtgtctacggtccaagacggtcccatcccaacaactgtactatctcatttgggacatccgtggatattgtcacacgattcatgaaccattcgttgaaccgagaattatgttctctgttaatccatgtatcagatcgccccaagttcttatctcggattttcgctaagtgctcctcaaaatatgggccaacttctgccatatgttggagcacagcgtaatgagcctgcacataggaagcctgacaaccttccttcatgacgagacgctggaactctgataggatcggtatcgaacatgtaattgacgcagaactcaatagcgtcctcggccgtgtaaccttcaatgatgctcccctcgggtttagctctgttacgaacgtaggacttcagaactcctatgtacctttcgaacggccacatttctcttagaaaagccgggccacatagttttatttgcttcaccagatgaacagggagatgaaccattatatcaaagaaagacagtgggaaaaacatctccaggtgatagagggtattcaaaatatcggtctgcaacccatctagatcttctggatctataaccttctgtccgattgcattgaagaaggcgcacagacgttagatcgtgtgacgcactttgggtggtagaatgcctctgatagcaactggcatgatttgtgtgattagcacgtggcaatcgtgaaacttcgttccaaccagttttagatcatccaatttaacatacttagttatcctcgctgaatagctcgatggaactttaatatctttaaagcatgataacattctgattttctcatccttcgacaatgtgtggcaggctggagggaggtacactctacctgtctctgcctctcgtatgggctggagttcactgcgaatattcatgtcctgtagatcaaggcgcgcgttcaacccgtcctttgtcttcccgagaatattcaacatcaggctaaccaaactctcacacacattcttttctacatgcatgatatcaatgcaatgacagacatcaagatatatccagtaagttagccgccaaaatatggattttttcttccacataccgttctgctttgtcttgctacgttttcttttcttcccaaactcattacttatgtccttgaccatattgtggaccccatctctggacaaatccttgggagcaggctaaagttctctcttaccgttaaaaattttcttctttcttctaaatgcatgacgtagcgggagccacctccgatgacccatgtataccatctttcatgatttcttcagccaccggcttcgtgtatgttgcttgcaatcggagcatgccttctttccttttatagtttgtccggaaagattaccgagtgcagggtagtcattaatggtgcagaacaatagaattcttagcttgaagtcctcctgaccatatgcatcccaagtttccacactttcttttcaaagaatctcaagatcatcgataacaagctccaggaatacatcgatatcattgccgggttgcctcggaccttggattaacaagcacaacataatatatttccatgttaaagcataaccatggcgggaggttatagttcgcaataagaactagccaagtgctgtgagtactactcatgtgaccgaaaggattcatgccatccgtacatagacatatcctcatgtttctagggtcggcagcaaagtctttgtgttttcgatcgatatttctccattcaatcgaatccgctgggtgtctaagcatactatcattctttctctccgtggcgtgccaacgtagtaacttcgcttcgttggggttggcaaagattctcttgaaacgatcaatgatagatagataccacacaaccatagccggaccactcctctttgacttctttccttcatcagcacttttctttcgcttgtatcgagaagccttgcagacaggacaagcatataagtctgcatattgcttgtggtacaatatgcagtcgtttggacaagcatgaattctacggacctctaaccccagtggacacagaacctactttgcttcgtatgtcgtctcgggcaatatgttctcagcaggaagcatagccttcaaaattcctaaaagatctgtgaaattcttgtctgtccatccactacttatcttcagcttcattaggtccaaggtaactgacaacttagtgtgtttttctttgcatccggcgtatagagacgtctcggaatcactgaccaacctgctgaacttaatggaatctctctcattctgggctgggtcctcaacgtcacttaacatgtcttgcagcagatcgtgatccacatcaaccatttcaccgcccaattgagaaggtataaacatgtcatactcatcttcatcttcctgattatgcacatcacttctgtctgctgctgctccacttcctgattcttgctctccatgcttcacccaacatgtatagcccttcatgaatcctcgttatatcagatgaccgtgtacaacctctccgctatcaaacatattctcattcttgcaatttgcacatggacaacagatgtaatcgctgtttcttcttttcctatcctcctccgcggcgttcataaaatttattacgccatttctgtacttcagaaaatgacgtttcacagttgtcgcatacattcaacttcgatcaattgctacataatgaaaaaaacaaattagaggcacatcttataagatcagtattgctaaagtaagacgtgatgaaattgctgaattaatgattagtattactcacttgattgctccattttgatcacttttgggaattttctgttttccttggaaaaaagacaaaaaaaattgccccctacagcctcccaccaaaatagtgaacagtgagatacagttacactaggtggggggtatttatactgtacaacaaatatctgtaacggccctaaaacaatcaaccgtgacgagcatacaagtaatctctatcaggccttaataaaagcccgtcaaagaagagtgtcatctgtgacgggcattaaacttatctcaatcgagcctctagttggagcccgtcacagatgaccgtcatctgtgacgggcttcttttaggcccgattgagatatggaaccctcatctcaatcgggccttaactatggtccgtcacagataagtgttatccgtgatgggctctagtttaatgccgatctagcatgtctgtgtgaccatatcttaatcggacgaaacttcggcccgattgagattactttcttgcgacggtccgcaaattccaagcttgttaggggccgtcacagatggaaggatatgtcctagtgatatatgcagcctacagaacgtggaagttcacgttgaggctgccatatcccttcagctcgtttggatggagtgagtcatatgtagaattttttttatttataatttttcttattaaaagttttacaaaaataattttccattttgaaaattgacggaaatagtcgcctaccgccctctgggaggg

SEQ ID NO: 21809 - DNA, 2549 bp, Oryza sativa
gccctccacgagggcgattttgcactgtgcggggggccgcctgcaaatgggcggcgagggggcatggaattttgcaggcggcccccttgccgccctaggggagggcgatttttgcctccccctataaagcccagcccctcccctatgaaatttcattatattcactaaaaatccaaaaaaaacgaaagagagagagaggggagggcagcagaaggggagcggcgaagccctgctggttcgctcactttatcacaggtatgctcccatacatcttttgcatttgtactaatatattacgtttgagtacatatgttgcgttttagttttagttccatatattttagcagatctatagcacacagcacatatgtgtagatccagagcatagaatataatagtatgaattgagacatagacagtagtgttaattgtaagatgtagtttagtttgatctggagaatgtaacctacttttagaaatttagagaacaatattgtagagaatgtaacttagggcgtagtacagaaatgcgaggttaacgcagttattgttttcatcaggcacaatgtcaagtaaggtcacatttcagatagttcacggtgaaggaaatattagatttggtccagatggtgttgatctgtcagattttgtaatgacatctaagggcatcgataggcctgcggagagaacatttcagtcaatttatagttggttgttgagaggatttagaatagaccaagaagtctacacaatgtcagtatctgttgtagtgagtcgtgcaatagaaggttatttttgggaactaatgccgatggacagcactgctgcttggagacggtatgtggaaatggcttttgaacggtcatggcccctcgttatatttgtgtcggtacaagagaaagatacaaatgtttcaatgcaaaccgaagatgtggagggtcctagcaatgcaggggatgttgttggaccatcgatgcaaaatgaggaaaatcaaccaagggaggagcaggccatgggcatggcggatgagggggagagagtcggtataattgttgatgaaatggagagggaagattcggataatgagcaagcggaggacgacgcatcatccgatgaggaaggtgatgtaatggccactgattgggcaaatgaggacttctctggtcttgttatatcagagggtgatcatgtaccctgggagtataaggagtacgaggtaattgagggtgcaaggtatgctcataaggatgagatgaaggaggcggtgaagcattgggcagtttcattgcagagagagtttagggtggtcaagtcaacaaattatgtgtatgaagtgaggtgcatgaaggaagattgtccgtggcgtgtccatgcatataagggtaaatggaatgattattggaaagttagcattgtgaccgagcacaagtgctacttacaaggggtggagaagtatcaccgaaacatcacttcagcttttgtggcaagtgagatgtacagcagtgttgttggtaacattggctttgaaccaaaatcaattattaggcacatcgagaacaaattcaagtacaccataagctatgcaaaggcctggagagccaaacaaaagatcattgagatgaggtatggcacatttgaagcttcttatgataatttgcctcgtttgttagccaccattgcccagaggaataataatacttactatgacctacatacatttacatcggttgaagatagaacaaagagtgtgctgcaaagagcctttttctcattgggtgcttgcatcaatgcttttgtgcattgtcgacctgttctatgcatagatggaacttttatgacaggtaaataccgaggtcagatattgacagcaattggctgtgatgggaacaaccaggttctacctatggcttttgcatttgtagagagtgagaacactgaaagctggtactggttccacgcgtgatcgtcttgtcacatctaatgaataatgtatctcattgagttcacatatattgcagtgaaaacgacgctatataattgacaatctgaaggcaacctcttcatatcttctttcccactaccacaccacacacgaaaatggaagcctattaattggtaatacgtaatctagaattgagattatgtacaacattcttcactacaattttacattttggcagcaaaccaaatattgatcaaatgcaattttaccttaccaaatatttggtagtgccaaaacttgcttatattttggcattaacaaaatatttgtacggtaacattccaaatatgccctaaaaaataataaaattgtattttaccaatcttggagattttaatcttgtatagttttcaatataaaaagatttgataactattgatattatataaaaaaaatatagagcacagtacaaaatcgccctcccccagggcggcaagggggccgcctgcaaatttccatgccccctcgccgcccatttgcaggcggccccccgcacagtacaaaatcgccctcgcggagggcggcaagggggccgcctgcaaatttc

SEQ ID NO: 21810 - DNA, 5354 bp, Oryza sativa
ccgccccctgggagggcgatttttaaaaatcgccctcccagagggcggtaggcgactatttccgtcaattttcaaaatggaaaattatttttgtaaaacttttaataaaaaaattataaataaaaaaaattcgtcatatgtaaggatggtgcgtcaaagtcagctgttttagtcggtggtgagtcacgttttctatttttgcacgagaataaacggaaaatgcatgccgttgcaagttaaacggcacaaaatgtcacctgtgtattcatctttgctccagcaaatgttcgtgtgatgtgcatctaatctagctaagcagtaagcagcgagaacgtactctgttgtgtacacctcgtgcttgtgcggtagcatggtctgtcgatgtgtcttgtctccgctaccggcccatcgtgcattgccgatcgagccggcctcggctgcaattcgcgtccttgttgctcggctgcattgcctgggcgaggttccagggtggaccgatgtggcccggtgcatcgttcgtctgttgttgggctggtgaatatcgatcaaagacaatgctataaactgaccttttatttcttgcaaaatgttatgactggcgctgacaatacggcaaaattccaactatactgattacttaatggcgcgtatagatggccatatggcccgaggcccgtgggctggcccaaggcacgccactttggcctagcccaggcacggccgggcctaggccgtgccgagcggcccatttggccaactataatggtgcgtcgttcacttgcccctttcgtcccagaaaaaaatcaaaccctttttgggacagagtagtatttgtcattagaaaattgataggagtatcagttgcacatttgggcccaccctcttaagtctcaacactgtcctttctttatctagcaagatcacatcacaaaataggccaagaaaggtggtgttattttctcctaaagatgaagattaagtttttacgcaaaacgaggtggtgttattgagttttaattattacaaattgaaaaattgattaatatgatattttagagcaattttcatatagaaagttttcgcatgaaatacaccgtttagcagtttgaaaagctgccatgaaaatcttaatcttcatccaactcttgttggagaaaagaacgggacctttggccacgcccatgaaacaggggctactgttgccaatccgttggtttggagagagctcatatgatcccatcccaccacatcaacctctttggtcaccacctctgtttgtttctctgtcgggccaatcgccattgacgcagagcaccagccatggtgagagagtgtcattatagacggattgggaatgttgcccacagtggagtatagtaaacgaatcctcttcaggggtcgaaatataatccatattatgtgcgtggttactcttcagtcttcactcactcttcaatcttttcttaagagctaatgggcgaacgtgcgccaaaccgatctcacgaataggtatgggaatgagatatttcttcacacgtgcgcgtactgcttccgtttcttcacactaaggtggtgtttgaatctcgtgagaatgaagatgaagataaagattaagtgtttcacgtaaaacgaggcggtaaataacgtgtgattaattaagttttaattattacaaacttgaaaaatagattaatatgatattttagaacaactttcgtatagaaagtttttgcacgaaacgcaccgtttagcactttgaaaaacatgctatgagtatccaaaaatttattatccaactctaaaatctgtcacatgacagatagcaattccgaataaataaagtgcgatacaaccagcgcgtggagttgggcttcaaattctaatcccactcgtttccgatgccatactctagagatatgttgaaattagaattcagcaccaactttagccgaacccaactccgctcgaagaactggaaccccaaacccaattccacggaccggttccaaggatccaaacggaccagcagctgcttccaggaaacaaaggatcgtctctcgttagaagttaccggtgcctgatgaactagagtctcctcatcaggctgcgtcaaaggggaagaacgtgtcttcgtttctagcgtggaattgaacgaccagagcagtatgttgtgcagctgaatcgggtggccggtggtcgacgagaagccgacggccacctcgctcggcaagcttctcctcagatcaacagtcgagttgatgcttctgcagggcgcgccgccgatccggacagattttgttagcacctgcgttctgtggtcgtatccaatatgcacgaacactgtgccttcgccgccgccggccgatccgtggttggtgtctccggccagtgaccacggtggtgttgatgatctgcagcttgtagacgacgatggatgtgacattgacgacgaccgtgctattagtgtagtctcgaactcgacctcctcaatctgatcatcgccgtccgttgtaacgcttctgctgtttctgttgctcgacgggtagtaaggcacgaggaacacagacatgcgaggaggagagccgccggcgccggcgccggtctgctgctgcgttctgaggcagaaggtcatggtgaagctcgcggcagcgccggtggcgttgtcccagagcagcacgggctgcgtgtgaagcaccctgccgacgctccggattcctttgctccacacggtagtagtactgtctccatggaggcggccatggagatcgaggatgcttgtggtcgtcttcaggtagaagaggctgagatctttagtgttgtagtgaggctgggaggagaagtcatagctgaaggagagggacgaaacgccggtaggcggatgggtggacagcagcgagatcagcagcacggagagtagctgccgaggactcatgttgcaggtgcagcagatctcatctcaatggctttgtgcagcaatacatttgatcggtaaatataactaggtataccgtatacactaggaatacataggagtacatttctaaccctgatagcctgctgaaacatgattggcttgtagtctttcgtcgtagacgacagatatcatcgatctcgatctgaactcaacggaaaactagtagaataagagcccgacgttgctctcatcacgctgagcgagtacaacttcacaccacatgacttccgtcttccggtcgtgatccgctgatttcccggaaatttcgaccgaaggtgctgcgtatggtacacaacatatttaagtatttggtgtttaatactttgccactatatttttcttgagaaatacagtgcaaacgcatgtattcacagtgagcgcaaacttacccatatcaacgtacaagcgcacatcctactcctatgaacacaaacgcaggggtatataatgggtgcatactcaccactatgaccatatgaacacaaatgcaggtgctcacaacccgcgcagactcacccatatgaacgcacgcacatgcactctacccctatgagcacaaatgcaggcgcacacaatgggctcacgcccataacgcgcgcacaatcactcatataaacacatacatgcacaccctacttctataagcacaaaccttctccataaccctatgaacacaaatatacaggggtctataaacacctttgaaagacagggtcggcataccataagtttaaggaagtcaccacgggtgcctatgaacacaaatgcatgtgcctatgaacacttttaaaaaacggggtcggcaccacgggtgcctcgctgttaatgggtacgttgctgaccaccgaaaaaataattaaccataaaaacaagcacgtgttaaataaaggatttgaatccgggtggatttattccatcacaagaatctaactagttaagctatgcttacttcgcttttgccactctattctctatcagcctcatcatttggcatattttctgaatatgccaaatggcatatttgcaaacgaaaatcaatttgtgaataaaacttttatatatgagttcttagcgatctaaaagcaaaggctgaaaaataaacttcaattaaaaaaccccaaaatcagctccaaatttaatgttgaaaatttaaattttagctgataaacatatgaatatgccaaacaatgaggccctgtatgtctatagaggagtagtaacaaattgttaaatgccatacttaatagcgtggcaaataattaaatataccaggtccagactccagaatgacagaccgaccgagctaatccgctacacaatttcctcacagcgtacggcaccaaattcccttgatgggcggtcatcttattcataggattcgcttagcattgtacaggggtttgcacttgcttttcaagagcatttatttagttctgtttccatagaacgcatttgaatattttattttttgtactaagagtttgcaatctgttcttgttcaacttataaataagctcactaatttttcaaaagacgactcccctaacaatttaaagcgatctatgaaacagagacggtgtatgtgttggggaggggatacacgatctttctcaaaaagtttaagcctcgagaagaattaagaaagggctatcctgtattaacaactggaaaaggtccatttcacgtcctcaagctatttcattggatcatttaaccacataaactatttttttcctcagtttacccccacaaaattattgaaaatggttcactttaagcagacattttatactatagccttaaatgaaacaattatcaaagtagaacagtcaaaatgtactgccaccgtgttggctccccatgagggcggacgggcagcgacaaccctagcagctgcccgagcgaggtgtcggcaaagccggtgactcgctaggacggcggcagcgggcctcacagctcccgcctctccagatcgagcacgggcggatctgacgatggaggtccacggtgccgtttcggcactgggcagagagcaaggcggcagatcgcggcctagggcaacatggcgtcgttggacctcggaggctagcgaggatgtggcgctagcatcagaccctccttcaccggtcggcgaggagactggtaggtggcggggtagaggaggtagcggtgatgatggaggaggtggcgttggaggcagggacgaggcagcgggctcagttacgggaagcgccgctagatatggcttccccctcgcctaatccggtgctcccctatttcggatctggcctcttcagtgagggaggacagatcacatgtggttgtgattgcagctgaggaggcggtggctgcggcgtagagagtgcgatggcgcatggtg

SEQ ID NO: 21811 - DNA, 13230 bp, Oryza sativa
tcctgcagccctagccattgagatgagggactcccccacttatatcttaggtcctttaccctttcacaaacaatgtgggactattcaaccctactaacttcaccatcaaagttcaatggtttgctagtattttgttgatcaattttcaagttgatgagtgtgcatcatttttattgtgcagtctattaggctatcctgaattggcctggttgttgtcagtgggtctttccagaaacacaccttattaaccaccaaattgatcaagtaagaaactcaaaagatatatcttctattagtctcaaattttagaaatatattacgatttctataaattttgttcgttagaatcgttgtatgatttctataataaaaaatacatatcattacactgcaagtgtgacatccctgagttaacatgagactgcaagtgtgatatccatgagttaccattcgactgcaagtctgatatccatgagtgcaactgttatctctgttctccaggtagaaggtctatctttaaaaggcaaacatattcagcaaaaaatgagttcgatatcgtacctttcggcccatgttaaaaacctctcatttttgtatatatgcttgtcaagactaccttcagatacgagctcataaacaatcaggagacccgtgcaactgccacacccaggttcactatatcggtttagtggttttgatcgggggtcaccgaaatcccgaaatttcggaaatttcggaaattttggtccgaaatttccgaaattttgaacaaaatttagttgaatttgaacaaatattacccaaattcatgaaaaaattaaaaaaattcaaaaaattcggctgaattaatatcgtttcggaggggaccaaaatgaatttcggaaatttcggtccgaaatttccaaccctagtcacaccaaccaattaattggacaaggtttcgatgcctcaaccgacttatgatcttgatctcagcctcaaactccttcctcccctgagcagatgagtctggtgagaactttttgatggccacaagcctttcctgatcatcaattttcaggcatccgtggtaaacatgaccaaaaccccctcttcctagcttcttctcctcagcaaagttacccgtcgcagcagcaagttccctgtaattataccttctggggccaacacctttcgcaaattcaatttcgtcaagttcaacctgacaatttccatcagagattccatttgatctcttccatgctaatcgacgtcttagaagaaaacccatgaaaggacataccagcacaaaggatactgcaaacgcaactgaaattgctattgtgccatgtaattaatttaccttgtgatctgggggagctcactttttctgggggcactgctgctcctggtgacattattggttcagagctgacagtttctgggggcacaggtgctgctcctggtggcattactgaaaaatccatccatgttagggtggagttgaatgaccatgacagcacccggtgtacctcaatggagcttccggtagaagcagagaaaccaacagcgaccacctcaggcaagcatcttctcatgtcaacgctggctgtcgaaacaagatttcggcaatactaaaaggggtggctatcaagctaggaaagtggatgggtttagagacaaagaattttatacaggttcaggccttcttattcaagaagtaataccctactcctgtccggggatgattccgccgagtgtattattgattgtatgatctgaggaaaaaatcgcgccctgagaggcatccggacccctccttatataggggaaggggtccgctttacaaaatacagtccatatcccaacggaacatgggattacagataaaatacaatcgtaaccgactaggatcccgagtatttccttgacatacaagtttagaatctaacccgagtcctcgtgaagatattctatctctattcggtaccctgtacccagctggaatataactgccatgtagatatggggtatccataatctccacagtagccctcgagacctttgcagtcgacgaaatagccatcaccccctggtactagacccagtggttcgcaatgtcaagctccggagaactctcatcgatggtggcaatgcactcaacatccttttcactaagaccctggacgatatgtagattcctcgcacggaattaaagccgagtaatgcacccttccacagtgttatcccaggattatcagctacaccacttggccagatcactcttccggttactttcggcactcgggagaattttcgcacagaaaacgtttgtttcgaagttgctgatttcgagacagcgtaccatgctatactcggacgaccggctctagccaaattcatggccgtcccacactacacctacatgatgatgaagatgcctggtcctcgaggagtcatatcactacggagcgacatcaagcaagccgtcacatgtgacaaagaaagttgcgagatggcccaaacccgcgagatcactctcgctcgcgaagagatccgactggctgcgaccacggcaagcgaaggagaaatgcctgtgaccaagctgtcaaagaccgaagaaggcgacgacaaaactaagaagattccactagatccctctgatcctaccaaaactgctgtaataggcgttgagttagattgtaaataggaaagcgcgctcatcacctttcttcagaataataaagatatttttgcgtggaaaccatccgatatgcctggtattcccagagaagtgattgagcactctttacatgtcaaggaagacgccaaacccatcaaacaacgactccgccgttttgcacaagataggaaggatgcgatcaaagaagaattaaccaagctgttagcagcaggcttcatcaaagaagtcctccatcccgactggctggctaacccagtcctggttcggaagaagaccgggcaatgacgtatgtgtgtcgattacaccgacctcaacaagtcttgccctaaagatcttttcgggttacctcgcattgaccaggtggttgactcaacggccggctgcgagctactcagtttcttggactgctattcgggatatcatcagatccgactaaaagaatccgactacttgaagacctcgtttattacgccctttggggcctactgctacatcaccatgccctttggattaaagaacgcaggagcaacctatcaacacatgattcaaagatgtttttcaactcagatcggccgcaatgttgaagcttatgttgatgatgtagtcgtcaagaccaagcagaaggatgacctgattgcggatttagaagaaacttttacaagcattcgtgctttcaggatgaaactaaaccctgaaaagtgcatcttcggagtaccatcagggaagctgctcggatttatggtatctcaaagaggcatacaggccaacctggagaaaatcaacgccatcctcaacatgaaaccgccgagctcccagaaaaatgtccaaaagctgactggttgcatggcggcgctcagccggttcgtttcgcgactcggcgaacgggggatgccctttttcaagttgctgaagaaaactgacaatttccagtggggacccgaagcacaaaaagcctttgaagacttcaaaaaacttctcactactccaccagttttggcctcgccacgtccgcaagagccgctactattatatgtgtcggggacctcccaggttgtgagcacggtcctggttgtcgagcgtgaagaggaaggccatattcaaaaagttcaacgaccaatttatttcgttagcgaggttttggccgactccaagacaagatatcctcaggttcaaaagttattatatggtgtcttaattaccgtcaggaaattatctcactattttcaaagtcactcggtcacggtggtcacatcgtttccactcggggatatacttcataaccgcgaagcaaacggacggattgcgaagtgggccttagaattgatgtctttggacatatctttcaagccatgaacttcaatcaagtcataagctttagctgatttcctcgccgagtggaccgagtgccaagaagacatgccagaggaaaagatggaatattggactatgcattttgatgggtcaaagaggcttacgggcgctggagctggggttgtcttaatttccccgactggagaaagattgagctacgtattgtggatacatttttctgcgtcccataacgtggcggaatacgaggcgctgctccatggattaaggattgccatctctttaggcattcgccgactaatcgtccgtggagattctcagttggttgttaatcaagtcatgaaagaatggtcctgtctagatgataatatgaccgcttatcgacaagaggtatgcaagttggaagataaattcgatggacttgagctcacccatgtccttcgacacagtaatgagctaggagacagattggccaatttcggttcaaaacgggaagcagccctaatccagtcggctcagtatttacaagggttgcaccgttatcataatcggaatgttcgatcgcgagcctttctagtcggcgacctggttttgaggagaattcaaactacacaggatcggcataagttatctcccttgtgggaaggaccgttcataatcgctgaagtcactcggccaggttcttaccgactcaagcgtgaagatggtactcttgtcaacaattcttggaatattgaacaccttcgtcgattttatgcttaggcatttcgtttgtatctttcctctttgactgctaacttcaagtttttccttgaagtttttagtcggggggttactataataataatggaacattatttttatcaattcaatttgcttacttgatttatcattgccctgcttgatttttttggcttagacaatgaggactgaaagttttttaataacttttgcgagttttaggctcaataaggtttgacaaaagcttttaagaaatcagaggctaagtttgaaatatctagcacatcataaattcatcagtattgtacaaattgatcttccatcatcatcagaatcactgctactaatcagtgtcagttttttcatcgtcggaattatcagacccagtcggccgaaggtcgacatcttggaatctctcaactacgtcagcagcaatcttgtcagcggctttttgcgcatcattgatgaggttgagggttgtttcttcgcttgtcccgtctgcaaatccatcaacggcgacaatatcgattttggggtataaagatttggtcatagctaatgtcatgcttgctcccatacttctagcctccctgatattcttgaagtaagtatccggagcgactctcagcttgtcgaagatctcggaagcgtcaagtgtactcggaccggcgttattgaagaacatggcttggatgagtggggtagcggcattagcgactttatccctggccccttcaagcctattgatcttgttgactaagacatcaaactgtgcctgggacttgattttgcgatctgcacgaatagattcgtatcaacaagtggctataagaacatggggaatcagttatcattaccttcaacatcttttaaggccaagtccctctgctttgctagttcggccttgtccttctccagagcctcgacctgcttctctaggtcagaaatcctggcggcttgcactgtaatgcttttcggttaatcgatatgacaaggaaggcttcacgaatacgtcagacagatatggcatttacctttggatgaaccacttagttcataattagattcttgaagctcggagattctattcctcagatcatgctcagttttcctcgcgagctctctaacctcatgtagctggcttctagtagcttcaagagttccaagatgaggaactaatttctcaagagttgcggtcttcgcctcattcctaagatggattctctgcaatacgaatttactggcgttttagcaaaacatgaaaggggataattaaagctatgcattaatggacttacatttacaatgcgagtagcctcgctgagtgcctttttcagcaagcatacttcctcatcttctttttgtttgtttattacgattccttgaggttgcctatcattgtcccaccacttgactaggatgggagggcgcgagtcttcagctgcttgtatacggggaatttcttcttcatcactaatcattagtcctaatgtatccattgacaaaggttagacaattgatcagagtcatttggatcaacacggtttcaggcaaggtgtttacctgtgatgatttccggacggggacgagtcgactcttgcgccttaacgggggaccctggcatcgggtcgttgctggcatcttgtctacgagggctgtctgcccgagctccaacttctggaatctcttggcttggcctagtgtccgactggttttcagtcgggggctcctgattaatttcggctccagcttcggccgactcgtttccaatcggggattgatcaccagatcctacattatcggttgctggctagttgtcactcggctgatcctcagcagttggctcggtttcttttaagttcgttcccatgttggtcgggtcagagtcttttccagaaggatctatatcagatggtttcctgcaagtttggttatcagtattatttccgcactgggtgcgcatcaatgcaagggagaccgttatatgatttgtacctggaagacttcctgatctttggcacaggacgactagatgtttttttccttggagtagcctgcttcggcagtttcttggttgcctctcggtctccaggctttctagcagtatcactttcgtcgtcacttgacaccaacttccttttgcgtgaatttggctggccggctggattggaggtatttggccgggcttcagaacggatcttgggacccccgctcccttgaccggtttggtggtggggtgatcggcgttgaacgactgggggatccaacttcatcaaagcaaattcctgggcgtaatatccttcattgttgattgattcaacaaaaagacaagactatattttgtgaaaggttgaaatgtttgattacataccggtggaggaggattgaaagcattgaatggcacgactggcagcaagtgcgaatagctgacgacgatagcattcgagaagatcttgtacatcctttccttcataaccttaaagtcaagaggtcagccggtcagccggtcagccgtccccctccccctctctcccctggctcgtgggcttggcccattggccagccttcctcctcggcctaacaaaacaaaggaagtttacttttactcccttccgagtccggtgctcacacaccgaagagctaaaagtccgcaattgctccctccaattgctcctcactctctctcttaccttcttattggccccactcgtcaatgagtcaaagataatcttgagattgtctttccaatattccacaaatatttctctcttctataaattcagtaaatcattttatcttatttcatgggttaataaatctttttcccttgatcccataaatcaattctctattccaaaatttcatgaatcattttccttataaatcatttcctttggtcccgcacgtcagacggtcaataatattcttgagaatattatttctataaatatcatgaatcaatctccccttgttccacaaatatcttcctatgccagaaattctaattaaacttccaaaattcgtatctctcgatccaatcgtccgattgaccccgttccacttccagtaattccataaaattgagatctatttaatggcactattatttagtctaaatagggtctttttcttggtctcttgtttaggtttttgtttgtttgcacatagttgcggttaccggattttcgtcgatcgtggatatcttgaagattcgtgaagcttcgtgaagaccatgagcaaggcaagccacctttgaacatattgtgcctatatttgaacttaattatattgcttgcaaaatattatgcattgataggattacacttaatttgtttgccccgtctgaaaggcagaccggtgggcctacccaacttgttgcatctgatccttccattgttaattgttatatcatgttcccttgtaaccatctagttgcgcctcgatattcgtgcactctgtgcgagtatcgacggtcgccttcaaacttaaaatctgagtaacttcttgggtaaaacttagtttacaaaagctttggaaaacccgacgcctgggtcggtgccttgtgaaagaaaatgagttttaaaaaaataaaactcgcgacacaaggccattcctgggcggaatacttgtgcggtcgcatctaaggaccgattcctttggaattacatctgagcatacaatagtgcgaccacacgggtggaatgggacacccctggctgagtaaattgctaatcgggggagacatgtggattcgccggggtggtgtcggggaggacccctgggcttcctggcacagtatggtctgggacctaacctgttgttggtctgggacccctctcgtcggcatatggtaaacctgtgtcggctttcgaaatgccttgtcatgaaagcccttaggtcaccagacgtggccgttctacacgggctgggtgattcgggttagtaatgtcgtgtgggtaaagtgtaccccctctgcagaagttaacaaactgttcgaacagccgtgcccacggtcatgggcggatgtgaggtgattccttagcgtagtttttgttttaccctgttttatgaaaaggtgttaaggtttgggaaacctaatgcatgggaagcatttagctgtccgggggatagcgggaccgggtgtccctggaagtgattggtcgtttggggaccactattatcgggaagtttggaaaattggtttggtttgggaaaaaccagatttgaagccaactctaggagttgtgcaaatcttgataaataaatttgttacttctcacctcccgaccgagctgagacttgtctcgctctggttgtagaaagcacacacttagattgttgaaaacttgaaaacaaaactgtttgcaaaataacagccttcccttgaagcctgcattaaccacctaagttcccctagcttgctgagtacgtaagtactcacctttgctctctatataaataaagttcagtcagctccgaagatgaagttgaagtgaagtaaagattagggtttcgtcctagttccctgcagctgcctgtggtgttgggtgttaggccgttggttccgctgctgctgctgttggtgttcgcctcgtccgtgtcgtcggttgcattctcgggctgtctgagctgcaacctaagttaaggtaaataagtcctctatttattttaagtattgcaatgattcatatttgtcaccgtgggtaccagcgctatgtcctgggactggtactgagatcgcggtttcgtaggaagcggttcgcgccgtttttcccacgacacgctcctgtcaggtgccgttgtacggcggtgctagattaggggcgcgacacctgtacccagctagaatataactgccatgtagatatggggtatccataatctccacactggcattgatatggtaggaggttccgttgatctagagggtgactgccagtatctctgcactgctgtcgtagctgatctcggcagtcatggtgttgccgcttgttaagttcttgtccggtgagatcgccgcgacggagacgatggaattaacatcgatcccgacatggttgccatccttctcccattccttgttcatgtaggtgtcaaactcgaccgccacgatcctagcggtgcccgttgcgttcctgttgttgctgctgccattgaagaggccgaggtttccgccatagctgcgatgagggatgcctgacgggtaatgcccgaggaagaaggccataccgtcagcgctgacgtccaggttgaccggcttgatttggaaggagaaggtggtcctgaagctggccacctcaccagtggtgttgttccagagctgcaccggccgcgcataccacgcgcggccgatgctgcggaggtttcggtcgctgatgtcggtctttgtcagctcgatcgtgcgggcgtaggggtaggcatcgccagcacaggcgatatctgaacctggggtacagtaggaaccaggctcggagaagtcaaatctgaagttgagtgaggtagcatggtgaacatggatgagcaacagcgagttgcagaggtgaagctgtgtgaatagaaggcgatgagagctcattgctgccattgctgatgcttgggagaactgctatagccataattttgcaagacagcggggtagctgtctggctggccggccggctcaccagtcaccaggtttatttgaagccttccaaataatggctgactatatattagcatttcacaattggcccaaacccattcattaacagttggctatgcaatatgtcttatcgcataatccaacgcttgcgacaatgttgcattgtggagacataaccggcttcaagtgacatccaattaatgtagaatgacctcttttttttttctataacatgcaaagtacaatctacttgctaaggaccctgcttaggaaattaatttctgacagagctatgcagctgtggaggaaaccagttaggccaaagaagacaagcaaatggagccaaaaggtagtacttgtggagatgggagagatgcaaagaattcatcctttgagtcatcttgttgttgtattgcttgttataatgatgaaatctgaatgaatcaaagaattcctgggagagcttgccctccaacaacatattccctccattttaaaatgtatgatgtcgttaacttttcgcataacatttgactatttatattatttaaagacattatatagatatcatttattgtgttgtgacttattttattatcaaataaaatataatcttaacctataattttacatatttataatttaataagataaatggtcaaacgttatgaaaaagtcaacggcgttatacattttaaaattggggtagtaaaacaaaaatgatctccagttgttatgttcagtgatattccaacatgtctctctgtataacttttcaggtttagcataaacatccaacagaaatcagcacaagacgaatcatgtaatgacgagacatatctaacagaggaagaggagagataccgagctcacaatcaccaagggtggcgcctgtctccctgcgccgcccgaacaagcgtaccagagctgcagaacactccgcacgaacgtgctgtagcaaaagcccgagctgcacggcgcgggagtgcacatgccgggggaaggctaggtccgatgcgtataggcgaggcgctgtcccggtcaggcaattcgtcgaacacatcctgtgcgcgatgtggggcgagccgctacaggtgtggatccaccggcggccggcggggagcccgggtcttcttgtcagcgactcttcagctagcgttaggcccatcaaagtacggcccgcctcaagtctaattgacgggaaaaagtacatgaaaggtctctcatcttgtaatcggattataaaattatcccccaaccatgaaaccagatttatttcatctctcattttccaaaaccgagtcactttaaattcttgggcggtttcgacaccggctttatcctatatgacagctaagtcagcgtggaacccatgtgagctccacacgtcagcctcttcttctcctcccctctccacccctcttcctttctctcctcccctctccacgggcggcaaccggcggagaggagttgggctggcaggccagtgcgctaggcacagttggtgggtggcgggggacgagcgacggcatcaccgagcttgactggcgtcgcaaagagatgggttaagccgcgttagtcgtgggaggagcacgacggctgccatggagactcacgctcgccctgtccacatcctctccgatccgctgcctccacatcggcggtcgggtcatcatgctccctagcttccatatccttcgctctgtcgcctccgcgtgaagggatgccgccgccgacgccgctcttcccctcacttccctctctctctgccttgagctcgacgcggagcgccgtttccatccacgccaccacccaggtgccacgagcccgacgaggagcgtcgcatccatccacactattgtcgtcgttgccacatctacactacaccataacctagtattcatggcacttaactgccggcaataaaatgaagttagtagcgaattatttgccgggaatatatcaagtgccggcaataatcttggacatcatctcatcagccgggaattaaaaaaataggacaacaaattaagtgccggcaatggacaaatataacatgtcaattgatctgccatagataatttaagagatcactttatctgccgggaatttagttactgggaaatcaaattcacagtgaactgtttgaggaaatattggcgggccaaaaatattggcaggccgagcaaggctccaaggcatggaaattttcgtgggcccaacatccgcggagcacatggttccactcccatcgtgccgcacccgattcctcatccgcgtcatctccacctgcacgccgccgcacgctggttcctcctccgcccaacgccttcccatcgctgcagttgattccatcatcttccccacctcctccgccgcctcctctagtgcttcacccttatgtgccaccgccgccgcaccacgcgctccacccctctgcgacgttgactcctccgcactcagccgttgcactccactccatccgcgctgcctccaaaaccctcgactccaccaccaccttgactccacgcaccgccatcgactcctcactcctccacccccgatgcctctcctgctcgttggcctcctccccacctcctcccaatcgttgccgcctcctcttctttcgcctatccttcttcagcacaacccactgcattgagatcaaggaagcaccgaggaaatccccttgttcaggtgaaattcttcgggttataccaaatctgtggtttgatttttttttcctcatggatggatatgtgaattttttttatcaatgacttgattatatccccaaaactgattagaacacgtcgtgtatcgatggggttggggg

SEQ ID NO: 21812 - DNA, 2745 bp, Oryza sativa
cccccccccccccccctaatggctcacgcgccgccgcccctccccaatcgcgcccccctctccaaccctaatctctccctctcacgcggcgccaccgccgtcgccgccgccctcgactgccgccgctccgccgttgttgcatccgtcgtctcgccgccaccgatctcaatcgcgtgatttccttttcttatcccgaaatcgtgcaaccctctcaccctaaccctaatcttgtccccgccgaccgacgcgccgcccctccccgctcgagtccatgccgccgcaagttcgccgtcgcaggccgcgtcacccggatcagcgttgacgtcgcacgccttcctcctcacatcgcccggcatacgctcgtcctcggtcatatcggcgccaccgccgtcgccgtcacacgcagtcctccccgtccacctcgccggcctcgcgccctcgccgctcccaacctcgcccacgaggtaactatagtttttgttgctctggatcgattgatttacggttgggcgtgaggggattgcgacaagccagtgaggtcactgttttggttcatatcttcatgtaaatcttgatgttgcagttcaggctgtcaggaattatgttagctcgttttcgtccatgctgttattactgatgtaaaatgattgatgggttgaaccaacttgtcagcattaacgattgttatatttcttaagcttgcagaaccaatttatatcataggccagttgatttaaaatgctgaaacaatgcgctgagcttaaatattttggttgaaatagaatcctgagggcctgctcttcctttgctagctataagaataaagctaaaagaactgaaacaaaactcaggtaaaaagtgagccaaataaataacttggagccttgaaataacttggagttctcgtaatgcagccttggaaatgagtaatgtgatctggtttttctttctaatgcagatcctactttgatatggttgagacttcataaattagtacacttcctcgatgacccttcaatgaatgcctaaatactagaggtacatatttcttaactgaattatgatcttagatgtcaatttggacatgcatgtacaatattaatggtgaaaatgctatccaatatccatagaactctagcttaattttctcgggggtagagaccagtcaatttggaacttttagcaggctttctacttggtacaaagaagattatttatggaagttcatgctttttatattataattttgtatgaagttgagctttaacaactggttaataaatctttcatggtttctttgctaaccatctttacctaatacatatttgtcctaatcttttaagtaaaagaataaaatcagatcattttggaagtgtctgaaatctaaatttactgctgaaaacaagtacttaatgattctctgaacttgagcatgtccctgaaactgaatgatatgtactgatagatatcttacgacaaagtgcacatagctgtaatgctatctcttactgatttaatgcactgatagatatctcactagctagaaggtttagtctactattgaaggctcttttctattagctaatagcttctcaggtattattttacctgttctattgataggactgatagagctgtcaatttttttcagggtttctactgctctctagggacagccatatatctttgagaatattgattttatccccctatttgagtcatatacagagactgctgttgaccttgaatttatcccacagcatttgtgtgcatggagatatactgaagtctttttttccagttattcacaaatataatctggtacattgaatattcagtttaatcatatcagattttcaacagagaatgtttgctatgtatccctaatgaccccatttcaacaaggttctgcacaaatctgaagatagagttatgattttctcaaaattaaccatgatgttatccttccttgaactattcatgtaactaatcggatagaatatatagcttctatgcacatatttatgcttttaaatcaactgtaagtttcttccttgaacagctgcattctatccttcaatgtcttcacaaaatacttttttttttcatcctatccatttttttaccgtctatttaatcaaatggcacggtttttttcgaaagggtttcaccaatccatattattatccatttactgtcattaccactaatcatggttgctgcatggaaacaaaaatggtttctctttcatgttaacagaagctatgaaccatcagtgatataagtgaaatcagtgatattatgtgtatgtgtgacaaaaaatgagttattatctgcatgtgtttctcaaatttagatagcaggcctaatcttttgtcgagctaggagaagccctgagtgccctggttagggataacctggagcttttttattattaaatgaacctggagctaaagagttttttatgttctgttgtagctgccagaatggaaaatgcctgaacattgctctgaagatgagtacatcttttgcaagtcttgatctgtgcacctcttcagctggttgtcagcatgaaaaatttatgattctgacatatgtctgtgaatatgtttgtaacaatgaattctaaaaacatatatctctgaatacgtttgtaaatttagttggattttgtgaagttttcagtgagctttggaatgattatgagatagctaaagatgactattgcttgtatggaccaacatg

SEQ ID NO: 21813 - DNA, 10624 bp, Oryza sativa
ctgcctaaggacccatggttatccggttttgtaaaatgagagatgagatatatctggttctgcggttagtagcggttttgtaatacgatgagaagatgagagacctttgatgtactttttccaattgatggggacgactagacgtcgaagggctgatgaatgacataaaatcgtgaaggtctaatggcgggtgatcgcccacaacaatcacgcacccccgcccctccgctaacacgcccttctctcatttctaatgcaccatattttttttaaaaaaaacaagttagagaaaaataaaacaaaatagaaaaaatctaatactcttaaaaatatattcatatgcatagactttacacttataaatatatacattaaacttcgtacgtataaatttcatgtatagaaatatgctatataaaaaatatttaaatccgaattcgaatttgaatcgggtatataaactttttacctataagttttaggtgtgtaatctttagatgtataaattttaggtatataaaaagaaaaaaatatatggtgccaaaaaaatggtgaaaaaaaaagatcgtccgcgggcaatcgctaattagcgatctcgcataaaataggacatcatatatatctgctccgtgctagtccctccgtcccctaatatactggattttgacattttgcttactgtttgatcattcgtcttattaaaaaaaatttagaattattgtttattttatttgtgacttactttattttccaaagtactttaaacataacttttgggtttttatatttgcacaaattttttgaataagacgagtgatcaaacagtataagtaaaatatcaaaatctcttatattaggagacagatggagtagtatttttttatagtagtatgcacatgcactgagtattggctgttatttttctctcatgtaacatgcacatgcactaagtgtatgcattgctgtaatttttttctctcttccatctaattaacaaaatagtaagcaaacttcaaactatgttttaatttcttctaaactatttatcagaactgtagtttaatttgtttgcatcaatatattagttgctcaaagtataatctaacataactatatttaaataaaaaaacatctagctataactattgaaacattgcgaaatacttattggaacattaaataaataagacacgcatcatttacaaaagtaactaacggaacatctaaataatactacgtgcaacatagtccaattctaattggaacatttgctatgcttctagcaaagtggaacataaaattttagtgattgaaatatatatttatttttcacatgaatataatcaagcaagatctcattgtaaagatttaatcgcaacaaatatagcatccacaatgtagtctaaaactagtccataagcaataaaatattccactcagccataagtccatagcaagaaaatagtgaaagccacccataagcatatgggctgcccatatagaataaaactaggtgaaaccccgcgcattgctgcgggaatttagtatgataacaataaaaaaaataatgtgtaagatagctagataacatcagttaagtaaattaatgtggtttatgataatttaaatttaaatagtatgtacaatggtgattcaaacgtaaaaagtaaggtggtatgaccttatagaagaagaaaagtagggagataatttggaccgtagattaatcatctaaaggctaaaaacaattgatgtgatatgacttaattagagggaaaaggagaaagataatttggaccatagattaatcatttaagcactaactaagtgaggatgaactttataagtatataagatatcataaaacatatacattgaagtattatgtgaattatgttggatgataatttaacatgtttgtgtttgaaaagctcttaaattataaaaactataaagatatagcatgtttgcatcatgtttaaatgtgatgattgttagtggatgatgatgtggcatcttgttaattagtggatgatgatgtggcatctttgcatgttaagcttaagtagttagtgggagatatctttatagtaataggatatgttatttgtctctatttcctctctccttctaatactagttgatatctatatacattgtgaagataacaataattatagttcatatatgggtcccatctatatgggctatttttgctatatacattgtggttaccctagtagaatcatagactgtgtatgtagttttggggaaaatgattttaaaaattgtgtttaactaacacgtgcatgcaattcataaaaaagaaaatgaaaaaatccaaaaaaaatcaggcaaagtaatttcaaaaaattttaatccgaaattttgaaccttagggtctgtttggcacagttctcaaccaaacagttttagctccacctaaaataagagcggagctaggtgaagcgctatcataaaatgaactagagaggcgaaggtgattttagactgtgctacaactccactccagtcctaactcctaaagataagtttactattgcgtgctgcgtccgctcgggcacgacaacctattgcgctgctgtggtgctcgtcttatgggtcgtcaaggtagcgagaatgtaagaagagacgaatagctacaagtggcgacattatagggcgatgccagcggcggactcatgatatggtagtggacgggggatgtgtggccagaagggaaagaaggaagaagagaggcacactgatatgtggattctatgatatcacgtaggcgtcacataatcactgcataggaacaacgtaagtaagtcaacttgtcatattggtgctacgtacgccagctaaaaccgctattaaaacagctgatggacttaatttacacagattttagaagtcggaggatgaattatacccgattttacagtttaaaaacataaattagactttcttgcactgacccacaaatattaggcccacttatgtgtagttcttgaacaaacagctcagcccatttagacccatcaaaatcgcaactaatcacgacgatccgaattggaaaaaggtacaccggaggtccctcaacttgtcgttgagttacaaaatcgtccttgaaccgcaagaccagatacaacacgtcccccaacttacaaaaccagtgtaaactaggtccctcgacagttttgactccggttttatccgacgtggcagctgactcagcgtgggacccacgtgggtcccacatgtcagcttcttccccctcacctctccacctctcttcctctctcctctttttttttctcacttctctcatcaattgagagttgggcagggctgatggcgggggaggaggccggtggaggaggtgggagtccggcggccggtgatgggcgatgaggcggcggcgagtaggagggcctctccccacgccgccgccaccaccaccgccgatctgcggccatggaccgccgctcgctagtaacgcccgtcctcccacgccgccaccgccatcggggaaggaggtgggcgcgaccgtcggtggcggagcggggcgcgatcggcggggtggacccgggcctgggcatggacggcagccgccggtggaggagttgggcggcggcggcggggaagggcgggcgcggggggccgtgcagcaactgtgacatatggcaacagatttatttgctcatttcatccattcattaaaacaggatatctcaaaatcatcaagcaatatatgggcacatctccagatatgcaaactgcaaaccatcagtaagaaagtaagaagtaatgagaatctcagaatggagaacaagcatagccgcagcaaccattcggcgttcctcagttacgcatcacaaattgtttcagacatttagcatcaccaccgaagcaggtagaatgataaaaggaaaaacaggaatggaacataacaagtgttcagatccctatgtttctgtaggttattaagcaactagctcatagaagtcatatattctcatccagcactctaccatcatcagttcatcaccaaaaaaaaatcatcaaatctttcataggctgtcgcagcagagcaaaacttcctgtgcattagatcaccggtttacctccagggttggaaatttcggaccgaaatttctgaaatttcggtcatttcggtcccctccgaaacaatattaattcggccaaaatttttgaatttttcaattttttcatgaatttgggtaatatttgttcaaattcaactaaattttgttcaaaattttggaaatttcggaccgaaatttctgaaatttcaggatttcggtgacccccgatcaaaaccactaaaccgatatagtgaaccctgtttacctcttgaggcggagaaagatcaccacggcaataactgccacgacggcgccgacggccgcagctccagccatcaccggcaatgcgacaggcgctctttgtagggccccaggtgtccaagcagctaccctcttgtcctccccagaggcaggggcagcggcggccttggccctaaccctctcggcgcggcggctggtcttctcgggctctcggcggcgacggcggcgtaggacttgatgcggtgacggtgacctcgtcctccgcgacgctgctgttggggttggtcttctcggcgacgatggcaacgtaggacttggcggtcgcacccagctgctaccccgccgcccgagcccgccgcaccgtgcccagctattccggcaccgtcgcttgtgggaaagggatgagaaagaaagatacgtggagtggggaggggaagaagaggctgacatgtgggacccacgtggctctcacgctgagtcagctgctacgtcagacaaaaaccgaagtcaaaaccgccaaggaatctaatttgcactggtttcataagttagaagacgtgttgtatctggtggttttgccgttcaaggacgattttgtaactcgatgacaagttgagggacctccggtgtactttttccatccaaattagcccacctaacattgtagtgcaaaccaacatttttgcccgcttatgtgttgttttcgaataaacggtacagcccaaatgaaccggaccgctgccaatggctaatcctaatgggcgggtgatcgctccctctcctcaccagcgatcacccgcctctcctcctgtacagtacattatctcctttccccctttctcctcccttcttctctttctactacaccataaatatttgaattcaaatttaaatttaaaaatgggtatgtaaattttttacttatgaactttgggtctataaactaatatttaaatttgaattcaaattcaaatttgaaatgggtatgtaaacttttgacctataaactttgggtctataaactattatttgaatttaaattcaaatttggaacgggtatgtaaactttttatttataaactttgggtctataaactattataaactattatttgaactcaaattcaaatttgaaacggatatataaactttaggtctataaactttagatgtatagaaatactatatataaaaaaataattgaattcaaattcaaatttgaatcggatatataaacttttgacttataaaatttaggtctataaactttaggtgtataaactttagatgtatagaaatactatagataaaaaatatttgaattcaaattcaaatttgaatcggatgtataaacttttgacttataaattttaggtgtataaactttagatgtatagaaatactttataaaatatatttgaattcaaattcaaatttgaatcggatatataaacttttgacttataaactttgggtctctaaactttaaatgtgtaaacttgaggtgtttaaactttaggtgcataaacttactaaaataggaaagtaatgcggtgccaaaaaaggaaaccaggtggagggagggggggaggggtttatcgctaacccaccgccaggcgagcgatcgcctattagcctttccggctgcgaatttcctcacattaacatagaacaacttattcaaaatttatctcatacaatataattttaactacaaacattgtctaatttattccactactttcctattttaacaatatttcacctttcttgttaatttctcttttataagtgggtgagaaagaagaaaggaaaattaaggaatctataatatactacctcagtctcacgaattaaagccgtgaacaccttctgttttcctttttcttgatgttgatgtagttgcactagcaccggcctcctccttgatttacctgcacaggagtgaattgcacaccacccgagaagcaaaagattcgagagtcaaggtggaaaagataagcatagtggtataattaatgacaagggccgacgaaaccccttcaagtgcatttgagatcaattgggctctctttagagttttgggaattaacataggaaaaaatcgtcctctctccctaacgcatcctcctctttttatttacactggtgggacttaagggtaacccagataagactaagttaatttcttactaccgatcacagtaatattttatctctctttttttttgggaagtaaactagtggaattatctcctccataattgtatcgacagtggactaaaaaatcaaccaatattcaccttttgattttgaggctaactgatgagtctactaaataaaacagctccataaggtgacatgtcacagcaacatcggacgtctctgagacccagtcttaatttagcggctgctaattgaaacttatgccccttcattgaaaatatcagtcaaggctctaacttatacatatcccggttagaacataatcttaattaaacttaatttacgagcctttagcatatgcctctacgatcaaacgcttagcataataatttgatcctgggacatatatacctttcatagtaactagctgccctggctctaattagtgaatagaatgtgctccacgatacaaagctctcagcagatcgatcaattaaatctaagaatttcagttactaattaagtttaacgtagtttttaatcgatcagctgctagtactttgcatgattgcatccaattaagctctagataagaccacgtacacaatagaattttatctttctttttcacaagaccaagctgctactccagttagtaggagtatttatttatcgtcgacgtaggttatcccacttggccggccggctgtcggtcgccagcaggtggctttcaaaaattgaagccgacgatccatatgttcatgtcattctcgatctacctgccaaccgttactcgatttttattaaattttttggacttgtttatttttttaattttattaatagacattttcaaaggaatgtttctgaaaactaaacctttgtaccacgccagcagtgttgttttgccactccacgtggcgtggcaagaggctggctgccacgacagctgcgtgtagcatgacaaagttatttggccacaccagacgggctgtcgtggccaaaaagtttggattcgaaaatactttttgaaaaggtctattaacaaaatcaaaacataaaaaagtctaaaaaaataaaaaaatttcccgttactcgtcctcctaggtattaatgctgcgagccggcctcacgatgccacgtacagcaacccatggccaacatctatatggacgttagacaaattaaagagacgatctgttcatgttggtgttttcgatcaggcttgtatgatagagcactattcccttagaaataatatagagagtttgcatacttctatttttgtcaagaaaaaaaaagaattggacgtcacacgctcacatagcactagcaatctaagtcgcgccttcgcgcgaccataacccgtcttttatttccgaatatgataatatactgtttgtaataattacatttgttaaattttaattggtctatttgcatatttgaattctattatttaatttttttatgaattgaactttgaagagtatttggctcaatgtttgagcaattaggttgagatataattttggattatgactataagtttgtttatctatttgttagttacgtatatttttgtaggtggtagatattttttatcttacctatttattcatgattgttttaatgaacggcacatccgataattttaaatttactaaattatttagttgtgaatgtaggatttgttgtaattctgttgacataaaatccatagaacacacattattctgtatgtttattaggttactttgtggctatgtaaagatatatcgagaattactttttatatgtgtggtgttttcactttatatggatttgatttcaccatatttattcatggttataaattgaatttatgaacaaattgagacagtaatggaggtgtaagtggtggccaggaatcgaaagaccgacacttttgatgtgggcccagaaaatgcattcaatttgaaagaagaatcaactaaatataagtttcacattttgatagtaaaggagtttattttgtttttattctaaacttgtctcatgtgcacggagaaaagaggatggaattgatttggccttgcagtattcttagagttaggagaggttgtctaagatactctagaacattcacacattttccttgggatgttctctacggtactctagaacattcctactccctccgtcaaaaaaaaacaaaccatggtttccgtgtccaacgtttaaccgtccgtcttatttgaaaaaattatgaaaaaaattaaaaagataagtcacgcataaaatattaatcatgttttattatctaacaacaatgaaaatacgaattataaaaaaattcatataagacggacagttaaagttggacacagaaatctaagatttgcctttattttttggacggagggagtacattttttacaactatacttaagtttcatccaatcgtaaagattgattcgacttattttgtctttaagtgcatccgacggttaatacttgttagatgacatggcatatcctggtttctttgtgagatttagttttcacatagagatatcaatgtgctaggcataaataacatgttataaagatagaaaacaatctatttggaaagaaaggggaactgaaccacataaacgatccatttgagtattattctttcagcgcgttcctctagacgaaaacaaacatcattgactagtacagattctctcatctgtgacggcccatcacatgcctgggcaatatgggccgtcagaatgaagtcatctcaattgagcctaaattaataccgttgtagatgtactcgtacatatataagcaaggtgcatataactatagcccgtcaccgatgacactcatcagtgacgggctcacagttaggcccgattgagattactacctatatctcaatcgggcataattactaggcccaacaaaggcccgattgagatggccttactgccagtcaccgatgactcttgttagtgtcgggcttctatttatgcccgttagagatagcgcccgttacagaagtcgtatttttggcccgattgagatatattttgcacactatatatactccaccagtctattatctgtagttatcccactgtgcactattctggtgggaggttgaagggtgcgattttttgtaatttttttccaaagaagaacaggaaaatcataaaagtaagtaaaagggtactaatcatttcttattaatttagtagtacttatcttataagatgttaactatttcatccgtttcatattataagactttctagcatttcccacatttatatatatgttaatgaatctagacatatatgtgtgcctagattcattaatatctatatgaatgtggacaatgctagaaagtcttataacctgaaacagaggcagtaatattttgttcatttttcaaccatggatcgaagttggatgtatatgacttctttgaagcagcagtataaggaatttgtttttgattattattctgtgatgaataattggcattggagattattggttttgatatttggaatttattttcaaagtggttttggagatgattggaattttacaggtgatctacaggtgctgctgttttgggaccggtcagaccaggcaagttttgccggtcagaccggcgtgtatcgcgcggtcagaccggcacagcccgcggtctgaccagccgacgctgtgtcggtttcgatttcaggttgtttgtttggatatccatgattgtttcatgaatatgacttctagatggatactatgcatatgtaatactgttatttgctactaatgagtcaagttggggatagcttggtcttggaatatggtttctttgtttgttccatgtgtaggtgaattgatgccgggagagtatttgcggtgatggaccgggagtcggcttggggataagacgatgtccagattggtcagagatcatggtggatactaaggctagagttcaatgcacgtggaaggtgaaggttccatatggcataggatgcggagttgaatttggaaggagtccaatttggtggaattggttatgtaaagattgtttcttg

SEQ ID NO: 21814 - DNA, 5506 bp, Oryza sativa
ctagtatgagtttggttcgtggctttaggctgcctacctcgggtataaatagagagcgagcgtgaggcttcctagtatcgcttttgagagcaattgagttgatagtttagttagggtttcgagtttagtcgaaatttttgtaaggagtgctgttggtgcactttgtaaacacagagagaatcaataaagtcgtcatccactttaagagttcttcggtttgtgttttctcgggtgcggcggtccaacctgcaggacaccagcggtcagaccggcgacataagggcggtcagaccggcagcggcagccaggcagcagcaggtgatttcggcggttcgaccgatcgatctacatcggtcagaccgacttttactaggcggctataccggcgcatacgcttcggtcagaccgcgatccatcgaatttgagggtaacttttatttccgctaaaatttttggtttttgggtataccaaccattcacccccctctggttggcttagttattatgattcgatcctacaagtgatatcagagccttgttttcttctttggattttaaccgatccaaagtttttgcaatggctaaaaagttttcaactaagcctcatgttttcgatggtactgattttgcttattggtgtgataagatgcaatcttatattatggctgaagattatgatgcttggcaaaaggttgcacaaccatatgtgattcctgaacagattgacactattgctttgaaaaccgagtctaataacaattgaaaagctcgcaatattcttttgagtggaatttctcgttcggattttgatcgtgtttcacatcttaaaactgctcatgagatttggaatgctttgaaaaactttcaccaaggaactactaatattaaagagcttcgtcaagatcttttcaaaaaggagtacataaaatttgagatgaaaccaggagaagctttggatgattatcttggtagatataataaaattttgagtgatcttagatctgttgattcttcttatgatgttaattatacacaatatgaggtttctcgccactttttgaatggtcttgacatgtctatttgggagatgaaagttacatctattcaggagtctgttgacatgtctactttgactttggattcgctttacacaaaactgaaaacacatgagatgaatattctttctcgtaaagttgattctaagttgagtgctttggtttcttcctcaacttctttggatgttgattcttcttcatcgaagtcttctgcatttgctttgtttaatgtcatgtccgatgatcaactcgaacagttcgaggaggacttggttttgttaactaacagactttcttgagctgtaactaatgtgaggtacatgaaaagaggtggaccaaatcgttgatttgaatgtggtgctacggatcacttttgttcgcattgtcctatgcttgggagaaataggatggaagataagggtgatgagaagaccaacgacaacaagccgaatagtatagttaaaggagggaagaagatcagggagactctcaagaaggcttttgatcaagtctatgccccgtttgggccactaagcgatgtagatgatgagagtggagatgaagataagggaaagaacatctccggtgtttgcttcatgccgcgtggtgaatcggatttagagtgtgaagacaatgaggtacatacttttgaggatgctattcttattttaagagagaaaaataagaagtgcgagaagatgtatagaaaataggagtttatcattgaatctcttaattctgaaattgctagattaaaatctcttattcctaatgatgatgattgcaaaagttgtgaggttttaatgaatgagatttcaaaaattagagatgtcaatgctgcacatgatttgaaaataaatcttctcaagctcttggatttgctttgcacacacgcactttggatgagttgtttttgactaaaaagttgttgcaaaaatattaaattgattttcatgctagtttgatgtttaacaacctcatgatgttttggattgctcaacacgcacattaaataagatgaaactaaaagaagcttatagtacatggaagatgttgtgaaaaccaataaaatgttttcttgccccaaatgtcgtaaaagcaaaggtgttatggtagattgtcaaaattgcgctaatttggaaaatgagtttcttatttgaaaagttatttgcaaagattttctggaggtaagaaacaacttaacatgattttggatcagtctagagtgactagttacaataggggtgttggttttagtgttcatgattatttcaccaaaaatcaaccaaatgttttgagtataactgaacgtggtaaaattttgacaaaacctaatgaaaagaaaattgtttttaaatctgctagaattttgccttctctttctgcaactctaaaagaaacaaaaacaaatctttcaaaaccatcttcttctaaagaaaagtatacttgttctttttggcaaagatggacatattgttggtttttgtttcaggttagctcataaacagaaaaaggagagagagattgcttttgcaaaatcgaagtggcaaaaatctggttttccctcaaggaaactggtcagaccgtagtggatcccacggtcggaccggcgaccggtcagaccggcagcagcgcctcggtcagaccggcccctggtcagaccagctcctatgttgcggtcagaccggccttggagaaattttttgaaaagttctcaaactatttttgcacgtggatatatgcctattggatcttctggtcgtgtgtctcagtactggattcctacatttttattatcatctaacctcagtactatggcttcgacttctgcttgtgtgtagactttggtggcgaggaaggagagcatgtggatcatggattccggttgttcgcggcacatgactggtgataaaaattggttctcctccctcaaacgggcatccaagactgaatcgattatctttggtgatgcttctactagtgccgttctcgctacaggtttggttaaggtaaatgagaaatttgaattaaagaatgtagcttttagtttcacaaattgttgatgaaaattttgaggttcactttaagaaaactggaagtaaagtttttgattcttgtggtgattctgtgttgaatatttctcactatggaagagtgtttaaagttgattttgataattcagtttcacctgtgataacatgtttggttgctaagtttgataaagatgtaatgttttggcatcgtagacttggacatgttggttttgatcatctcactaggttaagtggtttggatcttgttcgtggtttgcctaaacttaagaaagatcttgatttggtttgtacaccatgtcgtcacgctaagatggttgctacttcacatgctcctattatttctatgatgacggatgcgccgggacagctattacatatggacactgttggtctagctagagtgcaatccgttggaggaaagtagtatgtgttggttattgttgacgatttttctcgatattcttgggttttctttatggcaactaaggatgaggcttttcaacactttcgtagtttgtttcttcgattggatcttgaattatctggttctttgaaaagaattcgaagtgataatggtggtgaatttaaaaatacttcatttgaacaattttacaatgaaagaggttttgaacatgaattttcttctcctcgtgttccgcaacaaaacagtgttgttgaaagaaagaatcgtgttttggttgagatggctggaacgatgttggatgagtatcacactcctagaaaattttgggctaaggcagttaacaccgcatgctatatttcaaatcgggttttcttgagatcaaaacttggaaaaacttcttatgagcttcaatttgaacgtcaacccaaagtttcacatttgcgtgttttttattgcaaatgctttgtcttgaaatttaaataagtttgaggcacgctctaccgatggaatgtttcttggttaccccacacactctcatggctatcgtgtacttattttggagactaacaaaatcgttgagacttgcaaagttttttttgatgaggctagtccaggtactagacccgatattgcaggtacattgtcacaggttcaggggaggatggtcgtatttttgaagacgagagcgacgacgacgacgacggcgaggtcggctcggccggtcagaccaggcgctagtccggtcagaccgccggcacacctccggtcaaactggcgcaggacgtgcggtctgaccgaccagggtcgtcggctgagggttctgttgatactattcgggatggtcctccagagattacaaattcgaccagtgagggtacagaacgtgaaacaacttcagaagtcgctgctactttgcacattcaacgatgacatccgccggaacaaattattggtaatataggtgagcggactactaggtctatggtaacgactcatgatgtttgtgcaaattttgtatttgttgcttcttttgaatccaaagatgtgtcatatgcattaactgatgaatcgtggattaacgtcatgcatgaggaacttgaaaattttgagagaaacaaagtttggactttagttgaaccaccttctgggcataatattattggaaccaagtgagttttcaaaaataaacaaaatgaggatggtttgattgtgagaaataaagctagacttgttgctcaatgttttacctaggtggagggtttggagtttgatgaaacttttggtcctgttgctagaattgaagcaattagacttttgttgacttttgctcaaggttttgaagcaatcagaccggcgcagaccgcggtagttcaagtgaattgtcgtagtgtaaggaagattgattagttttctgaccgaccgacgctgtgtcggtttcggtttccggttgtttgtttggatatccgtgattgtttcatgaatatgacttctagatggatactatatgtatgtaatactgttgtttgctactaatgagacaacttggggatagcttggtctcggaatcatagttattgagaccggaccagtaatcgaactagtgaggctctcggttcaatggttcactggttcaaccagttgaactgtcagtctaaaccagttcaatacatgttaaatatattaatcattctatcctaacacaagcaacctggtagcctggtggtggggggagttaactcccacacatgtggtcgtgggttcgaatcccacccaggcatattttcgctcgtttttcctcccatgcacgcacgcttcgtcccttcctcttcccatcccacgtgcgcttcaccacgagcccggctcggaatatggtttctttgtatgccgggagagtatttgcggtgacggacctactcccatgcatgcacgcttcgtcccttcctcttcccatcccacgtgcgcttcggcgcgag

SEQ ID NO: 21815 - DNA, 5477 bp, Oryza sativa
  unsure (1)..(5477): unsure at all n locations
cgagcgtgaggctcccggtatcgcttttgagagcaattgagttgatagttgagttagggtttcaagttagtcgaaatttttgtaaggagtgctgttggtgtactttgtaaacacaaaaagaatcaataaagtcgtcatccactttaagagttctttggtttgtgttttctcgggtgcggcagtccaaccggcaggacaccaatggtcagaccggcggcatcgcagcagtcagaccggcggcgtaagggcggtcagaccggcggcggcaggcaggcagtaggaggtgattttggcggttcgaccgatcgatctacatcggtcagaccgacgtttacaaggcggtcagaccggcgcatacactttggtcagaccgtgattcgccaaatttgagggtaacttttatttccgctaaaagttttggtttttgggtataccaaccattcacccccctctggttggcttagttattgtgattcgatcctacaaatctttcctccctcaatagccaattggatatgttgcctgaagactttgcaaccattagtagcatgagaactagaattatgccacttaaagcacccgcaatggtaaagtaatgtgctatctataagacatgtacatctcagcaatagactacattggtatctatagctctctaatccattgcctcgtttttctctatagactatctccaggttagtagatagctttgctctctctcttcatttaatctcttccaagtaggaaaatatgctaacatggatctcttgtagagagcctatagataaccattgcgggtgcccttatagtatttcttcttccctaactcctcagccgatggaattatgtgactagcaggaagttggatctgtttctccagaagtagtaaatcaaaaatcttatcaaccttggtgatatcaaagtcatatctttcttcttttccagaattctttacccattgacatggcacaacctttttactcctcacccactcagctgctgctacctcaaagtcatcttcctcttcagaatcatacatatagggatacgcttgattgactttcttgaaattcttcttagcctctgcaaacctctgctcatgtagagtcaccttttgcgccagatgagacaagctctcaaagtcttgagatgagaactctttaatcggagttatcaaaccttggaaagcaagatcggctaactgtagcatctattcctcatatctctgaaccttggatgtaatcttgcacagtttcatcatgcctttgtattgatgtcaaatcagaaagcttcatctcatgggtcccgctgtagaagtaactatgaaactgcttctccaaatgggccccaccgcattctctgctcccacctaccattgccacaaatcacccacatattttagaaaccctctattaatggaatttggtttattctttgttccaccagaaatgtttcacctagtgtactgacaatgtttcaatatgtatagatataatattacagtgaactgaaatattgcattgcaacaaaaaacccacatattttggaaaacccctattataatagggaattcgtttcattttttgttccaccgaaaaatgtttcacctagtgtacttataatgtttcactatatatggatcaaatattgcaatgaactgaaacagtctttcactatttactgaaacattgtttttatataaggtgaaacaacacccgatttaaacgagtgaaacattttcgatctactaagtgaaacaattccgatatacctggtggaacatcatgcaacatttaaaaataatttaataataagctaattttttttcgtcagaatatatccatgtgtggtcttgttttgaagatttaattgcaatgaatttaatggttcaatcagatcatgatttagataagtaatttaagagaaaaatcaatttaaagtagttttgcacgtaaatcgggcgttgacgtcatgctgtcatcagcgcccgatttttctccaaaccgatcaggcgcccgacccgtagactcgagaatgacagggatcggtctactagcggggggagcaaaaatcggacgctccccctgccccctgcaccctgcagcttngncnancncnnctgnncacgcgtgcatgccacctgggccccaccacagtccctggctccctgcccccctgcaataaaatcacccacatattttggaaaccctctattaagggaatttagtttattttttgttcatagtgtactcacaatgtttcgtatagatccaatgttgcagtgaactgaaatattccattgcaacaaaaaaacccacatattttggaaacccctattaagggaattcgtttcatttttttttctaccgaaaaatgtttcacctagtgcaattataatgtttcactatgtatgaatcaaatgttgcagtgaactgaaatattctttcgctatttgctgaaacattgtttttatataaggtgaaacaacacccgatttaaacgagtgaaacattttcgatctacttagtgaaacaattccggtatatctggtggaacatcatgcaacatttaaaaataattcaataataagctaattttttttcgtcggaatatatcactgtgtgatctttttttgaagatttaattgtaacgaatttaatggtgcaatcggatcatgatttggataagtattttaagagaaaaatcagtttaaagtagttttgcacgtaaatcggacactgacgtcatgcccgattttaacctcctcccttcggtcatccaagccggagtcacgtccagttttgataatgtgagaagagatgaaatgggttccatctggatatataaaaccatgtgtacaaggtttccaattgaacttatgtccagcatgttaatacctacgaaacaataaaataaaggaatgcatgctttatgtgctatttcaactatatatgaactataaacataacaatgaacaaaacttgcacactagctataatagggaaataaaaaggataaaggtagcaatgacaagctttcaacactacaaatgccaaaaattaatttgcacggattttgttgccatctccaccgatgttatatgcaattggggaaaaaagcgctcaccaaagtgagtactcacctatgttatgcactatatagtccggagtagtatgtaatacggaacccgacataatcatcatatgcgtactctttatcagaggtggtaaactaaagcagtatttaggaatcccacatctccaacagatgatcaatatctgacgtcgatccgggtgcaccgacagcaccgtaccgacgcctgaagggaggaggccacacgatgacgtggaacaatggagagaagccgcgcataccgccgcggcggcggcggcggcgacggcaaatgaggccgtgccgtcgtcggctaccaccgagcagcaggaggcgcgtccggatgatgagcgggcgccaaaggatcacaccggctgcgaatgcaagcccaaggtggtaatgctcccggagctactacgagccgccagtcatggcgatctccagaggctgcgcgttctcctaggtgtcctacacgacgatgagtcgccggcaccgacgacgacgacgacgacgaccagccaagacgacgacgctgtcgtcctggaggtttatcgctctgcacccctactaccaccaccctctactactgcaggtgaaggtgaagatgaagggacgttgtccctcctggagggaaccacgtttcagggggactccgcgctgcatgtggtggcgagcagcggagacgacggcgacttcttgaagagcgcaaggctgatctatggcaaggccaggcacctcctcgaggcgaccaacaacaatggcgatacgcccctccactgcgctgccagagctgggaatgttaagatggtcacgcatctcctcgagctggctggaggcgatggcgccggcgatcaacggaagaagctgatcctgaggaaaaaaaaccaccagcatgagacggtgttgcacgaggcagtccgcctcggcaacaaagatttgatcgacaagctgatgacggaagatccagagctagctcgtcatccaagcaacggcgccacttcaccgttgtatctggctgtgatcttgccaaatccacaagttgcgatgcagctgcatgggtatgataaaatgctgtcctactcgggacctgacggacaaaatgtcttgcacgctgctgttcttcgacaaagaggtacgtaattcacaaataccttgtgcgtgtactgtttgatcccacaatatataataacaaatgcatatatggttcgattcacagtacttctttcttttttggccttttgatcctggcatatttcttctttctatcaacttcagttttcactctatatatgtttcaagtagtatttcaatttgtctattacgcatgccaccagggttagcaatctccaattacgatttttgcctggggtggctgaaagaaccgaatttttttgtacttttttggccaattttttttgaaacttggatgaatttgaataaaatttgatcaaattcatagaaaatggaaaaaaacaaaaaattcaggcaaggtatgtgcttgccgatgggggcgaaattacagaaattttggaattaattttgttccgaaaaattgcaatcactgcatgccacataatacagtactattcatatatcaagagggaaaaaaaaagttaaaccaacttacaatttggaacggaggttccaaattagagaaaggaaatgacaaagtgatatctctagcatgtaagttttgtgattgaaatatacacttgaattgtacaacaactttcagatctcatttatgtggatataagtaattggaaactggaataatacaatacacatatgtaatttagtcaatatatatagagacatgtttgaagcaagcaagggtcaatataggacaaaatatattatatagtcaatataattttgagtaaatttcaaattgatcaaattgtcacaaaactgtatattttaaatgatctactctctccgtcccaaaatataagtttttttagaccttggcacggtcttcgagatgctactttgaccaacaaatatctacaaaagtaaattattttaaataaaaagagttgcatattataatagttcgtttaacaataaatatagtagcatcaaatttacatgattaatctttttttatccttttgctattagtagttaaaaattaaaatgtttgatttggcactattctaaaaatgcttatattttgcgacagagggagtattacaaagctacttatattacaaaactacaaatttaagatggatcatcgcaaaactatagaattaataataaagttataataaaactacaagtctagtgccatttaaccacaaaactacaaagtatataaactcctatctaacagcagcactgttagggatttaaactctaaa

SEQ ID NO: 21816 - DNA, 12546 bp, Oryza sativa
tatatatatatacatatatatatatatacatatatatatatatatatatatatatatatatatatatatatatatatatatatatatatatatatccagccatcactcagatcacaatcacatgccatgctcttgtttgcattattcattaatactataatccaactgcatgctagttaatttgatcagggtcacgaactcgcgtgcagggtaaattgaaaaacctgatatttgcgtgatctctcttgatgcgtggctacactactttgcagcttaattatttaatttgctcgtgcaaattaaagtgagtcgttcctctccaaattaattagcttagcgcatatgtacgtgttactttcaagtgattactatttattcgttttgttgactgcacgcgtgtggaatattgctctcgccttttctatatacgatcagtaggaacaatatttcccttaagtaatctagagagtagtacatataaaccaaagtactttgggggttaaatagctatagtgttggggagtaattaaataaacttgtccggctgattattaatttgtttcttgggttgtgacggctgccacgcacgtgcagagaggaaagtacacctggcacattatggcatggcatatcgtgatgttacttctattttataggtcccacacaaaaattttatacctgtcataacaaacagttgaacacatgtataaagtattaaatataagttaaaagttaactaattgcacatattgcgaccaatttgtgagacaaatcttttaaaccaaattactccatgatttgacaatgtggtactaagtaaacatttgctaattatgattaattatgcttaataattcatctagctatttattgatggattctgtaattagtttttttattaatgttcaaacaccccatacgataccctgtataagtacccgacacattaactggatctaaacaacacattaactgcttttgcattctgctgctgctgctgctctagcatacacaggcctgtcagaggaggaatcaaccaacgacagcttcaagaaccaggatctgtttgatgttgttgcgtcctgtgtgaaacaaaccgctgatgctggtcagcagcagccgagtttcagttacccagcagctagtactcctatttcagtactacaagttctgcgtcccagggatcctaacctcaacttcactggtacactatttaattagcgatgaagtgtttatatattaattatacagtttcaaaatgcatgccaatatgaccactggtatttgcaaattaataagctatcggttaaacttgaaaaagtttgacgccacttattcatatcagctagctagctcacgcagtagttctattaactcataatctgtcagtccctaaatatttgacgccgttgattttttttaaatatgtttgaccgttcatcttattcaaaaagtttaagtaattattaattcttttcttatcatttgattcattgttaaatatacttttatgtatacatatagttttacatatttcacaaaagtttttgaataaaacaaacggtcaaacatgtttagaaaagatcagcggcgtcgaatatttagggacggagggagtacgtgtgtatatgtcggcatgcacactggctaacgcccattaatttccacctccatgactccatttgatccatgtattagctgtgctggtgggtgaaggctcaaggaagcgcaaagatgagccaaatggatgtggagctcatcatttgggaaaggaaaatatggagaaagaccaaccctccaaagacatggcaacatgcgtccactgctccaaagtatatacggcaaaatcgactaacggtacatctcatctcaggaggcacctcacaagcaagtgcctcaagagaaaagggctcactgaggaacttgctaagctcaccagtacaaagaaggcccgtaaaattcgttagtgatatatgcgacttaaatatattaattgcagtttcaaatttaagtaaggcaagggtatggtatgctcgaattgtactgtcggtgctaatatctgtattttttttatttttaagggagtggtactccgtattcttgtgcgtgagtgtgcttgttgcacctatttgtgcttgcgatgttcaatgtaagtttaataacattgttgttctctttatctttaattttattccgggccgtcgataagggtgttcaagctggaacagggcccaaaaaattaggaccccaaatttcttatattttaatctactagcaaaaatgcccgttcgttgcaacgggtgaataaattctaatgataatatacgtttttcatgcataatcatgtcaatgataatgtttgtattttaatgagcggctttttttttataaacgacgcatttctttctaacagtttcttcctagcatgtttttttgattttttttactgacgacaaataccatagttttctcccttttttgcttttcttttctcacgcgttttttgcttttttttaatgttctttttttgctttttttcccaatacatgagaatataaaacgaaataaaagccgtgtaatagatggcaaaaaatcgatggatcctatccgactcaagcgtccatcaattaagcgtttttttctgacagttttttctagagcgatttattttttaatagacggtgttttttcttgcgcggttttttcaaatcattttttagaaatggcgcattttttcttacattttttttccttgcatgcttttttgaaaaaatttaccgatgatggaaatagtatttctcgcacgtttttttaatggaagatggaaaaaacctttttagcatttttttgcgtttttttctcacgcattattttgaaccgtttttatttttctcgtgcattttctctttttaaatagttagattagattatagatagagaagagatatatactgattagaaatcggaatttgtttcgccctttccatttttttctcgcgtgtattttttattttgtacgaaccagctttttattttttacgaaccattttttcgccactttcttaggaaatcggacgaatttttttagatgttttttcagattttttcgcctttataggaatcagactttattcttctgtttttaaaggaatcggatctagcctttatttttcaccactttttttttgccttttataggaatcggatctgtggtttttttcgccacttaggagaaacaaaattttattgttattgtttttctctttttcccttttttttcttttttttgcagtttttctttttctttttatgcacctttatgcccttgttctcctccttttattattttttcttcaaaaaaaaacctcaagtatcttattacaagattatagggactcaaatgtaaatataaaaattacagggactcacatagaaaagtacaaacccaaaaattaaaatcatataaaaatggaatgctctcgaccggtaggttccgtttttgcaaacagatcttcaatccggcacatcaatttttttcaccaagatgaatgggatatcacggtatagattgaaaccgagaggagtgtgcctaggatctcggactcaaaccgagaccgagaggaggggtgtgttttattttccgtttttaagagggaattggatctagagttggactttttttttctctgagagggagccagacttttttttgatttttttcgctatttattttgttttcacgggagtcggacctgagatgagagggagtcggacattttttttatttttttcgctatttattttgttttgacgggagtcggacattttttttgccatttttttttgacggacgaaggaaactcttatttttcttaagtagtagagatagagatatataagtaccgtgtcaaatataatatgattcgactttttttttaccttgtcacatatatttttttttttgggaatccgacagatttgtttttcttttttttttttgctctttttttaccacgtccacgcggattcttttttttctggccggtcttttttttcaccttgtttttttttcgctcgttttttaggaatcggacagattccttttttatttctttcgctcttctttttaccgtggaatcagattcgtttttcttttcctttttttcgcccttttttgatcggacgttcttttctttttttttttgttcggattttttcccgttttgttttggatcggacagatttttttcgtccggttttttttatggacgacggaagcacctattattttttaagtagtagagatagagattatattgtgttttaatatatttaaaaacctatcatattgtttcattttttaaattaacattttggacatgatttctgttggaattaatagatgggctaaggcccattcgaaaattaattctttggaaaatcacaaaagctcacttcatgggatggcatgcatgtggagtttagtaccaccttacttattctaggaaatggggacctccttaaaagggaggatgccctcctagccatttgaagcatgtgtggtggagagaagaggggaaacacacacgctcgctcgcctggcctggcaaggcaggcggtacgcgtcgaatggtccgcaaaattggctcctcacccttgagcagatacagcctccttttgcagttttattccgaaaaaatacggatttgttttgttttggaaacattccgaaaaatccagtgcgtgaaaacggcgtggtgtccggataacttacggccagttcggttacgcgggcgccctgatcaagcgacctatctctatataaaccgagccgtcgccttcacgcaacacacgcgaaatcaatctagggtttgcctcctactctgtactgcgccgtcgctcgtagactactccatcccgctcgccggcgtacaccggcgatcgggagagcaggtctccggaacctctgtcttcgacgtcctgaaccgggagaaggcggcaataaggtttttgggaagcttttcgcgcgactactccttgttcgtccgcgacggctcgccttcctctccgctcgcatgctgcgcgccttcgtcgacgcccgcaaccgcgagtagttcctgacgagcaaccggtctttccgccacctcggtacgtgttcgacatgttgcgcatatttgatctgttcatgttttactgcttagtttacatgtgtagatataatgatgcgttcaatctagtttacatctgcaatgtcatgatttatttatggaataaattaaatcattatgtgcttataatttcaacaatccaaaaaccttattttaggcgctgtgattttactatggctggttttgccgatgcactgaggccagataaattcaccggtatgcactttaagagatggcagatcagggtcactctgtggctgacggctatgaaatgcttatgggtaagtactggcaaacctgaaggaattcttaccgctgatcagcagaagcaatttgatgaagccactactctctttgtgggatgcaatctcagcgttcttggcgattgtctggtcgaggtgtatatgcatatgaccgacgctaaggagttatggaatgcactgaatactaaattcggtgctactgatgctagtaatgatctgtatatcatggagcaatttcataactacaagatggctgacaaccattctgtagtcgaacatactcatgagatacaattcatggctaaggaactgctccagccttcacgcaaatacgcagccgcacaaaacagccaagcgagagcacggcaaatttctgctcgcctgcatgtatatatgtgatcatcagcctggccagaagcttgtcgactatagcacatttccacttgcaaccagctgcacgagtcttcacctctctgatctctatgtgcatgctaacgcaaatagtactaattaacgcaaaaaccttccttgactatggttaagctcagctaatccataatatttccattccaagataaatgctaagcctccctagcacatccgtgcgcacacatttaatcggctctcaaactaaccactccaaatcatgacagctaaactaagtaatctggcttacccaaataaaacaaactaatagccaaattgtgctacaaacataaggcatcaaatagtatcagcttgagtgaagatacttctacatgtttgtttcctctaagatttaatctgctgattaatgatgtggcaaatatcatattctcatggtcttaggtagtaattatataatgcttttgctaaaatgaaaatacagtctatgttgatttcttcgcaaaagtaacaggatatatattcagtaactggagtaatgcccctcttgtattgtatattataggctgtaattcaactatccatgaaggcaatgtaacacatcatgaatatgaggtttgtaaaggaagagatgtcagaatatgtacagggtgaaggtgtgtcaaatggaactggcctggagaacaaactccaagaagagcttacaaattaaggagatgcaatcatgacaatccccttcaggttgctattggttcgcagtctctggtccatctgggttgatctgatgacccaccgcaggatgcttcgcatggacccgatctcatgtcccatgggatgccattggcacgccggccagagcttcagccttaagcttccggctactgctctcccggcacaggcccagatgcaggtggtacatatataatccacttatgaattacacacactaattaagttgattaactgtagatgcatactatccagcaggaatagtactgtagtaataatgggagagctagagatggatgacagcatcagcgtacttcttccatcggcttccatgcatgagcagctgatcgatggtggccgagctagctgcaccacccgcgctgcccagcaacagcaattaactactacatgtctctctagcgacaccgcccgctcccggctcccgtacgtggtcgtggacagttaatggccccgagacttcaccggccgtacgtacgtatacatgcatgtgagctgaccatccaccgtagtccctccgtattttaatgtatgacgccgttgactttttaatcaacgtttaaccactcatcttactccaggatagagttcaactcttactctagtcctaatacctattatacaactccaagtcctaaactgtaaccaactaggtacttattcgacacaaaactctaacaaatttcaccttggcgaatatgccacgccaacctgaatttgttacttgctcgaaccttcgtatacccagacttgagttggttccttttcgccgctcacgccgagctgccccgacaaaccttcaccatactcaccataacagcatacggacaactagctcccctttcttccccaaccagattggccatggtaggtatccctctccctcgagcccatctagccccttctgcctgtctccccacactctgctcgtggcaagagcacagcgccagtagccgaagatccctactgtgaaaccctggatgtacattgggtgacggctgccggagaagattcagaaggacatgtcggcggcgccatggggaagagggtgcgtacagctgcggcggggagtgttctgcagtggggagggagacgtcgaacgcgcaggattggggaaggagatggagccacccacattgtggggccctctctctgacaccctcgagggtatacgtatgatatgtattcggtatgggtagggcggtctgtgtggggagtagttgcgtatttgctatgaaatatataaaattatatgtatacataaaagtatatttaacgatgtatacataaaaaattgaatgtagagatggatgattttgtgtaatatgtgaactcacttggtataaatatctagtagtaagagatggatttacaataattttattattaattttgtggacatatctaggcggtttggtggctgccacccccacgaaatgtatttgctggctaaagtagtgggagaaatcatgtttcgtgacagctattgccatcacgaaaagattttccttacagtaaacacattactctcagtaaattagccaaaacaaggaatagccttttggtgactgccatacaatcactaaataacttgtgacggcttgccctcgccaaatattggatttcgtgaccaatcaagtgtgacaggtgtttcgtgacggcatgatgccgccaaagttcttggtgacggcggcattatgacttttagtgacagtaaggggcagtcaccaaagatctaatctctagtagtgccacttaaccgtgttcgtgtgccattactggagatatctaatctctagaactataagcttaatttgcatcgatcctccgtaatgcgcatgcatgccctctcttttttaagctgcaggggcacacgtctctctctctctctctctctctctctcttcctgttgtttttttttcttctcaacccgatatcgatttacctttttccaaccatattttgtggataggtccatgttttctcaatatacttaacaaggctaaggtggtgtttggatccagggacttaactttagtcaatgtgtatttagacactaatttagagtattaaatatagactatttacaaaactaattacataaatgaaaactaatccgtgagacaaattttttaagcctaattaatctataattagagaatgtttactgtagcatcacataggctaatcatgaattaattaggctcaatagattcgtctcacgaattagtccaagattatggatgggttttattaatagtctatgttcaatatttataattagtgtctaaacatccacgatgtgatagggacttaaaagttttagtcacatctaaacaggtctaagatcgtgccttggtttccaagggtacaagggcgctcgctccaccgcgcctctctgcactcgcgaaaagctatatatactccatatccgatctcgcgagctcgaatacgccatttaattagctaggctgatcgatccatccatccatccatcgaccgatggaaggcagcaacggcactcactatccccaatgctcaactggtacgtccatgcgtcactacaatactagttaaccatcttttcttcactgatgagtaatatcatgcgtgaagatgaacatatatgtcgtctatatataatcaagtcaatagtgtgtgttcggatccttgttttcccaactctctgatctctcgtattctacgcacacgcttttcaaactgataaacggtgtgtttttttttaaaaagtttctatacgaaagttgcttaagaaggttatattgatccatgtttttttaaaaaaaaatttgctgatacttcactcatgcagggatggagaccggatcgtcgtcctcacacaatacttcatcaccttgcagcagcagcagcagctcaacatcgtcgtcactcccggcggcgccacagcagctgagtcgtagtcgccggaggcggggatgaggtgtgtatgcgtgcgtgctagagtagtgttgctactactactgctccgtttcagattagaagactttctagcattaccaacattgatataaatgttaataaatatagacacgcatatatgtctagattcattaacatatatatatatatatatatatatatatatatatgacactcatatggggcaccatggtgcccgggcaccatggtttcaaatgcacaaaattactcaaatttttcaaaatttttaaattgtgagtatatacctagttataagaattcgattcatacatatatctatcaacaaaacaactcaaatttaactttatttcacaattcatgtttacatacctaactaattatatgtatggatgctatatacctagaatcaaaatctaacaaaaacaagttcaaattcagttcaaacttgctttgaactagttagtaaagtagttaatgttaatacctaaataattgaaaaagtttcatactcatttgaattggttatatactcaatttcaacaatggtgcccgggcaccatggagcaccaaacaaatttactatatatatatatatatgaacatggacaacgctagaaagttttataatatgaaacggtggaagtagtatatactgtatgctatactgtacaacgtacgtctatatatacgtgcgcgtgtgcgccgtatacgtatgcatacatgactttcatttgtactgtatttgtttgccaactatatatatatatatatatatatatatatatatatatatatatatatatatatatgtatgtgtgtgtgtgtgtgcatgcaatgcaggtcacaacattggttcaattattggatctcggacccgacttcacaggtaagcggtacaactcaagctactactcccttcgttttacaacgtaaattattctagcattttccacattcatattcatattaatgaatctagacatatatatctatttagattcattaatatcaatatgaatataaaaaatactaaaatgacttgcgcggtgaaacggaggtagtatatatatacttgaatggtgatgatgtgttattgtagctagttaatatgtactcctaaaatattgtacatacgtaattactccctccgtcttaaaatataataacttctccaccaatattctcttttcaaccaataacaacccaccacaatttattttattttcccacctacctccactactaatcgaaccacaaccctccactattcacttctacctattttgctaataaccgtgtccaaactctaaaacttcttatattctgggatgaagctagcgagtagtatgtatgtagctcaattattctcttttatttaacttatataattaaatattaattttttggactgtaactaatacgttcttgcatgcatgcatatgtactagtcctccctgattccatgagatccatgttacatgcgatagaggacgacgaagacgacgacgttacgagtggcggtaacaataacccaatttacaatgaagcatcagtcacggccgtacgtcggccgtcaaggagatggtcagccgtatgggcccacactgaatttgtagatccttcggaaaattacgtcaagtgcagttactgcgccacgatactgacggctaattccaaagggggcacgagccacgtcaagtgccatgtcatcagatgcctgactagacttgggcgacataacgaatgtgaagaactcattgccaagaccaaaaaaagagcgagaaattaacgtaagtcctggtgattccaatctcgtgcgaacgaaacgcaagaatcttccacagcaataatacgtctgcaccgtcctcaattctagcaaagatcaagaaggaaggaagaacatgggtcaaagcagaggctgcaaccttacaggagtttggaattttgggagatatcgcctaattcctgattttttgcttttttttccttttacgggttattctattgttttcgtcgaaccttttatatttctcggtataattttttcttgctctattaatatacacaagataaagcttttgtctttccttaaaaaaaaagaaattcacgtacgtgcatcaatatttggcatggtcgtagtgcatgtactcttacagtatctgtccctccattacatgataaattaatctcgtataggatataacaaatattatactactacgaatttatctatgtgcgtagaactataatatatcacatgttatactggttaacttattttaggatagagagcaaatatttatttttgtccttgtgcgtacttgcttgtcatggatatgagcttatatatgaatgtatagtacgtgttcattggtggtgatcagatctacatcgatcgctattgtatatataatgtagctagtcatattatttcctcttgggttgtgcttttatatataattaacaaatatatatatatatatatatatatatatatatatatatatatatatatatatatatatatatatatatatatatatatatgtatgtatgtatatatatatatatatatatatatatatatatatatatatatatatatatatatatatatatatatatatatatatatatttgttaattatatataaaagcacaacccaagaggaaataatatgactagctacattatatatacaatagcgatcgatgtagatctgatcaccaccaatgaacacgtactatacattcatatataagctcatatccatgacaagcaagtacgcacaaggacaaaaataaatatttgctctctatcctaaaataagttaaccagtataacatgtgatatattatagttctacgcacatagataaattcgtagtagtataatatttgttatatcctatacgagattaatttatcatgtaatggagggacagatactgtaagagtacatgcactacgaccatgccaaatattgatgcacgtacgtgaatttctttttttttaaggaaagacaaaagctttatcttgt

SEQ ID NO: 21817 - DNA, 5729 bp, Oryza sativa
  unsure (1)..(5729): unsure at all n locations
tttttaagaataattcaaaacttggacacatgatctcatagttcatagcaaagccctcctaaccaactgaccctacaacactatgtgttttgagatcatatattggtttttttatctatatatttgatcaaattttgtgaacccaaacccgtatatgtactgtaggaatcatatcttgttactacaattcggtagtaacattatcgaacaagtgcagtaacacgacacgttactgcgaaatttacaggtcggtgctatgaaatttatcggtcgttactgtactttttgcagtaacatcatgatgaaactgtagtaacagagaacatatgttagtaacggtagtactatagtaccactgcttatgcattgctaaatttttaaatctcaatcttatgtaacatacaagttgttaatatctatatgaatgttggtaatgctagaaagtcttataacctgaaacggatgtagtaatttatagaaacacccagacatgtgtctattaacgtataaaatctatatgctttataggttgattacatgttttcttgtttccatcgtattatcgttatggatgctttgcttagattaattccctgcttttgatctatatgctatggagaaaaccgtgtgagagaaatcactaaaattgatgggaaatcctggattggagacatgcctaattcggttgagccgaatcggccgactcttccgcctccctcgcatctctctgtttctctctttctctaatgacgccacgccgggaacacggtgacatagtctcagactgtttggctggacttggagacatatcgatcgtcgttcgtcgtcgctgttgggtatgccgtcgaccttgtgtcgatgccatcgtgggaaaccaccgtctcggagaaagccctaaacccatgtcgccgttgctgctggagttaatgtcgaagcgaggtgccgccaccattgacctccgtggtgggaggatatgggtcatcggttgcctgctactagattaacctccgccgagacaatatggccggatgcaatttggttgttgtcgttgagttcgcctcgccgccgtcatgaggatgcgcgggttgacgcagagctccgtcgtatgccaccgagccaccgccgtcccaaattgccacacgggagtgatatcgtaacaatcatatcaaatactcccttagtaaaaaaagacgcaatcctaagtttgaacctggacacacatatatatacaggtttaaactcagtattggtttacatttttagggagggagtaccataccgtacataccatgccagtttaactcaaagcaaaccatgcatcttacgggatatgtgacccaaatattctactacggagtacactagaataccagaccacagcttcaaaattcgttgctactcgcaatctgccactttgagatgcttgtcaggaattaaacaccgggtgcagcatctgcgttgagacccgccggttgattagcagattccggttattacccaaatatattttatctgaaaaatcaaagatcgatatgattgaaataccgcgagcgataattagtaaaccaaaataatgcaacgtaactatatatatatcagtggtgtaactagaatttaaaataaatgtggtccatctatatataatagatcaattaaatgggtgatccactatataatttttattatattaactagcacatatactatagttttaacctcgattaaatttttaggtggtctatggaccacagtaccacctagttagttacaccactgatctatatttgtatctatactaatataaaaataaagagttacacccctccattcctactggccaaatcacccgcaccgcatctaagagcagggctaataagccggtgattagccggtggatctgacgtggaagggaaaaattcttctacaatcgcctgctcagctcaagcgcctaggcagactgacaacctaaacccacgttcagagaggggagtaattaagagtgcacaccaggttcacaacaaatataaaagatttatttattgatatgtatagcgcttaatccatcggcgattaatccatccatcgcctgcgcaatccccgccaccccatgccccggctcatgctccgccctatttaggcggctgtgttcttatcttcaagttcctaactcctctccctcattttatatgtacacgctttttaaacgactaaacgatgtgtttttttactaaaaaaattctatacgaaagttgctaaaaaaatcaaattaatctatttttttaaaaaaactaatacttaattaatcatgcaataatgcatgctccgttttgcgtgtcactaagctctatactccctccgtctcaaaaaaaaagacaaaccctaagtttctgtgtccaacgtttgaccgtccgtcttatttaaaaaaaattataaaaaaattaaacagaaaagtcacgtataaagtattactatcatattttatcatctaacaacaatgaaaatactaattataaaaaaaatttcatataagacggacagttaaacgttggactttttttgacagaggaagtatatcattattgctgtgcggcgcacgttacggcacgtacccatccccaccggcagagcgtgcagctcctggagtaccacgggatctcgcgtgagattcagatatatccggctcgagcaacagccaacagctaaccagccacgccaattaaagctgctgccattaacagtgtgaggttttcaagctgctagttgatgtagtatataccttttgaagagctaattaattccttgttaccggcagcattttgacagctcatcgagccagtaatctacattgattgttaatttgttccatgtagtaatgatttgaatgatggtcctgagtaatgtaaggttgtgctgtgtttaattcacattaaaattgcaagtttggtcgaaactgaaacgatatgtcggaaaagttgaaaatttgtgtgtgcagaaaagttttaatgtgataaaaaagttagaagtttaaaaaattattttggaagtaagcacggcgatagaatgagaacatacattacatatggcattcatttcatataataatgctactggatctcaaacttgtatatttctgatggtgtgtttctcattttactttttgcagctcaatatttttttctccatgcactcttattctcagattgtttgtcataaaattagtaaaacatcactcatcctgtccaaacatttggaaatgaagcgaacagatattaacggtagctgaggtatgtcgattactttcgctctgaattaacttgacagattctataaggaattataaatgcagctgttaatttgatttacctttgtacatgattcaagattcaagtgcaggagctggaaggtttttacccctgatcaagaagaatatgaaccttatggccagtgttcactgtggttttacatcatgattcacttgatttatgccaaagtgtaaatataagcccatcaaatgtgtcgtgtattttcctacgtcgctcactgggataggttctgaacttctgatcatgtctctttaactacaattatttttggcatttataatttttgatagccacactttaatcatgtagataacaaaatttcttggtgatattgctaatttcagttgaattaagtatagtaaagtatgctagagagaattatatctccctcactgctgacaaagggaagaattggttcaaaaagaacatgtagcagaagaaggaagcatatctagagcaataaatttgtctatctctacttctatttgaggtgagctgaaaacaatctataatcccatttgaatacaattagcatataaatacatgtcataaactcatagtgttgtggtataagcttttgtatttgaattcataatcaacaagatgatctgacatgcacatcctactacagggagcataggacaagcttgcaatgaacaagctttcgaagaaatgcgtccattcaataagatgatttttttttctctacagctaattcaggccgacaacaatgttgaaatgatttttgtaagcaggaaatcaatgtcagcaagctgaattgacagcccgctcctcccgtttacagaactcaccaacaagtaagagtattcataattctttcttctatgtttaaattggagtttcgctctctctcttatatatgtaacacatgaaaatttgaaactattcctatgctgaatgaaaaagatatcaatgttatacatgatgccattgtatccttatatttactttttctatgtgctcggaaaaatgatctgtcaattttatattgttgcgcattgttgaggcacgaagcctaaaacaattttaaagtcattgttgttggcaggcttgccaggtaaaaaagatagaaaccacacgtcatgacttcaatttagtttgtataggcagtaataagtcccataaaagacaatactaagaatttttttgggtaaaaatgcatgttttttccacataaagttccctgtaatagtaatatgatcgaatttgatatggattttcacttgcaacttttcttctttttgcagcaaacttatttgcaaagcactcaattcactactttgcaattgcttcacaagttaaattcgtgctttgaaatttatacaactcattcataaatagcccaccatccagctgcaatagtttcgatgttgaaatgcttcaatataacattggaacactggggaaactttgattggaggttggaaagtgtgaggaaaaaatttttatggcatcaacatttaatcctacatgtgctaatgacggattaattaggcttaaaaattcgtctcgcggtttccatgcaagctataaaattagttttttcattcatgtccgaaaacatcttccgacatccggtcaaatatccgatgtgacatccataaattttcttttcacgaactaaacatgcccctaatcaggaaaaggttagcgcaaaaggtatgcgtgttgtgaaacaaatatgtaggagataagtcacggacgaacgacatcacagatccgcatggtgacctcggcctgatgagacgatcgacgacgacttttgatgatggtggcgcaacaacggcgtgcgggcaccgggcagcggcgctccgactggcaatctcctctagcggcttgacgatgagcgtgataaaagtagcanagccgacaggggcgagcggtagggcgtcgccgacgagatgatctcccagttgatagtggcttctctccatcgggacggcgccatcttgcttcgtgttgagatatcgaccgacgcgggcgccgggcagaaaggggagaatatgcatggcaggcatcacggacggatggtctgcatacgcaggcgcgatcccaggccgtccggctcatatgcacgtacatctgttgatctcttgttaattggtttagcaccggtctacttctgctggtcttgctagctagtgaagcatgcatatatatatgcgtacgcatacatggccgaattcacatcacacatctaccctcccaaatgtcaggccacctctgtacgcacatgcatgcctgaatcatttaattagcttgctaattaacctgtttcctgctgcaatcaaccattaacacacaatatacaagtgattatattttataaatatgtacaaaataccatcaaacatatgcattgtgatattaaattgtagtgctgta

SEQ ID NO: 21818 - DNA, 758 bp, Oryza sativa
aaccctgcgaggcacgcaccgatcgatcactacaccttcactttctcttctcatcatctatatcacgatcgatcacaaagaggttaacagtaacacatggggttcggctcgagggagatggcctgcgcgctcgtggcgctggtgctcgggctctgctgcgtcggcggcgcacgggcgacggggaggatcgacgaggggctggaggtgatgtggggcgacggccgggggagcgtctcgccggacgggcaggtgatggcgctgtcgctcgaccacacctccggctccgggtggaggtccaagaacacgtacctgttcgcgcgcgtcgacctgcagatcaagctcgtcgccaacaactccgccggcacggtcaccacctgctacgtaagccagcactcgcactgacacattctttgtgtgatcggatcttttttttttcttggctcgtgttcgagctcacgtacggtggattccatgcagttcatgtcggaaggggagtgggatatccacgatgaggtggacctggagttcctcggcaacgtcaccgggcagccgtacacgctgcacaccaacgtcttcgccaatggcaccggcggcaaagagcagcagttccacctctggttcgaccccaccaccgacttccacacctactccatcgtctggacctcgcagcacatcctgtaagctcatgcaattcactcatcaaccaaatgcacattctcagtttataatcactcactcgctcgccgccatggatgccg

SEQ ID NO: 21819 - DNA, 29669 bp, Oryza sativa
ctcccttcctttcctctcccattcgcctcctcaccgttgccgccgctcccgtgctctgcctcgcctccgccgtccatcgccaagcgccgggagagccggtgcgttcgtggacgcggaaggggactccgggcgcgccctcttcttcctcttcctcagcccgaggccggagagatcactcccgcgccgtcggcctctcgtcactgcgccccgtcccgcacggtagtgtctctctccgttcttcctcctcgctccatctcctccccctagctttcggtagtagcttgagtagactccccgtagttagccggcgccgccccgaccgttgccgtcgctcgccgtgtgctcgccgccgtcgccgcccgagctccgtagcacccgctcgtcgccggcctcgctcggcgtagttccacccaatccgacgctagcgtcgagttcccgaagccgcgtagatgctctcaccgccgggaatcgacctctcgtgacctcgtcgccgtttccctcttctcccgccgccggttgccgccgccgcaatccgccgccgtcgagcaacctccggcgaatccgagccgatggcttgccttcccttgtcacgtgcaaccgcccggtgtgctcgctgttgcccgtatcgccgtggttcgctccgccgctcgccgccaccgcccgccgtccattcgaggccgggtcgtcgtctacctcccgccggcccgcgtggcagccacgtaggcgccacgtcggcgccagctcagccagaccgggtcgggccgaccccggtcggtccctccgcgtgcgcgcgatccaccgcgagccgtgaggctgcgcgtgggcccgccgcacctgcgtccaccgcggaccgcgcgcatgcaccgcgtcccgtccccgcccacgcgcgtgcgtcgcatgctccctccgcacggtgagccgagccgctgacaagcgggtcccacccgggaccgcgcgtggtgagcccggtccaccggctctctctctcctccctcccgcgcgcgcgcgagtttgggccgccttgggccggccggcccatttagctcggccggaccgctccatttctcttgggccgcgccctagctgtccaagaaaagtctatatttcctccctcccttcttttctttttcttttccaaaaaggatttaattaaatcctttacctttagatcaaaaattcaataatcttagaaattcaatatcttcccaaccgtaaatccgtttgactccgttcaacttctaaaattccccaaatctcgagatctatcttatggcacgcatagaggtcgttaatagggctttattttcgccgtttgttgagttgtcccgtttcgcgtgtagtttcggagcccgaagacccgcagtgcgaggatttcgaggatcaagctccagatctcgagcaaggcaagccacctttgaacatcttgagcctatatttgaaatttaattatgttgcttgcaaaatattatgcattggtaggatcgcacttaatctgtttgtcccgtctgcaaggcagattggcggacctacctaatttgtcgcatttgatccttcctttgttaattgctataccatgtccccttgtaaccacccagttgcgcctcgatactcgcgcactctgtgcgagtatcgacggtcgccttcaaatttaaaatctgagtaacaacttgggtaaaactggagttttacaaaagacttggaaaaacccgacacctgggtcggtgcttgcgaactaaatgaatttccaaaaccgcggaccggggaacgtaccgggtgtacggtttcccgctcttgcacctaaggaccgtttccttggaatttcatccgaacataagacaaggacgaccacacgggtggaatgggacacccctggctgagtaactagcttatcaggggagccttgatgccgagagacatgtggattcgccggggtggtgtcggggaggacccctgggcttcctggcacagtatggtctgggacctaatctgttgttggtctgggacccctctcgtcggcatatggtaaacctgtgtcggctttcgaaatgccttgtcatgaaagcttggaggtctcctgacgtggctgatccccacgggctgggtgacccgggttagtaatgtcgtgtgggtaaagtgtacccccccctctgcagaggtcattgaactgttcgaacagccgtgcccacggtcaagggcggatgtgaggtgattcctagcgtagttttgtttgactactgcttgtgaaattgctgttgtgaaaaggggttcgatgtttgaaaaatctgtagctgatgggatcagctaggcccgggtggccgtttgaaaagttgttggcccgggtggccgtttgaaaagttgttggcccgggtggccgtttgaaaagctgttggccgggtgccaaccttgttgcaatcctaaagactgatacattgcacatactccgaccggacgagacgcactgtcccatccgtgttgtttgagaagcactcacctagtcgttttagaaaaagagttcaaataaaaccaattgcaaaaacaacagccttcccttgaagcctgcattaaacacttatttcccctggcttgctgagtactcccgtactcacccttgctctatataaatatcccccccagttgctgaagaagatgaagcggatcctgctgatgaggagttcttccaggagcaagccggctacgatgagttttagggtttcggcctagttcccaagtcgcgcctgtgatgaatggtccaagtcctggcttccgttttccttttgtaatgcagttgtgagctcgggatctgtccgcagcccaacatgactgtactcctactctataataaagagacctctgttgctgtgatattctgtctccctgtgataccagcactgtttcctgggactggtatcgattaacaggttaaattggagcgtcacgggctagtcccggtcgggactagttcggggcgtgacaaagtttgaggacctgaacggtcgatttgcgagtttagagaccgggatgacacaacggtacaagtttagggaccggtgatggactttactctatttaaaacataaatgcgcgcgtttatagaatctgcggagggactgcacgcaacatacacagtgtgtgatttgtatgtagccatgtacctagctagcaacattttgaaacggagaaagtagtagaagcttgtttatattaattaacttaattaattaataattaaggcccgcttccactatgatcatgaactagctgagcagtggatcgacgacgcaaacgcatcaatttaaaggagtatatagtctgggggtgcccaggcccgtcgtccaactaactgagatgtgatgtgaattactgtactaacactggtgttaatttgtcagtttatcgatcgattgatcgatcgggccgggccacccgatcgatagatcctataatatttagctattgcatgcaacaagtcatcgatatatgaaacaaattataaatgtccgatatttgttcataaattaagtgccactgccatgccaacacactaacatatatagctagatctatcgaggtagctagagaagctgatcgtgatatcgagagctaattaagctagctgaaccaatcaatggaaggcctcgccggccatggcgacctcccgacagccgccgccggcggcggcatgctggcagttgatctccttggcccagctgcaggtattgtatacactctagctagctataacatgtctgttggtgtcatagtatactaattatatttagatcatggtgttataatatatgaataagtagtttcgctataaattttatcaaaagtcgtcggtacggtgtcgacaccggtcattacactgtagatccgtcttgggcatgactacgtaatactctctccacctaaaaaaaagaaaatcaactttctgagaatgaatttggatagacgacaataatttatccatattcatttttaacagttgatttttttttggagaaagtaaaatcgttcattttagaacggaaggactacgttacttaatgtgtgatctatatatcgcatgcacgcagatgcaggaacagtaacagaggagggctacttcgtcttcgtgcagcagctggtagtgcgcatcaccggcggcggcgccgccgccgccgccggcatttcgttgccaacgtcgtcgtcaatgcaggaagaagcatctgcagtagtagacgttacaattgatggattagcatcagctactacccacggcaatgccattgttgccgacgacgacgcgggcgatgacgggaatgtgcgtcgtccgccatcgtcgtcgtcgagaggaggaggaggaggaggaggaggaacaataaggacatcaagatcaagaagaagaagaaggagatcggtggtatgggagcacatggaggtggatccgtcggggaacgaggcgtcatgcaggtactgcaccaagacgctgtcggctaattccagaggcggcacgtctcatctcaggaggcacgtcaaccgatgtgccctgcgacaattggcacgtgcgttggacatatgatgaagaagaagaacataggtgcatcagtgcatgatgatcgatcgtgttccctttcaatgctgtctatatataattccacccattcacaaattaaacacacagaagtttaaggttaatgtgaagttattactttgatgctatttgtagagtttaaggaattaaagatcacgtctagtgatataactgctattagctagtattaagaacagttagcagactataaaccaattataaccaaatattgaggagataaataaaaagagataagagcagcgagctacagatttgtaaccagctacagcacatactacaagaagcaatgtgtgtatgacagtcaggggcgaaggcaagcctagggcaactagggcttgatccctaggcttgcctccaaaatcatgtataaattatgttaaatcaccaagtaattttagagaaaaatcaacaacttattagttgagcccaaggttagccctactattcagtaatttctagctccgccactgatgacaggtgagaccaagtattacttgtgtattatatatgtttataggtaactattgtataaattagctactaaattaacgatttggagctaatggttcactatactattaaactttctctaataagtaataaatatatatagtgatgatcagctagatagactaaaagtactctaaaaccgattatacttatatataaatttgaagttaaaattgttcgtttatatttacggaccgagagagtagcgataagagtactgcataatttgaaagtgatcgatcgaacaagcgatatatagcatacgtacggagcacgtacgtaatgcatgcttcagttcttttttcatgcacatatatataggttactactaattaattaggtgctcctatatgttggggttttgttcattattgtatgtgtgctagcttgcgtgtttgtgatgcatggtgacgatatatattaattgctgcggatatattgtactccagtactcatgctatatatatattcgatcaaatgaaacaaaagtcagctaaaatttctgttgatgttgaagtcgatacgatgggtcgaattcgatccaagatgagctttttgggtgccgatcgatggtgcaggtcaccagcatatatgtcgtcctgaacctcacgtggcggcgaaactgcaccatccgctgcctttttttttttttccggtgccaaaggcgcagaagtactacttatatagtgtgtgtgtgagatatataggagaaatatatagccctcaacgattccaaaccgtataaaaaaagaccccaaggcattatggacaaatttaaccctggtttcattgacatgcactactggagaagtgatctttgatgggtgatgtaaaaaccacattagtcccggtttggatagggaccgggactaaaaagacacgacgtatttaatgcctcgcacttatcctctagcaaactcctccttagcacaaactcctcatcccttatcctccttgtcattttaacttcttcctcccttttcttatcctgtctctcttatcttctccttttgttgcagcgagcaagccggccgagggctgtgcggcggcctatgccgcggcgggcagcgcggatgtctgtggatttgttgacttatacatgatgtatgtggatctgtaaatttgtgatgtaaatctgtgaatttgtggatgattttctaatgtttttgttaatgtggatgattttgtttttgagtacgttcaatttgaaatcaatatgcaaacagtaaaaaaaacaatgataaaaaaaaacctctaataccggttggtatccttagtcccgattattttacccagaactaaatatacccatcttcaaccctggatttggggttccggtttgaaactcgggactaaaggggttgtaaaccggggctacaaagggtttccccagtagtgatggcatacaacgggccccacatgtcagtgtgccgttgaggcgttattacatggagtcatcatcatctctctcgctgggctggcgacgccgcggcggaggtggattcgccgctgctgttcctcaacggcgcacaacatcatgacaccgtggttcccgttcaagcagtccagcatcaggcccgccttcgacgtggccaccggcgagcacaaggtcgatcgtcaggcccttcaagaaaccgagcggcgaggcgagctacgagctgaggtgtacatgcgaggggggagcagatggttggcacgcgccggccaagtgatgctgcgcgtcgccagcttcctcgtcggcttgccggctagcttgccgccggtgtcccggcctcgacagatttctttaggtcttgttcggttacacccgaatgcaatccggactgggaatgacaaatatagtaagaaacttatgataatacaatgagaggccgggatttattcagggctggtaaccaatttacttatgatagggacaataagagaccggaatcgatccatgtaacatcctgaaaattcctgacaataaaaattgctaaaattttgaactttttaaaacttttgcatcatgctggatgttatggttgttattacttgccaaactgtaaatcgtctcaatagaaaaatcaaattaaaagatgcacatctaagtaataactaaagtttacgacaatatattgttaaccctataagtatttatgcacaagaacacaagccaaataaaacacaagtcaattattaatttctataatgtaaattacaaattgtatgttaaatacttgaaccatgtcgacaagtgtcatgacatctaagtaaccacgaaatagtcgccactacaatgattctatatatataggagtgttgcactggaataactagattaatatttataatgttcatcaagtctctcaggggataaattcactcatgtaaaataatttgtcatgtaaataaattgagttctatgtataaaaagagcttatgggagtattcgattcaatgtttaagaccaatattgcaccaaatctcataatacctttatagaataaaacttaaataaattaaacatatgtatgtaaaatatattgctatacaaataaattcgaccaatatgccattgtattagtagggacaagttggaatatttaattcaatcatattctataagtctccaaaatatataagttcaccttgagtcaaaatccaagttaatcaaaacaattcaattgtgagaaatacataaatattcaaatcaaacatttgaattctcaaagcccaaaatgtatagattatatttcaattcaattccaatcccattcacttttgcagtttagcccctccctcttcctctttttccttttcttccttctctctctttttctgtctgtcactgttcatgggccatcatctattcgatccggtcccatgaccgcgcccgcgtcctacccgcatgccgcacgccgcgcctcccttccctcacgtcgcatccatccgcttccaggccgtgcgccgcttgtgggccatgcgccgcatccctccgcatccgcgctcgcgcccggacgccgcgcacgcgatcgaccgcgccacctccgcatctcgcgtcgcccccgtgcaccgcatcgtgccgcgccctaactccgtgtcgcgccaagtccgtccttccgccgcgaatcccggcatccgtcagcgccacgctaggtgggcccgcgactcgaccccggtcaagccgccatctccttcagccgtcactccaagagatgaggaacgaagccgattggataagcgcgtcgccattgccacgtccgccaaattatccagacgcatgacgtcccgtcgcccctccatgcacccgctggacaaaacgatgcgcaccctctcaagctagcgccgaggttcacaggctaggagctgtagggtgatgattaagccacagagacttaatggagaagaggatggaaaccttagggcacccacaatggttatctataggctctctacaagagatccatgtcagcatattttcctacttggaagagattaaatgaagagagagagtaaagctatctactaacctggagatagtctatagagaaaaacgaggcaatgcattagagagctatagatacccatgtagacataccattaaagtggtttactattaatctagtctattgctgagatgtacatgttttatagatagcaccttactttaccattgcgggtgctcttagccgcgtcaacctccctaacctaggccgtagacagccatcgagtgcgcctgtcatcgacctcatcctccacgccatcctggcttatccccaagccaagcccccataaaaaccccaatcccctctgcctctccctcggatacacatttcgtcgaacacctagcatgcgtgccggcatcgtcttctctactccaccaccgtgatatcaagcatcgccattctgcattctcttggtaattcctcgctcctgagctcctattaatcccctaggaactaacttccccatcaatgtcgccgatcatggccataaccatgccgagtccgagctccaaagctccacccatggaggtcaccgtggacatgctatcccgggggatctcccttctattttactggaaaaacggaaccctcatgcgccatagatgctcacgccctcaccaatatggtcgcaaaccatcccgttcgccgtagctgcttgcagccgagctcggccatggcgttgccgtgccgcaacgctcgcccctgctccgccatgcaccgccgccgccggtggagggctgctagagctcctccgcaaacccccctgtccgccgccgtgccgccccggccccgtgcccgtcgcgcccagccgtgtcctggtgctgcctcccaatggctggaggtagaagacgacgggaggaagaaagaacgacagaagagagagagaaaccgtgtgggacccacatgtgattagcgcacagtaatcctatccctaacggtgattagcccactcaatggcaggtggggtccctatagttaaaatataagaaaacacaattatatattttgttcctatgacaggcgggacccactggtaattaaacaagcaggtttgaccctaagtcaaccagggccggtcccacatgtcaaccacagtgggttttggataatgtttccgattaaagataaatcatttatgaacagtacatttttacaatttctcggattaactcaaatttgaatctttaaactagcataacttattcattttagctccgatttgagtgaaacttgaacctaaattcgtctaaattcataatcttcccaatggtatataactcactatttaataaaatatatttataattattaaataataaatatcaaatgattagataatgattaaactaaaaatgtgctagcaaataaaaattatcattgtacagtgaactaggtagaggaatatttgttgttaacatgttctgtcactatgggaaccatgtgtagctatatgtattagttcagtttaaagcaaagataggagatattagtatcatttactattccatgattatatatagtcaagttcatgattcagtcattgtctaaatagaggattaacttaatgagtttataactgaaaatctaagtacacacataacagtccttagtttgtctatgaggtataatgacagagctgggtgtgatggaatcaatcgaatgatagatttaaccggtgcaatatcctatatatatatatatatatatatatatatatatatatataatttggttgacacctattatttaacagaacaacaaataactcatgttcggtaaataatccaattaacatattattgaacttgcatgtacagtacatccatttaacacatacacagtaagtcaatcacctactgttgcacctattaaactatgaattgtttgataaacatcaaagttagataaaacactaattataaatcttgacctcgttacgagaccacacagacaaataatctgtacctatgacctcaccgatctaacatatagagcgtgtatgattattaacccttttataatttataatgacaagtaaaatatgatcgtaattaaaataatgccccattggtaaaataataatataaatgattccctgtgattgcttgttgatcctaattaaattaatccatccaacaacagaacctttagtataagaccatttatctgaatagatgcatgcgtagtcatataaccctcccataaccctgtaggtagactaaaccacatattagcaaaatgtgtatatcatatattgtgctagttagtaccagtagagccataatgattatataaaatactaagaaaccttagcccataagctttcttgtctcatcagcttcttatctcatcagctacttgcatgctatgtaatttagagcctaagctacctccattttccttacctatataaacagtgcagccatagtagagacttcgtagcaccttacaatccattagcaaacacagtaatgtgagcagccgtaggttcaaccccaacatttatattttgtttgtgcatatgtgactgttgtttgaacattgatttttctcgcgtattatagtattggtgtatcgattagtcgtgaggcaacgtatgcagcttccaggaggtgaaggttgatcaagattatatcaagaataagaactatcctgagcaggcaagtcatcaccccattccttgagcatgttgatcccaattatgaaattgttttgtttataaataaaattgcatgtagtgataaatgtcctacttgttattatgccatgcctttgattattggttatctaattattcccttgtacccataattacgtatgagtccctagtcacttatgacaaatgcttagtactgctaatttagatctatgcattctcatatttatcaaatgctttatgtttgggtaactaccttggggaaggtagttgagatacggcatgtggagatatgagcgccacattgccatgacattgatgagatgatttgtgaaagaaagttaaaactaaagaaatgttttcgactggggcggctggaggacttgggtggtgtccggtaaaggctagtgccgtccctggtcaattaaggaccgagccatgaagctaagcatgaaacgactccagtacaaccgtacttctcgtatgggtatagacctagcggagtaaatagccgagcggaggcagtatctctgcatagtggttttcttgatgtgtgtgaggcagggcctacggtggggcagccattggtaggaccgcgaggggcgggtgcctacagtggtgtcgccatcggtaggactgccatgtgtaaacctaaacttaactataacttaatgcatgtgtgagtcttcccttcccgggagcgccagaactcctctcactgctagaaaccgtgtacgcctagagtgcatgaggactcaagttcatggagcgggtactgccaaagtgaggttattgaaaggctttgccatggcaagtctcatccgttgggacgtaggctcatgtgttgggcaagtcgcggagtaagggtaaagtgtacatccactgcagtgtgagtaaaccaaatctattcgaatagccgtgctcgcggttattgagcaccgggacatgtattacacttggctagactctaaattcttaaaatgatgggtgggatgttgcatgatgattttgtactggtggatcaacttctcgagaggcgagaaggggtagaccctagaaaaccatgacgaccagtggcgggaagctatccttgggaacacaatggatggtggacagaaccgtcgctgtttaatgaacaatggaattaaaacttgaccagtttatgctaggtcttaggtttgtgaaatgatatttgaaaactcagctttacgcaaagtaaccatagccactccttgtattatcctgtacattactgcattttgtgtggtggcttgctgagtacttttgtactcattgttgctctatatatattttttagcagagtgttgaagagaagccattgttagtacgcttgcgtacttaacaagatgatcggagtgcgattccattctagatctcgttccccagtcgactgcttgtggcatgtcaaccgggcccttgtattattttgtcttccgctgttgttctctgatagttgttggcctgcctggccctaatgtaagcatttaactctcttagcctgaattcattcgtgatatgttgtgattcggctatgtatgtgtgtaccaactactgatccagggattggtactgataaacacagaagatttccgatttccaaaatcgggggtcgacaatccactagtcaagaggtgtggaaccaatccgaatgttttgttgtccttatcatgagtaaattggtttccggtctggaataaatcctggtctcttattatatatattataaatttcttactgtgcttgtcattctcggtccggattaaatccggacgtaaccgaacaaggccttactggttgcgcagctcgctcagctacacggaggtggtggggagcccatcctgtcgttcaacgtcatgccagcacaagtgttacaaataatcttgtgtcgatctgctttgtgtttcgtttttctggtagtttttgaccagctacgcatctggctttgctcaaaattaattatgtctttccatcatatggttcaccggttgtatatcgatctccatattgcagtccactacaatacaatacatggaaggaaacgaatacaaattaatatgattgatgaaatgatatataatactgtgtaatggagtaatagtactgatacataatgtaactcagtaacttctacatatttacatatattaatatagcgcagtgggagcctctcctgctctttaaatatcaaaaaaaattagagtaatactgaatttctttttattaggtacctagagacagtgaggacgacgtacgattatcgagctgattatgatggggatggaccaagtgtaaaccaatcggtgactaggagtagcccacggtgtgtttgcgaggacatggacacatgaatactacatgctgtatgcatgcgggggtgaccgttgacccagagtttttatttctctctttttttttagaacgaccggacattgtcaatgttgggccgccggcagcctcagccggttgatcaaatttagcccagcccatctaacaaaaatggcccgaagccatatctataattactacttactactctatccatctttaaaaatatagtagcacttataaatttaatagttcggccccttctcgctgcttggagtttgtgtttagctgtcgtagttttttaagcttcagcttcttagtttgctttttctcccttctcctggcataaaccggtctgtctgatcgcgttgcgtaactataactcttttcttctaatatattgacgtgcaatccttttgcacattcgcggaaaaaaaacttataaatttaatagtagaaaacaatttctcaaccagtggtgacgtgacaagaggcagctatggcaggacagcactatcatgctagctacacgtgacgtgatagagttatttggccacgccaggcgaactggtgtggccaaaaggtttagatttgaaagtacttttgaaaatggtctattaataaaattaaaacataaaaaagtcaaaaaaaaatctttcatctcttatccctagctcggctcttttagaaccaattccatctttctactgacagctgtgaagtccaaagtagtacatgttgtaaaaccaacgtaagtccaaaggaatttaatttcctttttcgctccaatgggaaatgtttggtctacgaattatactagctgccctgctttcgctactctttgggctaaagagtccgaaggtggataaaatttcttagtttcaacaagtaaaattggaataattaagttgcttttctttcattaaaaaaaactgttcaaaaacatccccttttaccatatggatgaccaataacaaatccacctgtatggtatgcctgggctcatggtcatgaaccgtgtaaagccccaggtccaaaatggttataggtcaactcaatttgcagagaaaatcctttctataccaatgaaattatagctaattctttttatgtttatgaattttgcttactttcttgtatatctaaaaatgattttgatcccttccatgcttctccgttgaccattagtatcagtggttctccccggcgtcgatcgggaatgaagacgtcgatgtaaaattagggtgcgcacggcgtgcagcacaaacagtagggtgggtgtaattttcgtcggattgatatgggaaaaatctaatccatatatatagcaaactagcaacgtctaaaaaaaatcgcatgttttagaggataaaacattcaaatgatgtttggacagtaaaaagagaagaataagactaatataacaacaactgagaagaaaataaaatcagccaaaaaaaatcaaatcatctcgtaaaataaaataaaagaaaagaaaagaaagagagcaaatgatccattaaacaacgacgcaccgtggagtgatgtccaagaggtaatagcctctcctgcgtcgtcgacctccagacggctagctcctccccggccgccgttgagcttggaggtaccgcatgcagctagctttcctgacggccggcgccgctggtcaccggcgcacggcagctgcatgcgcctgcgacaaaggccaacagatatctctcagttcaccacccgctggacgtaattaagggaggcatctctcagtagggcgaggatcagatctctcagtgcattatcgccattagcagtagagaaattaaggggggaagagataccttaacgacgaaggaagaattagctagctgcttcttatatatctccgctggtggagactcaatccacacacggctcccgtgtagttctcacttacaaagcaatcatattaattaagcgagagagagggtttgtacgtaactatccataaggtgtagattggtttaaccaaactactccatggttaaacccgactagctctttgcgtcatttaaatgtgacgtcatgtctgaatttaaaatctctccggtcctctcacttttatcgtagttttatttatacctttcgcgcttgtctagctagatatgattttgtctgccttttcccatagcaacgcactggcactttgctagttagggggtgttctagatcccacccccaaaattttgcacccttttagatcgaacgtttaaacacctacataaagtattaaatataggctaaaaaaataactaattacacaaattacgactaatttgcgagatggatattttaagcctaattgctccatgatttgacaatgctgtgctacagtaaatatttgttaatgacggattaattaggcttaataaattcatatcgcaatttacaggtggattttataatttgttttgttattaggctacgttaaatacttcaaacgtatatccgatgtgacacggcaaaaatttttaccgctagctagctggatctaaacacagcgttaaccatataaaattccacaaaactcctaccccccccccccccccccgcgttctactaatcgcagtcgcatccaaaggtttgaaacccctcgcgccaaatgcgaaaaaggcaccccgcatatccccacgtgcgctttctcctcctctccgcttgagccctagctcctccctgagctccctcccccgcgcgaattgaaaaccctagctccgatctctctcatccacttcgacgcggaggccaacgatcgtaagcagcttggtgagcaggggctagctagctacgacgagcagcctctggatgtacgagagcgcgcgcgtggtctcagatcgtcgactgagggcctcgatcgtgatggctagggcgccgcgcggtagcgaaggcgagggcggcggcgaactgggagcgcctggtgcgtgcggtgctgcggggagagcggttggcaggaggcgcgccgccgggaatgcgccgccgtctctcaacagcaacgtccacatcgacgaggcgcttcccgccgccgacgagaaccagctggacgaggaccctaccgtcgccaggattcgtaagtttcgtcaccatttttcgctccgttaggctattgacctgctgtatggccgggtcgccgcggctcaggattgccctacccatgaagttattagtggtgtttttcctagtattttatgcagttagtatcggctacacgaattgactatgctagttcattaggagtacttttgcttttttttttcttacagccttctgtactactaaatttagtcaacagttacatgatcaggctaataatatctttcgtaacacactcataaataatatttatgataatttatttttagatatgagataaaaataaaatttatttattacttattaaaaattatttatttaccatataaatagatttatcttaaaaatattatttttttgttatatctaaaaataaatttgtcatacataaaattttgttttgccttcgcgggggcggaaataaaatattatttttgttaaataatatatcacaaaataaactacatcagtatacttaataaatttatatttttcttgatatcaaaggacaaaatggattttacgataggaatttaacggtcatctaacgaaagaggtatagaagggatgcaaactgaaatttaggggtatgaaaaggaataaacaaatctcaggaatataaaaaggattgggtgaactttcaaggtacacatggaattttctcaataaaatttgattataccactcactaacaatctggaccactagttaatgaccaaattgccgactgggtggggcccatgaggtaaattaattatgttggggaaaaggggagaagagaggaggaagaaagttttggccttggtccatttttatttcttattctggcccggctaaatcctagtgggtggtatccaggcacataggccttctggcctgccggctacatgttccttttgtttattttcaaattcgtgtgtgtataatttttttttaaagtttacttatgcatccaaggtttatacaccaacagttatgtgtcttatttgtatttggatttgaatttcaaattattatacataatgttgttgctatattaaaagtttctatacaaattaagtgtttgtgtataaacttttatgtactattaatgtttgtttatattttttagtgaaagttttaaacagattttttaattgggctgaattggtgtatgcatgtaggctaaggacccgtgtacactggctgaaacttactagcttcaatagcttcaatcaacttttagctaatgttgatgcgcctgttttagacaagctagtggccataactcgagcttgaatcatccaatcagttatccattttaattacaagtgagtgtgcgtggatcttaatttaaccctaagtttactcccaggatccacctaagaaagagtcagtagctagaatttattattgtgccatggagttacaaaaactaatgtgtaactttaattagtgagtgagaagagaggaaagacgtgagccacatacaaagcgaacacaagtactgaccaaatccaagacggttagacagagcactcgtgaatatcgagtactaataaaccaacaaatagttaagcaaattaattaagtctcatcgccgatgacaaaagatcgtcgatcgatcgggtcgggtgccccgcccctgagcttagctagctagctcgattaattgaagcttgcactggtggagaaaccatctttcgtcggtcggccgatttccacaatagtcccggatgcaataaaaaccggggctaaagatgatctttagtcccggttcaaaagggtaacgggcatatttgatctttagtcccggtttgtgttacaaaccgggactaaagatcatctttagtcccggttcgaatgctgtcggggcctgtcaggcccccccaggatctttagccccggttggtaactttagaaaagatacgagaggctgcgcgacgactaacaaatgcagtggaagcctcctctcagggcacgttccgaccagacagagatagggacgagctgacactcgccctgcagactccaaagcatccaggacgaacacgagggaaaggggtgattccttggaagattggtttcaaggaggacatccacacgtacaggagtcggatgaggagcaagagagataccgaggcgaagattgcagacctagagttccgggtatcgagctacgaactcaacatgcaagaggaggtggcaaggaaggttgatgaacgcatggccgcacatcggtcccatgatccccagccgaccattcctcctgcaatggtgaacccgtcaggaaaccgtagcagctgcgcctcaacggggcaggtaggatcccagagcatggacgccatgcaaacacaggacgaaatacgaatcgacctgtcccgttgatgacatcactcagcggacaccatgtgagctgcatattcctttcaagaacttatcaataaaggtaagatttagccattccgctagttgctgcttatatatgttgattactaataaataatctctcacaacatgaaggtggcgtcgggcatggccatcccaacggacccttcaggtacttaccactgcaggccgattccagcaggatactcgaaggtcgaagttgagttggtcgaaggcgcgtacgaggacctcgagctggattaccctggaggagacggtgagacgcatctacgagacacaagccatgccattattctatggcgcaggcggtacatcatcctccctgggcgacaagcggcgtctcgtgcaccatctcctccggctccgccatctcctcctcaggatcctgcaccgtctcctcctcatgctccgccagcaccgtctccacctcaggctccagcaccgactcctcctcaggatcctgcaccgactcctcctcgggctcctacacctactcctccgcaagctcctcttccggcaccttcaaagtcaagggcccccccagctccatcgcctgcccacacaagggcaacgaagaaggcgaaagttgacgccgccaagaacaaggacccggggtacgattgcacgcaagaggagcttgacgcttacgttgcatcagaagtcaagagacaattcaagcctcgaaatccagaaaagaagattcctatagaccccagtgtcaggaacttcttcaggggtatgtctgcatctgtcaaggaggccatcaagctatcggactatgagcgaacgctgaagaaagcatcttctggaaagtccaaaccagtccctcagcttggagagcaaccaaaccaggagatcgagccattggtgaccggtaaagaaatgacgatagaataatttattactgacaccggtctaactacggatcaattgctaggagtcgcaccaatcgaaaaggcggaagtgaaatacatgtacgaactcggtaaaccgcttgtcaagcctgagctgctgcagtccctacccacacaaatgtacaagttccatcagctgtacatggagatgagcgccaccggtagagagatgatcggagcgaggatcagggacacggacttcttgcaaggagatgacattctctggatcaatttcaggggaatctacgaactataccagctggacgccctcgacgtctctattatgagttgctggattttgtaagtatatcgttcagttagatttcttactatacgtctcatttaattaattaggtccttgtatataagtagactatagaaaataatatactcccttttatcgttgtagaatggagattcaaagggcccgacggcggagggttttcgatactggattcatcgaccctcggaaagtaaacgtcgcaatgctcgactaatatccacaagaaacagaggacaatctcgtccatctcctgaaggcgcagcattacaagacgttcatactgttgccgtacaacacagagttagtttaattttactgtcttcctacataccaaatttcattcccgtacgaacttgctaagtgtttcatatgtaatgcatcccacgcacattgcagattccactgggtgcttttactcttcgacctggaggcctgcaccgtcaacgtctatgactcaatggataaaaaagagtctacgtttgacaaggttttcgaacttatagacaggtaccgtcataagttcctttgttaattaagaaaatcttgttatgttaattgctactacgaatcatagctttagactccatgtagggcttggtatcggttccgtcatttggtccgcggcaaatggagagaaagacttaggcggaagttcaaatttcctgtgagtacacatgctctacatttatatttctccgattcaaatacacatacaagtgtatattaattagatctctcgttgtttgtcatttatttgtagtgcgcaaagcaaaagcagggaactaacttgtgcggctattacatgtgtgagtattgccactgccttgcagaccaaatcatcaccacaagagagctcgatgtacgtacaaataaattcaaaatttcattacgtagcgatttcttgtttaattactaatcaatttcatacattcatatagtttattcgcatgagggataacctgaccacacacaaggaatttatcgcggcggttcaagaacaactcatgggattcatcaacgaagaaatccttgatcccaagggtgaattctactacgacggaaacacaattcaccggtccttagcttctgagctagcagcgagtactactacgtcgaaatcgtagctagctaggacatataatggattgtaattaatacatgactacatatgtttctatatgcatgtgtacacattttctataatgtaaatatattttggtcatatatatatctatatacatatgcatttgcataacatatatatgtataaatacatatatattatgcatgtatatacatataatataatataatatatatatatacatatatatatgtatgcatatatatgtattgaaacatatatatgcatggtttatatatatatatatatatatatatatatatatatatatatatatatatatatatatatatctactacttaaaaaataagaggtgcttccatcgtccgtcaaaaaaaccgtgtaaaaaaaccgggcagaaaaaaccaggtttatccgataaaaaaaccggaacggaaaaagaagtccgatccagaaaaaaaaaagggggcgaaaaaaaccaaaaagcaaaacggacggagtccgatccaggaaaaaaaaaggcaaaaaaaaaccaaaaaaaaccggacagagtccgatccaaaaaaaagccgaaaaaaccgacaaaacaagggacggaaaaagccatgtttgtctgataaaaaaacaaaaaaaataagtctgactcctatatccttaacagtaaaaaaaaaaagttcgactcctatatcaaccaaaaaaaaatctgactcagattggtgaaataaattgatgtgccggattgaagatctgtttgcaaaaacggaatctacatgtcgagagcattccatttttatatgattttaatttttggatttgtaattttatatttgagtccctgtaatttttatatttgcatttgagtccctataattttgcaacaagctacttgaggttgtttttgttaaaaaaaataaaagagaaagagaacaaaggcagaaaggtgcataaaaagaaaaagaaaagccaaaaaaaagtctgactcagattggtgaaaaaaattgatgtgccggattgaagatcggtttgcaaaaacggaatctacatgtctgagagcatttcatttttatatgattttaatttttagatttgtacttttatatttgagtccctgtattttttatatttgtcgtatattctcctgtattagaaaaaaagcaaaaaagaaccttcgaaaaaaacaagcaaaaaaacgtgtgagaaaacaagaaaaaacacacgagaaaagaaaagcaaaaaaaggagaaaaatatggttttcttcgtaagtgaaaaaagcgaaaaaaaaaacatggtaggagaaaactgttagaaagaaatgcgccttttcaaaaaatggtttgagaaaatcgcgcaagaaaaaaaacattgtttataaaaaaacaagccgctcattaaaatagaaacattgtcattgacatgattatgcatgaaaaacgtatattattattagaatttttttacccgttgcaacgcacgggcatttttgctagtatatatatatatatatacttatatggtactagtattaatatatatacttatatggtactagtattaattaatttcttgcactgcaaacatgcatgtgcattcgatcatgcacgtgtacgtagaacaagcggactccacgatgtcggtgttagctgggttactagctcaagatcaggatggtgatgatcaagaggttactagtcatgcagcagctgcctccacgcagggggacgcgaacttcaccggcggcctcgacggcgtcgatgatgcagccagcctttgggtgcagccgaaggcgaagaaccctcttgttgatgaccccgacttgatacgctttgctgacgacctcctcaacttaaccggtacgtacagctacggatggttctcctcaccgtcattggtgatccgcgcagacagcatcattatatttttttatataatagcatatatgttttcgtagtatattattaaaatatattaaaataataatttattttctcatataatataatgagactctcccgctggcctagtatggatttcaccggtgcgtacaaacgagcttgctacgtactctctccgtcccaaaaaaaagataaactttaggttttcgtgtccaatgtttgactgtccgtcttatatgaattttttgtataattaatattttcattgttgttggatgataaaacatgattaatactttatgcgtgacttatctttttaattttttcataattttttcaaataagacggacggtcaaacgttgtatacggaaacccagggtttgtcttttttttttgggacggagggagtaatgaataagcatcatcattgtgaattgatgatgattatatatcacatgtgcgatgatgttgttactatacatgtgttaaaaaatatgatgtgcatcccctccatgcagcagctgccatcggcgccgccagtgtcgaatatgatgtgcatccaaacggaggccagggaagaagaaggtcaacaataagaagaagaagaagaagaagaagaagatcagtggtatggaaatacatgacattagatccgtcgggaaacgaggcatcgtgcacctactgcaccaagaagctgtcggctaattccaaaggcggcacaagtcatctcaggagacacgtcaacaaatgtgcgttgcgacgactgcaggcactcctcatggacatctgaacgcgtacgcaacgtctaccatggactgccgttgctgctaaattgatcgatcgatctcatgtttgttttcatgcatgcatgtatagctcagatcgatctgtagtactacttgtaattagcatatgcgtgctaaatttgtgttgtgtgtgcgtgtgctcgtttgtacgtgatacatcggtactgtactccttttttattcccctaattgattgtgctatgaaatactccctccatattttaatgtatggcgctgttgacttttcgaccaacgtttgaccatttattttattcaaaaattttatgcaaatatgaaaatatttatatcatacttaaagaacattggatgacgaatcaaatcacaataaaataaatgataattacatgaattttttgaataagacgaatggtcaaacgttggataaaaagttaacagcgtcatacattgaaatatggaggtagtaattatttattcacgcttgattaaataaagaaagaacatgtgtaatgtactccttttttattcccatattcgattgtgctatgaaataattatttattcatgtaatttccccctttttcttaaagcctgattgatcgagcatcatgttaagcgggatgaggcgtacgcgaaggttgctgatcgatgcaatatggctacacacacgcactttttttttttgactaaagggcttttagttgaaagccaaatggcaaggtccgctggggatcccagctacattgtcagcttacaaacaagcagcaggttaagcatgaaaaactttaaacatagaaagaggcagacacaaaagctaccagcaccaacatctaccacaaactgcccttagggcttgtttgggagagtttaatattctgagaagcagatagttggtagacagcttctgagaatctagaaaaaccgggtttctcagcttctggcttctagttcattttctggattttaaactacaacttcttagaacctagatcaaaagctggactgtttgggggagtttatgattctgggagaagctgtagcagttataacctcccccgaacaggcccttaacatcacagctaccaaaacacaggaaaacaacactatcaaagctagcccacgccagcccttggaggtgtcaaacttgtcaccagcatcctcaacttctctaccaacgcttccagcttgtgttcttcctcaggtcgaaacagtttcctccactgtaaaagattggaaatgatttgaaaaggaatagttagtggagaataaaccagattcgctctaagcaccatattattgtgagtgagccaaagattccaatagattgcagctaaaagactcaaagtgactctaaaagaagtatggtcagaaatccctttgcacaacaagaagaaatctttgaagtttccgggcaaggtaatccaattaagagcatcggcctacaaatacaccaaatcagcctcaccatgtcacaggtaaaaaggatatgattagttgattccagagctccacacagttgacagaattttgaaccctcccaaccttttttcttcagttgttcagcagcctgaaatcctatctctaaaagccaaccataaaaaatgtttaatattcatggacaaggacaagttcacaactcaatgttaacctccctaatccctctaaaggttaattaaggctctgtagagagatctagttgtatattttttgttaactgtcaaaccccataccaatttgtcactagagtccgagctctctatattctctatgacacgcacagattgggcggtcacggtcgcccgatgacagagtcaagttacagcccattgccacatcactgtatgatgcggcccagcccatcgatttcactggtatacgggccacactagccgataggctacgatatgagccttggcagccgagtacactctagagatgggattcttcgtgtgatgacgcataaagcgagtgtaactggattctcagccttcttcttcctcctctctccccatctcccctctcttcatctctctcctctctccaggcgccggggaggtgtcctgggcatgcggcggcggcggcggcgctgtctcggaaggggagcgcagatttggcgctgctgctactgcggtggtggcaggcgtcggctccggatccgcaagctccctgcctcgccggtgacctcctcctttggccacctccaccgccgctccgctcgcccctctgctttgccggcgacctgccgactccccgccccctccctccccaagcactcccgctgtcgctgccgtatcgccggccagacgacctccctagcccctggagagaggagaggggagagagaagtgaagagaggggtgaggggagatggggagaaaggaggaagaagaaggctgagagtgatatttttttaattaattcttttagtgcaactgacaagtggggtcactgtttttattaattttcaaatcaaattgccacgttagatgaaagccgggtcaatttagccacgtaggcgccacgtaagctaaaaccaccgtcttattcgccatggaacctatattgcaccggttttaacagttgagggacctgttgtatctggttgaaagacgaaaatcggattcgttgacaagataagggacctcagatgaacttgttcctagccatggctgcgaactggttgagaggccagtttacttgttagatcggtgggctgggccatatcatatggtggtgtggtgatgggcaatgaactaagagttttcgttttatgaaaactaaatcatttttttataaaagcaaaattattctggcaaagtcaaattaactaaattaagggacatgcacctcagcctaaggttttccgcaccaaacttaatttaccacacgtgtttgccatgcttctctattctgcttttttgatctatcgatcactcgacaaatatgttgtgtaggatcgaaacacaataactatttaagcctaccgcgggttgttcaatggtagaaacgcccagaaccaaaactttaagtggcactaaaagctaccctcaaaatccgatggagattggtctgatcgacctgattactccagcctgaccgcaccaatacctttggtctgaatagtgtagatgccctattccaactgcccttcactctactgtcgattgatgccattgctggtctaattggagtgaagccatcggtctgaccacgcagttgctgccggtctgagtactgctatctagttggtgtgaccaccaaacccaagcaaatacaaattgaagaattcttgaaagtagatcaaacttccttaccttaattcatgtttacaaaatgcaacaacaacacttttctctcaaaattcgactaaattcaaaaccctaacttttatctcaactcaactctcacaacccctcttgtatttatacctagaggtaagagcctaaagccacgaatccaacctatacaagtctatctaatccactaggaaaccttcatgtacaagtatccaacttatcttattataattcagactccaatcttcccaaatttggtctccttccaaattcgattttgccttttcatacgcacacactctccaatatcgtatgccgcatgaaatcttcaccaaccacgtaaattgttctttaggataagcatccctcatgtatcccgatcgtccagatgtcatcatatcccaagttgaccctcgattatcatcgacaacactctcccggggtatcaagacatacctacacatgaatcaaacaagaaaccatatccgagcacaagttttttcccaacttaactaaacattagaacacaaacaatatctcatagtatatatagaaatcatctagaagtcataatcacgagataatcacaagtatccaaataaacaacctgaaaccgacttcaatcaggaatcagtaggttagactgccaggctagtcggtctgatcgcatgctacacgttggtctgactgaccttctccacctggtctgaccggtcccacgtaatccacaccacttaactaattattcaccaaatatatatcaaaaccaattatctcatatgcctattgttcatcacaaaatatctatgttaatagaaaacactttgatttcacatatgctgctgaaaaaaattatagagtaaattccatattaggccaaatgtttaaaccaacatttcacgatagatttgggcttagctcaccttttcacttatataacaccatatgtctttgcatttgttagcgatttggactagggttgagtaaaaaaaaatggcatatgggccggagagaaaatatagttcaaatcacataaaacattttttaatctaataagaaaacggttcttttagcaaatcacaaaaattggagatgatgcgaaatatgttcatatgtaaaaagggcacaagtattgatccgcacaacaaagatgaaaattagcacaagaagggaaatagaaataaaagtagctggctagctagatacatttcacactgaaaaagaacaaagaaataatacacgatatcattttgcctttgtaaaatgcgtcgtggacttgcctttgccatgtgctttctggacaatcagatcgacggcacgtacgtcttggactcgatcacggtaataaagcacagtagcttcaacggctgaactgcatgcattcgagactggctcgggccatatggatcccgatgatctccgatcccccaatgcatcgatctctctgcagctagctggtgcttgcaacctaaatatatgccctggaccatcacctgcacaacggcacaaaatgattgagattgcatgaaaatgaattaatggaggaaataatgtagaaacttttacatttctgctaatatatatgtatatattactcctaccacatggtatatatatggtgatatatagttttccttgttagattttgattaatatttagtgtcgatcgttttctcttaagataaatacgtacctgtacgttctttatatacgtgaggcagtgaaaatgtgcccaaaatactactagtactactactccagctacctggcaaaccaacatcagttatacatgctccacgttaatccgtacgtttttatattgtagtggagtactatatatcataatcacatctaccaatacactgtcagttgttgtttaatttgctgcatctgacagtatgttttcaatcctttgccagctagtataagcttgtgtgtgtgtgtgtgtcccctttaatttggccacttaattcggctgagtaaacaagcatatatatagagaataatcgttacttgtttcttcttctgcgtccgatcccgtggcccgtgattgcttgcaacgaccagcagtactggagggaaagtattctaattcctcgagtggatgttttctcgtttgctcaaaaaccatttaaacggttatgaaaaattttggaaaaaaattgacaacattcatacaacacatatatacaactttacagaattttaagtctaaactcaactcacacgtcgagatataaaaaagacaaattcagcatatgaatagtagcatactgtttatatctaaa

SEQ ID NO: 21820 - DNA, 2365 bp, Oryza sativa
gtctgtagtaatgttggatgcaagattactgaattaggatggggagaaaagaaggtaaaccttattgtcaatcatgacataaacagacagattatcatgtgaaatctgtagtaatgttgaatgtaaattaagcaaatctttgaacatggtgttgacaggggggcaaacaaaatgtagtacctttctgagaacggctttctttcttgctaacttctacttttctcacttttggtgaagctgacttcaggttttctccttaacgtcagcaacagcattttctgctccatacaccttcttgttgctcttcactagggaagcaggtttttctttcttgactgctctcatctttatgctcaaaagggacttggatgacaagtttatagaacgagacagtttcactggacttattttctcttcttccttcttttgccaaacacgagcattcttggcaacattcatcactgtcatctttctgtcagtttgtttctctgaattaactgatggagatggagcatcatttgcaaccaaggacttcagctttgattgcctagtaggtttggaagattgatccatcacagtagctggtgatgtaactttgatctccttcacttttggtacattcgatgcgacggtagatctgaattcttgtccctattgaacttggtggctctcactacctttgatccattggagctttcaattgttgtacctgaagctttccgatccaatgttcttacaattttctggcttgacgcattgcttcgcgttgcagtcgatgtctctttcaccttcggttttactgaaacattatacaaactcttcgatttagttccatgcccagatttttcacgcttctcggaggccatcacaatctgagtgctcttcttctctgaacctgcacactcatttcctgatccatcatcacacatgtcatccacaagtaactgttcaccagctttgtacacacattcaggaggcgaaatggcatctgcgatatgatcgtcagacgcgtcactgtcctggatggccaacggcatctccagctcaatgcttacagctccctctgatgattctccatccacaaaacatgcagcattgccatcagggatcaagaatttatcatcaccacatggcagatcagctccatcctcaacacgtttggattcttcagctgatgacaactgatcttgcacgcatggtgaggtttcagagttgtcagatgccatttcaataggcggcttcttcacctcgatgaattcaggcttgtcatgaacattaccatctttcacaagacaaatcttcagctccaggtccttgtttctggatctgcctttttgtgtctggatttcatcctggccttgctttccgcacccggcattggcacggtcctgatgtcgcctgcgacgaacaggccagtacttcttgggttcaggggaatgatgtgccccaaatttgcagctgtcatggcaagaaccagtggatgctctcaggtaatgtggcactgacttctccttcctcttcaggtcagatggcacactgctgacatccacattttcaagagaattcaccgggaaatcgccgcttgtcgatttagatgattcgggagttgagactatgataacctctttgaccacttcctctgtcatttaggagcacagatgctgcaatttttcacaatgcagacacacatgtgagcacatgaagaactagcatacttacatccgacacaagcacacaacaatgtaaaatgtggagatcgcagaacatacatagcatgataaatacagaactttaatcttctatttatattgtattgctgcatatgcaacactacagtaggtttgggttgcctacttgatgacaataggagccacataattcatcagcaggacatgcaagttaatcagataattaatgagtgaatggcatgataaatccagtcctcaaaacataataaatctcgctcagtaatcaataaaacgaagcgatccattccaagattccaggatacataaaacatagtgataactaataatcaattactaattgattcaatcaaatcgtgatcaaacagtgctatcatatcaacaccatctcatcagtaaaaagaaaaaaataacccccgaaactttgagtacttgatgaacacaagaacaacacacacacagcgggcaagaaacccaaagactcaccgccgccgcctccctagccgccgttctcgccggcaaaacgacggcggcgacagatcgcagggacagaaagcgagcgaatcaacgagcaacgagcagatataactgaacggaatgattgcgaggaaaatggagatggaaagcgagagagatttggagagaatggagaggtcgct

SEQ ID NO: 21821 - DNA, 4908 bp, Oryza sativa
caaaacataataaatctcgctcagtaatcaataaaacgaagcgatccattccaagattccaggatacataaaacatagtgataactaataatcaattactaattgattcaatcaaatcgtgatcaaacagtgctatcatatcaacaccatctcatcagtaaaaagaaaaaaataacccccgaaactttgagtacttgatgaacacaagaacaacacacacacagcgggcaagaaacccaaagactcaccgccgccgcctccctagccgccgttctcgccggcaaaacgacggcggcgacagatcgcagggacagaaagcgagcgaatcaacgagcaacgagcagatataactgaacggaatgattgcgaggaaaatggagatggaaagcgagagagatttggagagaatggagaggtcgctggctggcttttgctgctgctgatgatgagttggagtagcgatgcaggtggaatttggaaccgaggaaggtggagaatggagatgcagaggtggtttggggtgcacccggtccatggaccaccgaggatggtttttccatggcttcccttctatgtttttgccttctaaaattgttgccaactttgttagagtttcggctttcttaataaatttttagctaaaaaaaaagtagtcggtgttatgttcgttggatttacgttgagatccgcgcatgactttgctttctccgttggcacctgactttctcgatccatgttttgtgtgctgatctagctagcgtttgtcatctatatagtggtagtactgataggagtattggtttctctagaagttcgtttcctttaccgtgcaaatgaaaccaagtcatgccacactaccaacacattgttactcaaccagaaatcgtacttatgaaaaaataataaaaagaaaagagcgataataagactacaccatagttacaatgcaactttaggatgggttatgttttctagtctagctactagttttcatgttaatgaattttgtatgtttaatattattcttatttaataatttgttgttaattatgttttagggaccaaaattattgtttggttgttgtcaactatgacgtgtcacacatttttagataatgggtccaatcggcatagagacatttttttttgtcataattgatatatcaatttacaagattgatccatcaataactattggaccaaaagtagaaatagataatcacttgagatttcatttcgaacctacaaaatattgaagccactttcgttttcaccaaaggcaacaccatgtcattttgttgggatttagtactctacacctcccatggtgcatgaaacgggtccacgcaaaattgaagggcccccatctctgatatggttgacaagcaaaattagatggcatctgctcaactaaaccaccgacctccatccaacccaactcctctctctctctctctctctctctctctctctctctctcccattgacaatttggcatgtcaccatcatgtgattctcacaacaagaccaacagctcttgcatgcaagcctagtgtttgtttatctgcacccgcttatgcatttctgcctctgatagcgacctgcttaattaaacaagatatttaactatttgtcactcttacaaatagtaattaagaatttaccaccgaacccacatgtcatagacacatgagggcccacatgacatataccgcgagtggcagccatcagtccaattattagcaggggcggatccaggaacaaaaaaaaattagggggctcaattacgcagtttcttcaacctctagctatttaagaacctttagttatcatttatggtgaaaaaatcgaagggggtgctccgagggtatccatgggtcttgtagttgtaggggggactcttgcacccacgttggatccaaccctgattattagtaatgagctttcattgagcttgtcatttagctgcctaatgctcctgtgaaaactctaacagaaattacagatgttactacttactgatcagtgatcacacacacacatgttattatgttaatgtccaagatcaactgaactagtgatggcaatggcaataggtctcaaatgcaaaaacacattactaaattttatattttgtctgagttcattctcttggaatattctgggttaggtatacaatgctagattgctagtgtggtagtttttgcctaacaaggcaggacaagcaactagtgtcagaaaatggattgtgagacaaatttttactgaaatcctttgccaattctaggcttttctgttcacataaactggccaagtttaagatgtcctaaaccagtagtaggttttagcagagttccaggacataaacataaagtataagtagaccaaatgttgacactgacaaagcaatgaaaatatcaagtataaggagactagtagcagatcaaacaaagcatgggctaaaatcttgagtttcagttcagatgctcacagttcaggttgtaattcagtaaagttgcaatcacttgatgttctactgaaaactgaactgcaactacatgattacatgaaggtaccagactgcaattactgaaagtaaagctgaactgcaacacaacctgagaaacaaaacaagggcctaattatttgagttgtaagctgctgtccacagttcagaactgaaactggtgaatatcttgagataagacaggcaaaggccaagcaaagaatgaaaagagaaatagttttgacaagctagtaaagagacaggagcagatcaaagataagcatttgacaacaagatcatgtttcaccatagaaatagctcaaatcttggcttttcaattcagacaacctccattcaagttgcaattcagtaccaaatgctctgctgagaactgaactttcaactacaggattacatgaagatactaaactgcaaactactgaaactaaaactgaactcaaagcagtatctggtaaaacaaaacataagggcctaattattcaagttcagaactgaaactggagagagagagcatcttgtagatggacaggcaaaggatagttggggctcaaaactcaatccagcctcttgaggaggtactgcacttgcacttccttggtcagtggcatgatccacttgtcatacagctccacggccagctccggctcgatcttgagcttaatttcgttctccagatcttcactcaccacctggccgaaggtcatggccttgctcatcacgcgggccctcacgtcatcctccaccttcgcgaacgtcagcaattccatcagcttgtcactgtcctgaaaacacccaaaaaaaaaggtttgatcagtgagatgtacaatgctgatagatcaggattgcaatgtagtactagagattaagatggttgtgcttaattgtgtgattactggttagtaagtaactcaagcagataatgtacaatgaagtagagatgatgaactgtactgtgttccatttcagaaaaaaagaaagagagagaactgtatccttgccttgtttaagattgcaggcgtgtacgtgtcaggtgccccctggaacttagcctctgccacatacttgccatagtgaatcctcttggagagtgcctgcaattgcaagagtttcccaagttcagttcaaaccaaagaaaaaaggagtgaacttctggttgcacaaattttcatgaggcccaaaacatgtttcacatactaatttcattttttgagcagggtgccacattaagagtttaagaaattctgtgtaaactgcaacattggatcataagcacaataatattgtttcaacaagaaatcacttgtcatttggactacccataatacattcaaggtttcaagactaagttgtgacatgagtttaaatgtgaggtgatcagattatcaaacaaaatcacctgcagaattaacatgtcccagcatgcgctcgatccacagttaccgtcacttccttccttcacaagccttggcagaaggtcaccaaagtacacatcccagatccttttgtttatgttgatgttagcagcagctggatgcagaacctgtgtagtgtgtacacaagtgccaattttgtaaggttcagtatcaaatagtacagtttttgctgatgacatgattttggagacagacagtaacagacaatttgttctgaataaagagtagcagatgactgaatatagatgggtactaagatgttgacctgaaacttctaattttaaatgtcaccaatcataagtagtaagttcagaaatttatattaggaaacagtgacatgatcacattatcataagaacctaataccaatatcattatcagcatgtgcacgaaagaactggaattgcagagctagtaaacagcatggcaagacagacagatttaaacatataaatcacattgtcaaaaagtacagcacatcagcatggcacaaaaagagtaaaacacagacagatttaacagtcaacacataaatcacattatcacaaagtgactctaaaattgggggagtgagatatatatattacattctcatactcaacagatggctccaccacctccagcaaattctcagggaagaaaggatgctcatccgggctcttgtacctccccatctgaaaggatgtcacaacattattctgtccctgtcacaaattcagaatgcagaaatgaatgaactcactctagcatgcatcttctcggtctttttaaccatgaactcgaccagggagccattgaaccggacgatcctggaagcgttggggtcgtaggtgtccgggttgtagcagaactgtgacctctccagaaggccgaagatgatggtgtcctcatgcttcatcagcgtgctcctgatgctgccaatggtcaacacattgctcttgttgctct

SEQ ID NO: 21822 - DNA, 826 bp, Oryza sativa
caaattcagaatgcagaaatgaatgaactcactctagcatgcatcttctcggtctttttaaccatgaactcgaccagggagccattgaaccggacgatcctggaagcgttggggtcgtaggtgtccgggttgtagcagaactgtgacctctccagaaggccgaagatgatggtgtcctcatgcttcatcagcgtgctcctgatgctgccaatggtcaacacattgctcttgttgctctcttccacaccctctttgctcttttccacggccctacaacaacatgattagagataaatagagtcagggtgttgaacaaagctaaataagcagtaaacctgatcatatctaatagacggtgtgatgttagaattaacccaaacggaatttcaaacgatgcagtaggtttaattggtacaactgtgtatatgtcaaggtttaatgtagtactaaatgatgaataatgcaataaatgaacagtgaactcttaacacagctaaaaactaatgttacacttaaaatatacttgaacagtgcaattaatacgggaacagtgaactaatgttacacagtatattattatacaaatatacttgaagatttcagacaaacttcaagatgaaactttagcctgacccgcatgaccagaaataagcttcaagatgttcaagaaagctaaaaaaggggggactaacaccttgcactagttcatgttgtgacaaaacaagatcaaggtgaagcccaaagtgatccaaagtaccatagttatcaacttgcacgcgatgaataatcataaataaaacaaccgaaatctctaaatggagtaagg

SEQ ID NO: 21823 - DNA, 1012 bp, Oryza sativa
tgtgtgtttctccggaataagttggcacctgacatcatttgtttatttttctatgttatcatcacttttaccagcgtgttttttcttcttttcaaaattctgtaggctgcagaagagtgcacatctgtccttgagttggatagggagcatgctggagctctcatgttacgtgcacagacacttgtcactctgaaggattaccagtcagctctatttgatgtgaacaggctgattgagataaatccgtcatctgaagtatatcggaaccttcatgcacgactgaagacacagcttgtaagtttttcattctctttgctgtgctaattgattcactttgctttagcttcttgcatcggcattactctagttgcaatttcattcgatataactacaacaaatatccttacataattcaaatatgctttttagttgctaccagcacataacttctcccctttatttacaaatgttttctgaatgaaagaaactataccttagcttgtttacttattatcctactgcctgttaacctgttatctgtgttattttaacctttataggcactagctcccattccagaatctgaagaggaatcgttatatcttgaagaagataagcaagagttgcctccagagagaaatgtaaatatcgagatttgtattaccaagtctgataaacctgcaactgaaatgattctcaaaaagaaacctacaacagaacttattgtcgaaaataaacctgcaactgaactgattcttgaaaagaaacctgcaactgaacttattcttgaaaagaaacatgcaactgaacctccaaaggttgaggtgcctcccagtctgcctcaaaaaccacaagggtgggagaccatcgcaaaaccaaagggacattcaggacttgattactcaaaatgggacaaagttgaagatgactcaagtgaagatgaggatgaagaggaagaagagcttcctcagtataaattcaaagtcagaactgtcggtgtgcggtctgtgaa

SEQ ID NO: 21824 - DNA, 11868 bp, Oryza sativa
tgaacctggcgcagtgtcgcgtccagattcataggccgcgccgacctataagtacactcgcggggcacgctctctctctctccgaggattgcggttgcaagcaggataaacggccaccggtaggcgtcggcggagaggagaggagcaagagagggtgggaaggagaggcacctccggattaattcctccgcgggagctggatattgtgagggaatcgaggtgggtttcttggggtggggattgcggggggttcttggtttttgatcgggcaatgcggtttttggttctttggtgttcgcgtctctgttcttggttggttggtttggtgctgttcgtggctaatttctcggtgttgcttccggtttcggttgagttttgcttcctctcgagtgaggatttgagtgttttggtgagtgttcttggatcatccgcgtcttgctttgagggctaattcgagttgttggttgtcgtttcagcgatcgagtcgtcgtcgtcttcccctgagcaatccggacgcacgcgccccccgcctgttctgcttccatcttctccacgcggatcggcgagacaagaatcaggaagcacccaggtaaagaacaccagactcacttcacttgttgttgcaaccattatggccccttctgtcgttcctggactatctgatcgaacgccatctgtgtgttcgcgcaaatgcttcaaaggagcaggaattagtggtttcagttcatgtgtgcttcatcttgcgtctcacaaacgttcttgccgaccttgcagttttctggaattccagctactataacacaagccatagccatttcacttgttgttgagttgttgctttttatgtttattattgtctttcctgaactactccttcaattgctaacttggtgattgcaaacatgcttcaaagaagcaacattagctgagttcatatttgcttttccaattttttttgccactgtagatagtgattctgcctttgttttatatacagcaagctgaagaaacaatagccgagttcatgtttgctttatcttacaatgttcatagaatatccagtttggccactgtagaaagtgattctgcttttccatacagcaagctgcagatcttttttttttcccttggtggtgaaggccatggttcttgatgcattacttggtttgcttccatggcagagcagttctgtagtttgttcagtcacttatcctatgtggttctgaattttacctctgggttgagaattggagcagtttaatgagctttcttgatcgcttgcacctgctttgagggctaattcacttcacgcattcttttttcagcgattgagtcgtcatctttccctgagcaacccggagtgccccacctattctgcttcctcttctccacacggatcgtcgagacaagaagcaagaagcatccaggtaaagaacgccatgctcacctcacttgctgttgcaaccattagggccctttctgttgtccctgtactatctgatgaaatgccatctctgtgttcacgcaaatgcttcaaaggagcaggaaattagtggtttaagttcatgcttgcttcatcttgtgtcacactgtgttcttgccatccagatatggctgaagccataacttcttcactggttgtaaggttgttgactcgttgctgtatgttattattgtacttcctgaaattttccttcaaatgctaacttagtggttgcaaacgtgcttcaaggaagcaacaatatctgagttcttgttgctttgttttacggtgttaaatacagtatccattttgcttacagtagatagtgattctgcggttttataaagaaaactgacgattgatttcccctgagtggtgaaggccatggttctggatacattgtttgtttccatggcagagcagttatgtagtttttcttttgtcactagtactatatgcgcctgtgatgctagttcttactaatattgtgttttgtgttgttaatataaatatatcttggtgaaaatttctgttttgacattcatattgtacatactcagtaagctttaaaattatctgacaataaaatgcgtatgatgcagcaattagtgaatccatgttttcttccttatgctatgttctaacttagtgtaactttccaatgatacagatatggcaccaagaggaaagccttggaagcattgttgcaacaagtgcgacaagagcttccgttcagggaatgctcttggaggccacatgtcctgccacaggagtgttggtaatcagccaaagagcacgtcaagcccacccactgttgttgatctgcacatgccactgctgagttcctgtgatgataatcttttgcttttgcccccagaaacacaatgccagatgtgctcaaaggtgttctccacctccggatcgctgagggagcacatgatgatgcacggtggggagaaggtggtggtcaaggctgaggaagaagctgccgggctgattgaagcactgggcattgctgatagcatgcaagatgtaatggtgttttcttcagtgaagcgtaagcgatcattccgatcaaagaggcagacaccagcactcagtttggaggagatagaggctgcagatgctctcctactgctttcagggtgctttgacaagacttcagcttatgaggattgctatctgggagatatagaagacagtagcttgagatccattgtgctgacagaggttaacatgaatgccgtggatcgttgttcggttcgatctgttggctccaaggagccaataaatgataataactcaggttacaaggattgctatggacaaagtgacaaggaaaactgtttgatcgttcccaaggaggagatggatccaaatgattttgatcatgagctggttagagatgctgctctcaggaaaccaagaaccgacaattcagatgaggagatgaagtttggtgatcttccagctgctgctatgaaggacaacagccaccgttgcaatacctgcggaaagtcatttggatcagggcaggcactgggaggccacatgcgacgtcattatgttcggaagtgcaatcgtcaacggggggttgctgaccacgctggttctgttcttatgaaagtgcaaaagctgaagcttagattggaccccatcttgtttgatgtcacacttccagctctcactgatggagactgctgcatttctgtgggtgtgaagcctgaacctcagctgtggtgtgtcacgagcaatcttcagtgaaccaatccggtgctcgatgtggtctgaaactctctgttcttttggtgaaatctggggtgttgtctgaaactggtacagttccttgagctgtctgtagactgtaggtagttcatcagccaggaagcaaaaaaaacccatgttgtcttccgatagatagtcacaagctcacaatactgataggagtagttctcttgactgacaaacttccatggatagcaaaggccaggatcttgagtgatagcttggttactgaacagtgaagctgatttccatgttgcatgcaatgcaatggacgagcttgtcattttttttttgtaccaacaatctgtaaaatcagttttgctttgctttctgtaaatgtctgtaccttgattcttgaaaggaatgctggtcagaatgaggtgaatttttgtactaaatggtgatatcctcattgtatgcactgatcagtcaatattaaagtacagtgacattttttttcaagaaaaagagaagtgagataggagtagttctcttcacttgagtgataggagcttttcaaattttcttttgtactgacgatctgtagatcaattttactttgctctacacttctgtgtttctgtaaatgcttgtctgctgaaagaaatggtggtcagaatgaggtgattttaatttgtacactaaattctaaattttgatatatattctactaatcagtcaatattaaactacagtctcaatttttcaagcaaaaccagtatatgatgtttttttttctcatgatagtaatgtgacaagttcttcttgacaacatcacagccgtccgatcatgacacgtgtcctcatcctgcgcctcaccacgaaccccctcttcttccccgatgcgtctctctctcccctcctctctccgcttccgcaaccaaaacctccacagctcgccgcggcgctggcgcggccgcgcaggatgaacctaggacgcggtacagtccaggttcatacgatgcggcgccctataagagcacccgcgcggctcgcacgcgcggcggtcagtttacaagcgccgtccaccgagagatcgagctccaagaatcggaattggtgggatgggtttaggaagctcgattcctcgccgcccgtgaaggcattggtcaattggcccccccaagaaccgttgcttagcggcctaggaggctaggaccccgggcctggaacaatctgaggtgggtttcaggttcttggggttcttggtttgttgtccatggtcgggtttttccagttcttgatttggtcttccaccaagaatatgggctcttggtttcgtttgcctgattcgatgagtgcatttcctgtgttgtttgtttcagcggttcaacctgcatgattttcgcctttccctcacgaatttgatcgcgagttcgctacccacattcgctagaagccttcaggtgcagattccgtgcccatcctacaatctgaagctctctggtctttaccgtgtaaattcgttgcgcattgcaccgtgtaaattctggtgtgtccttgtttggttaaatgctcgaaatgaagcaaaacaaatagcgagaggaattcctcatgattaaaaatctctagctcttggttagtaaacgattctatgatggcgtttcttcagttcttgagttgttttgtcaccagccaagaattctgaggcttcttgctgattcatttcttcttcttcttctttttcttgtttctggagcaacctgttgattgttaccttgagaaatctgattagttcttgtcttccttaattgatcgcgtggtaatgtttacgttttgtaagttattgcttaaaagttgaaagagtggcttgctttgttccttctccatgctgcatgtttacttactgcgatatgaccttgctgtgatccagaaatggcttctgatgttcctcaagatgacgtgcaatgccatttttgtggcacctacttaaggccaagaagttttaggaagcatcagcagcgttgcaagtacaatccggatgcgcttacgcgacagaatttgtccgcaagttcgataccaacatctgctacaagagcgacgcattcaggtgcagattctgtgcccatcctatgatctgaagctctagtctttactgtgtaaattcaattcacattgcagtggctattcttagttttgtgatcaaatggtgtccctttatttccctaaatgcttgaaataaaccagaagttagcaagaggaatcatcccaagacaaaactctccagttatttgttagttaatggttctgcagtggtgtttcagttcttcaattgttctgttgatggcaagaatttttgccatttgctaagaatttggccgcaccctgtgtctgccttaatgattcttacgataattccacaagttcttacttatccatccttttgatctttttttctaggagcaagttgttagtagttaccattaagaatctgactaattcttgtctttcttaattgatcacatggtattagtgtttgcattttgcaactatttacttgaaatagtggcttgcttgctaagttctgattctctatgatgtgtgtttacttactgcgacttgctgtgatccagaaatggcttctgatggcgtttcagttctatcaatgatctcagtacagtgatctcaatttcttctactactactactttttcttgtttccggagcaaacctgttgattgttaccttgagaaatctgattagttcttgtcttccttaattgatcgcgtggtaatttttacgttttctaagttattgcttgaaagttgaaagagtgggcttgctttgttccttctccatgccgcgtgtttacttactgcgatatgaccttgctgtgatccagaaatggcttctgatgttcctcaaggttacgtgcaatgtcatttttgtgacacctacttaaggccaagaagtttaaggaagcatcagcagcgttgcatgtacaatccggatgcgcttacgcgacagaatttgtccgcaagttcgataccaacatctgctagaagagcgacgcattcaggtgcagattctgtgcccatcctatgatctgaagctctagtctttaccgtgtaaattcaattcacattgcagtggctattcttagttctgtgatcaaatgatgtccctttatttccctaaatgcttgaaataaaccagaagttagcaagagtaataatcatcctaagacaaaactctccagttatgggttagttcatgattctgcagtggtgtttcagttcttcaattgttctgttgatggcaagaatttttgccatttgccaagaatttggccgaaccctgtgtctgccttaatgattcttatgataattccgcaagttcttacttatccatctttttgttcttttcttctaggagtaagctgttagtagttaccattaagaatctgattaattcttgtctttcttaattgatcacatggtattagtgtttgctttttgcaactatttacttgaaatagtggcttgcttgctaagttctgattctctatgatgtgtgtttacttactgcgacttgctgtgatccagaaatggcttctgatggtcctcaagagaactgtcagtgcagtttttgtcacaaggacttcgagggtagaagttcttgtgcagagcatgagctgcagtgcaagaacaatcccgacgtgcattcgcaaacagaaccttcaggcaatgctcagggtggcataggcagcttggatgttcatgtaccaaggcgaaagcgaacagccagaaatcagccgctgccagaacaacatctgaagaagccagcttctgattatgctcagggtggcaccagtgatgcaccagagactccaccgaagccaacaacaagtgaagtgaaagtggattctgctgtcaatgctcctgatatcactattcctgacaacaaagatccttctgtgatgcagaaacaaaagaagaagcttgatctcaatctgcaacctcacagtgacagttcagatcaggaggaacaggccgacaatttcagctctatcaatgatctcagtacaattgatacaaattcagacaagaagaaaaataccatcactggtgttgctgataccaatattcctgaccacaaagatccttctaggatgcagatgcaaatcaagcttgatctcaatctgccacctcacgacgacagttccagctctatggatgatctcaaaactctggctcccactgataccaattcagataaggagacgaacaccggcaatggtggtgttgataccaatattcctgaccacagtgatccttctgcgatgcagacgaaaaacaagcttgatttcaatcttccgcctcgcaatgacagttcagattcattagtctgaaatgaaagacttgattttcgtctactggtagatagttacaggctatgatactcatacgactttctgtttcagaagcaacaagtgtacaaacctcttctgaatggcaaagtccatacttctgtattctttgcactcttgcttcgatagtgaagcagtgttattcagttacatgcaatggatgaacattttactactaacaatatgttctaatgcatacacttctctgtttcagtaaatatggatatactaatgagtaacgacatgattgctgtgtaaaaagattctggttaatgtttgtgtaatttggttgttgcctagattatggcagccttgatgtgatgccatactgatctatgagtgtgttattgctgtttttttttttaatattgaaaggccatggcttggatgtgtgtgctagagcagttttgctcagttcctgcaatgtactgttccattatatatagctgatatatcttgaaatgatttctgggtaaataaatgctagttaaattggtgcagacagtagtgcactggcccttttgctcttgggtgtttcttgcgaaatatggcttgatgtgaaactgagcctggtggccagttgtgcttgcttatacagttatacttaccggttagtagcatgtgcacaacttgaggttattcccattttgtgcagttggtactgtatattctgaccagttagtggtaagtatgatgtgattttggcctcattaaaagttagtcacatttgttctttaagaaaatgtcattcatttttctgagatcagtttctgtgaacttaatttggtgccaatctgcagttgctctcttctcctcatggagtcactgctgccttgtcagatttcattagttttgccaaggttcacttctcaacctgttgatacatactataagcttatttaaagttgaaaattctaccttcaagaaagacaagaacataaatgaagctttgatacaacctgaagtcagtccagtaattgtgtcttttaattaacaacactgcctttttgcatccaccactgtcagaatcaaatttacactgcaaatacagtttttgcaaggagtggcatttgcagaaagaaatcgatgctcattttttcagagttcagcagaaaaaaaaaactgatgctcttatgctcagcctgatatgtgcatagattcctcaagtatttctgcttttgtcaagttatgcccataataaagaattactccctaagtttcagattataagttattttgagtttggtcaaagttaaactatttcaagtttaatcaagtttgtagacaaatatagtaatatttataacacaaaattattttcattaaatttataattgaatatatttttataatatatttgtcttgtgttaaaaatgttgctgcatttctctacaaacttaattaaatttaaagtagtttcgacttgtagtctgaaacgtcaaacgtaaggagtaccaaactatgattacttgcattatgtggacctcttattataatgtggctgcagtgacaggttctcctcgcggcaacaccatagccgtccgatcatgacacgtgtcgtcatcctgtagcccagcaagaaaccctctctccttctactcttcctctcccaccaccgcaacccaaaacccccccgcttccactgctcgccggcgccgcgcgcaacgccgcgcgatgaacctagtacgctgaagagtccagattcgtagaatggcgcggcctataagagcacgagcaccccccccgcgctcggttcagtttacacgcggcgtccaccgagagagaccgacctccaagaagagcaagaagcgagtggggaacgggggattaacaagaagctcgattcctcgctgctcgtgaaggaatcgctccccacgacgacctggacgtgtaccgatctgacgtgggttcaggacttcaggtttcttgagttcttggttgtgctgttcatggtgtggttcggttccacagttcttggtttggtcttcccgccgagaatctgatgcgagattcgtctctgggttcttggtttgtttgcctgattcgatgatttcatgctaatgaattggttgcattcattgtttcagcggttcgacctgcaagaatttcgccttccctgacgaatttgatcgccttcccgcgttctgaaaccctcacgcattcagaggtacagattccgtgcccaaagctctagtctgttccgtgtaaattcaatccacattgcagtggctatgtgactatgtcttgccttttcttgattctgtgatcaaatggtgtctccgtgtttggctgaatgcttgagataaagcaacaattagcgagaggaactcctgattaaaagtctgttgctcttagttagttaatgatgtcgcaatttggagaatttggggaatcaactctttgattacgctcaaagagagagacgggaaatatctaaatgcccctagatatactaccctttaacaaatgattctgtggtggcgtttcaattcttcagttattctgtcgatggcaagaatatttttgccatcagccaagaatttgtcttggttctgtgagttcttgctgatccatttctttattcttgtttctggagcaaacatgctagttcttgtctttcttaattgagcacatggtaatgttcgcatttgcaagttattgcttgatgaaagagtggcttgcttgtttaattatccttctccatgatgtgtgtttgcttactgcaatgcgaccttgctgtgatccagaaaaaatggcttctgagtgggactcaccatgccagttttgtggcaagaacttcaagagaagaggtgatctgctaaatcatgagttgacttgcaagtacatttcggatgtgcatccgcaaacagaatcttcaggagatgctcaggctcgcaaggatattttgggatttcatataccaaggcaaaagcgaacagttcccgcattcccagcttctgattatgctcagggtggcatcaatggtgcaacaagtgaagtgaaagtggattgggatcccgaagaagagactgatttttagaggctctcttgcttctcagggagcaacctgcctatcctggagaagagacattttctgatgatgaaccgggtgctggtaatgtagacgatgaaccagctgctagtaataatccagatcaggtgctgaagatgtgctctgacaagggttcatctcctgtggaatgttatggaggtgatgagaggagggtcggtgcgtgcgccattgcgggggtggaggaggatgatctcagcccaaatgttggttgtcgaggggtcaccgattgtgttgatgagtctaatgtgattcaaaagcaaaaaagacagcctgatcttagcgttgccgatctcagggaccttgttgagatgaaacagcaaaacatgaaggctgataccaatattcatgaccaaggacatccttctgtgatgcagatgcaaaaaaatgagcttagtcttgatctactgcctcacaagaacagttcagatcacgaggtaccaacccttagtgtcagctctatggatgatcccgatggcctggtttccactgatacaaactcagataaggagacggagactgtcaatgttggtattgatatcaatattcctgagcagagagaatcttcagtgacgcggatgcaaaacgagaagcttggtctcaatctgctgcctcgcaatgacagttcaggtcatgaggtaccaatcctcagtgttagctctaccgatgatctcaactccctgattcccactgatacaagctcagataaggatacaaactcaaatgtagcagacaggttaggccactgtcctgcacaagagtagtagtggagtccttgttgcggtgaaaaaggaggtgcaggcctagtgtttctgatcaaactcttgaagtgaaacctgagggtgaattctgaactgcagcaatgaagggtggttcagtgtgcgcctacgttttgtgttttgtctaactgatgatggttttttgattcattggtcttcatattcatcggtctgaggtgaaagacatgatttttgtctactggtatatagttacaggctataatactcatactatctttttgtttcgtaagcaacaaatgtacataccttttatgaatggcaaagtccatatagttcctgtattctttccacacttgcttccatagtgaagctgtgttgttcacatagatgcaagtgatgaacattttactactaatgatgt

SEQ ID NO: 21825 - DNA, 13218 bp, Oryza sativa
ggcgtggggagcggcctgctagacctcattaagctcaaggccgccgcccgccacttctcctaccgcaccgtcttccacaccgtcctcatcctcgccttcctcctccccttcgtcttcatcctcaccgccctcgtcaccctcgagggcttcaacaagtgctcctccctaggtaccttgccgccctcttcatgaaatgctcttcaaatggtcttgaaatggtgttactgtgcccctgcacagctagttcttcaggagtagtttatgtagcttactggtggtataccagaccagggatgtgcaatgtgcatgccgcggcggcgtgaattacacgtttcggtagataacaaccgctgggatgctcataattttcttgtgttttaaccgaaactcatgaaatgtactacacgcctgctttggtgctatgatcacttgccgtcactagattataggggcttatttgggcatgataatgatagtggcattgttttttttttgttgcatactatttgcttagttggctgctttaattgctttcttggttcacctgatgttccaaaactgctcgttttggcctcctatagaaagggttagtacaaatggggttgctttgcttaccacttatgtggcaacttaatggctgcttctatcactcttagatgttaaggtgttcatgataatgatatcttgatggttcattgagaaattaggcacatcacattgacacggtagaccaacacttccgtaagtaaactatgaatgtgaaatatatgtaacatcacttgttttctactccgtatgttagaaaatgaaacaacttttctccattgttacttccgatacttcatacttggtgagttggagctactatgaaggctcatactgaaccagccagaataccaaagtgtgcccctcgaatgcttttattttgttcgaataagtcattactttagcctaaactatcctcagacaaattccaatccataagttacgttactaatcataatgtacacatttataaacaaggcccatttccctatcatctaatccacttaatttgctattacatcatgatcctgctaaataatctgttacatgcaccccccttggttgtttttctgtacatggacctgaaatcttgccctatgttcatatgttggattcaaggttgcagcagactatgtttgtctttgatcataaaaatgtaaatagtggtaattcccctgtctggagaaaagagactgctgatcttatcagttctaaatgtgtaacagcatttagtagaagctttagttttatttttctcaaatggaatcttaggggttaagcagacattgttctaaagctcaggggggttatctggactttcgccttaactctactttagttggtgcctatgttgttatcctatcttttgtcgatgatactttatgtacttatctttctctttgttgtgctgcctgatccatcataatttatacatgttcaaatttgttcatagttgaaatttgtgtggtcaatgacttgctactaattcatgagttgttactatcagattgtctaggcagacggttaggtccacggcttcttggtaggggcaacgatggctccatggtactcacatctcctctgatattacccttctcctttcaattttgtggatttgcttagttccttatttaatttctatattctaatgcgcagagggtcatgagggatttgtataggatgcttgacgaaataaattctgaagaagtacctgttgatttgaaggtcccagactcttttgatgaattcatctgggacatgaagaataatgattatgatttaaggtcatttgcttttaggctgaaggcaacagtaagtttctttccctgttttgaagtactgtccatattttctatttctgtccaagcatgtgaattgcaaagtttctcagtaggttatgttggtggtgacttgtgcttgagaatgaacgtcatgattcctttgagtgtgtttttactttggaatccactgtaaagcttgtgtcacttcttgggtaatattattttatagcagttatgttattgtgttggatggtgatggacaagctatcttgtacataaaactgttattttcttgccattatttacaagcgttacatgctaaactggtagcttctacatagctaaactctaaatatcaaggctcactatagtagtgatgaaaataaataaatatcttgtttacaccacatgtatacaacaggtagtatttaatgattctcatccttctaaagttgccaagcagaacactaatggacttgaaggtccctaacatcatgctaatatgcttctattgttcagcaagcactaatattttcattgcctgcataacattacgcagatggagagcatggacagggaattgagaacatcaaggttatcagagcagttaaacaaacactacgcagcaattgctattcccaaaggccttcattgcctttccttgcgtctaactgatgaatactcatccaatgctcttgcaaggaaacaactccctccacctgagttgatccctcgtctttctgacaattcctatctccattttgttttagcatcagataacatccttgcagcctcagttgtggtcagttcaactattaggtcatcattaaaacctggcaggatagttttccatgtcatcactgacaagaagacctatcctgctatgcactcatggtttgctttgaatactctttctcctgccattgttgaggtgaaaggtgttcaccaatttgattggttaacaagagaaaacgtgccagttcttgaagctatagaaactcagcacactgtcagaagtcgtttccatggaaatcaccttgcaagaaatagtgcaggtgatagcccaagggtttttgctgccaagctgcaggcagggagtccaacatatacttcagtgctcaatcatattcgaatatacttgcctgaggtacaataattttttctaacttattttcagtacagtttcatcagctttggcataattgataaacaattaagcatgtgttgtcatatgtaatagaaacctgagtttaagcaatcgaaatacaacagatttgaagtttctttccttgttttaaatgtaaataatatatatgtatatactctgcataattttttttcttgcagaaatctgtattgtgcaacaatttataatgttctgtagttagttggactttcccatctgtagttgtgcaaatatattctaactgcatcatttattttttcaatctacctcatttttttcctgaaagatttgtagttgtgcaaatttattctaacttgcactttgtgaaatgcagttgttcccaaacctcaacaaagttgtatttcttgatgatgacgttgttgtccagcgggacttgtcatcactttgggatattgatctaggtgggaaggtaaatggagctgttgagacctgcagaggtggagatacttgggtgatgtccaagaggttcagaaattatttcaatttctcccatcccctcattgccaataacttcgacccttcggagtgtgcatgggcatatggcatgaatatatttgacctgagtgcatggagaaagacatccattaaagataaataccaccattgggtcagggaggtaaaacatcgatgccactaccttttcatctgcacacccccagttgtgttctacacatttttttccattttatagtaactaagtgaatattttctgatattggaatttggaagtctaacaggctccttgtttaaacataacgctctttttgtttgtggcaacgttctaaaagcaactatataaaattaatgcagagctgctgatatgttaaaaactagggaatttctcttgatcacttcaaaaggcatatggaaatatgctggacactatttttaatgatcatatatttgaccaatgcttggtccaaattttaacgttctaaataagctctgatgagtttgagctacctaccttactcatgctaccttctttccctgcagaatctgagctcaaacttcacactttggaggcttggaacattaccacctggccttatagcatttagaggtcatgttcatcctattgatccatcatggcatcttttaggcttggggtatcaggaaaagacagatatccccagtgttcagaaagcagcagtcatacattacaatgggcaaagtaaaccatggctggatattggttttaagcatctccagccattttggacaagacatgtgaactactcgaatgagttcataagaaactgtcatataatggagccccagttatagattggctagataaaccattctataaatattggcgtaaattatggaattaaattcattattttggagaccaataccagatagtccagaaggatacccacgaaatgctctctgaacagtaacccggagctggtacacgagcggatggagaatatttaatgaacacaaaggaaatattttcttcctatacactaggatctctttccctttatttattccatttgtatcatagctcatgaaattacagtattgtttaggatggttcttttgtatttattggagcaatataaattgcctgatttggcgggattgatggtaggcccatcgttattgtaattgttgggtatccagttcaccacatgaacaacatgggccagattttgattttgcaaagcaagccctgtacatttgcttcctgttttctttatctttttgtggtcatctggtatgatactctggtgtcactggtgtcatcagaattggattattatacttactgtaaatttgtaactcctgtcatatttggtctttgactatctataaccttttcaagtttagtacatacatcagtgtgtattgatcattttattgtacattgtttacaagaaataagaacttaaatgaatttctttagacgaacttcagtggatattggttatggttagcaggtactcctaaaacaatactggttggactagtttgagttctaattatttcttaagagggtgttctttttcttcttttaatctgcatgtaattctttatttttcataattcactcataccagcataaaacatcaaggacgacatttttctttcacatgtacattttttatatagtatgcggaacatgagcatgatatcactacatcaaatgtgcttcattgtgacccaaccaaacatagaagggaatggaactgcaggcttgctacatactgatcagtaaacactggaatcaagttattctatatatagcccaattggggaaaaaactagaaacacagaaaaatctttacagtggatgtaaccctgagaacacctatatcatcacatcagaaaagaaaaacctcatgatatttctatctaaactcgaaatcatcgttcgcaaccttcagcctcgaaatctgggaagacgacgaacgcgatcgacagcggggcgacatagattggggaattgactgagaccatcactggtggcagtgaagggatgtcaccatctccagtgagctgaagaggagctccattgagcagcactgtcctggcaaaagggttgccatcctgtggagtcagatggtactcctccctcttctccagcccatccgaggctttgctcccaacccaggagactgtcctcttcaggccatggacaaaggagttgtccctctttatccctgccatttctctgaaattaatgttgaggtcatttctgactgagaccatgaatcccatgttcttgttcaggttgagcatgaggagcgcgacgccgccctgtagcacggaaaaaccatttcgagagcatataggtcagcctatcttcactttcagtttaatcaaccacatgaatatatgatgctagaacactgtagtactatgcttgtgttaccaaaaagataacatggcagcattacagtttcatcttaggttgtttcaggtatctggaagtaaatgggtaggtaaccgaattctttctttggactcatcatggttcataccttttgctttccgcaatgcgcataggcacgcaagtacgaagaaccgctggtgtctaaggaaataactcccttccccatgagccgatgccacagcaaggcactgaacatataccgcggtttagtacaaaaggtatatagggtagtaaagcatgattgtggcagagcaaagtataggaatacttgcctgtagtaatcagggtttggaacaaaagtttcggtatcaagaaggccatagttgcctccaatcaaagtctgtctgcagtaaacctttgtgtcatactttgctgactgaccaagctgatcaagatacctagttgaaacagcaagtttacgaacaaaacaagaaaaatccccatggttggaataattatctgttgaactggcaagtaattaccagaagctattcaggaaagtattagacacttttcggctgccactgttatatgcaccaccagcttccccaacccagggagcagaccatggtccatgccgctgtatcgtcatttggagatctctgaatgtatcagagctctggctcaaatactgcggattcaagatcctatttgcaacttgcggatcgttacctaataaaatttggtttatgtcagtcatcttaaatgtgtagtacaacctaaaaacaaagatgaattaaggagtggttctaacattatatctaggaagtacttaccagcaccaagattgtaaatatgatgagtcattgtgtcgagaacatttggaccagagatatcaagaagctgagcataccatttttggtcatagaatcctcctggggcaaccaccaatggtttcctagagtttccatataactggctgatgatgttcttgagctcaattatatcttttccatattgttcagctccaacacttgcaccaattccacttccactcaactcattacctagtacataagcacaactactgatgtaaggattacacaaatgaccgatgcttctgactcattgtaggcagcaaatgaaggttttagtttttataattcataccaaattcccatgagtctatagggtagttcatcgaaacagtgtactccatgaactcccgagcattactggaattccaagcacctccccaaacacctctgcccatctgctgtcgcccttgaagcgcgttaaggccgaatgtaacaactgcactgaagggattaaatgaaaaaatgggtcaggaaacacacttaatgaaggtatatgataggttccgatttgtgatgtggtcaacaatttatcttataatatatcagaattcactacagaaaaaagaatgcacatcagaaactactggagaaggaaggccttaccctgtatccataaagatcttattaatagcatcccatctttccatggttatgcatccttgagaaaatccaaacaggccacttgaactctttgaaaatggggtgcatggagatcctaaattcggcgtgccatacaccacctgatcttgtaaggaacctccaagtctgatacgtagagggctaaaggctacaaaaacaaataaatgggaaaaaaagtccatgaatcatgggaaagtgtagaaaaccataagaaggcaaatacattttgtggaaagtagctctaaacaaattccaagcttaataaataaaggtacagaatgaaccacaaatgtcaatatgtttcttaaaacgggatttaccctctaatatcttatattagtcagtgtaacaagtaaacctccacacggtagaatgaaattgatcacagttgctggcatatgtagttgcaaaggaacagataaatctttgacaagaattctttgagtctttgactttgtaactttaatcctatttgcaatttagtatggaaattccctactgttgtccattttttttagttacagtagaaaattgttcgcagaaaataggtataatattcaccttggatagctttagctagcaaaggattagtcaagtcctgggaaattcacaaaaggatcaaaattagttctttgcaaaaatatcaattacaacatgataaaacacacacattcttgggaaattagcaatttaccaaatttaagatagaagcttgcccccatggacactggtcataattgcacttctctggaggccaccaatcaatggtggcgcaaatgaactcgttgctggtcgaagcgatcgtctcagcaccccgaacgacgatggtcacatccgagtaatcctcggatcgaatcaatgtagggaaacagagaagaagaggtatgagaaaccatagcctcatgctttcttcccctgcaaatggtgttgtccacccaacccaaaagacaaccagaaatgtctcagatttattgtgctaattaaataaggcaactactagttggtaaggactaaggagaaggccttaagttttaattttatcaacatggatgaaagtgacacctgccctatcatcatcttctatatgtcctatatttacatgtttaacaggtcaaatcaattacaaacgaacagtttaaactttgtttccatgcaagtaaacaactatgttactatctcaattattggagcaacttaggcatctccaaatgcagtatccagagaaatataattcttttaacatttgaggaaatcatccatgaactagcactaaacaacaaaatgcaaaaaaaaaaaagaaagaaagaaagaaaggatatttcattgaagaaaggggaaagtttatcagttgagcagggtgaaattctgcagttggcaaaatcatcccaaactgcaaagaggaccctgaaacttgaagaaaggaatccttttcaacatgcaaacgatcgacctgagcacgccatttctgctcaaattcgagaaagctgaagatcaaagtttctctgacatagaataaagttcagcaaaacccaaaataaacccagcagaatctgaacatcgaattaacaaaaacttctcaaactggctgatggaacacgctaacccaacttcctccaaaactgcacctaaacagaatcaaatcctcgaaggctcgaacaaactgaaaccaaatgaagcaaccacaaccaaagccaacacaggcgcagcgtaatttgccacagatttatatactaaaaacagcagaaatactgcacggaatccaagagaaaccaagaagagttccattacctgggaatcaaaccccaacccaagaatgtcccaagctgttcttcccaagaacagcaacagctcgtatctttcccaatgcaggggaaagaagccaagaaaagctcgtatctttcccctcgcaatctctgcccagaatcaaacccggaggaaatggtcgggaggatttaaaaagattgcgcaaggttcgagcttttgagcggttcttggatagaaaagaagaggagagattcttgaggaagtagaagtattggtggtagttgctgcctctcttttatgtctcccttggaagctactctcactcttcccttgctatagtacagaaagctatgtgctcctaattagatttagagtactaatactgtattatcttttttaaaaaataagtactaatgctcctactaacctttaaacagtgatgtttttgttctttacatgtgcttctggaaagttactgcctcagttgttttcttttctgggttgagatgaactggtctaataaatctgaaggcaacagccgcaacagaggagacatgataaaacaaaaaaaaaattctgactccaggttgtattaaaaataatatcctgattcctgcatttttattattacatcctgattcctgcttgataaaaataacaacttttttattacatcctgattcctgcatgatatttgaggaattttagtttgatttctgggtaaaagaattatgagtatcttggattttgtagaaatattttgttcacatgtaggatatagagtcatttacgtgttggatttttctcatctggaaatagtgtagtgtagttggtgtgagatgaatggcagacatgtggggcccattactcagcagcaggcatatcatagctgttgtctgttgaccgggtaaagtatgggcataagttgacgacaatgttccaattagctgcaagagtctctgtgaaaaaaaaacgatttttttaccaagataaacacctgttatactttttttttggtgccaaaagaacatcaaagttaatgaaatggcacatgagaaagtgattagggctgttaattcttggcttgaagaaagagcaaggaattatggcttgatgtgattttcagcaagaagtccaaatactaagttttgatttacaggacgaaaaggattggggagatgcaagtcaaagattaaccaatccacatcacaatttcaatgcaaattgcgtgttttcaaaaggacaaaaaaaaaacaaagtggagagaaaaaggtgaccttgcttctatccactttcctctgagatgcaacttgcacttgttgagtgggtaggcttagacaaacaaacctttccatccaatgtattgatccaaaaacctatcctaattaaatcaatgtttgcaactgtatcatgattgtgctgagggatactactaactcacaatcatcatcctctattcctttttattgctatcaggatctcagtagtcaatggtcacctaatgcaaatatgcaattagttgatactatttacctatgattctagaatgaatgagggtaaaagcacttgacaatttgacataactgcctgccctgtgaaaatggcactggttaatatcagtaattggctgtacatctttatttccaattatctgctgcaaatctaccgtattatgattcacaaatgctggaggtaaatttgtgagatgccaggaacatgaagtaactggtgagcactggaaaaattgcttgcccaaaataaaaaaaaaactcagtgatattgatacccttgtttttttttttagataatgtggtatccttttaaatggcatgattcgttcttgtcctaaagtccaatattataatattagaaatggttagatgaagagtatgtcatacaaggcatgctcatccaactacttcaaaccaagactttgtttttcattttcatattcaaataatatttatctatatcctacatccttttgggtgcttccgttgttcattgtgtcatcatagtatcatattgtcacaaactggtccaaatcattggactgattacgtgttggaattctctggccgcttcttccctcaaatgttgactctgaattccaattgatatgccaaatgaaatttataaacccaaattggatttgggcgtcacatcttatacttttcaattttgatgctactgcaggagccccctgaatccatacatgaatggtggttttgatgggtttgacctgctcaactaaatcacctcagcttagactccatggtcaacgttccagtcaagccaccaagaatgatcaaatcgtccttggaactcaacatacgtaaattacattgaacctgctgcaagtaggaagcaagcacaggaaatgaagcaaaaaaaaaagaatcaaaattggcagattctaacacagtttaggaattaagccactgaaatgaacttcagcatagtttataagaagtggatttttatctcttaaggggacatcccctcgttttgtgtatggtgtttaaaaagttatcaaaaagtttgaaataaattgtaaaaatagatcaatatatgatatatcttttcgcaaacatgaaaattaaaattcgacatatacaattcgaaacaaaaacaacaaatttgaccgtgaattacacgttcttttcatagtcaaatttgttatttttgtttttatttgtataagttgaatttgaatatgcatgtttgtgaagtgatatatcacatattgatctatcatactaatttttttaaaaaaaaattaataatttttaagtggcatacaaaaacgaggggatatccccttaagggatgaatatagttttcctagtttataatcactgtatattttctgtatttggtaaattattgcgcaaacacaaaaggtactggtcctgtatttcactaattaagcaccaagtcctatgactatgagaaaaacctcaaacatgcaaacttcaaagactccaaaatttacaggaagttcacaagctccaaaacgaaaacacacatcattcagctcagagctgcagctgtaactggagccaccttactttcttgaagcgagatcactgtctcgaaggcgccgacgagggccttcaccttgctcttcctcgtctcacaagcttgctcgctgtctcctcgatcacattgttcaacaatccctgctcgttcttcttcttgtccctgacatcctgatgcctcaggatgacaacttcaggtttcgaagagcctgaatcttttgacccggaagaggctgcactgtcactcttccttctccctctggtggattctttgctcctgttgctgtcttctacagtctttgcaggcctgaaccggagccgtctcggcgtgctgctcgactctgaattgctctgtaggttcagtacctttcctcgtcggaaagttagcttgcgaggcgactgcgctgggatggttgaggactttggctgccttgtgttttcagttcttggagtggcagaattttctgctaaatttgaatgagcacatgtcaatgtttgcttgagaaacaagtgttttctgcataaattgtctgtagtaatgttggatgcaagattactgaattaggatggggagaaaagaaggtaaaccttattgtcaatcatgacataaacagacagattatcatgtgaaatctgtagtaatgttgaatgtaaattaagcaaatctttgaacatggtgttgacaggggggcaaacaaaatgtagtacctttctgagaacggctttctttcttgctaacttctacttttctcacttttggtgaagctgacttcaggtttttctccttaacgtcagcaacagcattttctgctccatacaccttcttgttgctcttcactagggaagcaggtttttctttcttgactgctctcatctttatgctcaaaagggacttggatgacaagtttatagaacgagacagtttcactggacttattttctcttcttccttcttttgccaaacacgagcattcttggcaacattcatcactgtcatctttctgtcagtttgttt

SEQ ID NO: 21826 - DNA, 631 bp, Oryza sativa
caagatacctagttgaaacagcaagtttacgaacaaaacaagaaaaatccccatggttggaataattatctgttgaactggcaagtaattaccagaagctattcaggaaagtattagacacttttcggctgccactgttatatgcaccaccagcttccccaacccagggagcagaccatggtccatgccgctgtatcgtcatttggagatctctgaatgtatcagagctctggctcaaatactgcggattcaagatcctatttgcaacttgcggatcgttacctaataaaatttggtttatgtcagtcatcttaaatgtgtagtacaacctaaaaacaaagatgaattaaggagtggttctaacattatatctaggaagtacttaccagcaccaagattgtaaatatgatgagtcattgtgtcgagaacatttggaccagagatatcaagaagctgagcataccatttttggtcatagaatcctcctggggcaaccaccaatggtttcctagagtttccatataactggctgatgatgttcttgagctcaattatatcttttccatattgttcagctccaacacttgcaccaattccacttccactcaactcattacctagtacataagca

SEQ ID NO: 21827 - DNA, 8701 bp, Oryza sativa
aggcccgaacgtttagagttgttgagttgttctgctcgcaacacatgctttcaactcttcttttctcgctttttcaaaaagaacagaacagagaaagaaagaaaacggtaatccagtacattgcgcccttaagctatcatattcttggctattttcaacctagatatttgcaagggaataagcatcaaaacagcacgcactggtgatggtttaccagatcatctgtatttttttttagaaaataatactactatatcatctatattagtgtaggaaaactggtagcacagctaacatttgatttcaagacagcatcccgaatacattaacaattgacaacatttttttttgttatttctaaacaacaatcctcaagcaaatattggtgtttgcaacctttttcttctcatcattcgtcatcactgtcaaaaacgactgccttccgacgatgaactgcctgttgttttcttggaggagaatcatcatccgagtcgatctccttgcgcctttggctggcactggcacccccagattctctcctccgttttggttcctgcagcagaggcttcagtttcagtttcgatttatatacagctaacctcatcatgtttttctttcaagtttgctatatattaactacaacaaaaaaccaatcatagattcctttcagctatatgctaactaagtatgcacaagtagtcaaacataaaccgaatacatttttttctgtttccttttgtttcacttcaacatttacaaggcagcaagcctgcccgctgacctgttagttactcttttgcagaactactgaacttaaacttacctatctacataatgccagcattgtaaactaaaatatcaaatttaatcatatattcctagtggttactgtcaagattcttgaacatcttgccctcacatatgctgcaaaagtatttaattcattaatctctttactgggcatatccaagaaagaacctgacttgcaaatttggaaccttacgacaatgttcattcgtatcacatattcacattgctaacttgtgaaaaagaaaaccaagagttttcaggccatgccatcggtcttacctcgatttcttcatctgacatagctgcttcttcttccacatcttcctcatattcatcctcttcatcaagctcatcttccctcccctgggttggtgagtgctcaatatcctctccttcagtttcatactctgactcctccctttcactctcagaatattcattttcctgtcgtctaggcggacgagcaggaaaggatggtttgcgaggaatgtttctgcccatacttgactgaaaatgtgcaaacaatacagattatgtataaacagcaatatattggataaaaataacaagggttacatgctgatgagttgctcaccttctttgcactaactatgcgcctctcagctagtgcttcagcctccagttcatccccaaaacgactacgtgctggcattcggcgagaaccatattgatggtcaggttcctcatcctgccaaaatatggcattgaataaatcattgggcataaccagtactatacgtcttattaattgtcacgccgaatccaatctcccgccagaacgcaccaaaaggacaagttgcaaatcattacagcacattttacaactacaaaaacagctattgaacatgtgcatctaaatccaaggaaaaaacatcatgagctacaacagcagaataaaatctcacacagaaataaactgtctcaaaaaacacagaaataaactgccaacataatgatctataactgtcaaaaaaaaaaacataatgatctatatatctgagtcatttacagtaaacttaaacaagtccatattgcccctatgaatttacagataaacaatttatgtgtatgtgccatgtgcatacgatagcagcctacatggtttcaaaaaaggaaataaaattaaccagacaagaaaattttggatatcatcgcgtaaataacatgtagggctgaagaggatttcagttttcactgaacaaagtttttaccatgcaacagctttaggtcggagagtgaaattgaactcaaatcagttgctaaaatcaaataaggagtgggcagtgatgcagtgttaataagatgtggagggaaatttggaagcatagaacgactgtttgtggcactgtgcaactctactctgtatgtggcagcggtgatccaatcagtagcaaatgaaggtgaactttggtgtttggctggggtttcaaagcttcgaaaactgtttgctaggtcgatagcccttgcggcttaactaggtcattcggtttgtttggttcttttgtaagacatgacggtgtttacagagtgggtttttttctaaactcccctgtgctgcgccgcccctacgcagatctcctgcgtgttcgagaaaagaaaaaggtgtggagggtcttgcacttgaccagcattatattgcagccaaaagtggccccaaagactggcaaacattcaaatggcatttactagtgagatttaataggatgcgtctggactaaatatcatttatcactaatactataacagtatgaacaacaataactaattgtatcaatgaccttaagcggaagaaataagagaaatgacaagaaacccacctcatctaatgcatcttccaaaaatccgggagaaagctgccttctttgcctggcgggctgtgtgtacttgcggctaaccttttctcttttgcgttgaagaattgaatgggctcgaatattttggcccaaggcctgcatagtgaaaagggacaaacttcattcaaaatgcatatataacaagtttagaacagaaaggaaatacagcaaagcacgaacaggattaaatgcatttattaaatcagtatgtcaactatttggttattgcaccttcataaaaggaaacttcaccctatgtgatttattttttgtgaaaagttcactggagcaagccacaataaatgttatacagcgtagcactaagaacaaatcatgttacaataacttttagacccgcagatcaaagctgaaattcacgggatctagaatgtgtgtttaactgccacaaaaattaagtttaaaatccataaacaacatgctaattaatgcttgcttatgcactggagaaaaacatgcaggataaacagaaaacacacaaacaagagaattttctgaatacaaattgcagtcttgttggataatgggacctctgatatcacattgatatttgttggtttgacaacataaatttcttaatcttagaactcatactctcatcatgaaaggaaaaaaaaaacagagaaagcagcaagatcgtgtaactcatacaaatgacttcataatgattacatctttatttttaggataaatatggtgaaaatcttgcactttaccgttcaagagatttacaatcaacatgccaagatttgcacataatgtttttagagaatcatctatttacccccactatatagctaaaaatgttattacatgtttgtactccaagaaaaacaatttgtttgctgattgccatgctctaaatttgcttgctgattatcatgctctaaaagcatcaactgtcctctcaatcattttaaatagtgatcctgactagctatgcgcccaagaataaccaaatttgaagctcatatttccatgaagaagaccattcttgtagtttgcaacattagaactttagtagcatttccttaatggtactagcttaccagttatgctcctatttacttatttgtcagttatctggtgcaaattcagtgtctgctcaaatctctcatggtcagatacgaaattatatttacttaatttgaagtttgcattctgactattttactgattactctactctattaagtattacatgcatccaactcctataatctaaagaaataggtgaaaaaaaatataaatgtacatattttgtcaagcccaatggcccctatagaaacaaaatggaaagtgagaatataacacaacagaaatcatgttgtttttgagaagcagcattggggcaaatgtaagtcatgcacatgtcattcagtgttgcatatacatccaatgtattaagaaatggagtttttcgttaccctttctttttcctgcttcactctctctggatccttagattcgatccatttttgcatcttaaccgttttcttattctgagaatcaacaagagcagttaataaacgatgtgatttcgaagacaaggaagatggcatgaatctcattttccgtaagagccttccttgtgattgaaggactccctgcattataattcaaaattatatcaggttagtgacacctatgcagtaagagcatgaatgaacagaggtggtagcaaacattgttgaattgcagataagaagtactttaccttcccattcctcagaaacagatgggactgatcatgatgtgcttcatgaacagatatatcaagaacttcattgccaatcagcagctgcatggtcccatctttccattttacaatgcgcgcattactttcacactgcaacaatgctcatatatcatatggatagccacatagtgcaccaaccacctgttgtcacaaactacttaaaagacaatgacagaaaaaaaggaggaagaagaaacggagcaagcatcttatggtatatataatggcattttttttgcagggaaatacataacagttgggcaagttgactagtatgagagaagactcagtgcaagcatcaccaagggctagtttacaaactagattatagtaagaaagttaagaagcttcccacagcatcttcagggaggggaatttagaagatggcaacgtagcataactgagtctgcaatgctaaagaatttcaaaatgctacttgaaaaacattccacttacagatgtagtgccattagcattcttaacggttctccaccgcacaatattgtcctccagtcgtatcctttttttggtcccagattcatctgtaacaaatacatcctcctccacatatgttttaggatcaaaaggctttgggtcaatccccataatatttgataccttgatcacattcatctacaagttaagaaattagtcagtaacaaataaccatatgaatagctgcaaaagcacaaaaacatttaagcatcgatcataacattcctagtaaagcctacagaacaagacagcaaaattctcttcaataataccatggcataaaaagaaatttcaactaccaaagtgccaatgtcacataagagttaatagcaacacaggttctttatttcttacattgtgctgtaccagtcaattgtgcagttctgcacaacaacatttacgcacaagcacagaacatcagcaattaaacagtaacagatacaaagaattaataataaaaaatctggtgcatatgcagcaacgcaataaatatccatcaaagataactgatgtctgccaatatataatcatcttggcagaaaagataacagtgctgtatggtcaaagactgaaagatagatggttaaaaaggggtagtcaactcactctctcgggttgagctggtggctgcttaagtggaaccaccaggttcagcggtggaccaactggtttctcttttggtttcagttcacgattttcatctgattcatatctcatatcttcatcagccactacatcgtcgggctgcaaatccttctcatagtgaccttcatcttccatgggtgatctctgaaaaagaaaaggagggaaatttgagtacctattgcatccagaaaaagttaacaggtaataggtgtgaaagttgatcaatactgactggagcacaaatcaatattcatgcagggtacatacaagaaatgaatagggagaaagatttttagataaatacacaattagcaaagagccaaagatgctacctgcattaataaatttgttacatagttaagcatcaaatggtaactctgaatttaaaagaagatgaaacacaaaattatctaagtattgaattacatgaatacttgtgctgatattcagtttaaacaacatgccaccaagtcatcgatagcatactgtacttgctcagtgcagaatgtattaaaaaaatggctctgtttagaacttccgtgaaaatctttgctggttttctttaagcctgacgaaagatattcctactttaaacctagaatggtaggtaatttgagcataaaaatctcacatgggaatcttcatcaatttcttgttgatcacgatatggagcaggttcatcttcatcgctttcaccaaatacatcacggacaacttcctgatctctctcctcctcaactggcgagctgcataagattatggttcttacgagttactacttactacaaaggtagggaggatatacataggcaaagaatgcatattgagtcactagcaaaatactaagacagtcaatcaatcagtggatagattgttatgtcgtaatgtcagatctggaaagcatataatgcacagataataaataggatcctggttttatttcccccttaaccttgatgctttccttgtttgacgaggttcctcatcttcatgagctcgaccagcataatagtcatcttcagacccctcagattcagaggcaacaactcctcttcttctgctagctactggccgctgttgataggcttcatcttcactatccatgcctgctgcatcattttgcatcacccggtcactaagttctcctggggagctctggaccttttccccatcactttctccttgatcaagatcagcacgatgagcttcagcttcactttcttcttccatcccaacttgcccctcactttcaccttctccttccgcttcaccttcccctccattatcagcctcaccttccacttcttcctggacaagcaaatcaagcagcaagcatcacatcagacagctgcagcagaagtatacagcatgcattggcgaagaactcgggcacaagaaaaacctacaagagctaaactctatggcaaggaatggttggatttttacaccgtgataggtccaaaatgtctccaaatcacttgctacagctgcccactaaaaacttcaatactacttttggtctacaaagtagaattttctactagcaaggttatctctcagaaatttcaaacaggtgattggggatcaacgaagcacaaatctactggttcatcaaactgctgtatcccaatcgcgagattaaacctaagccctagccagccccaggaagcaggggaggggagattgaggttcggattgtatattgtttaccgagtggtagccggagcgggcgtgggcgtcgtcgtcgtcgtcgtcatccaccacctggtggcgaagctgctgctgctgctgatgcggatgcgggtggtcgtcctcgtcgacgaaatcgacggcctcgtcgtcgtcctcctcctcctcctccgactggtcgccgaagagattctgcatcatctggttcctcgtctcctcctcgacatccctctccctgtcgccgcccgccatcgccgctggttgagcgagctcggagcaccgaacggcgacggaccggaccggaccggcgcgtggagaggagcggcggcgcggcctgtctcagcgtcggcggcgagaagacggccgcggcgcggtggcgcaaggggagccgccgggaaccctagcctcccagcagttcgtgagactaaaatcggatgaataggattccagcggtaattttgtcaagtctactgaaaaatatgactaaaattcttctaatttagtgaaaaatgatgtgggtgaattagagagggttggttggttctagttgagagtagtatttgggtgaatccaaattgtataatggtattatagcgaagcttcattttgacgatggcataatgtccattttctcctattctacggtgagggatcgatggtggtggatcgtgttgtaatatgtgaaatttaagggtcctttttgcaaaagtgcctagtccctaccgccctgtccgatgtcgtcccttcctcgtcgtcgctggatggggacaaggagctcggtggtggcgacgatctcagacggcggtgcaaatccagcccaccgccctttccgtcgacttcctccggcgattctcaagccacctcttcgtcggccacaacccgtctgcttccgtgcctcccctctccaatccatccacctccctccatgccgatgcgctcgacccgatgggctgtcggtcaagcttggcacaaagtggaaggaccgggcaccagctggaagcctcttgagtcttgattgtttgatggcggacgaccactacgacatagccccgcagctattacacctcaaccaacctctttccgccgaatccgccgtctcaaggtgctctggatgatgatgcacgtttcgtcgccgcgatggtagcccggagcctgctgttctacaagtttcgtgcaggggctcatggacagggggagtcagggaccccgctcgtcttcgtgcagaatctttaggctgctgctcggtcatgccatgtagccgaggtgctcgaagaattgcctatacggagaagccgcacacgcccacggctgtggtcgctcctctatgtttcggctggagattatcgaccactgctccgatgtatcggagtatctcgacttctgtggatcaaccgtgctgcatactgctgaa

SEQ ID NO: 21828 - DNA, 1333 bp, Oryza sativa
catcttgaaacaaacattacatgacattataaactattttctttctttatcttttaccacactagataatgcaatacttaagtcattttggtgaaccacatgcttcactaaccataccattgtcgtcttgatgccacaatttgtatagtatatggcttcaagtttgttcatgcattatatgcttactgcaccatgtgttttgaacctcatattcatctttcttcctatagacgacagccttgaaaaatggttcatttcgccatgatctccactactggcttggaaaggatactagtcaggtagactctcaaataatctggcagcacctcacttgacttagctctcccaagctaactattaatacacaaatgcctaatatttgaaaggacgaagctggaactgctgcaattctaactgtggagcttgatgctgcccttggagggcgtgctgtccagtacagggaagtacaaggcggtgaaactgaaaagcttctctcctattttagaccatgcatcatgccacagccaggaggggtagcttctgggttcaatcatgtagaggtcaatcagcaagatcatgttacccgcttatatgtgtgccaaggaaagcatgttgttcatgttaaagaggtaatctattgaagttgatcactgcctttgtttatgcaaaggcttgctgggttttttattcttatgctgcttgtcatacaaaccaggttccttttgttcgttcatcccttaatcacgaggacatattcattttggataccgcgaccaaaatttccagttcaatgggctctaactcatgcattcaagagagagcaaaagctcttgaagttgtgcaatatatcaaagatactttccatgagggcaagtgcgaagttgcagctgttggtaagctttttgttttttgtttatgtgcttttgctttgaatattcaaagtcacatttaaagcatttgacaatctggattcctctcatagaggatggaaagttgatggccgatactgaagctggtgaattttggggtttgtttggtggttttgctcctctcccaaagaagacatcttcagaggacaatggggatgataaggaaactgtgaccaaattgctatggtaatactcaagtcaaatcactatcaatattccaatacccgcatcaagaaagtgttagttttgaatgagaataatttgcagtcaaatgatgctattttgagatcaattctcttaaaatttatgaaactgaattagtgatttctattacttcctcccagttttaaccaaggaacgctggagcatattagttttgaatctttggagcatgagttacttga

SEQ ID NO: 21829 - DNA, 583 bp, Oryza sativa
tacaggtgtgacctctggctgctcctgagtgtgcgcctctggagctcctccaagctgagaggagcctagtacgtcgtggtggtgtgcaccgtgcaagtcgtcgtcgtagaactggctagtaggaccagtcctaccggcgtgagacgaagaggctccagtaccgaagatcccggctgcaaatcctgctggacaaggaccatcagtttcgtacaagtatttaacagtagtaataaaaagtaaagtaccgtgtgggcgagggatcgacgctccgtgagaggaagagctggcgaacgcgcccgaagaggtggcgaacgcccctgcggagctcgcggaagcgccggtcgtgcctgcgaacgcgctcgaaggcagacgaggtcctgcgatgaggaaacgtgcagttaaaacatggtgacatattcgtgcaaaagccaaaacaaaaatgaactaatatctgggctgaactgtaccgtgcgaaaccggtgctgtaggtcgcactgctccgaagctaggggcgctcgaaggcaaacgaggtcctacgaggatggaacatcaagttacgacggggtgatgttttcgtagaaaa

SEQ ID NO: 21830 - DNA, 894 bp, Oryza sativa
tttcactagctagcaagatgtttcaggctgcaaaattccaggctgcccaggtaacctgtccattgtccatatatgacatattacatcacattatcactctaattcattggtgcttccatgcaggctcgcctctatgaagggaaagaaccgattcaatttttcgtcatatttcagagtcttcaagtttttaaggtttttcttctactcagtagataagtcaatatccttgagtggatctgacagagtgactgttagatatatataacaatttgacacttaatccctctccccctcacaccggctttctaatgtagggtggacttagctctggatacaagaactttattgctgtaaatggtaccgatgacgacacttacgttgaaggtgggcttgctctcttccggattcaaggctcaggatcagaaaacatgcaagcaattcaagttgatgcagtaagtgcaaaggcatctgtttggtccagacatatgcgagagcgtaattcttatattgttatcaatggtttcatctctatgatccttttttactaggtgtcttcgtcattaaattcatcctactgctacattctacacaatggaaacactgtgttcacatggactgggaaccttacaacctcactggataatgacttggttgagagacagctagatgtaattaaggtgtgaatcacttattgcggaaaatattaatctttatacccatgcagttttcctgacacttggtatgctcctatacatttaaatccttgattgaaatcttacagtaggttttcatattaattagcaaaatgcagtttgaatatcgtagaaaagaagagaaggctatatagttgatcatgatgcgaccagattataaccatgtagatttattagatac

SEQ ID NO: 21831 - DNA, 1080 bp, Oryza sativa
ctttctggctacatgaagtggagttactaatatattgctctatgaagtgaaagtttcttcttgctcaaaaaactactcctataataaaatggctaaatatgccaattttctaccactactgaatctgaagttcaactgatgtgcttcattcccatgttagccttgatatggtcagccaccagtattaatattaacaaatttcctgtcatatttgagagaactgaaaccgcttctttgaaatgggatctaattgttgaaatatgttttttttttcatgtttgtgcatgattggagtatctcttttttttcggctgtactgaaatttggtttgtgattaacctgtgaaagtatctgtttgcactgctcgatatcctttattttgaaagcgacatcccgaggaggaaggctcttgtgctaaagaaaatctttagttcctctccttccaaattttttggttcttctttttgttttgattaatgaaagcagaaattcttgaactgaaggaaaaacaggtagctctactgtgtttatggtctttcctgtcgaagtaggaattcataggtgtgtggcaatgctcagcgattgcacaaggttggttctccacttctctgcatcagatcggatatatttcaattggttcgattctgatctatactgactcccttttagctaaaaccctgattactgataatatatatgttctactcagtgaaggggatgcaattagacttggaaatggagttagaaggcttaaaggttgctaatgtgatctgcatgatattatctcatgaaaaccaaacattgttttgccccttttatatattttgcccttaggattgaatcaatatttcagaatggacgaaggcatatatcctcttcaaagaatgaggtctcaagggatttggttgtcaatgtaaaatcacagatgaaacaatctttgttggtaagtaaatgcactttttgctgcattgactgggataatctcgatgagcaatgatgttgtttgctactttgattttaatgtagatcactgaattgccattctactatatatgaagcaatatttttaatgtgtaaaat

SEQ ID NO: 21832 - DNA, 1815 bp, Oryza sativa
atatactagtcccaatagttcacttgccctttcactttgacccgtgaaaggtgcctttgtcattttgccaagtaaacaagattcgcatgtctcaaatgattcaaaatcaaaagagtgtagaagtccatctctatgaagcttctccatgcgtttctcatttatatgacccaagtgacaatgccaaataaaagtgggattcaaatcattaggacgttgcctttttgcattaatgttatagactgaacatccatcaagattcacaatgtataagccattcatcatgggtgcatggaaatagaaaatgtcattataatagactgaacaaccattgtccacagatctaaatccataacactctgcttgcaaacaagaagcagagataacgttcttacacaaagctggaacgcaataacaattatttaactccaaaactaatcctgacggtaaagataatggcatagtgctgactgcaacaacaacaactcttgctctattgcccacgcgaatgtccacttcgcctcttgctaagctcctacttcttttcagcccctgcaatgatttgcatttgtgagcaactgacccggtatcaaatacccaagaatcagtagaggaagtagcatgattaatttctataacattaatacctgaggtggaactctttccatcctgctgcttctgcttgagctgctctaggtatttcttacagtttctcttccaatgatctgcctccttgcaaaagaagcactctgcatccttagcgggccctgtcttttgaaccttggtcttagagttgctagtactcgtgatttcatcagagtttagctttctcttttgaccactcttcttgttgttgggcttgcgcttatgcataaccatcacatggttggagaatcaaatcaatagccaactctcggctaaaggaaaaaccaagcttatccagactctcggtgtaaccaatcattttgatcacatgtgggttcactggattaccttctacaagcctgcacgcaaacaaggactttgaggtattaaacctctcagctcttgcttggtcctcaaacatgttacgtagtcccgtgattatcgtatgagcatccaatgcctcatattgactttgaagctcaggggacatagtagcaagcatgagacagcttatatcaagataatcattgcatcgcttttcatgctccctacgttgagcagcagaagcattgttgggcaagtcagctggaaaaggctgtgtaagtacaaactctttgtgctcttgcctgagaacaattctcaggttgcgataccaatccatgaagtttgttccagtcaacttctctttctccagaatagaccgcaagttaaaactggatggtgcaggagctgccatgatctacaatagaaatatatgtatgcaaaatcagcaccatgtctacagttaacttttcattaaacaatttaacaaaatactcccactatgtattgtaaaacaaaattccttctagtaacatagtgagtcaagatcctcattttattagtgtctagtgagctttggcatcacaactagacaactatcaaaataggtaagcaaccacccttgccttaattccacaatccataatggtggacttcctttgttgcttgtttggggggtggaacattcttctcattgtcccaaaccccaaaccttatgcccccaaaggtcaaaaaacggttttgataccccttgccaagtcacccaataatctccgcatatagatgtgtgacatctatcctattttatcatgataaaaagtgactctgtgctatggcaaacccatcacttat

SEQ ID NO: 21833 - DNA, 3456 bp, Oryza sativa
atctccgcatatagatgtctgacatctatcctattttatcatgataaaaagtgacactttgctatggcaaacccatcacttatgatcacaaccgtaataggtgcaattattggaagagcataaattacacttaatttttctgagggaatctatcctaccatgtcatatcaaatatacaacagcaataaagtaagacacatataaaaccccaagcgaaatctcaggggcaatgcacacggcggtcccgcgggtttcagggcagcgccctgaaaagttcacagggtacatagatctcatctatgattcgccatgtgaaaaccttaacggcgtaatcaaattatgccgaaaccaagtcaatctcattggctcctttttgtcattggcgtgcggttccagtggacattggactatccgatgaacacaatcacgctcggccttggtgagtactagacattccagtgaagtcaccaacacacttaccgattgatctcatcaacccatgcagctatcggttcatctcatgctccgatcacctaaaaacttatatacaacataatagatctcatctactacacccgcatatcaactatatgcaatgatctagatcataaactatacaagggggctctgataccactgttgggatacacgtaggctacgatagcataaatcaaaattttctatcgcgtaaaccaggaaccatgcaagtattagatcatagatcgttaccactcgacgcgctgcgcagcgaaacaaggtgctaagaagtcgaaggaattctcgcgaagtagagcgcgtcgatgtagagaaagtagtcgatcgcaccggctcgaccttcccctcctcgtgcgttctcctcgccgtactcccccgccgatcagcaccgcaaaccagtggcgcctctaccggtatccacacgtacagggatggaacgccacaggcagatgtgctagtacccgtgcgcggctagggttttgctcggggagggaagtgatggctagggtttctcacgtgatgcaatccctccgccggtcacacccctcacgaatatataggatccatcactcgggcctccaaggcccgtaggactcctattcagatccctatccgaattaagcttatattggacctccattcaatctccttattccggcctattaagcgtgcgaccctgtaggttcatgtacactcggctgtaacccgaaaactccttttcggtccacgcgtcaatagcggcccctagcagaacgtattgacccaccgggcatacatagagatcatatcggctgaacctctagtgtatacttgtatgaacccctttgcctcacgatatcaattaagctcaaggctagatatgtgccatcctctaatagctcaatcattcactcgaacctgttgatagattatataacttgtgattgactcctcagtcacctttggcatggctatgcacttccataatctacaacatcgagagacccagagatatctctccataggaggggcaaatcccatcttgattattcatatcccactacatgtttcatagcatacccgaaaagtacttttataactacccaattacggagttgcgtttagtagttcttaagtaagctactacatattttgggaaccatgacaatctcaggtctaaggattcaacaccaacactaaatgagatcactgatgacacaatacatatggctcttgcagtgtctcatgttgggtctatccaacaacatgttcgccaacatgtgtccacattattaatttagtatctctataccatgatccatgagacatgatcatcaattaatacatgtgctgattatctaaatatatttgttccacatatgatatttgatcagggatcctttagaaataacagcatataacataaagagtctcatgaaagaatcacatattcattaactaataatgagttatctatttcaaggaacaaagtcggataaatatgtaaatatagtatgtgatacaatcatctctatgattgcctgtagggcatatcactaacactagcttggtgaagctgtatcaaattaggatgatgcctgctgctaggatgccacaggttgtcttggccgaccggtgtgatcggcctacatgagtgcattgcttgtagagattttgagccgtttccacattctagtaccataacagacaaaaactagttattcggtcatcctctaatctgtgagagatccgccttccaaactctgttatgaaggagcagtattattttgatcaaaagtacacgcaatactgttagtcatataacatcatggtgtttcgatctagttttttttactgcacatagtagtatttttaaaccatccgcttgcaggagatggcgagtttgtgataggggcagagtgagcccaatggggaggaggactcagagttcagcattgtcggagatgcaagacggtgaccaggattggaggaggcgatgcatggacgaagctgactcggtgaaacctgacatccgacgggccaacgatatgggctgcacagcccaatttggatcacgctcaggacgtgtagtgtaggctgctcaatgttgcagtcccattctcattcatccaatatagtcgcgtgttgtaatctattacagtctactcccttgctaaggaaaaaacccgcttatttcatacacgaatatggacatagatatcttatgttcatatatattcgtgtataaatgttatggttttttagagagggtatcttgtgtattagtgtctatactatataggcaccatctatgttatgatatacttttttttagggtgggatttaagatatactctttgttggctcaaattttatatttatagcaagctgaaattgaattgggatcatgccgactacttgtaacctacctgttcgtactaatacaaatgtatgtgtacaatctcctctggatataaaagaagagctgaaagagtgaagtaggaataggggaattgtgtagtgcaaactcatatgtaggattaggaagcatcgtgaagcaaagtatggcatagctagttggccaaccatcgaacctacaaaacgtatccgccgtatgtatatgaaaacctgatgatatatagtctccatcatgtatgcatgacacaactagtgtgggagtacataatgaaagtaaatcagtcatcagtggtagcctacacttggacctgtttgttaacatgccaccgatttgagagtttgagacatggtggtaaagatactgccactaggaagaaacatgataccaattctacttgaaggagtgctaaactcagctatatatggtagacattaattatttggtgtgactattagtttttccctatgctccatgtgttcaagaagttttgaaatacaattcaatgtatattattgaattgcatatgtggaaaaaaagagaagaaactgagttcttggactgaa

SEQ ID NO: 21834 - DNA, 4843 bp, Oryza sativa
ttatttcttcttaattattatttgtgctctgaaaattcaagtaaaattggaggtctccttttagaccaaggagaatttaacaaaaattctccggaccacattcgaattcttctggcacgtattttagtgtttgccaatttcttttcgaattttaattaattctattattccttttagagaatgatttttatttcgggatgaatttatcaggacgtgacaataccttgcaatgattagtcgtatgagaccatgaattatgccatttgcaataacttttcttgcccaattcttcagccgatggaattgtatgaccagcagaaagttgaatctgcttctctcggagtagcaagtcgaaaatcttgtcagccttagtgatatcaaagtcatacctctccttttttcctgagttctttacccattgccattttacaacctttttactccttacccactcgtctgtagctatctcaaaatcatcatcctcatcgtccgacccatatatataaggacatacatgattaacctttctagaatttttcctagcctctgcattcctttgttcatgcaaggctaccttctgtgtaaggtgtgacaagctttcaaagtcttccgatgagaacttctccctaattggagggatcataccctgaaaagccaaatcggcaaactgggcatcagtcaaactcaagctgtaacatttatttctcatctccctgaatctctgaacatactcatgcattggctcatcatgcttttgcttgattgacattagatcggacaatttcatctcatgaatcccactatagaaatagctatgaaactgcttttagaaaatcagcccaattgttaattgatccatatggtaaagaagaaaaccaagtaaaggccgatccagccaaagacaaccggaataacctaaccctcatggcatccacagccaatgcttcaccgcactgagctaaaaatcggctaatgtgctcataagtcgatgtactatcttgccctgagaactttgaaaaatctagaactttgaacctgttaggtagaggaactttgaaccattcaggatacggctgtcgatataggtttccaacatctttcggcctaagcccaaactgctccttcgtgacatctgcaatcaaatcggcccatggtcgttgttaaggtgttccttgaggttgttgtggcatgggctcgaattggttgtattgaggaacaaattggggttgagccgatcctgcatgctggtactgaacattaggtgatggtggctgatactgatagttcaaattgccccctggtaattttggaggtctggctgaatattgcgcaacaaatgttcaggaataacttgaggaacaagtgtgccatctggttgtacatgatgaactaagtgttctgtgacaacctgatttgcggtatgctgcacaggttgaccaccaggtgttgcaaacccagccaatgcattcattggactttgttgctgaattggctgaacaacctgttgcctcaacggtgtctgctgaattggctgcaagacctgccgtcttggtggcgtctgctgaactggttgcacaacctattggattggcggtgtttgctgaattggttgcacaacctgctggattggcggtgtttgctggattggttgcacaacctgctgccttggcggtgtttgctgaatcggctgctgctgggctggatcaatggtgtgttgaggatgtaagaacatagacgcaacctggtcttgtgttagccgactcacattctgtcctgcgtgctgtggttgttccctcactaacaaccggggattgattaattggcctggagccgaaggcggtgtagtaggtgctggagccgatgctggtgccatcggctgagccgacggtgcattaagagggactgactggacgactggtagattatcggtgactaatggccgataattcgggaacactcctccttgtaggtaaaccagtcctgtagcttgatattcagccatcgaaccatcaatcattgactttaccttgtttgccaaggtgttggtcagtatgccagattggttgatcaaagcatggtgtacggcatagtcaatctgatcttgaaagttgttgaactgcacctgtgccacattgccatcttgattgaaacctccaccttggactccccgagaaccatcaccttgaatcccttgagaaccatcaccttgaaccccgtggactccttgagagttgtcacctagatttgctagggaaccatctgtagcacctttgtcactcggttgagccgagccatctggagcttgtttcccttttccatccttagaggaaccagtcccgggatcgtcagcaaccacctttattttatacttctaaacaagcgttcccttgcgagtctgcatcaatgagtacaagaactgatctcgtgcttgctgcatcatcgcgtcaaaatctttcttttgatcaggtgtgaacttttctggatcgatggtcacaaggttcccttcatcaacgtctgtgaaacctaacttctggaatctgcttaactccagtgcaggtccaaaactcgccttcgggtatgcaagtgtgccagttgatttgatcctgcaatcaacaagaaataaagatgaagaaaccgcggttaaacctataaacgatagccgatcggctaggtgccgatgacatatcatttatctttgagccgatgtcatatgtaaatcgatcggtagttataaataaataacaaagaactaaatctactcgatcggctgtagatatcaacaatatatagttcttatatcgatatatacttaaatcaagtgattgggatagatcggtcgccatgccgagacagtgtaaatcacttaggtcgaagtatatattaataacgagacaatatgtgtttataaaatagccgatcagatagatctagcatgtatcggctaatacaccgatacaactctatgttaagatattaaaacaagcagaatatacccaacgaaagcttaatatgcttagatgcgataatatctttacataaagggcagatttaacatgtcaacgaagtatatagagcaaatatagttaaatcagataagattggctgaaactccgacactaccctaattggcaaccaggaagcaggatagagattgatattctaagcacgacttaatagataaaactcaactgatgcagcattaagtatgaaaagaagaacaatatctagacaatcaagccactggaagtttcatagagtggtagatatcctatataatctaaatcaacgtcattgtctaacctaaccggctaccctcttccaacagatgttagccgattgtaggttagatagcgatattgccaaagattatgtaagttatatgataactcgatggattacataaacaagattagagtatcataaagatggaagcactaatcccgagaacacaagccgtcataacaagttttacctctgtcgaagatcgaaaccgatgcagctcaacccgaaagcaagaactcgtcgaaataaaactaaagcaaaagggtggcgatgcgccgaaattgtattgaacgtgtgcgttaattgattacatggggttcggggtctatttatacccgaaaattacaaactatgtccataccggatacgactcttatctctaacaaactctaagataccataagtctttgcggcaaacttttgcccaaacatatcactaaggaaattacataaaatatcctaattaatagatacagttgccttctcaggactctatccatgtacagtaatcatcttgaagtacctcaattcaacccgatgtcaaacaccaagtcgtattgtcggaatcggctgcatcggcttccctagtccgactcagactcagccgatcctaatcgtaggcgatctggactccagcggactcttgctctgttcttgaatcgttctccgccttcgaatccacttcgatctaatcttcttttccgatgccgatattaccaaatttggttattaacagtattaccgacctttccagccgtcacaaccgtcatcgggaagctataaaaggagctctcatcctcacttcactcacacacctcaagcaatagctgtctcatttctctcaagtttagttttgtagtatctagctggtggaataggaatagagtagaaatcaggagtctagaagcctttggaagagttcgggtatggctctagtagcttttcttttcccttttgtaagctttgtactttatttagaatactcttctatatatatttatggtattgaaatactttctaagtatatgaatgcctactttacattatgttcatgttatactgaatatatggctagcttatctgggagatgctttggtgcgggtataatgtttgcatatgcaattactctatgtcatgatgatgatattagagtagtatctggtagtttagacgtggtgtctagattacgggatatcattatttggggttatatattgcggatgagaggtgggccgctgatggagacagctcagtacgggtattcctccgcgccggtatataatcctaagttaattccctggggagggtattactccgtatttagccccggttgtatggtcatgacgggctgtcgtaaggaactcggcagtcagggatggcttctcgaagtaccaggagagcatcggatagagggtattagctagtatatcggttaactagaacgtatatatactatgtatattagaagtataggaatagattttctttctcctttctttccatttagcttagataatatattatgagaataagaagctaaagcttgagtattctatagtgt

SEQ ID NO: 21835 - DNA, 2306 bp, Oryza sativa
taatatatatgttctactcagtgaaggggatgcaattagacttggaaatggagttagaaggcttaaaggttgctaatgtgatctgcatgatattatctcatgaaaaccaaacattgttttgccccttttatatattttgcccttaggattgaatcaatatttcagaatggacgaaggcatatatcctcttcaaagaatgaggtctcaagggatttggttgtcaatgtaaaatcacagatgaaacaatctttgttggtaagtaaatgcactttttgctgcattgactgggataatctcgatgagcaatgatgttgtttgctactttgattttaatgtagatcactgaattgccattctactatatatgaagcaatatttttaatgtgtaaaataccctaggtcatgtgcatgtttttttcctaagttcatgaataaaatctcacttctatatgttagggtggctactagatccaatcctttggttttgtgtttcttatacacccaatgatttttttttttttttaggcttgggtacatgtacatgtttaatttttcttaatgtcaattagatatcatttgccaattaaaattcatgtagaaatacacctacctgaaccaacatattcaatttcatgtagaaatacacctacctgaaccaacatattcaatcatccaatgcatgttacttcacaattttcggagctaggaatcttttagagctggacaaatccatttacattgagtgtttattataaaagaaatatattttcaatcactaagataatgataaaattctattatgtgtttgccgataagcccaggtggctgcccggggttgccaagcggtgtctccacctctgactccattcatgtaatcatgttcatggtctgctccattgagtttatttttactggatgcacatccttccattagtagttcttgcaagaaactgaaataagtaacagtcgtatagcattatgctgccagtatcttcagtaaagaatgtattgtcatttgcttacctcttttgtgttttcttcttctgatgcttagagacacaaaaacaagcgtgtacaaacgatggaaagagaataaactgtaattagtgatcaagattgcaccgctcatcttttgccacaaacactgcaagagagattgatttacatatagtgaatgaatcaattctacagtcttgaagatttagctctcggttttctttagatggaatgtgcctcagatttagatttatgtacattttaagttgccaaaataaacaactaaatgaatctttacgcaaccacgccaaaggattcacctagatgcttcagtcaacatactatgacaagcagaacaacgtttattcttatcttttttatatagtaatatgcccttgctatataaaaataaaagcagaactacaatgtcttaaaagaaaaaaaaccatgttttttagccttggtctattgtcaatcatttgaatatgctttgcttataaatagatggttcatattcatacaatatttgctaatacgtgcattgcacgtgcacgattactagtaaactctaaagggtgccagttgagaaaccgctttcggtgccggtttttccaaccggcacccaggagacggcacttattacctaagaaaccagcacctttaacacgcccatgagcaaaaaaaaaaaatcaactcaatgcatcgagccgatgcattgagccgtcaagacgatccaatctaatacccaaatcctaaaatttcctcaaattcataaacacaaacatagtccatgtcagggttacggataaggtataccctctatccttggacgtacgttgcatactgatacggtatacccgcgtggataccgataattcctgtgtacgttaaggaaatctatcacgtgatagaaacagaatccatagatggaaggagtcctacacagacaagactgggtttttaccatatcgtgatgggtccgatatctccgagttctacttggagatcaactgacccgtggtataaaagggaccccctgggcaggacctaaggcatcgaatctcaccgcccacacatccgccacagcctacgaagccggagcctacaggagcaaagtcgccgggtgatctagtcgaaccaactcgactacggtctcgtcgatatcatcgagttccgctattcccattgtaatctgtggtttccatcatataatcccttaccaactggattagggctattagctatcaaggggcctgaaccagtataatccttatcttttgtttgcttgatgtcgtactacgtagatcctc

SEQ ID NO: 21836 - DNA, 15694 bp, Oryza sativa
aatctaaaaatggagtctttgtgggacggaggaaatattaattaaactgtcagataagtcaaaattttatgtggcaccaaaattaaatttctgttcgtactagtcacaaggctaagcatgagagtttgagaggagaggaaaagagaaaattgagaagatatgcaaaacgagttcgcatgatttgttgagtattaactattttaaattgtaaaaatggattaatatggttttttaaaagcaactttcccatagatttttttaaaaaaaacacatattttagtagtttggaagcgtacatgtggaaaacgaggtcttttctctctcgatttcccagcaacgaacaagttagagatgttgattcatgtaatgtgcaaatgggatgttcaggacaatggtaataatacttttagaacaatcttccccttcccaggtggagttccatcatatgatggaatgggggggcagtaaatacaaaggttgtaaaagcaaagatggtgatagtagagaggggatttgggaatgagatcaaattgtgatgcaatcttagggattaactaaagagttgagagaactttttgttcatatgggttgttggttctattcttggtgttagatggtggatattgtcatgtcctgataaatctcaagcactaaaatatgcctaagaaatattttaaagtcgctttgattatttttcttaaattctccatgctctaaattggttccgcaaattttatttgaatttttagaacacctaaataattataatgcaacatcaacaaatttcaaagtttattaaaatgaaaaaactaaaactaatcatctccttcactttgggccgaatccagcccaaagctctcccttccttcttcagcccgctgccaaagtctccttttgtatcatacccttcctcctctccctctctttctccaccaacctcttgggccatcctttcccgctgacccaacctcctcttccctgctccttcccacgccctgcctctcgcgccttgtcgatcgccctcgtgctctagcaggtggggcccacgtgccaagcgcgtaccctagctgcgccatttcactctaccggccaaaacccttgtgccgcccacgccgatctgcctcctcccagtttgtttgctcttccaattgattgcaaaaattggttctcctcctcctcctcctcctatcatttcccagtgtttctccctcttaatttagcctttattacccgaatttactctccgacgaactgttgccattgatggcaggctggagagctcccccggcctttcctctcctccccttggcttacaaagggtaggcaacctcctctccccctcctttggcattccggaggtctgttgctctcttttcgtctcctcacatctatacctcgccagcgaactacagctgccattcctcatcgagccgagctgggcaggaacccggtgccaccaccctcggagtcgcagccacctcctcttccccagtctcacgtctggttcgccacaagaccgcatgaagcgtgctcggccctcaactagtgaagaacatcatccttctccaccttcacagccattctccgtcgagcagggctgtgccagcccgtgccgccactgtcgacggttgcgtcacgccttccttgtccttggcatgccctttcccgagcctagatgccaatgaaacaccagcccaccctagcttttttcctctacctacagcccctcccgcatcgtcggagcgtcgtcccgctgcaccatcgctgtcgccggtctttctctcgttgagttctccctagtctatgccttcaccaagctccgccagcaccggagcttcatcctcgccatcaacccaagccggctatctttcctactccatcaccgtaacctcctcgcagaccaaagaccttaggaacgccaccctgttgtcgtcatcttcctccgtctgtcattcctacctcgtcgaagcgccacccgtggtcatcgtactctccatcaagtcagcacctccatgcgcatcgttgtctacctcttcaccaggcccgaagatcgtcagagccgtctcctcatcaatcttctccgttcatcgccgccacagcaagctcatcaacgattgccactgttaatccctcaccgcatcgtgattgtggtgagaactctcccctagccgtcctctactcgtcctccccatataggcacagtttaaggtaatttgatcaactagaaacaaaggaaaacaaatgtggttttcagtctgtaaatgcctgcagatcaacatttctaaccaggctatgcttgttgctttagcaacatgcatgctagaaaattattctcaaacgctattgaacctgcgttgatcgaaaccatattttcctaccctgctgcatcagttagtcttctagcacaccaacttgataattggttgtcgatcttagcataatatatccagatccgttcttctggttacatggaggtagtcattaacactgatcttgaggcatgccgtgttgggtttagtcccagttggtaattgatgatgggggagaatgacttcgatggtgggagtagtcctcacccatgagactagtcttttgagttgtataggcctaggacctaaagtttgtggcttcggttgggcctatggtggagcaggcccaatgtgatttgggtggcccacggttggtgggccgagctgcgcactctaacaagtggtatcagagcccagtttcgaaatccggaacgatttccatagctcacatggtggagaggccatgtaacaagtcttcggaaccacatgggttgatgtgacgggggagactgttacgcctgatgtgtcacagaggatattgttcggtttactcccacatcggtaattgatgatcgggtacatgacttaaaaggtgggggcagtcattacccatcagactaatcttttgggttgtatagtcccaggatctaaaagttgtggctccggttgagtctgtggtgaagcagacccaatgtgacttgagtggcccacggttgttgggtcgggctgtgcactaacatgccacgaatatgtcagctagaggatgcaatgggacaatgccgaagtgtatcttggattaggctagatcgcctgcgcatacttcatgcatgtggctagcttggatgagcacaagccggtagcgagattgtggtatgactgatgatgacgtggcggtgaggggaatatcaaaggggacagaagatacaatgaacatgagtaaaattgacattttgagcttcttctccttcgagaaaagtacatacaatgaacatgagtaaaattgacattttgagcttcttctccttcgagaaaagtactaactgctggattgatggattggatagatgtctaaagctcccgttggctcattttgtcaattttgtaatcacttctgtacactttacttcttcttcttaatttcctttttgcttaattcagataggccttagtacagatgccatgaccactgaagagcactctaagaaaattaagtgcaaacagcatattccggtataagtcgagctaaattttgtaactcttggtgtatcttccgctaaaatgcttactcctgatccctccggagcctaggagtctattgaaatcttcgaggttgaagttacacctactccatacgcaaatttgtgttggtttaccaaaagcagtactgcagaccaacagccaaattatatcacaaacaacttctacattgtccaagctctgaaattctcatgtttcaagaatgcctccttcgtactgaatactgccaagttatcacattgaagtatatttatacaagttcagtgcccagctaacattggaagaaattatcaaaacaggtctcatgttgggtttattgcaagcacccatgtgcaaatggctgtgcacgcctttgtgtgaggaaatcttcgagttcttttttaatttcaaattttgttttttcagtgactttcagctgttacattttgttggtcagaccatttgggaagtggctaataaacgcacttctttttggttattacggaatatctatacttaatgatcgatccctcatcgcccgagacttcattaatcatttctatgattctctgatgttaatttcttttcttttcttgaatgcacaacaatttatgtatcatttcattcagaagggaaagaaaaacataatcgggaaaagggagcagtgtgcagcctcacctgaaccaccaataggacttaggcattacaagaaaaaaaaaaacacaaaacctcacccaaatagggctaacgagctagtaagaaactcgctaagaaaattttaggatcccattttacatttcgtacatgggcctcaaatttctaaggaaagccataaatagtgaaaatggtttacatcttcggcctttatcaacaggcgcgaagccaaattccaaactcatatattagcatgctctttttgtcaatgcgctaatcatgttcctatgttcagataccataatcagagaagagcactctaaaaaaattaaaaattaagtacaaacaaaatttaacgatacaagtcatatatactaaattctgtaacttctgaattatctttggctacaaatgtgccttctgatccctgccgaccatacgagactctgttgaatgctttcaggttcaaagtacacctatagtccatgcacaactttgtgtttttttgaaaaaagaaattagaagaggctcctacagtgagcaaatatattaaaatttaaaaaagattacaaattacatatgtacgtaaaaaaaaatcaaagattgtctagctattctaacataattaaggggtttgagactatcttttgccctatggataaccaaggaaaaatctttttgaatatatccttacatacatgaaaataaggatttatgcctctaaggccctgtttggaggagcttgtcccagctgcagctttttctaaaagctgcttccgctagaagctgccaaaacagtccacagcttctgagaatctgcagttacagattctgaaaaatgaactaagaagccaaaagttgaagaagctaggtttaaaagcttttccagattctcagaagtttgttaccaaacagctgctcagaatctagagctccccaaacagtccctaggcctcaccacaagcagcacagcagaccagtagcaaagcatgtcagtagcgaaaggtgcatacgtggcatatttttatctatatggtacatttaaaaagattaacggatttatgcactttactcctctctatattgtatggatacaatttagtgcggaagccaaatgttctcatccgcttaatgatattgctattttcatactctctggtgcaatcacatcaacataattgatgttatatatcaattttatcaatttccgccacaaatttgcccaagctcaggtacatgtttcttctcaggtttgatctctagctgaagctatatcagattaggaagcctccgagaactctggctcaatctcttcccccctagcaacaatgaatgaaaactatgtagtacaaaccacatatatagagcaaaccggaaaactaatgattgatatggaaatggatatatgatagatttgtctatgtcattctgagttaaacttttataaagttttcagatccaaaagttttacacagggtgacgtggataaatctcatacgtctattcttagattcttttgaagtacatatcatgtttgcactactttttaaaaaaattttactacgataataagaacatctggtactagccgctgccaccaccggcaatgaccagagcaaacaacatcgcctttatatatcaatatctattcaatacaacttcgtccatgcttctcccctcgtacaaggcagcagtcagcctacatcctcccactaatggttcttcgtgtgtataatttgctttcgaccatatacttcttcagcaaaatacgtaccggtagtacatgtttcatgcaagagaagggaggcgtaagatgtgcagcatgtgggcataagagagcggtcgtcacactgaatgtgggttgcattagtgggattctggaaggtgctaatgtgtgtttcggttgtatatgacttaattactcccccatcgcggattagagggcgtctatttttattttttttggctttccacctgttaaagtgattggaatcggattaaacatactagccgtcaacccgtgcatttcacggactatttttttataaacatcataaagatttaattacattggcttagattaaaataagagttagtaagattaacaacttgctaatcaatagaaaatacttgatggacagtcatatatagcttcatgtcaattaattcttattaattatggatttagtaattgctaaattttggaaaagccaataataaactaaattttggaaacgccaatactaaacaatctacgatatttttaatgccatgtttgcattcatacgcagcacgtacagcttgcgtaactccactaaagctacaaatgcacatgcatttaaattccatttttctttcattgcatgaccacatatataatgcgaagtttattgtgcatcaattgaataaaatgtgcatggtgtaaaatggtctcaaacaatttttagaacttgaatttggaaacttttaccaaataacgataaaaactttatagagtataattaataaagtaaatctaatattagtaaactacgtcacaaatacgaatgatagaaaattaaaaatatattgtaatatcaatatataagctagaataataagaaagttagagcgcatacagacaagacagatggctcgtacctgaattgcaacgaaaattagtccgaaaatatgcagcggagtacatttatgaattatgaatatggtgaccatcgatcgatgggcttattagttgcaaacaaacttgttgatttgtgaatcaacatccgaatatctaaaatttacatgattagatgatgtatactgacggactcagtgaaccctaaatataaagggcgttgttgcagatgaaaagattgcatgtaaagaaaattgaattggaaattagacattcgaataaataataattgaaaaggtagcaattagaactcgatcacctgtcgttgtgcggtttgagtggccggccgaccttggcttagtctgggcagaaatcatctctggtcatcacgatgcgagcgacgtggtttgtgtgcgccggccttgcgagcagaacggcatggacgaaggatgtatgtgtctgtaccggccgctagcttcttgctggccgccgccgacgtttgcgatggccatgcatgccgtaccccattgcagttgatgagatgcgtatacattgtacgtgcaaaccaatagataatctagattagattgtggcccaatatcagtttaattgggctttttatagcacatgataatctatggtcaagatattataattaatcaaatcaacggtcagatttttctaattaacgtgagagcttttaaaaagtgcccgattagtataagtatagatagatagatagatagatagatagatatagaagtatagatagatatagatagatagatagatagatagatagatagatagatagatagatagatatatatatatagatagatagatagatagatagatagatatatgtgtgcgatcaattagggggtataaccgcgagaatgctagctatcgtgcatctgatgggataacgaaatatcatggttttcttttctagccacccgtgactccctctctctctcacacccccttttctctctcccacgctcacatgggagggcgaagctgtttctcttccctgtgcgccattgggaacccctgagtctcgtcacccttgcttcatcaccaccaacaccgtttctctggcctactgctgctaccggtgggaaacccctagtcccatcacccccgcttcattggcaccgacatcgtttcgctagcctgctgctgccggctgcttgatgtttcgtgttccaaaacgaagtgtttcaatccatgattcaacagtgtttcatcattttaatagtttgaaacatgtgttaagctagtggtgaaacattcttctataaatactgaaacatcgtctgatttttaggatgaaaatcatgtgcccgacttgtagttgcctgcgcataacaatagcaaactacttagcgattgtttggtttgcaatgccaaatcataggcaagtttttgtaacatttgtatagtattggcaagtattagtagcaaacaagacattgccaaaattactatttaaaatgctaatattttggtatggcatgttttggcttcaaaccaaatcagcccttaatgtgttctctccttagcgttagcaaaataagtgaagcaccatctaaacatgggatggtcggaatttaataagaaagagagtcaatgtaaaaattaaattactatagtggacttagggaaggactaaatctcagcatgcagtatgatcaaatatcaccagtgtcagaattagggtatcaaccatgcatgtagatattacgcaaattcaaaactcgtgctttttgtattgctatagcctaaatgttttgtgcgcccatttaagatgtcctcaatttgcaccaagtaaataatacgacggaccaagtcatcactgacgggcttaaactgtcctcgtcagagatgttaagtggtttgtgatgacaaaatctcatctgtgatggatgaacacctgtcgatgagtcatttgtgacgggtgtataagtcatctcttataagtcgtaacttatcacccgttaaaaataagggcgtgttaagattgatgtcatttcaaaccataccatttcttggtagagttgccaaatatatgcatccatttagtttcttatcaaactttagttttttcttacttattttctttgcttttcatgtgaagacatcactacgttggtgtgtcaggcataacacatagacacatcacaccactgtaagaaaagaatagaatgagtagatggcatggggaccaatctatcccatacccaaactattaactccgtacagtgatagatgtatcatgacctaacactcacactaggacaacctcacttggcattgggaaaaaaaataaagagtaaaagtcccctcctctaaccactttgcattgcctatatggaatcaaagttaccaattcttataggatacaacattaattacttatataaaagagattaacacaagttagacaagttagagccatgatcaaactagtttaactaaggtctagggcaactaaaactttatcatgtacactcacataccactcattattgcaactccatgttgttctccataatagctttccgaatatagttatgcgcaaacgttaatatccacactatacactgcaccaacgaatcaaaactaaataaatttttttataccacctagctttacttaatatacaatcagatcttattcgtagaagagcatatatatctagtaacaacaaaactctagaaatcacaaatacaatgacttagagatcagtaatcaataaaataaatcagaagtgtgatgcaatgaatgacccaatcccattctactgtgcaccggtgtgtcaaaattttaaattgttaaggcccatctcatgttttgtgttaatccattaagcaacttaaagctctttttttttccaaaaattcactaagcagatttggtcaaagttttttttagtcaaaattatttattctctcccatggacctaccgcccgctctgataccaactgtaacaccccaggtattcttttacctagaatactacacactacggtacagaaaccactaagtcctaaattcaataaaaatttcgatagagtctcccctgtaaatacggacattcacgataggcaattataaattaaattaataataacatcattcccgtaacgctatccatccatataatccatagaaagaaactaaaagatatctaaagtattattaccaaaccggacctaagcaatatagtttgatagtgtgtagataaatgtgtatataagggagctacttcccgcccatgcgtgtccatctcaatgcatacctaaaaccaaataaaacacaagaatgactataaaaatactcagtaagtataatatggaattagaaaacacatatacacatcattggcaataaagcatgaacagaaggctttctttctttgataagaaacacattttcaaacaccaagtcaaagaagatagtagttcccatcccaggcaggcatgaattgaaatagtagtttccatcccggataatagtgattacatcctagcatttgccggcaaagtcgagtaagcgtgatcagcgcatacccataggaacatgaataaaaaccagatagcacatccatgactcgcatggaacatgagtaattaaaaccggaatcaaagaaccaaattgaaaccatattggacatccaagacaagcagggaacttgaattatttaaccagaaccagaatctggaatactgaaacaagaataacatcgtaatcatcagacaaagttgaaatctaaatggcgtgaataacaatctgaacataagcagtagcatatcacatataaatataccggaaataaataggtggagcagacaatccatgaatcacacaattagttcgtcatgcacttgcctccaataaaaggttggtatcatacacgatcttaaggtccaccacctaatcacgaaaaaaaccttagcaaacacattcaaacatgctataaaacaatgaaaaaggtgaacctactgccccatcccgtcaaaatggaataacaaggaacgccgcttggactatacacaagactgctgcttcaaacctttatatcttgaaatatgaaaaggctatgactaaaaatatatacattttgtaaatctacagaatagtacctacaacttttatgtagaaagcatatttttattctgccatttaaatggtctaacttgcgcttgaaagcaggcttcagaatctgtccaaaatttcagaggatacatacaaaaacaactataactggagttctactcatccgatcgaagtgtactttaccaatatggaaagattggagaaaaatctacaactttttctataggcagccagactgattccgctgtttaaccccctccaaaaatagttcaatctactactatccaaattatgacataaaaacaaaagttatactaaaaaaattatatctccgataccacttgagataaaatcacgccctttggtcagaagatagatccaaacattatcgacaacttcctggtaatacacttttgtagaaaataacatttagaaccccgaaacatcgaaaaactgaagcactgcaaatctgcccacatgcagaactacaacaaaccgaaccgcaacaacccaaactccttctctaaccttccctaaccacgaattaaagcactaaagccacgctaaaacaactaatacaacaaggggaaaaagcctcacctagggtttctttagagaacttatgaggagacactaggggagactccgatcaaacccctcctacccctctccttctccttgttctgtttgtccacttcgcttcttgatccaagttcttggggtggagatctatgagggcaatttgctgcagaggggagagatgcggacacaggaggaggggaggaaggaggcgtcgttggaggctggccacggagatgggtggcggcaccaagaggggaagtgggattcggttcccctctctctaggttttaggggagaaccagtgggctgggtttatggaacttatcatgttagcccacttctaaaggtatttttcctttatttatttctgttaacatctttattttaacaagtcaacccaaactaaaaaaacctaaatatcttttaatataaggggtattacaattattttaggatggaggtagaacccataaatccacgactttcctagcaatgtagacatgcgtgcatttatattgagtctcaaacatgagaccttgctctctatacagagcacacattacttattctttcaataatattgtttttactattcctatccaaagcacatgtaacatatatttaacactcaaaacgacttcaaatgaaaacatcgtcaactaaaaccttttttttatcttaacgtgttctacaacttttctatagggaatatctccatccaagatcgtttgaagaattcaaaatttttgtttttccaaatatatattaccatataatgcatatttgggcatgtaaactgtctcggatgaaaatattatctaatataatatcatagatctggttgagctctgttacattgatatagagcttgtttccatccgagatcatttgaaaatttcgaaatttcagtttttaaaatgtagacctcatcacttgtagtatgtgaacggtctgtaatgaaaatattgttagttataaaattattgatatcgtcgagatctacaacttttatatagagcatatctctatcccatatcgtttcaaaattcaaaaatttgaattttcacaaccctacctaatccttatatatttttaggccaaacatatatagaaattgaactcaccccactttaaacctcgccctcaaattttgtaggctaaaaagttagagcgtagccagtgctgccctcccaagaattaaggactctccagcagacggcacaccggattgaacggattgaactgatcttgcagccctccacactcgatggaaatgtactttacaatcatgatttaattacagaaaatctatcgtatggtgtcccatggctgtgcggatagtcacggaataaattaaacgactggataacgttttagttcttatccattccttttctcttctctatccaaagctttggtcaacaccttcgcgtttgggcaagccaacacccgccattccagccgtgcatcgttgcaagagaagctcaagagagaagttcccggcggcaagatggccggctgctgcgtgttcctccgatggccgtcgaccctgccctcagtcctcggctaccgcttcctcgacgacagcaaggtggccggcttgtcgtctccagtagtgacagtcgtcgtcgagaaggagtggtaggtgttctccgtcgactacctcatgctcgacagctacccatcccggttgctcctcgagacagcggtgaggaaggatgagagcaaggcgacgctcttcgtcaacgtcaccatccttttcttgtcagtgttatgtgcaaagtaaatcacgacttgatacctaggtatcaagtttggtaccaagtacaaggggtcttggggtctgtacggcgtacgccatcacgcgcatgtacaacgtcttggggtggatgaggcctagccacgatggcaagaagaggtggtcgcacgggcggaatgtggagcgccatgctgtgggcggcgctggtgttcgtgttctccgccgccatgctgatacagctggtaccatacctagtacctgtgacacctagtacccaatacttgtgatacctagtacctaatacctgatacctatgatacctggtacccgatacttgtgatacctggcacctggtacttgtgatacctagtacctgatacctgatacctatgacacctggtacccgatacctgtgatacttggcacctagtacctcgtacctgatacctgtgacacttggtacccgatacctgtgatacctagtaccctatgatacctgacacctagtacctgtgatacctaatacccgatacctgatacctgatacctacagcatggtgtacgctaattaatcacacattaaaattgtcccgtgacttcagtttttcacggtatcccgtgggctagcagccctctttaattaagtgcaagaaagaacagaaagaggaaacgtagacgacaccgaataatgacgagaaggaaaacgttgtaatataccaaaaggagaacttgacaattagttgcatggagatagacattaacattgatctagaggcatgccgccaatattatctagtgggacatgaccaatgtgtaccacaacaacattactgtggtaatgctagatcggctggtcaaacagtgtgcaggtgacaagactgtgctacgactgaggaccatgcggcagtgtggggaatatcaattgggacagaagatacaatgaagatgagtaaaattgacgttttgaaattcttctccttccagaggactgatggctggattggattggaaactaaatactgaactcaatgtctagagctcccgatggctcctatgcctatctttatgtttgaaaggagaacatgttcgtatgggattatcctgcggcaaagccaaaatatttcattctcagtggaatgcccagaaataatagtagttgtgtggtgaggtactcggggtatcaaatgttgacagtacgccctatgtggctttgccccagtgctgctcttataagaagttagttctgtagaataattgacataattatctgtaccaaagaccgtaaatcttgattcttcgcaatcattagaaagaacttctcttatatggtgacactagcaatttccttgatcacaaatatgcattaaaaataaatttgactaaaatatgcatctcctataccaatctaattttttttattaatggaaatggtttacaactctggtttttgccgatagtttacacagacaaattcaaaactcttggcctaatatgctcatttcgtcaatgtactattcacctttccacaatttccttgttcttctcccctttcatttagacagactgctcaattcagacaggcatttagttcagatgccatggccactaaagagcactctacaaaaattttgtgctaacagtacattccgatatatgtcaatccaaatattgcaactttccaggtattttccgctacactgcttcctcctgatccctcccgagccaaagagtctgttcaaatcattgaggttgaaattaccccaaggccagggcaatttcgtgttggttcaccataataagcagcactacaggccagtcttgtgtactgcctaacatctgaaattctcaagtttcaacaatgtttccttcctactgaatactgtcaaatgtatcacactcatgtatatttatgctggttcgagactagctagcattggaattttggaagaacttgtgtaaattggtctcatgctgggttcattgcaagcacccatgtgcaaatggcagtgtgggcacctttgccattatggaataccttatcaacacagttaatttccgaacggttgattttgatcgccatcctgtttccattgagttaagaatcttcttttttcattcgttggccggacagcttcaggctaaacttgaagtcatctctagttagcctttgctcttgtttttgtgaagagattagagatatcccttgctctggttcgcaaggcagctttctttttatccccctttatctccttgtatcactggcccttttttggtgtgtgctatcagggaatgatccactttagcagcgatgggttcaagcaacattcccgatgacttttggcaacctattggtaaactatttaaacgagaacgcaccatagtttaagcttgatcaacacgttctgacgtcca

SEQ ID NO: 21837 - DNA, 4525 bp, Oryza sativa
tggaaatgttcacatctacaaggcacgattggtggcaaaaggtttcagacaaattcaaagtgttgattatgatggaactttctcgtcagtcggcatgctaaaatctattcggattattttagcgattcctgcctatttcgactatgagatatggcaaatggatgtcaaaacagctttcctcaatgaaaatctcgatgaggatgtgtacatgacacaacccaagggatttgttgatccacaatcagctaaaaaagatatgcaaattgcagaaatccatttatgggttgaagcaagcatctcggagttggaatattcgttttgacgaagtagtcaaggcgttgggctttgtcaaaaacgaagaagagccttgtgtatacaagaagattagtgggagcgcactggtgtttctaatcctatatgtagatgatatattattgattgggaatgatattccaatgcttgaatccgttaagacatcgttgaaaatagtttttcaatgaaggacttaagggaagcagcatatattctgagcataaggatctatagagatagatcaaggaggctaattggaagccagagtacatacattgacaaggtgttgaagaggttcaacatgcaagattctaagaaaggtttcttaccgttgtcacatggtattaatcttggcaagaatcagtgtcctcaaacgactgatgagcgaaacaagatgagtgtgattccatatgcttcggcaattggatccatcatgtatgccatgttatgtacacgtccagatgttccatatgcacttagtgcaacaagccaataccaatcagatccaggtgagagtcactggatagctgtaaagaatatcctgaagtacttgagaagaactaaggatatgttcctaatttatggaggacaggaagagctcgttgtaaataattacactgacgcaagcttccaaaccgacaaagatgattttagatcgcagtctggatttgtgttctgcctaaatggaggcgctgtgagttggaagagttccaagcaagatacagtcgctgattctacaacagaagccgaatacattgccgcttctgaagcagcaaaggaggctgcttggataaagaaatttgtttctcaattaggtgtgatgactagtgcttctagccctatggacctctattgcgataatagtggtgccattgcacaagccaaagagcctagatcgcatcgaaagtccaaacacattttacggcggtatcacctcattcgcgagatagtgggtagaggagatgtgaagatatgcaaaatacatacggatttgaatgttgtagatccgttgacaaagccactccctcggcctaagcatgagacacactgtcggtgacatgggaccgggagtatcatgactagaggcttgggcagccgcgatcacccacgtggcctgaccccctcgggggggtcgggcccgagggtgatgtggccgcccctccttttgtctccccgaggggtcggaccgctcccgtttcggccccgagggctggggcgccccgaccccctgtgggtttggcgccacgtatatgggttaggtgagcacagtggggctcacctaaccgcatttattgcgggttgaacgagcgcgtcacgtcgcatgtaatgcagcgcagcgcgctcgcttatccggtccgtgaccgggcgcagcgtgtgaccggtcacagaccggtcagatcgcgggttaggtggtggcaggtggcctgttacacgcctcgccccgtcccgtcggattgatgagagcctccaggcacttgtccctagccggagacggcgtgccagctcctgaagatggcacgtcggtctcggtcagatatatgccaggcttcatcccaaccattgcaaggaagtcattgtatgaagaagggcagacatgcagcttgctaaactgacgcgtggtggacgagagtgaccggtctgtgactggtctgacgcctgtcatgtcataggcagacaaccgcgctcccgttttgcacctccttccagcggagtggaggtaggtatgacccatcccatcggagggtcattcggacagcagccattgcaaatctccgcccatttatgaagggatgacagggtgatctacgggagcagacgagtgaggacgcctggccacactgaagaacaagctgtgttttagcttccaagagaaggtgagccaagttttggtgaaaatagggtgggtccccacccaaaagaaaagtaggtagaagtggagcatgtgggatccccttgagttataaaaggaggaccttgcccaccgaagaaaaagagaaaaaggaggaagataactgagagaacacctaagctctctagctcttctgctctctgtaattccttcacactcagatccaccagaacacaggagtagggtattacgcttctcagcggcccgaacctgtctacgtcgctcgtgtcttgcgcatttgctctctcgcgaaccattccacagatcaagggcttggaacctcacttagcgcccccggtcgaatcggcaaaggggggcccgcgcggtctcccggtgaggagccccacgctccgtcacacacactagggcaatgagtataagatacgttcatgattgactctagtgcaagtgggagactgttagtgatatgccctagaggcaatcatagagatgattgtatcacatactatgtttacatatttatccgactttgttccttgaaatagataactcattattggttaatgaatatgcgattctttcatgagactctttatgttatgtgttgctatttctaaaggatccctgatcaaatatcatatgtggaacaaatatgtttagatgatcagcacatgtattaattgatgatcatgtctcatggatcatggtatatagataccaaattaataatgtggacacatgttggtgaacatgttagatagacccaacatgaggcactgcaagagccatatgtgttgtgtcatcagtgatctcatttagtgttggtgttgaatccttagacctgagattgtcatggttcccaacatgtgtagtagcttacttaaggactgctaaacgctactccgtaattgggtagttataaaagtagttttcgggtatgctatgaaacatgtagtgggatataaataatcaagatgtgatttgcccctcctatggagagatatctctgggtccctcgatgttgtagattatggaagtgcatggccatgccaaaggtgattgaggagtcaatcacaagttatataatctatcaacaggttcgagtgaatgattgagctattagaggatggcacatatctagccttgagcttaatcgatatcgtgaggcaaaggggttcatacaagtatacactagaggttcagccgatatgatctctatgtatgcccggtgggtcaatacgttctgctaggggccgctgttgacgcatggaccgaaaaggaattttcgggttacagccgagtgtacatgaacctacagggtcgcacgcttaatgggccggaataaggagattaaatggaggtccaatatgagcttaattcggattgggatccgaataggagtcctacgggccttggaggcccgagtgatggatcctatatattcgtgaggggtgtgaccggcggagggattgcgtcacgcgagaaaccctaaccgtcacttccctccccgagcaaaaccctagccgcgcgcgggtactagcacatctgcgcgtggcgttccgtccctgtacgtgtggataccggtagaggcgccgctggtttgcggtgctgatcggcgtgggagtacggtgaggagaacgcacgaggaggagaaggtcgagccagtgcgatcgactacttcctctacatcgacgcgcgctacttcgcgagaattccttcgactttttagcgcctttttccgctgcgcagcgtgtcgagtggtaacgatttatgatctaatacttgcacggttcctggtttacgcgatagaaaattttaattcatgctatcgtagcctacgcgtatcccaatagctagttcatcaggtttggtgattcctctgcttgactgactgggagttgctctcaattgccctctgcaatgcatgatcatcttgttcaatgtgcatagaacgttgtacctgtaaaactttttacaaacaagagattttttactgtattctgagttcggaatctcaatgctgcaacttattcatgcttggatggtctccgaactcatagtccgttccgttgcttcctggtgcctctaaatcccatatgtatttagccaaggcacatgctagcgaagcagcgaacctctaattgtcatggcaatctcatagagaaagttatcagttgccttattatttcttttttttcccctccaccctcgtttcgttttatgtactgctgaagtagcaatgcactaagaatatgtttatatccatttgaaatggtaaatgatacatggcaaaagttttgaaagtaaaagttttggcattgcaaaagtactagttggtgttta

SEQ ID NO: 21838 - DNA, 809 bp, Oryza sativa
ccctccccaaacctcgcaggcgccattaatggcggccgggtctcccgcgcccgttccccatcttccggccgccctctctcactcccaaccctatataaaccctccccgagctccccaccaccgtttccgccactcaccgccctctctccccgccgaaatagagctcgcgccgtcgctctctctctccacagtcaccgccgagctccggtccgccgccgtcgtcgccccggaccacctcccacctcggcgccgcctccttcggcttcgccgcgtccccgccgacctcgtccacctctccgtttcggtcgccgaccgccggagcaccgtcgaccccgtccacccgagccgcgccgccgtcttcctccgctccggtcgccgtttccgtcgtcgccgtcgaaccggggtgagccgtggaccgccgcttcgtttccccctttccctcccctctctcggccgctgctccgccgtgcctatggccgccgccagcgaccataggggcgcgggcgcgccgcctcccgccgctgcgccggcgtggccgccttcgggcgcaccgagcggctgccgcgtggggcccggccgtcagccgcccgcgccctcgggtgcggctgacgcgtgggacccacggcgccggccggtgcgagccccggtgcgcccggtccaccgtggaccgtgaggctgccgcgtgggccccacccccgtggacccggtctgcgcgccccctcccctcggctgacgcaataaaccttttttttaattaaaatttaaatgaagaaattcgcaaatattcatttaaagagcatataaacttc

SEQ ID NO: 21839 - DNA, 1246 bp, Oryza sativa
acagagagaggaatgtgaaaagcctgttctaaactctcgagctctaaaaagctttgacaggagatgtccttattcttagcaaaagagaatagggagttcatttcatcttgtaaaaacttgccagaccagttatctttccagaaaagggccgtgtccccattgccaatagtgatctttgagactgctctgaagatgggaatcaatctaaaaatgtccttacaccaaaaggatcctttttatgtgtgagcatgaggagagtcagacaaagagtattacttgttccatattagttttacctagggcaggtcttttttgttgaagaacttgtccagatgtttggtcagaagggcaatgttttacagttccaggtttataatgcccaaaccacctttcttctttggctggcatactaggtcccatgtagccaaggagtggatcttagtgtttggatcatttgacttcctccaaagacagtgtcttcttgctctgtctatgtgttgaatcactttttttgaagcttaagagtgcacatgtagaaattagggggagcatatagaacaaaatttaccattgttagtctctgaccatgattgagaaaagcagctatagatgggagccatctctccactctgtcaaccagaggggcaaagtcaataatctttggttttgtggtccccattagtaaacctagataagtgaagggcatctccccacttgtgcagccaaaggttctagcaagaacttccattttttgactgtcaacatttatcattcccatttcggaggctattctgatttatttctagggatggaactttctgagacaaaccgatatcgatgtgccatttcagagtttaataaaataacagacatttatcattattacattcaattgtgtgcatataatattccaatgactaaatcccttctttataaagttatgacacactaaatgcaattaagaccctaaatctcaaacctcaatgttccacgtcatcatcaattctcagccgttggatcactagattagattacattttaggcgttggatgaacaaaacgcaatagccaccacatgaggcccatgtaccacgtgaagtacttagggtttcttctttgattagtagggtctccttgtggagttgtggtgctagaggcagctggttttctccattgatggcaagtggtgccctggcgtgcctcgcacgtggtgtggcactggcctgatgaaaaaacaacatgcatta

SEQ ID NO: 21840 - DNA, 15815 bp, Oryza sativa
  unsure (1)..(15815): unsure at all n locations
taatttgcagggctcatgtgtgctttttttgtttacactgtatctatttgaccatttgattgtttaaagttagttgtttcttctttgctttgtagatccaaccatatgttgtcggatgattcaattttctgttacatttgttccatggaaatattttcagatgtgcatgtcatatgttcagcacactgcctgaatgaggatcatattagtgaacccctatgatcttagcttcattagtatcttttcacaacaagtttatgatttttattattgtggtttcttaacctaattgcgtagtatagttaatttttacctacatgtgcacactatcatctcactatatcgatcaatttgtatcatctgacatgattctattgtaaaatcaatgtgtgttttgattatattttgatgatgaacaattggcatggtaggttattggttttgatatttggagattattggcgaagtggtttggtgctaattatgtgctctggtcaggccggatagactaggccggtcagaccggcgtgtgttgtgcggtcaaaccgaccagcctgacgatctaactggctggtttctgactggaatcggttttgggttgtttaattggatatctgtgattattgttgatggtcattaagtgcgaactttcactatcaactcctacataaaagaataccaaatataatatcaaacttattggtaggggtttattactaactatttcctctagtcttggtaaatagtggtatgtagttgatttctgaaggaaaacacactcgtcatgcgattaaatgtacctctgaccaatcatacgtaagcacaaggatcggagagcccacatgtcagtcaaaatcgactaaatttgagctaatccattgccaaccgccataatcactcacctggcatacactagagaatgtgggtggctagatgcggtgtgcctggttcgatcgaacgaggggttcgaccaaaccaaggttggcaccaccctcctcccctctccccgccacctccttgcacttggcgacccactattggttgttgatggtggttgtgggtgcaccaacctccacaactgtcattccaaccgttatatggaggctataaaaggagaggctcaactcacatccaaaacacacaactcaagtgaagtacaactcaatttcatattttaggcatcactttagtatgtggaattaggtagatagtaaggggaagctctagaaggagtgtcccaaatatcgacgttctctctgggaagtccggaggagtgccgggttcgttgacattgttccactggaattctagagaagcgcatgtgttgttggccttcttgtcaagcttgttcctcgacggatgcttcttttaataaaataagtattcgagatctccttatggtatctaatttatttgcttgagtgagacatattcacatcgttatgggttcctcgcttagttgaattattaagtgctctagtactaggactctggataaagaaggaagttcctaacttcctatgcgaggctagagtagtaatcaataacttaggcatggtgtctaggttagcggttacattcatttgttgtgtggtccacggaaagtgaggtaggtgctaggtggtgacagctttgtccgtcctttacatccctccatgttcagttacatcatagagtcataggccgaactcagattgacagactaggggagagccagtgcccaaagcaatcgatagggttttacctttaactccagtctagtaaattaacccataggaatcctctttagccttagcccatcattagttgttgtccttgaatagaattctactcttacatatacacacacgttccctgtgattcaatacccttaaaatactctgaggtcaagtgctacagcggtctccatatgcttgcggattgacctgtgccgtatcaaataccaacaaacatttctagcaccgttgccaaggaacggttgctatatcatattcgaacctgattcatcctcgtatcttttcatttctcttcttacctaccatggagcacctttcttttcaaaatctttctattccaagggccaagttatgtgagtcacctttttcttcaaaacctatccattcatctagctataaattccatactgattttatagccatggttcgggaacaatccttcttaggacgtgaaatcgaaaatccctaccatcatctgcgttagtttgagcaattgtactcatgcttgacaatcgcgggcatgacacaaacaagcttaaattggaaattgtttcccttctctcttatagagggggtaaagcaatggtacacccataccggaagaaaactgcatggtgaatgggaggaatcaaaaggtaggttctaccttgatttcttcctgttaacccgtgtagtctctatacataaggaggttctcaacttttgacagaatgagaaaaaaatccaatggtgcagtatgggctcttttgttcttgttaactcaagacagcctagatttgtctgcacccgatcatgcgttgttataacactttcactcgggtttagataaggagtctgccatgtatctcaatacttccaccggaggttcgttcgcacacaaaacgacgttagaaagtagggagctcttggattgtatcctagagaacacctccttcgttcgttgtgaaaccgtcttgaaaataaagaatacacgtgaggaaccatcgacgaccgatattggattcgaccgttgaattctcacccaaacctcgagaactgaaggtagaagaaattcaacctttgaaattcccattccagtttgatgatgatctttttgaacattatggaaacacctcaaattattcctaccaaaagagaccaccggtcccgtgtaattctcccgcaccactcgatgagaatctcttcaaagagacggtgcagaaattaactaccatcatgagtgatgagtggttaatggagatggaggtttcttctgaagtaattcatattagctcccagtccttaactattccatatctgatgagagaggccatggtgcaaactctatataatcccactgttggtgcaaacattatgtctacaacctttgcattaaattgcttcgggggcgaactatttgcgccaacaaacaaaaacttctggagcccctctagtcccatcatcgaaggttatgggattcttcgtagagtgtcgatccagcacaatgatgtcgaagctatcctcgacttcaatgttttgaaagtctcttatttcgatcttttcgttggccatcccatagagaaacttctccttgatgtgccgcataccggagtccttgacattaaactcgggaaaatggtgtttttcattttgatcttgcgattgaaaaattctatgatggaacccattcctgattccgagccaattgaggaagtgatggctatctctccttttgaggcccccgaatccctcctcgaaaatgatgccaatgcattcgtcgaggagctaggacgatcatagagagatgatcgagttacccaaaactgatccacattcatgacctccagatgagctcaaatctcttctttcaggctttccttataccttcttgcatggtgatacggagtcgcccgtcaccatcagcgacaagctgtctactgacgagacctccaacctcaaagatgtgttagaaaagcatcgctctgttctaggctactcacttcaagacctgaaggggattggactggaccaacggtcaacaataaccggagcctctttgttggtctggctggtcgaggccccaattcaattctcaaggcgcatatgcctaaccattgggattcatcgtcaggtcgcaggggctgagagatgcgcgctagctaacccaccgtctcatcgcttctgttggtagcaaatattttattaccgactatctaaccacttgaccagctaacagagagcttgtttagtttattcatcaatccggacttaataactatgatatcataaaaaacataacagtatgccacctggtgtgtatattttttagtgacagaacggtacgtggtaccaaaacggaattaacaagcttaactatgagcgattcctttcctgctagttcatgcgcacaatacataattttagcaatatatattttttcacactctcaactaaatgatccaacagaaaaatgtagataaatcacaatcatatatgcgaaatcttagtattaaatattatgatcaccggaggtgcccatgcataaataaataatatgatgaatacatcattaattgccctcaattgactgatatgtcaatttcgttacttttttggaacgagacagaaaccgcgatgttatgagatagagatccgacatgactcatgagtgtcatcagcaacaagatattcgactaaatttcaccgtaataatgatcattattacctaaactaatatatgaaaaatttcatatatataacccactaaactttaaatggaagttcatccaacacctctaaattaaaaccagataaccaacccttaaacttaataacaccgttcatattacccctatcttctcctctaactaatgagattttggacagttaaccgtgtcatatattaaaaacaaaggtagtatatttttatttgaaaaatagatgtagttcgtactaaataatttaccttttttatgtataagtgcactttgtgaatcaaaccgcctgtctacaaattactccctaacatattatttggatatttagttttccataatatgcattacttgattttttttctcaacttccaagtttaagttatactcagcatgtaactaccgaataaatatacacttggacttttcaacttgcctttgtctattcagcaataatttaattacatggaaatactatatataccaagttgttggtaaactaaaagtcactagtcgtgtgtacaaaatattctctttttctagcaagtacaattggcatagaccctaatcacatcactctgatcacactagcagtccagcacaagcattcacacgtgtgcatccttaatatgtacacgcttgaaatattgtcaagggcttagtgtgtactcctaaaaacaccccatagcttagtcatgcacatatccactgaatgcgcaggcgtgtgtactcctaaaatacatgccaaccacacatcctagctactggatataaatatctgaatttacattaaccagatttaattttcagcctttcatccacagacctcatgtgctaattgatcatgatgaagcctcccaaagtatgcaaagctgcataactaaaaaaaaacgttgtaagtttattagcgataaaaaaaatattttatgagtaaaatttttatatacacgttttagtaacttaaaagccaatgctaaattacgatgaaaaaattgaactctaaattaaattttggttgcggtcaagtttacttaagaagcaaacgatggagctgtgtctacatcgatcagtccagatggagacattatatcatgtgtacgacacaatttgaaatggaacagcgctagcggtcgacctgcaaacgaaattataaatctcatgtacggattagcacatgcaaattaagattaagaagcgtgcaattaagggaaaaccacacttaactatgtggcgaactctagaccaatacgaatctggacatatatagccagattcgtattactagaatgtagcatccagtactagtactagtttggtttttatggaataaaggaagtaggtaggattgttttttttttatttgtagtattatagaattgggatactaccataagatctggatagttccagattttacaaagtatatatttttatgtaaaatatataatatgttgtataaattaaaacatataaattgattttaataaatttaactggtttttaatgtaaacttaagtatatttattcatattattttcaatccaccttattttaaaaaatattttgtaggatcgtatggatcgtagaatcatgatactacttaagatttcgtagaatggtgtgtaaataagtagtaaatcgggatgctatgaaaattaagatactaggtgggaataatagcgtgcttagtaggatcgtagtatcgtaagatataggatacggatcgggatactgataaccttacactagacttgtcttgtcgtatgacatcattgacatggatagactaccaggaacaacagagagatttatcacgagttaataccccctgaaaatggtatatgtacctgctgcaaatgtatatgccctgaaacctgaaagtgtcaagtagcaattaagaaggtggtgcattatgtggcatgccttagaccagaacttttttttaggaaaaacatcaaacaataacttgcttgataacaatggatcaaccaagaatggtacttgaccaaaagaaaaataaatggtttgggtaaaagaaaatgctggcatatttgtttaggcaattttagttactttttttagcatactataaataatgcccgtgcgttgcaatggataaatgcatttttttagcgatacaacagctattaagagccgaggaataaattgaaacatcaatatcactatatacattataattgaaaaagtgttgccttctacctcccttcactttacttgcctctccttaacttccggaagacagtttagtgcccgtccaatgctggagcaaataatcccatcaaatctagccgaatatttctcaatctcctaaaattaattgagggcttttgatccacttaatctcttaattcagtttttcccaaatcggagtgaatccataaactcgtgataaaaatggctaagagaatatcgccggccgacaaagcttaaatctaatgaattaaagccgaattgaaaggggaaatcatgggaaacgttaacaatggagattaaatctggtgaagtaaaatggaactgtaggaggaaatcaaatgatgaggggtagtggggaatcaatttttgcaattaattagggtaggaaacgcacggagagactgatcaatgttacggcggcgctagggtttggccggacaacagcttgctagggtttggcccagcaacagcttgagattaaatcctagcgacggaaaaaaaaaccaagtggattaaaaaacttaatcctcaccgcgtgcaaaaaaaaaatatgactacaaaaatagtgacagaaaaagcttatgaaaaaaccgaaaaaaaggcgaaaaaacatgcaaaaaaaatgatgtgtaaaaggtagtggaaaaaaaagaaaaaaaggacgaaaataaagcggacagaaaaaacgaacaaacagcgtcgaaaaacattggactgaaaaaagggagtcggacggaaaaaaaaaaaggaaaaaggtcgaaagaaaaaggccggacggaaaaataaaagaaaaagggttaaacaaaaagaaaaaagagtgaaaaaatacgacggacaaaaaaatcacggaagccttacattttttttattacatttttttattagatatagaattacgagctccaatggttcggcgacgatgttccagtgtgcacaagtctattttcatatctcaattcattccctcagctcttctctcttaacttttgttttggttttcttttttacttatatatccattaatttacactaatatcttctttttttaagagtcaagtaagatgatcacatgttttaaagtctcatttctttcatgcaaccaatatttgtaaaatttagtgtaaattatacatgttaaagtgtgattgttttttatgtttaaatctttgaaaaaatattgacaatcctagatatatatatataaaggattgttttgcagtaggtagtacgcattcataatgaatcaaatctccaagatttatatatgtcatgtatttattatttactaagctaggacgctctaacatcaatagacaaaagcataaacaatatgaactgttatattaattgtaactggttgagattatgatggtgtagattataatcgacataactatacaaatataagtggatatatataataagctgaagcaagaactatgtatataattcagttatacttttgaatatatatcttcacatataattacaagaaaatcagctagttagtctaatttcaacttgtggataaatcattgaagactaaaaggatagcaaaaacaagtacacctggtatatttgttaggcctagtttggtttgttggccaaacaaaccgtatccaaattttggtatgcgaaatgttggcccattttggcatttccaagtaattttgggatgtgtttggtttgatgcagttgctaaattttggtatagttttaagagtaaaagatttcagaagtactaaattttggcatcatatatagcaatggttaatatgtgtttttgtttgttgccctaccaaaatttgatagtaccagaatttggtaaggttaattaatgaaaacatgatcattgggactaattaaccatgtttgctaagtgcggaaggatttcaatgccgatgattaaatgtgatataatgattcatccatcaagaagttattcatcccggtgattaataaatgggcgtctaagatacatactaaaggtaattatccagtcttcaacaagcaaagtgaagattaaggactcctattcactagtttaccacatcgaaggagttgggagtgatgtagtcattgaatagggttttactccaaactataaagaggggtaaagttagtagattgtccaggaagctagtgttagtaactcatgttactggaccttgggttgaagctactagcccactgtggcccatccgattggaagaatgacaatacaaaagaacaagcatcagtcagggagaggggatcgatcgatcagaagaaccggacggcggcggtggtggcgacctgaaggccggtgggctccttgtcgatttcttctccaccattcctcctacctccacccccttagttctagaaccccttctagaacttatatcccttttcttcttcccattttctccaccaaacaaagagttgtactgaatatttgttgcaatttcgcttagagaagtgggtctctaagggtctctaacagctaggtgtgatgcacactagcgccgtgtttagttccaaaataattcttcaaacttccaacttttccatcacatcaaaactttcctacacacgtaaattttcaacttttccgtcacatcgttctaatttcaaccaaactttcaattttggtgtgaactaaacatagcctaagcctttttctagcacaatatctatgctttttccctagtggagttgagccggagcaaagtttggattgcgaatcattaattgtccttgagtctcagtgtaccggacggtccagtgccacatcaaacagtccgtctaacggatcatgtgttgatgaaagcatattgtgtgtacgtgtcaggtaggccgttgttgactagatagtccagcatgttttcttccaactggaccatgtgtcgatccaggccataccgtgtgtacggtccagagaatccaactgcgtgtcagactgtctggtggatggatcgttcgaccagaccatgtgttggtcctgaccgtgtttgtgcacatggatcggacagtccgacagatgacggatcgtgtggccaaacaatgtgtttgtctgagttaagacattacatttactggacagtatggtgaaaatcaggcaatccactcaaatcacatggaggaggcctaaggattatatggattggacaatctggtatgcaaccggatagtctgccttatacatgggtcggatatatagttttgatatgagtaaattgtccggctttttatggtctaacggctagttacatgtgatgattgaaaagtttatataaagggacaaacagtcctacaatacatcggactatctaaatctatgctttttttttttttgcaacacacttgcaacgactagtttgagtggttagggttataaatacccaattgtttagacttcccctctagctttctagatatagtgttaatacaaggaagcatcatcttgttattgttggcatctcgatgcgcctaaacggttgtggaggtggttcctgtgatctctcaagaatattgtggaagactcgggtgacgtgtggggcttggagctcgctatccaaagttgagaagagctagctatctctcgatagtgctcgacttcatgaccatgagacttttgtgtacagtactcaacgaggactagtagagattgccgaatttccgatatctcaggaaaaactcgttgtgccttggtgtttgcaatatctctttttctgttcttcacttgatattcttattagtttcaatatttagcttgttctagaattgttaggatttcaactaggttgtagaacttgggctaactagcttttgaacctaggcacataagctagattttggagttgctcatattgatgtcatttcaaactatactatttttttaaaagttatcaaatatgtgcatccatttagtttttttttaccactctgttaaaaacataagaaatcataccaagacttagcaatattgccaaaattttgacaatgctaaatttggtaaggtttatttgactataatctgaacagaccctttattttctgaatttaagtttaaattcggccacatctttgatccacgtcttagagcatatatcgttattccccccctgacctacccttttctttgtacgcgttaagcccaatgtgttgggctggtccaaagttattgtaaatactccctccattttaaaatgtttgacaccgttcactctttagtacatgtttgaccgctcatcttattaaaaaaaatttgtgaaatatgtaaaactatatgtgtacatgaaagtatatttaacaatgaatcaaatgatatgaaaagaattaataattacttaaattttttgaataagacgaatagtcaaacacgtgctaaaaagtcaacagtgtcaaacattttgaaacggagggagtatattttatacacagaaattttatatgtatgacaactttatgcatacaatgtatgtataaactttgtacatatatggaaaattcatacatgagtagtatacgcatatatacgtacatttttttacgtacaaatttaaaacataaaggcacttagaaaaaaaaattaattactgtaacattatatccgaactttgcacgtataaataaactttatacttatggatcttaaaaaattcaaaatttattttgaaaaaaaaaacgcgcaggtgggctaacctccctcgaattcggtatgatctgtaaacactaaaaactgccaaaatccatatagaaaataaaaaaaaaagcttgatcgttaaacacgcaaaaactaaatgtggcccaaatagcgcgggcgaaaaaaaaagaataagttcatctgaggtcccttaacttgtcaacgaatccgattttcatccttcaactgaaaaaccagtgcagatgaggtccctcggcggtttggatggtggttttagctgacgtggcgcttacgtagctaatttgactcggtcttcatctgacgtagggttgacgtggcgcttacgtggcaattcgatctgaaaaataataaatctcatgggacccacatgtcagtttcacccaaaaaaataaattaaaaaatggtggggcccacgtggccccacatatcattctcacccctcctgttcttactcctctctcaccatctctcccctctgctccctccaggcgccacggggccacgggaaggtccggcggcggcggccggcgacgcgggagaagggcagtgggcagggcgtcgncggcgggagcgctgggtcttcgctcacggcgtcggcgcggactccgcgcgggggctcgtggaggagatcggggccgcggcgccgcccgtctccgatgaactgagctcgtgcgagcgcggtgccgggagctgcacgaccgccgacgagaagcagaggaggttcgaggtgtacaggagcaacgttgagcttgttgagaagttcaactccatgggcaatggctacaagctggctgataacaagtacgttcgccgacctgacgaacgaggagttcagagccaagatgttggggttcagacctcatgtcgcaattcctcagagcaatgcctggagagagcagtgatgatattctgccgaagagcgtagattggaggaagaaaggagcagtggtggaagtgaagtaccatgaagattgtggtgtgtgagaaatagcatggtaaagaaagattcaaacctgtaaaaatgttggagattaatcgatggaaatctgggtgttgtgtggatgcaggttcttgctgggcattctccgccgtggcggcgatagaggggatcaacaagaacggcgagctggtgtcgctgttggagcaggagctcgtggactgcgacgacgaggccatggggtgcggcggcaggtacatgagctgttagagttcatcgtcggcaaccacggcctcaccagtcaccacggaggcgagctagccataccacgccacgatcggtgcgtgccaggcggcgaagctgaaccagagcgcggtcagcatcgtgggctaccggaacgtgacacccagcagcgagcccgacctggcgagggccgtggcggcgcagccggtgtccgtcaccgtcgacgccggcaacttcatattccagctctacggcagcggtgtctatatagggccgtgcaccgccgtccgccgacgtcaaccacggcgtcaccgtggtgggctacggcgagtcccccaacactcctgccactgacgccccgcccttccccgcgtcgtcggccgccgccgccggacctcccccgtgaccccgtggcgctggagagaggagaggggagagatggggagagaggaggggtgagaatgctacccaccattttttaattcattttttttaaactgacatgtcccatgagatttattatttttcggatcgaatagccacgtaagcgccatgtcaatgctacatcggatgaagaccgagtcaaattagccatgtaagcgccacgtcagccaaaaccgccatccaaatcaccgagggacctcatctgcactggttttgatagttgagggacccgttgtatctggtttttcggttgaaagacgaaaatcggattcattgacaagttaagggatgtcaaatgaacttattccaaaaaaaaaaacaaagaatcagagtgatcgtgcgtgcgggccggcggctgatcgcgaaagcgatttcgctatttagaggctgagttggactctcttcgctaactttcagcttaaggaggtaggaaaaagtacaccgtagttcccttaacttgtcatcgagttgcaaaatcgtcccccaaacacaaaaccggatacaacgcatcccctaatttacaaaaccagtgtaaactaggtccctcggcggttttgactctggttttgtccgatgtgaaagctgactcagcgtgggacccgcgtgggcccacaagtcagggtgtccatgtcatcatcatctctttcctcatcttatctccctttctcctctctctctttcccagttttctcatacgggccgaccatgggtgcgaggaaggaaagggtcgccgacgacgagtggtgtggtggtgcggcaacaccggagaaggggcgacgcaccagcggcgagtgagatgtcaagaccgctcttggcgagatgacacaagcgacgggaagggctctgcgaggttcactggcacgggggacgacggcggcttgggggcatcgaggcgccacgctcggtcagaggccacctcagcgtgcgcaagcaggaggagcgctggcacaaggtggcgcgccgagagcggtattgcccaccactgccactcgcccaccgccgccacactcgcccgctcctctgctccacccacgtccagagccgctgcttacccaccgtcgccgctccgtagccgcgctcgcccgccgacgtcgccacttcgcccgctccggccgtgacctggcgcccactgcagctctgccgagagacacgcggtgacggacagggagatgagtggaagagcgagcccatatgagccacagtggaagagcgacccatggagaagagctcgccattgtcgtcgaagtcgagccctaatgagcagccgctccggccgtcctcctccgtccttgcgccatccctcccacccctcaagctctcagcggcggcgctgcttgcacggctccagtagcggctgctccgaccacgggcggtcctcgactggccgcgccgccgccatgttcaagcccgtcctcggtgggaagcgagcgttgggattggtgcagcgaccgacggggagagggcggcacgcttcatctacaagccggcgccgtctaatgttgtcttcctctccagttgcgctgcccgacgtcgtcctcctctcccattgcgcagatcctgttcgtcggccggcacctccaatgagggccaccaccgccgagttgggagcggcggagggcgcagcacccagggggacacgtgggcgagcgcttgagtcgcctctcatcgagcagagaggagagcgaggtgagggcgaggccatcgccggtggcgccgccgccgcgtccgtctccacctccgctcctctccccgcctgtcgtcagccacgcttctcagtcctcccacgccaccgattgccagaagagaggaaaggaagtagtcattgacatgtgggacctacgtgggccccatgctaactcagctgccacgtaggacaaaaccggggtcaaaaccacccaaggacctagagtgacccaattttgtatgttaagggatgttatatatctgatttttgggttgagggatgatttttcagtgtactttttcctaaggaggtataaataggcagcccattagagttcgctcttacttcttctgctaagaactgggccattaggtagatgggcccatttcctgtttgggcaagctgggccagacacagtccacctatgggcctattgggccttctcggggccttacctaagcctgggcctcgtctaccctaacccaccacgggcccgcctccattgcctcctcgctcgccgccgccgccggcgaccaccaccgccaccaccaccaccacccgcaaccgcagcagccgccgtctcttcacccgccggtgccgacccatccagcaaccctcacggccagccacgcgccgcaagagagtccagatctccgcctcgatccgcgcgccgccgacgccgacgccgacgcccacccggacccggatctgcgcgccgccggcacctccccacgcgacggtgcgctcccgatccaattccatctccataccctcctcactctggtgcgaccctctgccctgatggtgtgtccacgccgccaccgacgtctcccgctatgtgaatgggagaaagaaaacgggagttttcttggtctattattagttgcagcaatcagatgacagcgacctgaaactccgggaattcacacgtttttctgcagaattttcttcagagttattcttttcttttcttttcttttcttttttgctaccatggatgctggagttttttttcgctatggaagattcagtctctgcatcttaaccagttatcataccagtgcaaaaaatttatgatacacttgctttggtttggttggagaaggcatcagcctcaagccatcaacttgctgaatttgacggtgtccaagctctgaagcattctattgcttccactggatggattgatggatgg

SEQ ID NO: 21841 - DNA, 5444 bp, Oryza sativa
tagttggctgctgctgtagttgacttatggaatattaaaatgctgttaatttacttatcccaagctgtacatgatgctgttacatgatgctgttacatgtagcttcatgggttgcatgtagacagccatttcggttccccatgtctgacctttagttagttgtgtacaccgaatggcagtagagatagatgcgtaagatggtggcaaatctgatcacatgctgttcaattataccataatgacaaagcaaccattttttaattagctgttcttttttcttaattggttagcttaaagaggtttggtggtgtgtcatggactcatgggaaccttttttgattagtggaggtttggtggcctcttggcaaagcataagaccaactcacacctgctcatttattccagatttctgaccagccttgacacggtaaatttttcggagggggggtagatctgatctgctgggtttgtgggaaggggcatataaggagctgaggcctccctctgagtgcatatcgtaggcagcttccctctgcatacaagaggctgcctcccatttctcttctctgtcggtgttctcctcaagatctgtcttaagttcttgagatctggtaagattcttcatgatctcgtgcatacttctgcggttgatctgtagttcgagtatggaccatgcaagctgtgtggtttcctgttttagttgttcatctcaagatacttaatgctgtgaatctctgaatttgcttgagattcatgccttgcacatatatgatcccttgctagattcagtaacttgatttactctgtgtttgtgccattaaatttgtttcctttcacccctgtttggaactatttccttttattttactgcttgctacagtgctgtcgtcgttgatgaattagaggcattattattctgctcgtaacttgaattcgttagctaaactttttgttagtgttgttgtggtgacggatctccatctgtcattctcctgatgcagtttgacaccaataggcacatattattatcatgaactgctcattggtttatcagtttaattgtgttcctcagaacctgactaaatgtatttcacagcctagcagtctttgcatgtttcttttgacatattggtcattgtgcttgtaaactgtgtatctagatagcttctattaactcaaaaatgctgcttacaagttctgatctatataattacttttagtgcttattcttcaatctcctgaaaatcagttttcattatcacagtttcagaactaagctgagaagatggtgaagatctgctgcattggagctggctatgtcggcggcccaaccatggccgtcattgccctcaaatgcccagcaatcgaggtggtggttgttgacatttccaagcctcgcattgatgcctggaacagcgaacagctcccgatctacgagcctggcctcgatgaggtcgtgaaggagtgcagaggcaggaacctcttcttcagcactgatgtggagaagcatgtcgccgaggcgaacatcatctttgtatctgtcaacacccccaccaagacccgtggtcttggagcaggcaaggctgctgacctcacctactgggaaagtgctgctcggatgattgctgatgtctccaagtctgacaagatcgttgttgagaagtccactgtccctgtcaagactgcagaggccattgagaagatcttgacccacaacagcaagggcatcaactaccagatcctctcaaacccggagttcctcgcggagggcactgcgatcgaagatctgttcaagcctgacagagtgctcattggtggccgggagacccctgagggcaagaaggctgttcaggctctcaaggaggtgtacgcccactgggttcctgaggacaggattatcaccaccaacctgtggtccgctgagctctccaagctcgcagccaacgcgttcttggcacagaggatctcctctgtgaatgccatctccgccctatgcgaggcgactggtgccaatgtggccgaggttgcttactctgtgggaaaggactccaggattggccccaagttcctgaacgccagtgttggctttggtggatcctgtttccagaaggacatcctgaaccttgtgtacatctgcgagtgcaatggccttcccgaggtggccaactactggaagcaggtcatcaagatcaacgactaccagaagagccggtttgtcaaccgcgttgtgtcctccatgttcaacacagtctccggcaagaagatcgccgtccttggctttgcgttcaagaaggacaccggtgacaccagggagacaccagccattgatgtgtgccacggtctgtgggtgacaaggcacagatcagcatctacgatccacaggtcaccgaggaccagatccagcgggacctcgccatgagcaagttcgactgggaccacccgatgcacttgcagccgaccagccccactgcattcaagcaggtgagcgtggtgtgggatgcatatgaggccaccaagggggcccatggtgtctgcatcctcaccgagtgggacgagttcaagaccttggactaccagaagatctttgacaacatgcagaagcctgcattcgtctttgatgggcgcaatgtggtcgatgccgagaagctcagggagattgggttcatcgtctactccatcggcaagccgcttgatgcctggctcaaggacatgcccgcggttgcataataattttccatattccacacctgaacctcatagctctctacactctgctggtgctgaagagagtctgcgtcgaagaggaatttggttgaccatcattttttatagctcgttgttcgtctttacatacaggagaggctaccattttgtcaaacagaaagttgatttctgttagtatctttgttcaagtttttcttgtgttgcaccattgtagatctgaaatcttcaggcctctaccgtttgagtgccaccctcaatcttgtatgatgacatgaattcttatagccgatttattcttcaaatgtattcttgtgtcgctaaagattaatgatgcaattttttcttggccaaactgcagcagtcttgtttgctctggtttcattgtttttggctcggcaataaatgtgtaatatgctgtaactgaatgaaaagattggtccaatttttttggtgctgcctctcctctgaccaaccactggagaagagagccggagatgatccggtgaccggagctagacagcgacaagggtcacaacttgcctcccaattcttgaccaggaggggcagctctggtacttaacacaaatgttttcacaaataagaaaagaaaacccggaacaaataacggagttggacggtagtgatagaaaagggaacacggcaaattcgagtggtatttaagtgtaccatggaatttcatgaaattttagttccaggtatataaggacctataaatatagaaatatgttaggagaaaaaaaacattaacggcaattagacgtgagcaggggcagtaggctaacatataaccacttgtttttttaactgaactaactgttagaataaatgggctaggcccgatttttctattaaaatctcaagggcccataataaatgttaaagaaaataatatcgccctgagaattaaaagtggagtatctcaacttaaatagagagttattggaggctacctgttaaccggttgaggtggggatcggaaagccacacgcgcgcgcgccgagccgagccgaggccgtgggcgtggcgaggcgtgcgtgcgtccgcaacgggtgcggattcctctccgacgctattaggaaatagagacccccggtcagatctctacgctttctcccatcactggttcttcctccgatcagatctctacgctttctcccatcgctggttcttcctccacgcttgcgcctgtgctgcttctgcttccccggttctgattgcttgcgcgcacgaatgatcggaacgagcagggcctccgaaaccacaccttcgcctgagatctgcaccgggtaggcgggtgatcaggtttttaaggagtgcttccgtacaactgctctctcttcatcatcgtcggtggttctgttcggtatgcgtcgcggcaatgtctactggtggcggcgtcaacggaggtgcgccaggaactggagtcgcaccgatcgacaacaccaacggaggcagttctgtctcacaatccagcggagggacctttacagggtataccatcctactgctatctctgtttttgttacatctgttagtcgcaatgttattgcgttctctaaatgatgttgatgcttattttatcttaagcatgctcctggttatgtttaattttatcactagatcacctcacattgttcatgtcatgtttattgtcttaatattttggattaaaatataccgatatatgaccatatttccaacactaacacacaaccatccgaaaattttcaatccaaattgtctcagttaggtcagaaatgtgctcacaaattacttctatagtatcctacaatcccttgaaaataatccttatcataggtcataacatgtgactttatgtgtataacacatttaaatatatataaatatttggttaccagtttgacgtgtagtttcatattaaattcctttattttaaatatgctattttctaaaacaaatcctcataagggatgtatgtaggctacgcatatagatattctttaaataattattaaatggtggctcttcactcaatatttttactttggactaaaaatttttatatgtgttttactttcgaccacctcaactttcttcgttagtgacatccactctctcctctatcaaagaattgatgtggtttgcacgtaagtgaaagacaataatgtgcaagtgttattgtactttagactgttgatgtatttgagatgagagttggggtgatccaaatttctaaaaagacaaggtactcaaggtgaaaagtaaaaggattgattaagttatgatccagagtgaaattttagctataacagttagcccaaactgcatttcgattagagtattcacacttttcatgactctggttgatcacaaagtcctagcatgtctaatagtcaataaattgtagtagtatttcatctctggaattccaaattgtagtttagatcaagttttatcaccaaaatttatccattgtctaatccttttatttcagactaggtacttttgttattttaatttactttggatcaccctgattatcgtttctaagccatatttagcaaactatatagcttgggcacataggtgaggggagctcgcaagcatgttgaagctgatcgtcagaccagtcattgatgtgttcaagaagtggtttaggtgatcagaactactaccatacatctgtcttataataattgtatttctaccatttaaat

SEQ ID NO: 21842 - DNA, 2350 bp, Oryza sativa
ctggaattccaaattgtagtttagatcaagttttatcaccaaaatttatccattgtctaatccttttatttcagactaggtacttttgttattttaatttactttggatcaccctgattatcgtttctaagccatatttagcaaactatatagcttgggcacataggtgaggggagctcgcaagcatgttgaagctgatcgtcagaccagtcattgatgtgttcaagaagtggtttaggtgatcagaactactaccatacatctgtcttataataattgtatttctaccatttaaattttatataaaaaaagcatttgtaataagatgaaacccatccaattagtcagatagagatatcctgccttctgtcctaccatctttccatccccattggcgccaacctttcttttattcagtatgttattatagttatccgtgtttactaaattttataatgcaaatattttagaaaaaaggtagtagaaaaacagcaaaattatctagtttaaaagtgaaaagcttggataaatagtaaaattttggtaacgaaaaattgataacaaaaatgacctaaactaattgttgttttttttaataataattaaaaaagtgctgagttgccgagcagtagtaagctcccagtccaaacatttctcctcctcggtctggagccgctcccccctccccgccgccgctgctctcgacgccgacgccgacgaggcagctaggccggcgacgaacctcgatctcgatccgctcgccgccgtccgtcgccgatccgcgcgccgacaccgacaccgaccttgatcctgatccgcgctccccgcgacgtacgccacggtgggctcccgatctgaccccatcctccatccaccctcctcactctccgccgtcgtagtatatctcaggagggctaccagctgagccgagggaggagaactggatgcctcgtgcgcactcaaaggccgcagctttagcctttaagcttcttttttttttctcttactatggggggctagttgtttatagttagttagttagctcgaagcctctcctgcgtctgcggttgcaaccgattcgatttccaggttggttggttggttggttgtttgcactgatgggaataaacctttatgcataaatagctttgcgtgacttgcactttgtgcagctaaatgtgacaacctgctgttgctgttgctgttgatgttgatgttgctgttgctgttgatgtgcgttgtgatctctgaccaacctgaaattaccgggaggccagggtagatccagttgttttgtggtgagttgtgtggttgtggagaggagggcgcatgatataaagagcttggggtttgctcccctctgaatacaaaagtgacaacttggggaactaggcagtgcctctgcatagcatagatcttcctgtcctttctttcttgtctagtggtgagatctggtgaggattttctcctcaagatatcccttttttcggtttgtagtttgttctgaacatctgtagtttggcatgtccttccatgatctagctgttcgttctgaagatccataaagatattgatacttactgtcttgggaactgggggatatcatttccctttcacccatatgtgaatcaaagtttattttatttagtttacctcttagattcgtcatttcgcttgctgtcgattttgccttctttagctgtgtagtcatgatagaatcgttgcagcaatggatttggtattgtgtccttaggacttaggagtagtttgaccgtcttcccagaactactgctgtttctttctccattcagttgggtggtagctttctcagaaccagagttcacagtcctgcactcttcacatgtttatttcgggatcctggctggtgtgcttgtgatctgcgaaacacggctgcttatgttcactcagaaatgcgcacattcctttcagtttactactctgcaatctccctcaaaatctaatttatatggcaggtttgcagtaagcaggaaagatggtgaagatctgctgcatcggagctggatatgtcggcggcccaaccatggctgtcattgccctcaaatgcccagcaattgaggtggtggttgttgacatctccaagcctcgcgttgatgcctggaacagcgaccagctcccaatctacgagcccggtcttgatgaggttgtgaaggaatgcaggggcaggaacctcttcttcagtacggacgtcgagaagcatgtcgctcaggcagacatcatttttgtgtctgtcaacacccctaccaagacccgtggacttggagcaggcaaggctgctgacctcacctactgggagagtgctgctcggatg

SEQ ID NO: 21843 - DNA, 16014 bp, Oryza sativa
  unsure (1)..(16014): unsure at all n locations
tggtctgctgagctctccaagctcgcagccaatgcgttcttggcgcagagaatctcctctgtgaatgccatctctgcactatgtgaggcgactggtgccaatgtgtccgaggtggcctatgctgtggggaaagacaccagaatcggccccaagttcttgaatgccagtgtcggctttggtggctcctgtttccagaaggacatcctgaacctcgtgtacatctgcgagtgcaatggccttcctgaggttgccaactactggaagcaggtcatcaagattaatgactaccagaagagccggtttgtcaaccgtgttgtggcctccatgttcaacactgtctctggcaagaagattgccgtccttggctttgcgttcaagaaggacaccggtgacaccagggagacacctgccattgatgtgtgccatggcctgttgggtgacaaggctcaaatcagcatctacgacccacaggtaactgaagatcagatccagcgggacctttccatggccaagtttgattgggaccacccaaggcacctgcagccaactagccccacggcttttaagcaggtgagtgtggtctgggatgcgtatgaggccaccaagggagcccatggactgtgcatcctcactgagtgggacgagttcaagaccttggactaccagaggatctttgacaacatgcagaaacctgcatttgtcttcgatgggcgcaatgtggtcgatcctgagaagctcagggagattggcttcattgtctactctatcggcaagccgcttgatgcatggctcaaagacatgcccgcggttgcataattctgaatccccacctggagcgctctgctggagctgaagaaattcgataaggaaacagaaccggtcgaccactattttctgtagtctgtttttgcaggagacagctaccattttctcagtcgtaagttgaatatctgttagtatctttgtcgaagttttcatgtttgcagctttgcgcctttgtagatctgaaatcctcaagcctctgatctaagagtgccacccaaaatacctcttgtatcacatgaacttcttatagccgatttattctcgtatttcaaagacgctacagattaataatgcattttttttgccaaataaaggctgtgtttagatccaaagtttggatccaaacttcagttcttttccatcacatcaacctgtcatacacacacaacttttcagtcacatcatcttcaatttcaaccaaaatccaaactttgcgctgaactaaacacagccaaagcagccgtgtttgctctcatttcatggtttctttgctgtcatttcgtagttttatgcctgagcaacgaatggcagcagatataaactggctgtgcacagtatgctgtaactaaatggaaagagattccttttaagttttgatgctgctaattgctgtgtccagccagttttgtgctgctgtgatcttgccgaccagctttttgtaaaaatttgtgcaagaggaatggatggtatggtaaaaatttggttacagtggtctgctgaatcggttaaggttttgcatttgtgagcataaggtgctggaacttttatcctctcaagaattcagtgccaaaagctattgcaaccttcagcggggccttcacacttctacaggatttattttcaggttgatccaaatatgggaatatattagatcacacatgtttcaactgcataacatgtctgttcgatatgtaaagaaagagcatgctatgcgggtgttttctgttgtgggactggcatagttctgcagcttactgaaaaaaaggggataagcagttttcctttgcgtgtaaatgaattatgcgcattttgtttttgtttgattttcttcaatgttgtcatgctgccctatatgagagcaccacattcacgtgtatcagattttgaaggactggtcgatcaagatgaccacacgtaacggaaaacacaatgtcaacgattagttcaattaagttgctgggtaaacaagattctgaaccaaacaagatgttacttaaacattccaatgtcaagatttctgacaagcagcaaaactgcacggtaaatagatgtatgtgtatcatgctttgctagtatgaaaactgcaatacatgtctatggtgaatcaacggcttcgccagcaggaatgaatgatcacaaccgagatccgttacagatcaatagctgcggccccagaatgaccatttcttcgcaggctttccagaagcaaagcatgtggttcctgaattttggtgcaccgcatcagaaaaggttagttacaagtgcatggaagaatacgttgcaagaaatgcagtaaaagaccgagcaaaagagattgtgaacccaggctatttgtggcattttagctattgcctgcaaagcataccttctgggagatctggctgttcaaatggtgtacacaatgtcttggcagctcccaggtcaccttttgtccgagccttcacatccttctcaacttcctgaaccagcacgaaaatggaagatgcccatgttgagtagaaaatgttagtaatccagtgtaaatagttcataatgttatgttaataactagtgcaacacaggagtatatttggtagtaactaacagaactccagatatcacagtgcaataaattattttgcaggtactattgaatgtgaccctcgaccaagacattgcaaacctcattgagtctccttgctatcccatttcgttctccattctacttaactcccatctttgaactaagctcgacggtgctttaaacttctattggtcactggtgttacccctaccttcccattctccctccacaatcaacagatataataaagatatacaaatacgccttgccccagcaatcaaaagaaaactttgtagaagagaacatgaacacactggatattccaaatagttaactagtgctaaaaaaataacatggtgagagggagatctcataaaaaggtctcacgtacctcttcatcacaccatggagccaggatcaattttttgtcattcagagccactatgaattcatcccaggtgttaacaaccttaaggcaggcatctctcttttgtttcgccgtctcaaacaagtttttctgaacctcatcaagtaacccattaactttctcaaccaagtcagccgtaggaatatcagcttttgcaccattgtctcgcctaacaacacgggcctgaaaagcagatgatgttttcattaactccctccatttcataatataaggcacaactactttttaaagttgttccataatataaggcatgcatgcatgcatgccattaactaacccatcttctctactaaaatattattatttaaattctccaccatcaagatctctaattttattgggtgcatgaattacatttattagattaatccaaactataaggtgataataattatttcttggtctttgggctaagggtagctgtgctttatattttggaatggagggagtattagttggaataaaggttcagggaatagtagcaaattaaacagcacaacaaaatgaaagttactccatccatgccaaacctatatgagaaatggttgagggcaccattcagtcactggaaaagatgtgaaagttgcttaattgaatcaaattaacatattttaagtagaaagaggagaaataggttattaaatgaactagccaactcatgcattgcaacgatctaggataaatataaaatctgaactcaagaacaatatatagacttcggattgatcatcagttcacaaatgatcctattattacgaaccacatgtgcaaatgatataattattcagataaaagaaacacacgtgcatgtatgcacagaacccatggtgatggtggtggtatggcagacttaccatcaccaccaccaccactagctctttttctctaacagtaaagatatagcagttttcaggaaaatgcatgataacaaaggtgcccttagtttatatattcattagctacttactgttttgatgccattaattaatcatattttccatagggaatagagaacaaagaagccatttacacttcatcttatgctaacaagaaaaaccaatttatacaagtacactgatctactaataaacttgtggattctatcatggatatggaaggcattattaatttatcattaactactttatgaagagtcctagaagcattatagtaattaatgtgccactgatcaatgaagttaataaattaaatggtgtgacctctgtacctgattgtttgccatatcttttggacctatctcaattcttagaggaacgcctttcatctcccagtgggaatacttccatcctggagaatagttttcgcgggtatccaagtctgctcgaataccagctttctccagtgtctcaacagtctttttgcattcgtttacaatagctgttgtgtcaacatctttgtatggaacaggaataacaatgacctgcagaggtgccacccttggtggaagcactaaacctttgtcatctccgtgtgtcatcaccatcaccccaatctgcaaaacaagcatagggtcaatactacaaatgtgaacataatttgggtagagaactcagcaactggaaataacagatacatagaattaaagtaaaaataataatttaaaaaactagcgcattctgtattttaaaattaccagagagcttagcactcaaagctagctcctcattcacaataaaagcctcatttcttttgtaaaacattaccacttcaaaagggcaaaacaagaagaaaattccaggtacattccaaaatttaacaatatatgagaattaccgagcgggtggtgtatgcccaagagttctgccacaccatggatcttgagcccttatcattctcaaaagtgatatcaaacatctttgcaaagttttgaccaagacaatgtgatgttgccccttgtacaccacgtcctgtgtttggaatgaaggcctgcaaatatgataaaattttattattactaaatataaagataagtactcttcttcatcagggtaactacagaaaaactaatcgggtggaatgaagcaaacatttcatattaatacctcaacacttgttgtatacagtccaccagcaaatttttccatctcacttttcctccctttagaaactggaactgctaaaaattcttcataaatccttcggtagagttccaaaatttggagaacctgaacattgtcatggattaaaataactcagcatccttttaaattaacaacacgttactcattatttctgttcgctccatcagatattctacaaaatagttttttgtgccaagcaaccactggagataaatacaaccttttcacattcgaaaatgtaaaacaaggttcaggaagtgtaatgaaattgaaatattactgatgtcaaaacgactatttacactagcagtataatatcttcttcctagaatactatgcattgatattgggccagctgttgcttcacactagccaaaagcaggacaatagtacttaaagatagtttacaacagaaacaccaatatttgttaaacaaaagatgctgcttatttagaaccaaaaattccctgagcaagttatggccagctgcaaatggcagcagattgcccattagggaggcccatggattatggagattgctcatatggcaaggcagcagcaaaaatgctagtgctggaaaagtagcttaaggttaatttagcacatcttgattggagagctaatttcttagtgatcatttagttctgacagggagaataatggaacagtattctcattttcctaagaatccccccttcatccatgcattcgagcccacttcaatatggcagttaaccctgatgaactgcggttgcaaaaacaagtacagtacctcttcgtcagcctcctctttagttgcaaaagctgtatgcccttcttgccaaaggaactcacggctcctgcggagaatagttacagaatgtgtcagccagagatgatgaatatatccctattccctagtgcataggtcaaccacctattcgccatcatggaaacaggtggtgtatgataatgctcgtatttacattcactaagaaaattgagatcatcctgactcattgttatgaaactgatgaatgacataacatgcaggtgacaacacatgagcagtataggaatatatacaatattggatatcatggatatcatgcagaaccatgttggagagtgggacatgtaagaaaaacctaacctaaaaattcatatgaacaccaaagttgcaaaaacaagattcccttatcttcctttgtcccttttgtttcaagtaatgtcgagcacaattagaaaagagctatttcatgattttcttgggaaaagagaaaatgataacccttgacccaggattacagaatatttgaaagcatatcatgccactcatttcacataaaagaatccatattcttcctttgcaaaaagtttttcggatttgttaggatgcaggcaatcaggcactattgaggacaaagcttgcaagccaggcactagaggaaatagggcagggaggggtttataaacaattgactaccttatgaatggagttggattgctaaactcccatcgcacgacgttacaccactggttacacctcaaaggtaagtcccgatgacttcttatccatttggagaagtatggatacatgacagtctcacttgtaggacggattgcgataggagcttccagatcagattttcctgatttagtgacccatgctacctgcaagatgaattacaaaagactatgttactgtatcaagttccaacaaatagcctaaaagtaaaatgtgtatgcaacagtttataacaaacaaaacagatgctattgaacaaataatagttgtcatcagcactaccacgtggcatgtccaatagatagtacctctttttacttgacattttagacatcggcacagttctaacaactatgtcaactcaattattcagtctcagtgattatgatcatactccaggaaaaagtgttgcatgaaaggcagtggcctgtgccaacaaattgcatgactagcacaaaaatagttaggtggtcatacaacaggtttacaggccatgtggttcatgtgattaagagcatcatttcatatggcttgggtgcttgaatttgaaatctatccagaactaacctttaggaactttataagagaaacagggagtttcttcaggagaaattatgggtcaaacattcaaagccctgaggtctagtttgcctcaataatcaaataagagaatgaatagtgtcatagcttcataggtcagatagttcgcatgcctatgaatttatgtgctatctcacaaattaattgagaaatattgtgggttatctcacaaacgagttgagaaatattgctcaggtcaagcaagaaaaatcttttgagtgttcagacttcgggctgaaaagggaatcgttacaaatagtttttgctagcttcatttcatgaaggtttgtcaacatgctcaaatgacagacgtacatcctaatgggtaaaatactgaatgatggagtaaatagcatgggaaaatacacacctctggtgcaaagccctcaatgtggtctttctccttctgtaggacattctcagtgacaaacaatgggaaataataaggtttcagcttcagcttttttatttctgcatcaaagaattcctgcaccaaaccgcataggacttagggaaaaagaacatgattatagtaatgccattttacttaataaactgcaaacaaagaaacaaaggcaagatccttgatgctaagaacgacacttttacacaactcaatcagaagttactgatgatataaaatagacatgttgagataaacttattagtccaaaagggcatcagaattagcatttgaaaagctgatttgttaatgtgatgtttgcagtaactgtcaatcagggaaaaggagtgcataaggttgacaagataaatacttcaggcaacactctagaccaacttgtggacagagattactttttgttatcatcactgatgcttaggttacaagagtacaacaggcaacaatgactacttacatttcattgcaaagggaaataaataaaaattagcatcttgattaattgaatttaagcaggcattgagaaaaaacttactttaagcaattcccagatctccatcgcccatggcctcaagatataacaaccggatatgtcatagtactcgatcatttcactgttaacgacaacctgaaggaacaaaaagtaaaaaaaaaaaaaaacttctataagccccctagcaagaatgagatatattttgaatttgaaaaaaaaatgtttgagcttgttgttttgttttggatggcgattaataaatggataaatcaaccaataacagtttagaaacagaatctgtgtgttccattctccagtaacagctacgaaataacttatatagttaacataacagtatcatatccttggagattactaattctctcttcagcaacagcatttgaatagagtaaattgacccagaacagtttcagaaaaccagcaatagcaatagcaactaacagaaccaccaacatttgcactgatgcagaagtaaatctctgttaataaaagttcaaacgattagctaccaacactccctgccagaacttgtcacacgcatctcgaatacatcaccacctttaaattcaattccacacatgaacacctcatcgcacccacattacattaaaattcacccaaatctaccaacaaaacctcgccaaaaactcatgaaaggaaaaggcgagaaaaaccaacctcggagtaccactccccgaagttgtcatccttcttgtacgccatcccgagcttcgtctccttcttcacctccttcttcttccctgcaactcaaccgccaccaaaccccccatcatcagttgaagaacaaaacgcaaaaacccacccaaatcttcaacccaacccaacccaacccaaccacgccgaaccttcgccttccttgccggcggctncaccttccttcccggacgacatggctccgccctgcacggacgaagagacagacaacacggaagtcaaatctcaaaccccggaaacgcacggagaaatggagaaacagcttcggtttcgtggatccgggcgctagctaagcttgcctgctgctacgacgcggcgggatcaggcaaggcgagcgagggcgtgggcgaggcgagcagctagggttttagtagtggtggcggcggcggcggaggaggaggaaggagatgaggggagtaggcggagtagggcgcaagtagccaatggggacagcgtggcgggcgcgccacgtgacgttgctgacgtggacggaggaggtcggggatgggcccggcgtgtcagtgagtctatacacggggttaacgggagtagacgtgggtgtactgctcgtacaattgtggaaaattggtggcctaacacaaaaggtgctttttttttcaaagaggtgatttaattttattaattttaaaatgggcaaaggcacctcaagttcggccgaaattttatattcgaatcctttagcaatacttaattcataaatatacccctacaaaaattaatttatgagggaatggatcacacgtttagctgctactgtgtatagtgctaatggtaaacatcacagcaacaatggtcttatttacccctgatcccgatgcctagagccgaagcagctagcaaactgatgtggttgtgtcaaggttacggatcagacatacatcctatcctatggcttatggaatatacgagtattgtataccttcacgtacacgggttgttttcgtatgcgttgtaggaatccatcatgaattatggaaaatatctctacgggtcgagtgattaatttacaaagtcatactctgtagggatagagtttctattataacatatgggatccgatgtctccaagtcttacttggagatcaagatgatccacgatataaaaaggacccctgggagggatgcaaggcattgaatctcatgccaacacacccaccatagtctacgaagccaaagcccacagagccaaatcgtcgggagatttcatcgagtctatcgactatgatctcgtcggtatcgtcggatccatctactcccattgtattctgtggcttttccatattaatcccatataaactggattatggctattacctgataaggggcctgaaccagtataattcttgtcttatgtttgcttgatgtcgtaatatgtagatcctcgttccaacgtaccccaataccctaatcatctgttctacaagtatcactcgtcgaaggttgacaataacatcaacgaacctattattgaaccattgattccaaaccctaaatcctgaagttagatatatcccagatcttcaatttggtctcaacatgtgttgtacaggggtatgagcaaaaatggagaagctaggtagctactcttctgatgagaaataagacaagggtggcaatcgatgatgttaataacgacatttttaagcctaggaggggattgaggcacaaggccattattgtaggactaattgataaggtgaatatgagaagtcgagcacctaatatctcgatgtacgccgatgacgcggtcatcttcctcaagtcgatacaaggcgaaaactgtgctgatcaaagcagcacttgacctatttaggattgctactaggctacacgccaacttgtcgagaagcgccatcacacatatccaattctcggaagaacagagaaacttgttcagaatgtgctaattacatatctgggcttgccattatgtgtacgtgaaccaacaaaacttgaattacaacccatcctagaccggttggcaaagaaagtggctgttgggaagttgaagttactcttgccagatggtggcatgtgcctgatcaagtaggtactgatggcaatccctatgcatgtattgtcaatcatgcaactaccaaagtgggctattaaggatgttgagggaatatgtagggtttttctgtgcaaggggcaagaggaagtcaatggtgggtactatctcattgcttaaagagcaatctgtatgtaaattgagaagatgtctatatataaagcatctagctctttttggaaaagctcttagcttaaagttggaagtcaaacgaactgagcagaaggggaggccgtggaggatggtaggatggaaacgaaataaggatctccaagacatatttaactcaacagtgatacatgtggtgggcaacggccaagatacaaacttctgaagagggaattggttaccaaacaggggcagcatcactggtaacatgtcgagaactggctaccgagaggtaacatcgttggtaacatgcctacgctcttcagctttgtcagtaggtcaagactgatagtgggacaaggaatagttggctacagatgggggagagatctccaaggatcgctctctaacagagccttggcagagtatttattcctttgggatgaactctagaatgttcacatccaataggggatggaggattcaataatttggaagctgacaagtaatggctagttcattgtctacgctgcttacaacctattctttatggcgacgatgaaatgtccttatggtgaactattttggaagattagagtgctagcgagggtcagattctttatgtggttggctgtaaaaggatgatgcttgatggctaacaatcttctcaagagaggatggctgttcgttgtgccaatctgagatggaagattgtgaccatatgttcatcaagtgtcgtacaccaacagagtatggacaatgctacgagattggatcaatgtggcctttgacccacctagtcagcaaggtcttctatgtggcataatggtgacagcaaacgcaatcttgttttcgagcgagctacatgaacatgctcgatatgcttttcatgatggtgtgctggctcatttggaaggaacgcaacgggatagttttcgagcagaggttaaaacaattgcagagaagctctggagatattaaagaggaaatagccatttggagaactgctggcatatttcaatattgttatgaatagtccgttttagctaatgtcatgatcaatcgctataacatataacacccccttacaatctcaatgaaatttgattggccaatctttcagccgacccgcgaaaaaaaactccaaatacagctacatcaacagtatcatgtatggtgaataagatccatatcagggagtaccctggatacaatatcgaggcataccacaccgtgaccaaatggtacctacaaatttatctgagttaacctaagtactggtgaatgtgatacgcaactggtaaaagaaacgttgtgtgaaggtgatgcggcaagagatgaaatgtaggatataatagcctcgcactttgacccaaccccaagggcattatttcagttaaatctgagtatggaaactgtgaattctaatggccaaagttcaatactaaagaccatgtcaaaaactaatcacttggtattttccaacggagggagtaaccgctttgactttggcaaaattagcatagggcagtttcatcgaatctgtgacagaattaaacaaaccacaagaaagcaaaaaaaaaaaacataacatcataattaggaatttaggatatgcattatgcattcagcaccatagtaacaaaatagctgaatgcatacagataaacaccgctttactgaacattggtagcttgctttgcaaagaatgaaaattcctgcgactcctcgaagtagcttcttttgaagcaccacaagaccaactcatacagcatcaccaactgccagcatacttgacattgagcaaaaataacacgcatccaaaccatcagatttgcagcgcctttggaagtctttcagctgagagacaaggaacacctgcatcagtgatcacaagtagtctgaaggtatatggctgcacaaggtatgcttcattgtcctctgtcgactctcgcaagcatatgtttcgcatgctttgcatgggaaagcatactagcgccttcaaggctgcaagtagagcatcatgaatttaagaggcttgacttgcacaatcccaattcatgtgttaaatccacccaaaagtttacatgaaaccaaatatacagaagaaacattttgcatttcgattggtgatggtaggatgcaacatactactacattaaaagaaaattccaagatatttactcaatgaaacgaaaagacagaacaaaatgttctacggtgcatcaaggttgccagctaagaatcagaagtgggaaaaacaaaaggagtgattgatacttagacagtccactgcaatgagtaattgatctaacgaagcagcaacccattagtaaagcagaaacagactaatgattaagaatgtgtagttttgctttggagtacagaagctccccaacttatctttattggaatattaaatattactaccagcaacaaatcgccaatcactattaaggacctatgttttctcacatttttcttggttctcatacacaatatgataacaagggcacgtgcaagtattagtgaaggtccaatatactgagtaaaagcatcaaactacttatcttttggcatgactattcaggttttacttactttcaacatctccctgcaaattaatttgctaagctcccaaattgcctgttccattcttcataagttcccagttcacttgaggaaacagaaggtctaacctcctgcaaagcagtctcaaaatcctacagatccaaaattcaaaataagcttttaaaatcggaatgctacattttgggaatgattcatcgcaacaaaggacacacttatttgacaatgcaatagacaatgcaatcattgtttatccttttagtgatcataagtgcctagctatctagattccagcacttatttgactagaatagtagtaccttgagcatcaccggccgcatgtcctccttgtttagctttgttatgccaacaccctgttgaagagcttcccttagtggtcccattgaggcatctttcacaagatttttcatgtcagatcctgagtaacctgcagataaccaatgatgcagaaatatccagaaagatggcatgatacctcagaattagcagcaacaagaagaaacctggatgattatgagtaccttctgttaacttgcaaacaatatttgtttcttcctctgtgagcttgaaaaggccatccttctccaatagattgcgaattatccaggcccgtgcctctttaaaataaaccatggaacaatgagattcctgaagttatccccataagaacagaaatagaacattacctgatgaaggaaggggaatatatagacgttttgtaagtcgcctccgtgctgcttcatccagttcttgaggtctgtttgttgctcctgccatcattttttctccatgacatcagcccaatctaagttccaccattggttatgaccccacatttaacatccacctcatagactatgcaacacaacttcaaagcataggcctttaggcaaagatggatatgcaataatgcatttcacaaggacaatagaaaagcacatactatgttgatgctcaaacctcatacatataaatatcctgtaattcctaccatgacatacattaatgcatatcacacttgatattttcatctttttaacgcatgaggtacctataagtaaaatttgatcatttccactgtcaaaaccttccatctcgattagaaactgtgttttcaacctcctacttgactcatgttcaccatctgatttgcgctgaaatcatgtgtaagggtgttaggtgtcaactgatgcaacatgtatgtgcataacaaaaacaattcactaagaaaaacctgtgatagtagtgaatcaatctcatccacaaatatgacagctggctgacgacaacaggccaccccaaatagtgctcgaactagcttttcaccctcgccaatctgcacagcaggagaattaacaatcattatcaatctaaaggtatgccttcacattctatgtcataatgtatttttttttgaaaaaaaaagattgcataattactgtgcacaaaatgggcaaacatagtttgacagagattaggatttctactttctgaggagagggcatataaaggctgggatgagagaattagcaagtgagagagatcacaaacaattgtagggagtacaagcatgttccacgcttgtactaaatcttggttctaatccatatagactataattctttgaaaacattaataagatggatttattagcatataaacaaatgaatttgttttccgtagcacctttatgattgattaaagatatgcagaccagaaagatgtaactagccttgactttataggatacaaatggaactatgttgaaaattaaaacaagcagcagacagacccatttgcttgtcagtgaacttgcagaaatgtagaaaaatgttgccttggcttcaccagctattgcttttccaatcatggttttgcctgttccctgtggaaattaatgcacttatctttaaattgaataaaatgggggaagagcaacataacgggatcagataaattcgacctgcaggcatgcaagcttatagaagacctcttccaggagaccgacaaccgtgaaagatgtctggacgtagcagtggccatatcaccatttccgtcacgcacttctttgcatgttccaaaccagctattgcaggttggcatgaattagctacaagacacaagttctgaaagtactagaatgcaattatgtacctatgtcatcccagcggacattaggatctttatccattatttcattactgacatgctcaattaggcgaggttccagatttctcagcttatcaggaagctcaccatcaggtccaca

SEQ ID NO: 21844 - DNA, 3789 bp, Oryza sativa
gacttaagttgtatgaagatctcacttttgccacttattgtgctagccccagtggcaaaaacaaaatgcacagggcaaaagtgagatacgatctttccttagtggcaaaaaaacaaccctggtttccatgcagatcttaagcttacgattactgatttaaaatgcaaattgaaatcaatgcaacaaatcaatcatatgaaaaccaaaaatatgtttaaagcgctacacatcatactatacagtggctgcagcagattgtagcaagaaatagaaggcctcagtggacccggaactgtacatagagccacagacaactgttgtgcagacacaactacccccggatcatgaccgttatatcagggctacacagagttatttaaaataatggcctaatgggtactccatatgcttgtctcacattgggagttcaagattagcttgcactagtggtcaaggaatttcaaacacactgtattaatagaaactagtagtagtttttaattttttttttcacatttagcaaatatctattatcatactaatgctgctatatccacttgatcaattcatactcttgttctgaaattgttaagtgacaggtaatattgccatccagaaatttacctagttctttaacacactacattgactttaaagcaacgtctacaacaaggatacccagcaaaaaatgcaaaccagtgtccaaatcaccaaacagatgtaagaaaggcaatcatactgaatatgatagtgataatcttagtcatctcaattgcaaaacaaaaaacacattatggcaatgaagtcaaagaaatgtatctcatgtactttgcttctagtaccaataaatctgagtcttagaaaaaaaaggaaaagatgtagtcatgctaaacataagaaaagcaacgagataaatagctatgtaaatgtcatgtaaattgttacaataacatgaagataaaagtaaattcaaatggtatcatatgatcaagatggaaatacagaccattttcttgttgaatctcccattgaatcatcattttttccaatgacccgtgaggtcatattggaagtggatcctccattatttctgataggaggaacaaaattaccacgtaatccacgacgagaattccaggttggccttacaccataattccggttatttgggttgttatcacattgtggggatacagaagcaccttgagtaccattatgcccatacttttgcacagaatccatctcctagaaaacagaagcatcagctagtgaaggttacattgacaaaatattcaacataaaccagaatggccatactaagctctcctaataacgataccacagcaaggcagatgccacatagtgcacaaaaatggtttcacccaaatgcaaactttgtgtgtttagcaccaaaaaataaattataattctcttgctaaaagagttttcttgaaaattttatgatttcagaagaaacaccataaggatctggaaaattgtcgtttttacaaataaaatattcgcacagaatatgctgcaatacatatcatggtttcaagctatgccataagtagaactttatttctaactttagctaactgttacctaatgatgctttcttaggtaacgtgtagaatgctcaggactgcagtgcatgcagcagacagagaaaagtaaaaaaaaaaaaagaacagttaaatgatatggatttgccatcaaccaatggtcattaagaaatgcacaggatttggcacagtggcaaaccagcaagcataaacgagcataacaaagaagctacccattttcaaaactatgcgatgctaaaataatagaaagagtcttggcacgaatagtaaatgcagaagttaaatacacctactatcatatgccactagtgcttacgatgtctttttgttggaggatcatagaataatagaggcactctaaatatttaccaaaattgtacaatatagaataaaagcactgagcgtaccaactttgtcctggcagtcacaaactcattggcaggggcatcggcttcatcattacttaatggagaatttgcatgttcgcagattgggcttctgaatcctgcatgctttcgctttgcattctgcaacagtccacggggtctgtcatcatcttcaagatccatataagcagtatacttgttatcagtatgatttgttctgactccattttcgacagcaacactctcattagatatgttactcactgatttgaacatattcccatcttgtacaacatttgccttcaggggcttatggctacgcagtgatgttagttttctttgcattactaattttgaagccctgatgctaagcttctcattttccatatcagttgagttttcctctacatgcggaccttcttcaatggtggactcttggcaatcagtggtcttctgtatttcagttcatgtcacaaaaagagaaaatgatgataaaatcagccagcaaacaatgacaatttgcaaacaattaacattggaagttgaaagctatgtgtttcttcatatggtgcttcaacaaaaaaaacattaaaaagagttaaatcacctttcagaaatgatgttgtaaataaagaattaagaaaaatggggcaatggttagatgtccctcaagaaggaagaaaattaagaatgagaagtacgaacaataaggtcttttgagcacgtaaagcctaacaacataaattgaattgtaccatttgttcagcagcatgtcctttggatttctgaagaagtgcttgaaaatactttgaacacttgatcttttcaatattaacttctcctgtctttgcaaaaacacaaccaacatccttttctgcaagcttaaacacagcactgaaatcgaaaacatctaaagtgaggactgacaccaagtatcacgatagtatgcatcagagcatcacaaataaacttgaacagtgcagaacaaagctaaagtaatttggtttaacagacaattatttgttctagcggttacattgctcaagtagcacctctacgtcctgggttcaactccccaagggagcgaatttcagacttaaataaagaaaaatataccgtgggggcctccctcactgtttccggtcaaaaatgaaatagacaactatttgttcaagattaaacccaagaagccactcagtttccatcagtgatggcaacttaatgctccaatgcatatggtatccgtaccaccaccaaaaagaaatcacatttccaaaaatttactagtccagtagtcctgaccctgataatatctgctactgctaccatctctactataaaattattttgactacaaatatcagaagttggattcatccttgcagaacttggttcgatgttgcggaattttcacaaatgacactccttaactttcatgcttacttgcttagccctgacagtgatttctgcaacgccacaatcgttatttaccagatcgcagcacattaataatgaagacatgtgtatgtcctgcaacacttatatctgaatctaacttgtagtggtatatgaatatgttagtcaattcaaacatgcttagcacatacatggaatgatctgaggaccttaaaattgaaccaaaacacaggctgatgtcaaccattgccgcagtggtaacctggtgatttcttcctcacttaaacaatgagcacaaacaaaaaggcaaaaatatttcagtacgcaatgtgcaacataagaagaaaaaatgttcttggccctatttatttagacaacaatttctaaacttgagtcaaggt

SEQ ID NO: 21845 - DNA, 7999 bp, Oryza sativa
gatctatcccctgaatcgggatgattgcgccggtctgaccagtccagggctcggtctgaccgacatccagaggcgcggtcagaccggcttgagtcccggtctaaccgccggggtaatacccggtctgaccggccatttggccggtcggaccgatggcgaagtcgcggtctgaccggccatcaggcccggtcggacaggccatctgcgccgctccatcagttctactacttgtttgatctgtaggagcttggctagcactagtagaggctttatcttttaacataaaatcggccatgagagggccgaatttagttcttaaaaactcatcaaatcgaccttcaatagttgcgtctaacttatttttaaaaataaccatggatgaatctattgcagatgcatcttgttgttggatagattgtgttacctcttcattgcttaccaaatcaggagtgagcttaggacgtggcccaggcttgatgatcacgccttgacgagtcctagtgcacgcccttatcaacgcctcatgtgtgatctccttaatgtactcctccatggacttgcgatcttccccttcgaagtcatccaatgtgattggtatcacattggtcggctccacctccgccttggatgacgactgcttcgtcatggcaaagtcgaagttgagttgacattgaacggatctccccagtggagtcgccaaaaatcgtgttggcaacttttttgtgacaagttgacaagcacgatcgtagcaccttatgccttgcggtgatcctagagtcgccaaccaccttgatatagcaaagagctaaacctagatgggtttttacaaataaactggctagcggagccgattttagataactacccgtctcgtgggcaaaacggaaggttttcaggacaaacctacaaagagatgtcgcactctcgcagtggtggcgaacggtttacgacgcaaaccgacaaagatggacaaacctacaaagagatgtcgcactctcacagcggtggcggacggtttacggcgcaaaccgacaaagatggacaaactaagagaaaactaaaagcaatatgaaaaacgattcgattgattgattgtagattggttgttacaatagaaccggccatgtcccttatataggggttggtcttaccctttacaggccctcctccacatccaactcggggtagaaaccaaaggaaacctaaagcatgccttcccgagcaaggaaacctcgagacccgaggaaacacagtccgactcggacctgccggtcagaccggccacacactgccggtttgaccggccctcaaccggtggtcagaccggcccactcggaggaaaccggtagacttccaaatcttggcaatctttcctatattaatcctaggtgccaaatttgggtgtaaacgttatgtattgtgtcttacactttttttttgttatcgattgcaaatggacagaagttggatgtactatattcaccgttcgacactagagtatggggaagaggtcactgcattcctaaattttcctaaattttgcacataatgacaggaaaaataggttgagcaaatatatgttgtgtccatgtggactgtaagactaataaaatgttcgagaatagttcataggtgcattctcatttgatccttagaggattcatggagcactacagatgttggatgtcacatgctgatacatccatctcaaactaaaaacggaaaagtccattttacgccctcgaactcttatgcttgtccaaaatacaccctcgaactacaaaatcgaatataatacacccttgaactgttaatactgacacttaacccccctcccccgcccaagcctgtttttaccgtggtttatgacacgtcggctgctacgtcaaccctcgccacgtcggtgtggagatgcgagggcgacggtggtcggcaggtgctgcgagggcggcagttctaaggtcacgcctcgcctgattccgtacccatccattgtccgccggcctaaggttagagaaaacggggttgctcgcccatttggatgagctcgacacagagctcgtccccatgcccaaggtcgaagaaggttgccgtagcgacgatgcagcgcagaggcgatggcgaaggcagacgaggtgggcggggctaaggtcgcggagggtggagctcgctgccacctgcgtttcctatccacctcaagctcatcggcatccgggccatctccaaccaccaagaccgcccaactacctatgccagggttatggatactacatacccaatactaatcgactaagcttggcagggcccaccacataccatgtcttatacgcaaataaacctagtatatagaaggagttttggataaggaaggaaaaatagagttctacatggaaacgacaaggactactcggattgtatccatattggtctccctagttttacttggacaagggggcatctatgggtataaatacaagccccctaggaggagagaggactagccacaagacatataaatcaacatagatcaatacaagccaacacatgccaagataagccgcaggatatcgatattagagataagtctagacaaaccaaatatggtgtctgcggaggccaacaagagggatctagcgctatctctgatttcgctgagtgcggattcgaggaggaagactaccctgtcgtccactttaagttggatatccataccgccaagttgacgatagctagataagttatcccaattattgtattggtgcgattgtgatgaataagagcaacaccggcttcagccaacaggaatagggctattacctgtcagataagaggcccgaacctgtataaaaatccttttctccatctcttttacctcaatctcgcatataccctgctaccaacaatccccatactatgcaaaataccgtagtcgtcatatgaaacgtcgacagtggcgcgccaggtagggggattttggtgcttaaaggtttcgacgagatgggtataagagatggattctccaacaacaagctactcgacgacttcggctgtgggtagatccaacccgaccggagtatgtcttttgacgagatcggaaccatcgtcatcaacaatttgatctatcgagatcgtccaagcctctacaaaggtacgcaatgatgtcaaactagtacgcaacaagataattggtagattggttttgaaattaatctactaatttcatagatacatccggcatgtatctacaaaggtacgcaatattctatatgtgatttatcatagctattcttcagatcaatacaatattgtcagatcaataatttattatgtctacctagagcatattttttatacaacatctattgcacgagtgtttccgatgttaggccaactacggtttaatgctgggggctcactctattttcttatgtctaaatcatgcttgtttacggtttacataatgtctgatatgtaatctactcattatatcctaataatactagaagatttatgcaattttttcagtacatagtcgatattctctgctatatatcttgtcttcttgacaatatttttcaggaacaattgaacacttgagtaggatatggtcgagtacaccatattatcgagaacgttctcaaaaaatgctgagttgtcgcacccaaccttccaacgtagaccgacgacttatctcatgtatagcaccggctccggctggactatttgagaaaaggttgttaacagataattcctcgcgaacgttgtcggcttgatcacccaacatgattgcgaacagagatcgggatatgctataagttgggtatgtgagtcatgttggccacataagatgcacatgtaataaccaactctagcacccctataggtgattaagagatgcctattcctagttatcaactagactgttgtagcgacatttcgccttctatcaatttaaatttacttgtggaccattgaactccatatattgttgtcaaagactctacgtctctatggtcttacaccgggatcgaccaagtgagtacagcaaatattgataaggggagtcgtggataacataagatgctttcgtgaatactgtttgtttccgtatgcctatctgcctataggtgatcgagatacgcctacacctggttctagaccagtagatcgtagtgatctctcatcatctaaaaattcatcttcaggtgatcgagatacgcctacacctggtcctcgaccagtagatcgtagcgatctctcaccacctaaaaattcatcttcaggtgatcgagatagacctacacctggtcctcgaccagtagatagtagcaatctctcaccacctaaaaattcatcttcaggtgatcgagatacgcctactccctgtccttgaccagtcggttacaggaatctctcgacatctaatgcgacaatcaacatcatcgtaatagcaacaatcaagaccgactggatcgtcgttttcactaggacgacattgtctaggactaatgacataaggacgacaacggacaaggttaacgacatcacgacatcacatgacgacgaagaaactcgagatccccagacttctagagggcccgaagacaaggtagtaggtccaggagtcgaacctctgactacgataattcctaattgtcttcattgtcatcaggaggcagttctcgcaggtcacgagaatgtcgtccatctattacgctggattcccttcaaatggtcgagatatgactacgactggtcttcgactagcaatgtagcaatcatcgaggatcatcgcaccacgacttctaatggtcaagatatgactacaattggtcttcaaccagcaacgtagcaatcctctgtcgcgcccggaaaaattccttttccagaacgctagtgtattaatccccgtcctaggaaaagccgaggtacaccaaacaaacatgatacaaaaggcacatctttattatatcaataatatttacattattacaaaggcacttcaggcctgacaaacaaaaataaacaacagcggactagcgggcctacggctccatcttcacaggcgctcaacaggggtataagccaggactccacctaggacttcttcttcaaagcttctcttactgaaggggggagagatagagcaagaatgagtataaccacagtactcagcaagtcacactgggagatgcatgaataatgcaagggggtacaaggggtaataatatagggttaggttttgcagtaaacagcatttaaaagtcacttagttgcccaaagctattttataaacacgatcctatagctacacaatattattaatcaaggccgtgaaccctggcaacccgaactgggtcccagctcatcccaagccaacctaggccaactattacacattttagttgttaagtaagttttaagaattaaaccactaacttgggtacattgctaggcttgcccataaccgagggcgtggctattcgaatagatttactctgatcagaggtgtacatctttacccacaagacacatctttactccgcattctatggccttggaacccgtcataaacatgtgacataacccttcacccatccgagctgtgaacaaaagtaccgacctatcccagcctacggccggtattctggacaggcaggccaggattgagcccctagcaataggatcaagaccgggtgcgccacacacataggggtgagaccacccgcgtactagtccagtgccatggcatctcgactaacgggcaccgtcccgtgtagccttcatttgcctagacatctcgattaccgagccacagctcatgtagccttcatttgcctcagagatatccaccgtcgcaacgatttcatccacctctatccgtgtccttttgttcaggactagactgagcaccgagttaagccttacccattagacatgtggttagtacggtagtgctttgcaatagaggcccgaagactggtccttatagtggccgagatgctactagcaaaaccatgcacctcgagcccagcctaaaaccattttgggagttttgaatagaggggggaggtgtatgttcaattccatcacaagccaatgtcgacccccgatattgtaaatcggaaatcttctgtgtttatcagtaccaatccctggatcagtagttggtacacacatacatagccgaatcacaacatatcacaaatgaattcaggctaagagagttaaatgcttacattagggccaggcaggccgacaactatcagagaacaacagcggaagacaaaataatacaagggcccggttgatgtcgcgaccgagaaaattgccttttcccgaacgctagtgtattaatccccgtcccaggaaaagccggggtacaccacacaaacatgatataaaaggcacatctttattatatcgataatatttacattattacaaaggcacttaatgcctggcaataaaaaataaacagcagcggactagcgggcctacggctccatcttcacaggcgctcaactggggtataagccaggactccacctaagacatcttctccaaagcttctcttactgaagaggggaaagattgagcaagaatgagtacaaccacagtactcagcaagccacaccggagatgcataattaatgcaagagagtacaaggggataataatataggggttaagttttgcagaaaacagcatttaaaagtcacttagttgcccaaagccattttataaagacgatcctagagctacacagcattattaatcaaggtcgtgaacccacacgagcctgccttagcccaaggcctacgatgattcagaccgaactagcaacccgaccctgggtcccagctcgtcccaagccaacccaggccaaccattccacattttagttgttaagcaaattttaagaattaaaacactgacttgggtacattgctcggcttgcccataaccgagggcgcggctattcgaatagattatactctgatcagaggtgtacatctttacccacaagacacatcttcctcacgtgtaaacacgtgccacataccaccacggtatacggacggaagacgtgacatagttcccaacccatcctagccataaacaagattaccgacccaaccccacctacggccggaacccccgagacaggtaggcaggactgagcccccagcagtaggacaccggccctgtgccatgacatctcgactaccgggccgcagttcgtgtagccttcatttgtcctaaagatgtccatcgatccccgacttcgtccatctccatccgtgtacttttgtttataaccagactgagccacaaactaagccttacccactagacatgtggaagtacggtagtgctttgcaacagaggcccgagcttagtccttatagtggccggggtgctacttcccacaactggcatgcacccaaacccaaccgaaaaacaggttttaggggctttgaaagaggaagataggggtatgtccaattccaccataagccaaccattccatagtatccaagagatatgaatattcccaaagtctaaagttataaaaaccacctaatgttgtccttttaaccagcgaagcatctacctaaagtcatactagtggtaccatgagtagagtgtccactagttggggttttgtttaatctagggtgaacaaggtaataataacaataacaataataataaggtcataacaaaggtaaataggcatggctagataaaacagtgataacgcgggaatttaaataaagcgataatgcaataatttaaagcaacataattttataagctgggattcaatatgttcaaggatgatgtgacttgccttgctcgcttttccaaacgtcggcttcaacttccacgaagagcggatcttccgaagctgcagcgtctacacaaccaacggaaaagaaaaggcttttactctaaataacttcatttaacaagcaggaccaaagcacaaaaa

SEQ ID NO: 21846 - DNA, 14048 bp, Oryza sativa
ataaatacatttgatctcagatctattagaaaatactttaggtattgtatttttaattaaactacttaaattgttctaatttaagtgtatattattaatcagaaggtttaaaaatctatatgatttttttcttaaaaatgtatggattggatcagtgaacaatagctagtccatagattatatatgacccaaagtaatgattatttagattttactaaataatctaatggtgtgcaccaataaaaagtttgctatatgatttagataatataattgtttaaaatttatcataaaatattttttccatctaactaaatgaggaaaataggagataaaggatataggtggggaggtacatacgcacaaccagatgttttgattattctcataatttttattatttttctaatttaacaaaatgtcacgtggcagcgtagaagtgtttgtagaagtactacatggcggcttgagagcgtttacataatgtttaatgggcaaatagctaaatttgcttccatgtgataattttcaaatgaaaatatagttaatatcaaatatagtcgtagtattttccctatatacatctaattctgataagtttattagggtcgggtggatgtttcttgtatgtataaaaattcgaggagggaagaattgtccgtagtatgtacatacccaggagattttatttttctcagtcgtggatagtagcacgtattatacatgtgagaattttttcattttttttgctgagcattacgtatgcacggttctctcgttgcaattaggtgggaccgtggcatggccaatccttcttcttttttttcaatcataattatgtattttgttcctttttttggtgagtagcaaaatacggaagtacatatatgtacgtatatgtcacgccccgatttttgtttgggattaaaaatcattaaataatgcatttctagaaatttatattaaaatttaaatcaatttaatcaagtaaattattgagggtatttaaaatttgctttaaaaatcatggccaggaatattttataatattctatgtgccctaatatattctctggaatttcctgcgaatttttggagctcgagaagtaatttcaacaatataaagttcatttaaccaattaaataaaaagaaaaactaataaaaaatctcctctctccctttgggcctcttccggcccaaggtcccttgttcctccctcgcagcccgctcggcctccctcttccctccttacagtcgggccggcctctccccctcggcccgaccctttgccaagtctatttcgcctcctcccatcacctctgttcctccctcgccgacaggtggacccatgggccctacctgtaagttcttattcccaccccaagcccgtctccaaccgctagcatgccgccattgccgcccccacgtcgccgcctctcccgctcggttccgcctcccgcgctcgcaaccgacggcgtggaccggcttccctccacctccttgaccaaactcccccgctcgtcccacaaaaaaggaggcggccgagccgctaccaccccacgtttgcgccccacttcgctgatcgttgccgccacgcccggccatggttttccctccctgagcctataaaacccttccccggtgtctcctttctcgtttcccctaactcccgagtttccccacgctaaaaattgcgcccacatcgccgagcctatgcgccactgcagcgtcgtgaaaccaccaccaccggcttcgccgctccacgctacatgccggccgctgcaccacctcgtcaaaatagcgccggagctctgtttccacctccaacccgagccaccattgccattcgcagactccgatctccgattgtcgccgttaccgaccacctcgcgccgccatcatcggtggccgtccgggcaggccgttgccgccgctcctgccgcgcgcctctcccgcgccgtcgccgactatgctgggtcgccggctggccgcctccccttggtcccagccgcagccgatctgggccatcggatcagcctcggtctccatccgggccgtccgcgtggcatcccctctcagcccagcgtcggtgcctacgtggcgccacgtgggcgccaccttctccatgctaggctgccgtggccgccacgtggctgccacatgctgctcccgcgcctagtgcgcgcgtggaccgggtccaccgtgcgcccacctcccttgagccactgatagatggggcccggttgtcggcgccacctatcccctcggtgacatcataaatgatttaaattgcactataaatcattattaattctagaaaatcatttaagtagctcaaaacttctattaattcatatctaattcatacgaactccaaattgagccgttcaactggcaaaatgcatctaaaattgagttctacatgttcgtttacttttcatgcactatttgcttttttttattagtgtttttccttatattgcgtgccagtgtgtagtttctgccattttggaagatcgtggtcgcgaggaaaagatataaggttgttttgaagaagcaaggcaagtcacacattccccttgagcattttgatcctagtttacaaatgttttatcgttatcaaataaatatgcatgttttgccaattacatgagaatagggtttacctatctgctcgcttgtgccatgtttacttgttacccgtccttgtcaaccttgggtgataatttatctagctcgtgatactcatgttgacctagttagaactatatgcttagcaatgcttaattaccactagctcacttgatgggataattgcagtattagtccttttagtatcatggcgagctgcgtgctcgagacatccggccatgtttcattggtcgtagttatccaactaaaatgcgactgaatggtgagctgtgggtgcatggttttctagtctgtcacgaccggaaataacccaacaggcgttccttacgtgcgtgcattattccttgtcccaggaggcaaggtacaccaaaagttgatacagttcagagtttaacaagcggaagcgtaaatagataatttattacatgggcagcgaaggcccagcacacacaaagacaaacgagaaacagcggaagactagggcgacgaccacaggcgcttgacggcaggcacgagctagacaccaaagccttcatcttccagggactcctcttctgggtttgggaaaaattgagcaagactgagtacaaccaccgtagtcaacaagacacacccacaagtgcagaataaatgcaagggagtacaagggagttataatataaagggttagggtttaccgtaaacagcattaaaagacacttagttgctcaaagctattttgtaaatacggtcctagagctatacaatattattaaacaaggccgtgaacccacacgagcctgccttaacccaaggcctacgatgattcagaccgaactggcaacccgaccctgggtcccagctcatcccaagccaacccaggccaaccattccacattttagttgttaaacaggttttaagaattaaaacactaacttgggtacattgctcggcttgcccataaccgagggcgcggctattcgaatagattatactctgatcagaggtgtacatctttacccacaagacacatcttcctcacgtgtagccacgtgccacataccacctcggtatacagacggaagacgtgacatagtttccaacccatcctagccatagacaagagtaccgacccaatcccacctacggccggaacccccgggacaggtaggcagggctgagcccctagcagcaggacaccggccctgtgccatgacatctcgactaccgggccgcagctcgtgtagccttcatttgccctagagatgtccatcgacccccgacttcgtccatctccatccgtgtacttttgtttataaccagactgagccacaaacaaagccttacccactagacatgtggaagtacggtagtgctttacaacagaggcccgaagaccggtccttatatggccgaggtgctactatcaaaaccatgcaccccgagcccagcctaaaaccattttggggattttgaatagagggggcggggtgaattcaattccacaataatcaaaccattccatagtgtccaggtgatgagaaaattcccaaagtttagagttgtaaaaccacctaacgttgcctaattaaccagcgaagcatctacttaaattcataccagtggtaccaagagtagagtgtccattagttggggttttgtttattctagggtgaacaaggaaataataacaataacaataataaggtcataacaaaggtaaataggcatggctagataaaacagtgataacgcgggaatttaaataaagcgataatgcaataatttaaatcaaaataattttataaactgggattcaatatgttcaaggatgatgtgacttgccttgctcgctttcccaaacgtcggcttcaacttccacgaagagcggatcttccgaagctgcagcgtctacacgaccaacggaaaagaaaaggcttttactctaataaactccatataacaagcaggaagaaagcacaaaaatgggttcttgacttcttaaggaaaaattagagacttgaacggtccaattccgagttcaaatggccaagttatggccatttgaagtttatatgctctttaaatgaatatttgcgaatttcttcatttaaattttaatttaaaaaaaatggatttattgcgtcagccgaggggaggggcgcgcgtaccgggtccacgggggtggggcccacgctgcagccccacggtccacggtggaccgggcgcacccgggctcacaccggccggcgctgggggtcccacgcgtcagccgcacctaagggcgcgggcggctgacagccgggccccacgcggcagccgctcggttcgcccgaaggcgaccacgccggcgtaggcgggaggcggcgcgcccgcgcccctatgctcgccggcggtggccataggcacggcggagcggtggccgagagaggggagggaaagggggaaacgaagtggcggtccacggctcaccccaggtcgacggcgacgacggaaacggcgaccggagcggaggaaggcggcggcgcggctcgggtggatggggtcggcggtgctccggcggtcggcgagcgaaacggaggggtggacgaggtcggcgaggatgcggcgaagccgaagaaggcggcgccgagggggaaggtggtccgggacgacgacggcggcggaccggagctcggcggcgacggcggaaagagagagcgacggcgcgagctcgattccgacggggagtgagggcggcgagtggcggaaacggtggagggaggcacggggagggtttatatagggttgggagtgagagggggtggccggaggagggggaaacgggcgcgggagtcccggccgccattaatggcgccggcgaggttaggggaggagtttccaaacgaatccgagggagagagggagggaaaaatggggggaaagggggaggggatcccggggaataattcccccctattgattgcgcgcggggcggacaggggcggtgggattcgcggcggtggcggcgctagggcgcggggaaggcggcgggagcggcgggaggaaggggatgacgggtgggccccacccgtcagcgagggtggcgggcgggcccgctcgtcagcggcgcgcgcgcggggagaggccgaatgggccgcggggagaggagagggagggggaaggagatgggccgagccggcccaagagggagagggggggaaaagggactttttagagcttttctttttataaaaccattttaactttgtttatttcttaataattattatttgtgctctgaaaattccactaaaatttatttatgcattttagactcttatgaaatatacaaaaatcctccaagccttatttgacttttaactttgcaccttttaattgttggaggctttcacacggattttaattattctaggcataatttagaggatgtattttagggtcgttttgggacgtgacatagtcgcacccatggcaattaagaagcggttcgcgggatgcactagaggacttaccgcgcttaccacaagcgggaatgggtgactgcttgatctgtagtatagctttcctctggctgacgcatccaggcaagggtaagcgtgatggagttcagatgggccttgcgatggcctatgcggcttgctgattcgcctagccacgaggggggctgctcattgcctgttgaggagtgggggtgaaacctgaggtgtggtgtgcttggtcagagggggttatatgaagggtctcgtcacaatcactcaacatggtgacgtgtccggccgggcgcgttgacatgccggtggattgtgtcttgtgagtacagttgtgcacctctggccaaactaaaactattcaaatagctgtgcccgtggttatgggcgatcgaccagaatcaccgtgattagtctcactcttaataaatcgactcaatgcataggttagttcaggtgggatggttggtcatgttcaacgtggtgtagcgttgttcagtgcaggcataatattatcttaattaatcgaatgttctattgtttgctcaataaaatgctttgcaaccacctttatatcaatagccacaaacccctctttgtatccccttgcatgtctgcatcgattgttggtttggcttgctgagtacggtggtggtactcagccttgctattattctcccttttcagaagtgtagcgcttttgagctgaagacgaagttagaggaccaaggctcagaccctagttgagttttgcctgtggagtggagctgaagccccccgctaggatcgccttttttcgcttctgtcactttcttttcggtgtgaggactaaccggctcttctgtaagtatttacgctttatttacgtttggatctatatattaatttattgttttgtgtatcctggctgattcctggacagagatttaatacacaagatattccggaaatttgggctaaatttctgtgcgtgacagtatatatacgtgggatgtattttaaataaatctatataattgttttaaaatagtgggtccaccgaattgaatgaaaatcgagggttggatgtttttcttttttctcagaatttgtaagattttttcttctttattagagcgccacatgacatcttagaagcgtttgtaggagtaccacatggcggcttgcgagcgtttataggaagtttaatgattttttttatataataatagatagatgctgattctttttgaaaatttttttgacatgattctttttagaattttggtatcccagaaagttctcactccaaaaaattaaaacgtagtacgtattctggtaatgatatatagctagcaggttttcatgaacagttatgcggaaagctaatcgtcaagagtagaattcaatttcttgtaatttctctgggttgataatatttagagcacggtctttaaaaaccaattttgataattattttctattataatatgtataaaactgttaacaaatactccattcgtttcatattataagactttctagcattatccacattactatagatgctaatgaatctagacacatatatagaactaacgtcttacgttgtgaaatggaggaagtatatgattttattaaaatattttttaagactaatctatacacgtagtcactatatttgaatgaaaaatattttagaaatgattcataattaaagattctaaaatttaacctcactcttgtatagaacgacaagtattatcggcccagagaaaatatactatggattctattccaataataaatatataccaatctataaatatattctataccacatacaatccagagttctagactcgccataattagtatttaaaagtggtgctcataggggtagggtttgctgtgtgccttcatagggttgagtctacgtgtgttgtgagtgattgcgttgtactgcgtaaattttttaaaaaaaattaaagaagagttgtgctgcgtttcagacctctacttatagcgcagtagtgccatcatcccattccgaaggaaaaggaagaccgaaaaaaaaaaaaacattagtgccctcactgcattacagcaatggcgcatgctaagagcaatggatatcaagccagtgatgccaccagctcgctcgacgctctgagagagctctacggcaacaccttcgccgtcgtcaagtccatggctctcaaggccgccatggacctcggcatcgccgacgccatccaccaccacggcggcgccgccactctgtcccagatagtcaccagggtcgcgctccacccgtccaaggttccatgcctgcgtcgcctcatgcgcgtgctcactctctccggcgtcttcgccgtccagaagctggcgcccggcgatgccgcagcccctgccgacgaggccgaggcggccgtctacgcgctcacgccggtgtcccgcctcctcatcggcgccgggaaccagggacacatgatgtccatgctgctccacccgaacttcatcacccccttcttccggatcagcgactggctccagcgcgagctgcctggcccgtgcatcttcaagcacacccatggccggagcttgtgggagatggccgacgacgacgccgcgttcaacacggtcgtcaacgacgggatggcgtcggacagtatcttcacgatggacatcctggtcagggagcatggcgaggtgttccaggggatcagctcgctggtcgacgtcgccggcgggaacggcacggcggcgcaggccatcgccagggcgttcccggaggtgaaatgcagcgtgatggacctcgcccacgtcgtcgccgaggctcccggtggcaccggtgtcgagttcatcaccggcgacatgtttgagagtgttccaccggcaaacgctgtcttcctcaaggtatattaattggtctcgcaattctctcaagtacatttccgtttttttctaaaaatttggcgtcacacatatttaacacattttcagtcatttttttatgtgtagttgctatctctgtatatgtttatttctcgtttagctcctactcgacgtaattaattaatcactttcgatcctattctattacatgttgtgcattagaaaatttatagttttattacagtataaatgctggtgatttaaagtttaaagcgatttgttttgttgaaaaatatggcaaacccccttatttttgttgttcccgtattgctgtaacatatgtctaccaaggtacgtgcttttgctatggacagtgtcgtacaaattgtcgatggcgattgcaattaaagtcacgcgctttttttataaacattactgcgtaccaagctttttcaatataattagcagttgaattttggatataatgttcaatcattcagcttatttataaaaatattactcctacgtagacatcatcatttattttgctatgacctattgaaggtacagaggactttaaacatgacttatatattttatagtagtattggagaatactattattgtaaagatttcaaagttggaaaatatcatcgcatatgtccttgacacgttggtcagggactcacatttcattctcacaaatgatggtatttttcaactcatacatctttatgatggtattctcctaatatttgctatctgctatatatttatagtaaatttttaaataaaataaatggtcaaacattatgtacaaaagtcaacagagatatattctacaattatgggagtactggttagaggtttcgtaaaccacacaaattaatactagaagattcagaatgatagaaattcccttgttataaaatatctgagaaattttcatcttaatatattaaaatcatgtgcgtccatacataaaaattgatggctgagatggaaaatccctaccatcaaatctgtttaagatcaaatacaaatgggtcataaattaaagctattcgaaggcaagcatatatattatcagaataatatatgcctgatcaaaaatgaaaattagatacaactgtttagaaaaaagaatttcgtatatatatgcctccactgaaattcactaaatttatcttcaaaattgaatgtcactttcggtgcaaattaaggttgagaccagtgcaatgctaattatatttttgtaattgatgtcagactcttaaattttgtgtaagtcattatactttggttccaccgataagttattcactattacacctttaattcacattgggaattttagaaatgtccaattagtacaaggttagatgtacatacagatacatatatttacagaataatatatagttatggagggactgttatatatttaccttctgtctctcctgatataaatttattatatatttagtggattatgcacgattagggtgacaacgactgtgtcaagatactggggaactgtaagaaagccatcccaactagagacaagggagaaaaggtgataatcatggatatagtggttgggacagggccgtccgaccaaaagcatagagatgtgcagatcttgtatgatgcatacatcatgtttatcaatggtgccgagagagatgagcaagagtggaagaagcttttccttgaagctgggtttagtgactacaagattatgccaattatgggattcaggtcaatcatcgaagtctacccttgaagaagttgctgattcttccatgagcaatctgtgtgtgttgcttgggttgtttgtgaaattgtgatcagaccaatcaaataagtgtgtggtgtagccccaatcaaataagtgtgtggtgtagcttcatatctatgtattcgcagttctacttaatttgcctttgaaaatttcatgaaaatagtaggaataatgtatgtaccccaggacataaatatccgctcacctctgatggcccatcagtgacgggccaaagtgctagtcacggatggccgtcacatttgacgcgttctagggatgccgtcatcagtaagccctttgtctgtggcctgtcagaggtgtggttcagtgacctcaaacgggcaactgtcaactgctttcgattccaacccagtgcactattcacatttcagatgggacaggaaagagggcgattgtttgctggaaatcggaggtaaaaaagaactgtgaaaattattattttctaacgtgtactatgtgttggcaactttttgtgacaagttgacaagcacgattgtagcaccttatgccttgcggtgatcctagagtcgcgaaccacctcgatctagcaaagagctaaacctagatggattttgacaaataaaccggctagcgtagccgattttagataactacttgtctcgtgggcaaaacggaaggttttcaggacaaacctacaaagagatgtcgcactctcgcagcggcggcggatggtttacggcgcaaactgacaaagatggacaaattaagagaaaactaaaagcaatatgaaaaacgataatccatttaccggccatagtaccttctaagcgtcttgccaaactctcgggaagtatttcttcaagtatttcccgttgattgctcgctgaaaacgctccccttgaagtgtctccaaaaaatatgcgttccctcgaacaatgccgcatacccgataaggacctttccaactaggagaccacttaccgaactccctggatcgagtacccgaaggcaaaattgtcttccaaaccaagtctccaacttgaaacaactttgctttcacccttttgttgtatgcctaggccaccctcttcttctctttgtctatctcttccaaagccttcaaacgcttgtcaatgacatcatcaaggtcttaacaaatgtcttgtaatcttcacttaacaaatcatcttgcttgatataacgaagagaaccaagatttacctcaatcggtaaaacaacttcttgacaataaaccaactcaaaaggagtgactttagtggcaccatgtttagatatcctatgcgcccacaatgcttcggaaagcacttcatgccacctctttgggtgttcctcaatcttctttttcactagctttaacaatgtcttattactcgactcggcttgtccattagcctgagcgtagtaaggagaagaactcaacaatttaataccataagattcggtaaaactctttacttccttagacataaaagaaacaccttgatccgtagttaatgtttgcgggataccgaatctatgaataatatgcttcaaattaaaggcaattacctccgtataagtcatattcttcagcggcacagcttcggcctacttggtgaagtaatccgtagcaactaccacgaacctatgcccctttgatgacgaaggataaatttgaccaataaaatccaaagcccaacctcggaacggccatggtttgattatagagttcaacacggcggcgggcaccaattgaacattgccgaaccgctgacaagcttcacatcccctatagtatttgaagcaatcctcaatcatcctcggccagtagaaccccgctctcctaagcaaccaattcatcttgtgggccaattgatgagttccacaaattccttcatgtacctctcccatagccactttagattgatcttcatctaggcacttcaacaagacaccatctatatttcgggatataaatcttcatcaagcaacgtgcatttgagtgcttgccaccgaattttccgatcaaccttaagtgtgggatcttttaaatatcgaatcaaaggaattctccaatcctttaaatatcgaattttccgatcaaccttaagtgtgggatcttttaaatatcgaatcaaaggccggtcagaccgctcggggtcgccggtcaaaccggcggcatgtggccggttataccgcacttggtcaccggtcagaccggccgcgcaacgtcggtcagaccgcccctggtctccaatttcgccaatttcgcacagagatttaaaatcaagcaccggctcttccaataccagaaataatcccttcttcacattatagccagatgcttgttgagccaagtcatttgctctagaattatcatgcctagcaatatgtctaatagtaaaattatcaaaattggcaatgatatccaagcatgaatcaaggtacctatttagtgatccgtccaagcatttataaaatccggcgactcgttgcaccaccaattccgaatcaccaaaagcttccacgtgcttagctccaaccatctccatgatttgtaagccgaataataaagcattgtatttggcttgattatttgtacaataatattccaaacgaaccgatgcttcataacacatgccattaggtgaaaacaaaactacccctatgccttgaccttctttgcaagaagaaccatcaaaataaatcttccaaggtataacttcaactaggcaaacctcttcctcataagcaatatctacatgatgttctactataaaatcacatacattttggcctctcacagatttcaatggttcataagccaaatcatactctatcaaagcatatgcccacttgccaattctcccacttagaattggcctttgcaacatgtgtttaataacattggcttgacaagcaactatgcatgtactagataacaaataatgccttaatttggtacaagcatagtatatgcatagacaaagtctctctataaagacatacctcgtttcggcatccaaaagacggcggctaaaatatgtaataatatattccttgccatcttcctcttgtgtcaaaacggcaccaatgactttgtcttcggaggcaatatataaccgaaaaggctttccagctttaggcgcccgcacaacgggtggagtagataaatacctcttcaactcctcaaacgcttcttgttgttttgccccccatgtaaaatcggcttcttttttcaagcgaagtataggaacaaaa

SEQ ID NO: 21847 - DNA, 3810 bp, Oryza sativa
agccaaatcatactctatcaaagcatatgcccacttgccaattctcccacttagaattggcctttgcaacatgtgtttaataacattggcttgacaagcaactatgcatgtactagataacaaataatgccttaatttggtacaagcatagtatatgcatagacaaagtctctctataaagacatacctcgtttcggcatccaaaagacggcggctaaaatatgtaataatatattccttgccatcttcctcttgtgtcaaaacggcaccaatgactttgtcttcggaggcaatatataaccgaaaaggctttccagctttaggcgcccgcacaacgggtggagtagataaatacctcttcaactcctcaaacgcttcttgttgttttgccccccatgtaaaatcggcttcttttttcaagcgaagtataggaacaaaagcatcgattttacctgctaggttagaaataaatcttctcaaataattcaccttacctagcaacttttggacctccttcttgcatgtcggcgctttgaaatcacgaattttttctatcttcttaggatcaatctcaactcctctctcatgcaccatgaatcctaagaatttccctgccgtcaaaccaaaagcacatttaagtgggttcatcttcaaaccataccggcgcatcctctcaaaagccaacctcaaatcggctatatgttcctccataccatccgatttgacaacaatatcatcaatgtagacttctaagataatacctagtaaatcatggaagatcaaattcattgccctttgatatgttgcaccggcgttcttcaatccaaaagtcatgacaacccactcaaacaaaccaacaaatcccgggcacctaaaagtcgttttatatatatcctgttccgtcataaagatttgattgttgccggcattaccatctaaaaaactaatcactttatgacccgaagcatcattgatcatcatgtcggctataggcataggatattcatctttgggagtagctttattcaaatctctaaagtccatgcaaactctaatcttaccacttcccttcttctccaccgggactatgctagaaacccactccgcataatgacatcgcctagtaaaccccgccttcaacaactgatcaatctcctctttgactcggtcatatagcaaaggattaaaacgacgaggtggttgcttgtaagggctaaaacccggtttaattggaagccgatgctcaacaagctcacggctaagacccggcatctcatggtactcccacgcaaagcaatcaacatactctttaagtagctcgattatcttaaccttttaatcggctctcatatttttgtttacaaaagttggccttggtttagttccatcacctatgtctacttcctccaatggatcggccgatgtaaacccttgtccaagtttctccacttcatcgaaatcttcaatagtctcaccaatatcattctttgtagaccgatattcttgcaccctcttttgtaaccactctaaattagcccctttactcattatacaaatttatatggcttagctgtgctacactagccggctttacagaggtagatacaaatttgccatcggaaatactaataaaatcatagctagaaagatccatccccgataagcattgaatattcccatgatgccactcaaaagtagcatcagccattgcaacctcggccgatgtatccgcttgaacaatctcaacatcatcgctgtcccattgaattaaacattgatgcaaggtagaaggcactcaataattggcatggatccaacaacgacccaaaataacattgtaattaccttgcacatcgacgatgaagaaagcggttggtaacgtcttgtttcccatggtaagctccaccgaaaagatacccttcgcctcctttggttcaccattgaagccattgagaatcatgttggtcttcttcaactcattatctccacgccccaacttattgaacaacgaatacgacatcaaattcacggcggtacctccatccactagcatcctagctatggtctcaacgcccttacgaggtagtgatgagtttcacgcgctctaagcccggccagcgcgcagttaggaggattggccgctatctgagcggtaccacccatcctaccctactacctatagggggccgtccgtcctacagccgcccgaaaaggaactgcagagaccggcttcccatcaatatgacccttgagatagagaggcttcatatgacaatttgactcatcgggtttctcaaaaaccgcatctttaggacctagtgaaaattgagcaacctcggcttcatccatagcacaaaactctataggcaacatatataccatgttgatatccatgtcttcttttgtagatggctcatctttagcaaccgattgttcttccttctcctctacaacaaccggttcttccttctctatggatttacgcctccataccggtggtggtcgcaactcattaaacctcctatccctttgctcttcggccttttgctctcttatttcttgggcccgaagacgttgcaaccttctcctttgagtagccgttaaatacttaggtatccacctaggtttcagctccgttccaggaggtaaatagtgccctctattgagtttacttgatgacgataaagcccccgcattgcccttagcaaacctcctgtcaaactggcgctggagcccggtcagaccggatgtagaccaccggtcagaccggccagatacgccggtcatatcgacatttggtgggcggtcagaccggcctgaggcgtcggtcggaccatcgtcgggtcggcagtcagaccggccagatggcccagtcagaccggccgtatgattgcggtcagaccggctagaaggcctggtcagaccggccgactgcgatgagctggtacctgcttcgggtttgttgcttgaggactctccaacttcatctcaagaaggtattggcacatcatgagatcccacattgatggtaatcacttccgaagttcttgcctccaccttaatacgctttccttctctcttttcttcattggcccggttcttaccataaaaccagccattgtttggtgaagacaaatgctcatggattgtcctccttggtcctccccacccttgattgaattgtattggaggcatatgattgaacattggcggtgttgccccccatggcatgtagtaaggataagtataacccgacggcggcattggatatggaccccatgacatgttttgagaacaattatattgaggtgattccgaccgtcttggtgaatgaccaaattgctccctaggaggtgatcttggtcttttccctttgttgcgagctttctcaccaccttgtttctcgtacttccccaaaagcatatcaaaggtcactttggtcttcctaggggttttagaagttgaagcttcactattattttccttccaaacaccaacctccggtttctttggcactatcatctttggcctcggttcaccaatgacctctccttttcccttagtagattcggcttgctctggccgaatcaacaccttcttatcattgaaattaattgtattcatcggaaaaggatcatgatcaagcttcatcttggaaccatcgatgaacttcaatcgtccttcatctatggccgattgaacctgtcgtcgaaacacattgcaatcattagtagaatgagagtgagaatcatgccatttacactaagctcgacgtttcaattcttcttgagatggtacgatatggccttt

SEQ ID NO: 21848 - DNA, 1287 bp, Oryza sativa
tttacaggtttgaatctttctttaccatgctatttctcacacaccacaatcttcatggtacttcacttccaccactgctcctttcttcctccaatctacgctcttcggcagaatatcatcactgctctctccaggcattgctctgaggaattgcgacatgaggtctgaaccccaacatcttggctctgaactcctcgttcgtcaggtcggcgaacgtacttgttatcagccagcttgtagccattgcccatggagttgaacttctcaacaagctcaacgttgctcctgtacacctcgaacctcctctgcttctcgtcggcggtcgtgcagctcccggcaccgcgctcgcacgagctcagttcatcggagacgggcggcgccgcggccccgatctcctccacgagcccccgcgcggagtccgcgccgacgccgtgagcgaagacccagcgctcccgccgccgacgccctgcccactgcccttctcccgcgtcgccggccgccgccgccggaccttcccgtggccccgtggcgcctggagggaggagaggggagagatggtgagagaggaggaagaagaggaggggtgagaatgatatgtggggccacgtgggccccaccattttttaatttatttttttgggtgaaactgacatgtgggtcccatgagatttattatttttcagatcgaattgccacgtaagcgccacgtcagccctacgtcagatgaagaccgagtcaaattagctacgtaagcgccacgtcagctaaaaccaccatccaaaccgccgagggacctcatctgcactggtttttcagttgaaggatgaaaatcggattcgttgacaagttaagggacctcagatgaacttattctttttttttcgcccgcgctatttgggccacatttagtttttgcgtgtttaacgatcaagcttttttttttattttctatatggattttggcagtttttagtgtttacagatcataccgaattcaagggaggttagcccacctgcgcgttttttttttcaaaataaattttgaattttttaagatccataagtataaagtttatttatacgtgcaaagttcggatataatgttacagtaattaatttttttttctaagtgcctttatgttttaaatttgtacgtaaaaaaatgtacgtatatatgcgtatactactcatgtatgaattttccatatatgtacaaagtttatacatacattgtatgcataaagttgtcatacatataaaatttctgtgtataaaatatactccctc

SEQ ID NO: 21849 - DNA, 635 bp, Oryza sativa
atcccacttttatttggcattgtcacttgggtcatataaatgagaaacgcatggagaagcttcatagagatggacttctacactctattgattttgaatcatttgagacatgcgaatcttgtttacttggcaaaatgacaaaggcacctttcacgggtcaaagtgaaagggcaagtgaactattgggactagtatatactgatgtatgtggaccaatgagctcaaccgccagaggtggttttgggtactttattacctttaccgatgactttagtagatatggttatgtctacttaatgaggcataagtttgaatcgtttgaaaagttcaaggaattttagaatgaggttcaaaatcatttgggcaagacaatcaagtatctacgatctaatcatggtggagagtacttgagccttgaatttgccaatcatctaaaggagtgtggaattgttccacaactcactccgccaggaacacctcaatggaatggggtgtctgaacggaggaatcgtacattgttggacatggtgcgatcaatgatgagccaaactgatcttccgataagcttttggggttacgctctagagacagctgcgttcacactaaacagagttccatcaaaatcactgaataag

SEQ ID NO: 21850 - DNA, 553 bp, Oryza sativa
atatatatatgtacaattcattttctcactagctatagctacgacttcgacgccggcgttacgtcagaagaggaaggaccgacgttatgaattgtcgatccgtcgtagtagaattcaccatcgggattaaagacttcttcgttgatgaaccccattagttgttcttgaacagtcgtgataaaatccttgtgtgggagattttccctcatgtgaatacgctatcattcgaaaaataatgacatatcaatatatgaaattaataaacaacttaacaaatcgatacacaatgaaattttgaatggtttatgtatacgtacatcgagctctcgtgtggtgtatatttggtttgataggcagtgggcatactcgcatacgtagtagccgcataagttagttccctggtcctgctttgcacactacatgagaaacgatgagagatttaatatactctttatattaactataattatagattcaattcaatataattttggatcatgcatgtactcactggaaaataaaacctccgtcaagtttttctttccaagtcccg

SEQ ID NO: 21851 - DNA, 631 bp, Oryza sativa
accccaagctagaatttctgcagcttaagcacaatatgttctctggaagtattcctgacagcatcaccaaccttggaaagctttctcatttggatctagccagcaatggtttatcaggtcccctgcctcagcatttgtcaaatttaacaggaatgatgataaaccatgataccacaaaatatgaagagagactatctggatgtgactacaaatcttttgtgaacatgaagggacaggaactacaatacaaccaagaaaaagtaacagttgtgacaattgacttgtcttcaaattttttgactggtgtaattcctgaaggcatagtttctcttgacggaattataaatttgaatttgtcatggaacaatttgaatggaaaaattccatacatgattggggccatcaagtcattggaatcactcgacctctcgaagaacaatttctatggtgaaatcccacaaagcctatctgatttaacatatttaagttatttgaacctatcttataacaatcttactggaagagtaccatcagggacacaactttgtagcctctatgaccaaaaccatcatctgtatgacggcaatgatggtctttgtgggccacctctccaaaaaagttgttataagta

SEQ ID NO: 21852 - DNA, 636 bp, Oryza sativa
gaattcgagctcggtacccccgatagtccaactgctagagatagagatattagtgtacaccacgctgacatgtcaacgtgttgtgccacgttagttaaagtggcagaaaaaaatttaagaaatagtcttatctctcccgtctgctaaatatgtaacaacaaatccaaaagtgttatttgaagagtggcacagtttggtattgtaataaatactgtagttaagccccccacagtagctctaataaaaaggcagccagtatatatactggatatagctggtcgtcgtctttgcattgtctccttgtccggtacgttggttggctctagcttagctggtgctcgatcgcgaacatcatgtggaggctgaaggtggcccagggcggcggcgctttgttgcggtcgacgaacggcttcgccgggcgagcggtgtgggagttcgaccccgaccacggcacgccggaggaccgagccaacgtcgagagggtgcgccgcgacttcaccgaccaccgcctccgccgcccggagtccgccgatctcctcatgcgcatgcaggtatgtgttgtgtgctcctccggcttgataataattgtcgctttggagaaggacacggtcatctacagaaaacaattttgaccaa

SEQ ID NO: 21853 - DNA, 2419 bp, Oryza sativa
tatgtcactctacccttggattatgttaacccctgcttagaatatgattatcacaagtaatatataaattattagtcaagttctctgtcacgaccggaaataacccaacgggcgttccttacgtgcgtgcattattccttgtcccaggaggcaaggtacaccaaaagttgatacagttcagagtttaacaagcggaagcgtaaatagataatttattacatgggcagcgaaggcccagcacacacaaagacaaacgagaaacagcggaagactagggcgacgaccacaggcgcttgacggcaggcacgagctagacaccaaagccttcatcttccagggactcctcttctgggtttgggaaaaattgagcaagactgagtacaaccaccgtactcaacaagacacacccacaagtgcagaataaatgcaagggagtacaagggagttataatataaagggttagggtttgcagtaaacagcattaaaagacacttagttgctcaaagctattttgtaaatacggtcctagagctatacaatattattaaacaaagccgtgaacccacacgaacttgccttaacccaaggcctacgaagattcagaccgaactggcaacccgaccctgggtcccagctcgtcccaagccaacccaggccaaccattccacattttagttgttaaacaggttttaagaattaaaacactaacttgggtacattgctcggcttgcccataaccgagggcgcgactattcgaatagattatactctgatcagaggtgtacatctttacccacaggacacatcttcctcacgtgtagccacgtgccacataccaccacggtatacggacggaagacgtgacatagtttccaacccatcctagccatagacaagagtaccgacccaatcccacctacggctggaacccccgggacaggtaggcaggactgagcccctagcagcaggacaccggccctgtgccatgacatctcgactaccgggccgcagctcatgtagccttcatttgccctagagatgtccatcgacccccgacttcgtccatctccatccgtgtacttttgtttataaccaggctgagccacaaactaagccttaccaactagacatgtggaagtacggtagtgctttgcaacagaggcccgaagaccggtccttatatcgccgaggtgctactatcaaaaccatgcaccccgagcccagcctaaaaccattgtgggaattttgaatagagggggcggggtgaatccaattccacaataatcaaaccattccatagtgtccaggtgatgagaaaattcccaaagtctagagatgtaaaaccacctaatgttgcctaattaaccagcgaagcatctacctaaattcataccagtggtaccaagagtagagtgtccacttgttggggttttgtttattctagggtgaacaaggaaataataacaataacaataataaggtcataacaaaggtaaataggcatggctagataaaacagtgataacgcgggaatttaaataaagcgataatgcaataatttaaatcaaaataattttataaactgggattcaatatgttcaaggatgatgtgacttgccttgctcgctttcccaaacgtcggcttcaacttccacgaagagcggatcttccgaagctgcagcgtctacacgaccaacggaaaagaaaaggcttttactctaataaactccatataacaagcaggaacaaagcacaaaaatgggttcttgacttcttaaggaaaaattagagacttgaacggtccaattccgagttcaaatggccaagttatggccatttgaagtttatatgctctttaaatgaatatttgcgaatttcttcatttaagttttaattaaaaaaaaggtttattgcgtcagccgaggggagggggcgcgcggaccgggtccacgggggtggttcccatgcggcagcctcacggtccacggtggactgggcgcacccgggctcgcaccggccggcgccgtgggtcccacgcgtcagccgcacccgagggcgcgggcggctgacggccgggccccacgcggcagccgctcggtgcgcccgaaggcggccacgccggcgcaaaggcgggaggcggcgcgcccgcgcccctatggtcgccggcggcggccataggcacggcggagcggcggccgacagaggggagggaaagggggaaatgaagcggcggtccacggctcacccctgttcgacggcgacgacggaaacggcgaccggagcggaggaaggcggcggcgcggctcgggtggacggggtccacggtgctccggcggtcggcgaccgaaacggagaggtggacgaggtcggcgaggacgcggcgaagcccaaggaggcggcgcccaggtgggaggtggt

SEQ ID NO: 21854 - DNA, 3440 bp, Oryza sativa
atccaatggctaaaaacattggttttactggtttaagtaaaaaccaatgattggattttcttttccataagaattttaaagatttaatctatctcattagagcgtcacctgatatcttagaagtatttatagaaatgtcacgtgaactagaatacttcatagaattttactatataactaggaagataacatgtgcattcacgcgggcatcgtattatttagtttcgaaaacagatataacaaaataagttaaaaactaaagtatggtattttccctttttaattgaatgttcgttgtttatttttcttaagaaatcttgacaaaattttagctaacaaattaatttttttttaccatcatgctggaatataaatatcttagatagcgcttctctatgacatgagggaccctacgctatttttaagaaaacacatagtcaacatgagttttaaaataataatttattggaaaaaaattgtaaactttaatcatattgtcataagaaaggctactgattttgtattgccaccttagtagcttatatgtgcaagatgtggagaaacctatggagctactttaaaggacatgaattttttgagttcgttgattcataattgaaatatggttaggagctaaaataattttttttctatagccaggggagtagaatgacttaatactatcttgtgggtgaagtgctccactaaatagttctatatacaaaagctgcaacgcaatctcgtgggtaagtactgcactaaaatagttttgtgcaaaaaggactgcaaaagttattttcaaaggcggcccatgagcgtaatgcaagtggctcgccacaaaggaggctacacatttgagccacatgtgtaaagaatgctcgcgaaaatcatttgggtaacattacaatgaaaataattgttcatgcaattaaaaataagtgtcttaaaattatcattttatacattggttgttgataatccctatttgaaaatagtgatacgtacaaatatttttgtccatattattccttaccaacagccgatggcaattgatagttcctttcggtatgtagcaacattggctaggtatttttacaacttactattgtatccctttgttaagatgcccttgctattttcttatatgctagattttctccaccttggatgcatgtgacactatatatatttcaaataaaaggcctcgtggagttcaaattgatttcggattgtaggagactactcactgtttatgcagagtgcgtgagacttcacgtggcctagcaggaatataatttcctagcaaaaaaacaattccataaaaataatttttattgtggtgtggactttttatgattgccatcatgagttaaatatttttactctaaatatgatttatatacttcaaatgatcactctttataattttcctttagctaatgtgcattggccatttagtaagtatacataccctatacacacaaaatttttgtatacacaccgtgcacaccaactacaatcacaaaaaactgtaaaaaaaaactatgcatgtactttcaacagtacaacaaaaactgaaaaaggatgaagaaaataagatgatcttaagagataaaaaacgaatctggacatttgtttagaaatatttatatgatattgaatgaactatttattaggagataatatatgaaaagttggctagatatagtaagttgatgggctttttaggcccataaaaaagtatttaattttaatttttatggggattaaaaaaagagaggaacggtagttggagggatcgttgcgcaccaaggctgatgtccggacggagattttctttccttgtgaagtaaatctaacgtccaaaattaaaggatccaccaatttaaatgagaatcaattgtcttgtcagatttttactattttgttatagtgacacatgacgatttgagagtatttataggatgccacatgatagcctaggaacgtttgtagtaaatttaatggacttttaatataatagatagataatatatacatggttaaaattaaataacactatgatatctactacaattataaatgggagtacctatacatctttcgaaagatttttattatcgtatcacacagatttttaatctttagattaaaatccgatagatataataaaaagaaaaaagcaattaagaaacaccataatggacactaaattaccatatcctcaagaaaaagaccaaatccaatacaaaatttaaaatttacatgcgaagattcaaaaattatagtgtaacaaaagttacagtataagtttcataaattacactgtaacttacaagaaaatgcactgtaaatttgagtgagaaaatcgagtgagagataagaaaaaatctttcgagtgagatatagcaaaatcgattataaattcgaaagttattcaacaaaaaaaaactatcgaattacaatactgcatatgaactctttattcccagcaatttctggttccataacgaaatgcggtgattcttcgagccctctacttatatatatgatgtgtcccctctgtccatgatcatattcaaatccaaagtagaagatagctagaggcagtgtcatggcgtccactcaaagcaacgagcacggggctggcttgctcgatgctgagctctagctctacgtgaacaccttggccgtcatcaaatccgtggccctcaaggccgccatggacctcggcatcgccgacgccatccaccaccacggcggcgccgccaccctgtcccagatagtcaccagggtcacgtcgctgcacccgtccaagatcccgtgcctgcgccgcctgatgcgcgtgctcaccctcaccggcgtcttcgcagtcgagacgacggagccggtagacggcgcggcggccgacgagctgccggccgccgtctacgcgctcacgccggcgtcccgcctcctcctcgtcggctccgggaaccaccaccagcaggcgtcgctcatgtcaatgctgctccacccgagcttcatcgcctccttcctccggatcagcgactggctccagcgcgagctgccgggcccgtgcatcttcgagcacacccatggccggagcatgtgggagatggccgacgacgacgcggccttcaacaaggtcgtcaacaataggatggtctccgacagccgcttggtgatggacgtcgtcgtcagggagcacggcgaggtgtcccgcgggatcagctcactggtggacgtcgccgggggccacggcacggcggcgcgggccatcgccgaggcgttcccggaggtgagatgcaccgtgctggacctcccccacgtcgtcgccggggctcccgttggcgccggccccggcgtggagtacgtcgccggcgacatgttcgagagcgtcccaccggcaaacgctgtcttcctcaaggtataatgtt

SEQ ID NO: 21855 - DNA, 4535 bp, Oryza sativa
tctatacacagtgaaacattgtgagtacactaggtgaaatattttatgtggaacaacaaataaaacgaattcccttaatagagtatttccaaaatatgtgggtgatttgttgcaacgtggtgcgtggtggggacacgtggcaggagcggcgcagtggtggggatacatgcacgggcgcaggcgcacgcgggaagcgcggcgcgtggagggatcgcccgattgtttggcgcacggatcgggagttcgggttcaagtattttcggatattttatcaaatatcggacgcccgcccatccttggcgtctggcacatccgtcaggatgcgcatcgtatgccgtttacatgttggcttgtggcgcttgcatggcgtatgtcacattcatgtatttttctactttctctctcttttcctttttctaaaatatgtgttcaatatataattctattacaccattttattcgtcataattagatctttataacaagatctcacatggatatattttgataaaaaatatttattaaaaaatcaaacttatgttgcaccgtctaaaaaaagtttcatcacttgtgcagatgtgtcaacccagttcataaaatgttctagagatgcaacatataaaaagtattgactgcaacagtaattatcactacatgaaacattatgtcccaattagtaaaacattgaaaaaaaatcgtgtgatacaatacatttgcaaatatttgattttgttaaaatatttttgtatttagcttgcatcaaattgtaatcgttgaaacataaaaaaaatgtttgctgaaacatataaaaaataatgtgcaacattgctaatgcattagtgaaacattaataaatacttattggaacatatattaacaatgtgtgcaacatttaaaaagtaaaaaaaagtgatcagagtatagtcgtgtgatatcttgttataaaaatttaattataacaaatccaacgatataattagtttgaaatacagataaatagtttgagagaaaaaaaaatcattttaagtttaaaatatgttttgcgtgcatgctcagacttaccatgcacctgctgctggtttgaattgaggcgtctgattttttttcttccgtttaggacggctgatggtacggaactttatacctcagtttccaaacctatacaatttccgaaacttccacagccgcaaccaaccgcatcggagtcgatctccggcgcttgctcctgctttggcctatcgcacgtgggccgacgtggtgctgctcctgcggctcgccctccagccagctgccaccgaagcccaccgagctttcacacatgcatggcacaacacacgtgcatgctgtactacatcctactgctcctgttgatcgatcccatcgaccaagcagcatacgcatgcatgctacagtacctcgccgtactgtagcaccacatactcctctctagtatcttccaatttccttcggcaacaacgacacttctacacacacattgtgaaacccgttacgaagatctttttcacacggtgtccatctatcatgtgacatctcgtatccaagttcgtcacccggtatccttgaccgtcaagaccttaactcctccctgagtctagtcccgatccccatcgttgggcgaagttaacctctaagaatcctgactctagtcaccttctcacatggtatcctaaccacactagatctcttctcccttagtatagtcccggtcctcaccattgaccaaggctgaccttaagtcacctgcacacaattagacaaaacaactatttctggacacagagatcacaacctgacccacattagtcacacgcactcacaccaacattcacacatactctcaaactaattctttaattaaatcatttgcaaagccaattattctcacaaatattaatcatgacaatgattttacagttatcaagtggacttattcttttatagcacaggctgaatctgagtggtgggagtatcacggctaaacgtacgttttatttgttttctcaaatttgttttgaatttctatttaaatttgtaagtacaaaacttatatgtacaaagtttctctgcgcatatatacaaaattgtctatgtataaattattctatatgtaaacttttctttcgctgacacgccgctcaattcatttcaattctatatctgcaaaatttatataagcgtaaaaagtttctatgcccaattatcagtgcagagaatgtgtatatatggataaacctttttaggctcaagagttttatagttttgtaactgagtgtggctgagacccgcacggtcgagcatgctttagactaaccttatataatgagcttgtaataccccgagcaaattacatccacggcgcatcaacttggcagatgggcgcaatttagtacaataacttaaaaaatgagcgttctagtgcaacaacttgacacataggtgtattttagtataagaactttataaattatcatataaatgcaacaacttgcatgataagtacgattttgatacaacaaattaaaaagttacataacaacttaattatttggagcgtttttttatataaatttaatttttaagtacttatttttagtatatttatatttttaccctaataattaatactgaaagtcaattaaactagatttagaaattattatatttcggttgatatatgagaaggtgaagaaaaaaaattcttaaaggtaattggatgtaaatttcactactatgtgcataattcttaaagattaagttcaatattataaggtaatatctgtatgattactttgtaataggatattgacatcgtgagaaaaaactcgtctagcatatgcttagccaagttgataccaaggtactagaacgcacctacttgttaatttgttgcactcgaatgttcaattctcaagttcttgcactatatcgcacccacctgcaaagttgttgtaccatgggtgtaatttactcaaaattcaacttttgaaccgttctttgaatagacgatcagaatctgtggatgtgtagagctcgtcgagttaggaaaaaatagactataagttgatcggagtccggaggaatttatgttgattgaattaatgtgggccgttgatcttcattaggctctctctatttaacaaacagaggaaaaaaaaaagggcaggggataggggattgctagcagctacccgtagcctttgtcgtcctcatcctcgcgtctgttttgaataagacgaacggtcaaatatgtgctaaaaagtcaacgctgttacacaagtgaccatgtgactcctcctccccccacccctctgaacttagggcatgcagatgactgctgttttgcaccatcttttttatgtagtatttgctacgtctttcgttaatggcaggtggatataggccctgatatcagtgagatgtccaaggtaaatagggatcccgagaaattacaaatgacaaataagaaagtggcacgtatacataaagtagttcgactcacacataattatttggttgcgtcacaatttcagaacacaactgagcttgcacacgcttattccaagcctcagcagcaacaaattaacagacatgctccacacactacaacagaaacatcatataacacttttgtagaggcgctttggaaattgcctcttagatcatcagttttatagtgtatagacactttacagaggcactataaaaattgcctagaaaatttttactctagatatactttagaaatattttcagtatattttattagattttatcttgtagagatattctttcggcagtttaaattgtgcctgatatgtaaaggcattttcttgagacactttaaactttgtaaagacacttcttagaataaaaatatgtactaaatgactaatataagtaactcaaggcaaaaacatacaagtaatgagtggggttgagttggttagtgccttgaagataagtatgatttgtgcaattgatcataagtttaaggattgggaaaaacagggaaaatattttattttatactagtttttcatatggttgtagtacaatttaatgtctctagaaagacattttacaaaatgcctcttttacagatacaattcacataaggtacttattaggtattttttaaaatgcctctatagtattgcaaaggtatttgaaaagtgtctctacactgacacttggcaataatcattgtcttttttaagggtaaacctcaatgattgacctggagcctagaactggcatgatcttgtagtcactaaacccggcttcgacgaaaaccttcttccactcttgctcgtctcgctccacaccattgataagcatgatgtatgcatcaaacaaggtctgcatctctaaatgcttttgatcaggtggccctactccgaccaccatgtctacgactattacctttcctccagcatctctagatggaatggctttcttgcagttctttagtatcttgacacattcatcatcgccccagtcatgcataatccact

SEQ ID NO: 21856 - DNA, 1955 bp, Oryza sativa
tggacagaaagctcgtggctcgttagctggctcggctcgtgacaggctcggcttggttcggctcatttgaattttctaacgagccgagctggcattttagctctttagagataacgagccagctcgagctggctcgcgagccttaacgagttaggactccatcacagcccaaaagcccaatacaacaaaaaggcccaagcccaagacactgcaaaccctatcctcactcctcactcaattccccactctccccagcagccgccgccactctgcctctcccccagccactgccgctccacctctcccccagccgccgccgccgctccgcctctcccccagccgccaccgcctccgccgccgctaggagatcgagtgcccgccgccgctcgtctctgcctctcccccgcaagcgcccgccgccgccggtctcctcctctccctcgccagcgcccgccgccgacgggaaatcgagcgcccaccgccgccggtctttgcctatcccccaacacccgccgccgccaggagatcgagcgcccaccgccgctgatctccgcctctcccccagcaatccagcgcccgctgccaccggcgctcgcccccagcacccgacgctgccggcgaggggtaccgagctcgtctcctccaagtgccggcggagctgcgtcgagttcatcccctccaccgtcgagctcctccctgtggtcgccggcgagctcgagctattttcctccgccgtcaagatcctcccctcctccccgtgcttgccggctacgtctcttgcccctagcttgcgagcgctaaacgcgctgtctaacgcttgtgacaagacccgccccactatgggtttaggttggtaggaaacaagccgagccgaggtagctcggtttctaacgagccagccgagttagctcgttattctaccgagccagaccgagccgagccgagctagctcgacatccacaccctaacgacaacataatatttgctatcatcataacaataattagtcaaaaatacgatcactcgtatcgagtagtaaacatgatccacaataatatagataagctacatgttagcataataaatagtacgtactactgcaatctgcatataagaatggagatgaatttatatacatcattgtcactatcaaagtatcccacagtcaaagtttaacttcgatatgatcacaagacaaaatcatgtcttagtgccgtttaacgaactaagattatttcagtagctctaaatcatgccatgcaggtaggtaataaatatttacttccgtactgcactagtaataatattaataatatttttactagcaatacagttatacaataaacactgggcgtgctatatatatatagtagtcttacagactattataccatgtatttgtattcatgtagctctttttataagctgttaggaaaaaaatgttcacagtttaaagaatatagaaattacaagtataccactactggagaaaccatctttcgtgggttggccaaaatcaacaatagtcccggttcaactaaaaaccgtttagtcccgatttaaaagtgcaaagggactatatgatgtttagtcttggatggtaaatctttagtcccggttctatttgtttctgacgatgtcagggcgccaaggatatttagagataactagagacttgacttcctcatccgacttagattccctcatcatcttctctcgctgagatttttagtcccgagaccagatcgagatctccattctccactggatttttcacattttgatccttttgaaaaacttatttcgcaagtagatctctagaaaaacttatcccaaaaatggtcctttttggggcgccagagtggctggcgccatcgttcaacaggacggcgccagcctctttggcgccgtcccaccgccgacgtggcggggcgatgctaaggtggctaggggga

SEQ ID NO: 21857 - DNA, 1060 bp, Oryza sativa
ggcggccgcgctgggaagacgccgggagaaccggtggcgatcgccgggcgggggctgcagcggccaggctggggactaaagatgggtacctttaatcccggattcgcggtcccggttgtataaccgggactacatatgggggtaacgaaccgggattaaaaacactttctaccattctactactctaccttcccatcatgttggactgtacaacaataatttatataattcaagataaaaattgctaagcaccgtgctacttgttgtggactctcaattagtatccttgttaatgaataaccaatttttgaagtgttaattgccaaatcgtgtctatcacgactcattattaatcttagttattatttataactaatttcataaatcgaagttaacaattacaaagcatgactcagcttggagggccaattttattgcttcaattacgtaatttttctagaaaaatcgaaataacataaatatgaagtcattccggtcttatattctgaatttaattattgtattaatttgatcatagcgaaaattcgagatcagtaattgacagtttgtaattagtatggtgtttttgtttaacctaagccataatttgtaatttctaaatagtacagaatgttatttatttacctcgtgactctctcattatgtttgctatatatattcagtggattatgcatgactggggcgatgatgaatgtgtcaagatactaaagaactgcaagaaagccattccatctagagatgctggaggaaaggtaatagtcgtagacatggtggtcggagtagggccacctgatcaaaagcatttagagatgcagaccttgtttgatgcatacatcatgcttatcaatggtgtggagcgagacgagcaagagtgaaagaaagttttcgtcgaagccgggtttagtgactacaagatcatgccagttttaggctccaggtcaatcattaaggtttacccttataaaaaccaatgattatggccaagtgtcagtgtaaaggcacttttcaaatacatttgcaatactatagaggcatttta

SEQ ID NO: 21858 - DNA, 3620 bp, Oryza sativa
ccccacctatcggcgaccccggggaaaggaggaagccggccggcctggatgggcctcggcctgcggccggcccagcagggaggagggggaggaaggagggaatgggccggcggcccattcgaaaaaaggaggaaaaagagaagaaaaagaaaaggaaaaaagaaaaaggattttccctggaattaaaatattgcttgctcaattttaattggttaaaaattatttctagagctctgaaaattccactaaaaatcctgttaatgaatttcgacatgtagaactcaagaaaaattccacatgtcaaatccgattattatttgcattactttcttagggttttctcttgatttcacctgcattttcttggggtcgttttagaaattaaattttaggcttgggaggagaactttggggtgtgacaaacctaccccccttaaacagaatctcggccccgagattcggaggagctggtgaagaggtgcggatgggcggctttcaactcatcttccctttcccaggttgcttcctcttctgaatgatgactccactgaactcggcaaaatcgggtgaccttgtttctggttctcctttcactggtatcaagtatacgaaccggcttttccacgtatgttagatcctcctggatatcaatgtgttccgaatcagcctgttcttcaggtaccctttagcacttctttaattgggacacgtggaacacgtcatggatgccgatcatgttggatggaagttctaactgataagcaacttccccccttcgttccaggattttgtatggtcccacgaatcgtggtgccaacttgcctttcgtctgaaaacggtgtactccccggagcggagtgacacgaagatacacgtaatctcctgcctcaaaagtgagcttccttcgacggttatccgcgtagctcttctgtcgagactgggcaatcctcaacctttccctgatgattctgactttctcttctgcttccgctaatacctctgttccgaacagttgacgctcgcctgtctgatcccagaagagaggtgtgcggcacttccggccgtataaagcttcaaacggtgccatctgtagactggcctggtagctgttgttgtacgagaattccgcatatggcaaatttttgtcccaagctccaccaaaatcaagagcgcaagctctcaacatatcttccaagatttgattgacccgctcggtctgaccatcagtttgcgggtgataggccgtgctgaaatttaaacgggtccccaatttttcctgcagcttctgccagaattttgaggtgaactgactccctcggtcagatacaatctttttgggtactccatgtaggcacatgattctcgaaaggtaaagctccgccaaccttttgcccgtatatgtggtatgtactggtatgaagtgagcaaccttagtgagtcgatccacgactacccagatcgaatcgtgacctgacgatgtccggggcagtcccgttataatgtccattccaatctcctcccatttccattccgggatttgaagaggttggagtaaacctgctggtctttggtgctctgccttcactcattggcaaacatcgcagagtgcgacgaattcagctatttctctcctcatgctgacccaccaaaacttttctttgaggtcttgatacattttagtgctgcctggatgaatggagtactgggtctgatgagcctcggtgagtatcagatccttcagttccttgtcgtcaggtacacacaatctttctcccaaccagattgtgccatgctcatcttcgtggaaatcccgggcttttccgactctcatgttctttttcagctctgctatttcagaatcatttacttgagctgctctgacttgatccacgagcgtaggccgtgcctccagagcggctacaaaaccatgttcaacaattcccacgttgagatgctcaaactcctgccgcaattcctcacacatgccctcgatgcatagggcagtgcagtaacttttccggcttaatgcgtctgccaccacattggctttacccgggtggtagtgaatactcatgtcatagtctttgattagttccaaccatcttcgttgtcggagatttaggtccggttgggtgaagatgtatttcagactcttatggtccgtatatacttcgcagcggttgccaatcagatagtgcctccagatcttcaaagcatgaaccactgctgccaattccaggtcatgagttggataattcccttcgtgtggacgcaactgccgcgaggcatacgcaaccaccctgccctcttgcattaggacacatccaagtccgtggcgggatgcatcgcaatagacttggaagtctttcatctggtcgggcagaatcaaaactggtgcggatactaatttcttcttgagctcctcaatactcttatcgcactcagctgtccatttaaacttctcatctttcttaagtaactaagtcatgggtcgggcgattctggagaagttttcaatgaatcggcggtaatatcccgcaagtccaagaaaacttcgaatctgcgacacggtcttcggtggggtccttttggtaactgactctacgttcgacggatcaactgccacaccctgagctgtaatgacatggcccagaaatttgacttccgtcaaccagaagtcacacttgctgaacttggcgtatagctggtgctccttcaacttctcgagtaccaaacggagatgttgctcatgttcttcttcggattttgagtagataagaatgtcgtcgatgaacaccacaacaaacttgtccagaaattccatgaatactttgttcatcagattcatgaagaatgcgggtgcgttggtaagtccgaaagacataaccgtgcactcatatagcccgtaccgagtggtgaaggccgtctttggaatatcctcttcctgaattctcaactggtggtagcctgatcgcaggtctatcttagaaaacacttcagctcctttcagttgatcaaacaaatcatcgattcgcagcaagggatatttgttcttgatggtgacctcgttgagtgcgcaataatcaacgcacatcctcttcgtcttatcctttttctccacaaaaatgaccggagcaccccaaggtgaagtacttggtcgaatgtaccctttctgcagctgctcatcaacctgcttcttgacctctgctaattcgttggctgccattctgtacggtctcttgtaaattggagcggttcccggtgccaagtcaatccggaattcaatctctctcttgggtggcatggtagtgaggtcttcggggaacacttctggatactcgcagactatgggtatatattccaatttcctcaagtttttctccacggtgtcgactgggatttccgtctcaatctgattcaaagagaccccttgctttggtgagactagtgatttgtacaccacggtttctcccttctcgttggtcaaggtgactgtgtgattcgcacaatcgatgacccccttaaacttggtcagccaatccatcccaagaatgacatctaggtctttggattcgagaagaatgaggttggctagaaatggtgatctttggatttctatt

SEQ ID NO: 21859 - DNA, 9952 bp, Oryza sativa
gaaacgtacccagtacaaccgctggtgctgcttgtgcctcctccgcagatgcgtggttgacacgagcctggataaaccttggcccagcacgcctaggcttcgggcatttgtcagcgaagtggccaagctcaccacagtgaagcaggaccctggttttgctccagtctccttcttggcttgcgcgggcgggcctgactgtgccggtgccattggtgggcgtggagctgcaccgcggttgggctgacctccatggtggttctgactgccactggcgccctgaggaaagttgctaggattgaacgggcggtactggcggacgatcatggtggtaggtccaccctgctgtccgggagtgaagcgcggcctctggtgacttccctgaggtgccctgaactgtgcggccttcctcttcctgtccatcttgttgcgttgatcctcctgacggattgccttgtccaccagcctctcaaaatcagcgtagtccccagatatcagttggttggtcagctcgtcatccagacccgccatgaacttttcctgcttctcggcgtcggtgcggacatcctctggtgcatatcgcgcgaggcgattgaactcatggaggtactctgtcacagtcctgttgccctgatggagcgcccggaattccctcttcttttgtgccacgaccccatctggcacctacgccttcctgaagctacggcagaactctgcccaagtgacttcagtacctggtgggcgggtggccatgtgattgtcccaccaagctgacgcaggaccttgaagctggtgtgtggcgaaagcaaccttctcctgatcattgcactgcaggagattcagcttcttctctatggcatggagccagtcattcgcctccatagggttggtggtgctggaaaaggtgggtggcctgacacgcaggaactcaggcaacttggactgagggggagggggaccaaactgttgatgctgctgttcggcgtgctgcagcatccgctggtgcatctgctggtgctgctgctgcatctgctgcatcatggctgccatcatctgggtctgatgtgccattacttgggctagcgtcggattctcgggaagtggtggcggaccattgccagaatcgctgtggggatgcgccccatcagtgcgctcttcgccgttgctgccctcgcctgtcgcgcggctaccattcctggtgtagaccatctggaggaaaagcatacggggagaagaagaaaaacagatgctcagaaactaagctttattacataggaatttaaactgcaattgttctgatctgaattaaaacacttaaagagcaagcaaaaatccttattaagacagccatatcataggcacatgatatcgaccgtcgactgaccccaaacaagcaacctaaacacacaaactaacaagcagaagctagacagtcgataaactaatggaaaacgagcctaatgctcggaacggctccttcggtcggtggagtcgaaggcgtcctcctgctcgtcacccggtacctctgagcgactcccggagcctggcaggtaagtctcgccgctgcctgactgtgagccactggagctgctgctactgagatcgcggctgccactgggagtagcagacaaccaacttccggtgccactggctggacctctggcggctgatgctggagcgaaggagagagcggacgcgggagctggagctggagctgcaggaactgcgggcggaactggaggtgctgcgggagctgctgatggaggtgggttcctgggcgcaagctggatgcgcacgggtgccgtcgtcgtcttgcgggcgtagtgcggatccggactcctcctggcgcgggaagaccctttaactgagcattctccctcttcaggcgcgctatctcgtccttcagagtgacgatcctcatgagcttcccatcgttcaaggccttggtcgccttgtgcaggtccgagtgcatcctatccaatcccctcatcacagcacacatgtgactaaaggtggtgtcgttctcgccggctgtcggacggaaggtactgatatcatcaccactggctcgacgagggtgaaatcggtacgccgtgtcgtggaagatgtagttgtggcgctcccgtagtctagccatcatcaggtatgctgcctcctgacaggcgtgatctgttgagcctccggatgcctcaaccaccatgttagctaggcaggtacccacgtagccgtggacctccaagcgaacacggtgaggaagctcgccactgagcggtggaatcgtcgtgtactctggcgcgttggggtagcccaccaccagtgtcatgcgtgccaactctgccacaaagttgatcatgccttctccgcggtggttgggtgggtgaccggccatctagagaagacaaaggggtaggatcaatgcatgctcaaatccaaatttaaataaagcaataaaagactcaaataagggaatcgaataagagcgaaatttttatgcatagatcattttgcatgagagcgaataaaaaagacagactcacataacgataaaataatgagaaattagatacatactaataataacaaataaagcataaataccttgcaacccatgttcctgagctaggacctaatgcatttcacccatcaaatcccaactgactgacgaataaatcccaatagttttactaaaaccctagactgactcgttttgaaaaatctcacttaaacgagcgaccaagatttttcccttgaaccacaagaacagatcccaattttcccggaacaaatccaattgcaaagaacatatgcaatgaaaaggattcagagggctcttaggtttttccatttggcttgtcctacggtcaaggtcggctctgataccaacttgtcacgcccaaaaattcccgaatagaatttcaagcagaatgtgcattaaaatccccgtccaggaccggccggggtacacaaacgacaatgttgacattcagatccacgtcttacaaacatcataaaagtcttacataaatgcagcggaagaaaaaaaaagacaacaggagctaagccttgactaaaactgcagcgggaacaccactccacaggcatcctcgacggcacggacaaagcctactcctcgaagaaaccttcatctgacccgaactcgaactctggggttgggaaaagtagagcaagactgagtactacccactgtactcagcaagtcataccggaataggggtatgatgcagggaatcatcaaagaagagctgaagtggttcatttgcataaagcgagcatttataaacagaaattgaaagatttaaacagttgtaataattaattaatattaatcatccgctgtccaacgctatcccacgaagtcacacagatcccaaacaaccctttgagcatgttgatcccgtttaaagctattgtttcttttcaactattgcatttattttcgaatgtcattgggtggaattaacctattcattgttatagcccttttgttcttgattactttattccttgataccttgggttattataacttgactagttgggctatgtatattggttcaactagatattagatataattgcttagctctgcttagaaacattagcacactattgggataacttatgactcactattatttaatgatggcttaatgatagttcacgatggtcaatcgtgattggttaattaattaatgtgccaactaaaacctggtaatggtgggttgtgagcacatggttttgatggtcgtgctcatgacaattaaggaccggttcacgagtttcggttgtgaaacattaaccgtgccaaccacaagccagcgtgggcaacggctttattttttgtatagcatggttcattgcggggcaccagactgagaagtggcggagataagcccacgggggtcgctggggagtccatgccttgtttataagggggtgattatgatccaggaatggtgcgctgcggtggattgtgttgtgcgaggggtattgtcacagctcctttccgaggtaccgtggtggtattgaggcacatggtgacatgatgtggggctgtgtattgtgggtacagtggtacacctctgatcagagtaaaactattcgaatagccgtgcccgcggttatgggcgggtctaacaatgtctttcgtgattagtctcacacctctcatcacaataaaagatgctataactggtaataatttgattagctcctggtttggaatggtatattcctggtttggagatagaactgtgcagccgggatggttgttcagaatggttgggcctatacaacagggtatgttgtatagcgttggattaatattgtttaattattacttaactgttgtcatgcccggaatttctatccaaaattccaaacgcttacatgtgtgtgaaccctcgtccaggaatcagccgaggcacacaataacaaattgataatatagtacaaatattactctaattaataagcgaataaaatgtcattacagaggtagatagttcctctcaatcaataaagatctaagcagcggaaaataagataaacggcgcagacgactccactccacaggcagcttgaccaggcctacacctaatcctccacaccatcagcatcactgtagaactcttcctctgatgaatgattgcaacgtgagtatatgacatactcagcaagccacgcagcaaatatgcaagcgcacaaggataccaaaggatggcatagtagggtttcatttgcaaaagcagcatttaacaaatatttcagaatttaataaaacagttaagtattaattaaacaatattaatccaacgctacacaacataccctgttgtataggcccaaccattctgaacaaccatcccggctgcacagttctatcttcaaaccaggaatatactattccaaaccaggagctaatcaaattattaccagttatagcatcaataattatgatgagaggtgtgagactaatcacgaaaaacattgttagacctgcccataaccgcgggcacggctattcgaatagttttactctgatcagaggtgtaccactgtacccacaagacacagccccacaacatgtcaccatgtgcctcaataccaccacggtacctcggaaaggagctgtgacattaccccttgcataacacaacccaccacagcgcaccgttcccggatcataatcacccccttataaacaaggcatggactccccagcgacccctgtgggcttatctccgccacttctcagtctggtgctctgcaatgaaccatgctatacaaaaggtaaagccgttgcccacgctggcttgtggttggcacggttaatgtttcacaaccgaaactcgtgaaccggtccttaattgccatgagcacgactctcaaaaccatgtgctcacaacccaccattatcaggttttagttggcaagtaattaattaaccaatcacgattgaccatcgtgaactatcattaagccatcattaaataataatgaatcataagttatcccaatagtgtgctaatgtttctaagcatggctaagcaatcacacctaatatctagctgaaccaatatataaagcccaactagtcaaattataataacccaaggtatcaaggaataaagtaatcaagaacaaaagggctataacaaacaataggttaattccacccaatgacattcgaaaataaatgcaatagttgaatagaaacaatagctttaaacgggatcaacatgctcaaagggttgtttgggatctgtgtgacttgccttgctggccttggaactcttcaaattcttctcctgcgaaaacggactctccggaaacgtcggaatctaaacagaaaagagcaaaaaaaaaccaaaacagcacataaacaagcatgaacagtacatgtggatatttttaacatgtagatctcaattttagaaaaatttagagacttgaaccaactaaatccgagctaagatgaattagttatgaatttttaaagattaaatcggattaaaacacttatatggattttaattgaattatgacgcaataatgaattatttttgaaaaggaaaaagggatttattgcgtcagcggctagggtttgcggtggaccgggcgcacggcagcggttcacgggaacgaacggccgagatcgatcctatccaaaacgaacggccgagatcgatcgggtctacggcggctcacggcagacggccacgatgacgtcagcgacgacgtcaccaccggcggcggctcggcggctcggtcgcgcaagctcgccggcgaacgacggcgcgaggacgcgaacggagggcaccaggacgtagagcgcgacgtggcgaactcaccgatgaccaaaacgtcggcggaagatgaacggacggcggcggcgtcgaggaagaagcggcgacggtcttcggcttgaggacggcgacggtgctccggcgatcttcagtgacggcgaagggacggaggaggacggcaacgatttggcgaccacgatggcgacctccccgagcgacggcgacggctggaacggcggcggcgcacggctggagctgcggtgacgacggcagctcgaggttgcacggcgctagggcgcttccgacggcgagagacgaaggcgagggtggcagcgaagagaggagacaccgggggtccttataaaggggctagggcgcggcggcaaaggcccacggcgaccggcgacgcgaaggaaacctcgaggttcggaggaaagagaccgatccgattcgacctcgaatccacgaacttccaaagcgagatagacgatgattccaaaagagaaaaggtagaggagatccggaagattgtttccccccaattgatttcaccggaaacggaaagacgcggccgaatttggaaggagacgatggcggcgcggcgctagggtttcgggcggcggcggccggaggtagacgacgggcctgacaggtgggcccacctgtcagcggcagcgagcgcgcgcgagggcggctgcagctggacttgggccgaggaggagagagagcggttttgggccgactttcggcccaaagacaaaagaagacttttaaaaacatttttcaatttaaattattcatgaaatgcaattccatttattaaaaatacttccttagctcaaataaatcccagaaaaatctaggaattatagaattaagcaaagtatttaataaaattttatttggccccattttatattggaatttattaattaaaattagatcttctcttctaggcttttaaaatagattctaataattccatttaaacaacaatttatataattaggatttttagggtgtgacacatagatccaaatataatgcgtattcaacagaaatattttgctttgcttattagtttcattctttgacaatccagatcacctcacgctctctttcacagtagaggactcatccctctagctgctcatgatcaattaaaatctctcgaactatatcactctctctccctctctcttccccagtataaaccatgctaccactgccaaatatacatactccttccttccctaaatgtttgacgccgttgactttttaaacatgtttaatcgttcgtcttattcaaaaacttttgtgaaatatataaaactatatatatacattaaagtatatttaacaatgaatcaaatgataggaaaagaattaataattacttaaatttttcgaataagacgaacagtcaaatatgtttaaaaaaatcaacggcgtcaaatattttaggatggagggagtatttcattgtcaaccaatgtaaaacaaacctctataatacccaagcaatatatatttcatttgccccatcctcctatccctagtgcttcttatctattaatctcaagtcggcttgtttgccgctgccgattggatcacgtgtccttttccccctagcagataaatgctcgatggaaatcatccaacaaaaaaatcacatatatatcattggttgagtggagggccaaataatcgtgcgacacatgccgaaatagcgaagtcgttgtgcttctagatttttagtcatgcacgcacggtcggtctcacgcggtcatgctgcccttctagattacaaatcatgattcacgcgcctacacacgcatgagccaaggcctgctgcaacctgcaagagcagctcgatcacctaacaaactactccctccggtatttcaatgtatgacgccgttgacttttcgataaacgtttaacctttcgtcttattcaaaaaaattaatgtaattatcatttattttattgtgacttcatttatcatcaaatattctttaagcatgacataagtatttttatatttgcataaaaaaattaaataagacgaatggtcaaacgttgattaaaaagtcaacggcgtcatacattaaaatacggagagagtactatgaattttatccactctggtccatgggttgaacctagcttttccgtgaggaaagaaaaaagaagagaaatctttgatagttgtaaataaagaaacaaaccaccagaaaaataaataaagatcaattagccaacgtgagaaaattttgatcaaagcatatgaaggatatattgaggatgtccccatcaggagaaaaagagatagcaatacatgcaccagataagcttatgaactgctaacattctggttgacctgaggtgtttgccatttgctttaccctataacaaacccaacgtttttcagctgagcagtgatgcattccatctctaacactcaatgatgccgatcgcgataaaaagctttaccaatcgataaaatgatcttactagcacgacaccaaaatgatcttactagcacaacactacataattaaatacatatatatagcaattgttataaaattgtacttatcaatgagggaataatgggatgcataaacgaccgagatgtgtcgatgggggttcggtatgattgcgatgacaaccttctactctaaaatatcaacatgaattcataataaaaggggtagcgcacgagacctaaaagtggatggatacggagacaaaggatttagacaggttcaggccctctcaatgagaggtaatactctactcctgtttggggatttgaatccgccgggtgtatattgatctgacgatcaggttgtgtcatctgccacctacagggcctcctgcccaccttatataggatagaaacattaactaatatggtatcagtttcctaaatctactttacaatattatcaaatcaggactttaggccgttccataatatacaaggaaacgtaatacccaagtcatgatctgttacatattccatagatataagttatcccctataactagtcggataaccatgccgtgtgggtatggggtacctataatctccacagtagcccctgagaccttcacagtcgaaaagataatcttctcttgaaccagattactctaaagccgagtgcttcaatcatctttgcaatggtctcccgagtacttttaccaaatctgaagactgtggagggctgaaaaaaattgaatatagacttaggtgcatcgactagatgcacctaataggtgtagcccacgactatgtgattagttgaacaaactaaacatatagtcaaggagtaaataatccaaccaaccgagcggtttttataattatagtcaaccaagtaacttaatattaatagcatatgcggtgtgaatccacgaataacatgatccaagtgatatatctactgcttggaaaatgaccaaatatataatcagcctaagccataatattggtcaataaaaatgcacacttacatggcaaaaagcaacaatattgtatcctatcaattgcttgataaaacaaaacagccgcctgactatataaaaaagtcagcgggcagttatttaaagctttactg

SEQ ID NO: 21860 - DNA, 5401 bp, Oryza sativa
gttgagtaactgcggtataaaaggatttgaaggtatggggcatataatcacgtgcacttttgcctaagcaaaaaatgcctaagtccctaaaagaacgtgacaggccacacctaaaaatatgggctgcagacatattaggcctagacctaaagtatgtctaccgatacccttaaatatgacgtatagaacacgacaattaatatgaccccgagtgataaatatcttgggtgatgtagatcatgcatatctcatctgagtggcttctgatccgagtaattatccctcatggagaataccaaagtagatgtgataattgaatcccgactagcacaagcactcagctaatggccctcgtggggaataatgaatagttcaatcgttgggcatgagaaatcgactcgtaatcatgaatccatgatgaatgtatccggaacaagtccaaattaaaaatataatcctcgtgcttatgttgatgagctcctaagcatgtagcatatccttctgctgtagtaacaattgtccattggtagtaactgacgcagttggcatgaagatgaaatgaccactatgaagatgatatcacccatcaaagctgatgaagatgtttgtagtggtaaagacaacggcaccaatcaaaggtcatgaagtcgcatagccatggaggcgaagaaacctgtctgcagcaaataagtcagccagcagtgaagatgaaggcgctcagcaacggcgacagagttgtgtagccatgatagcgaaataatcagtcgataacagacgaggcacccggtgaagaagacaaagacgccaatcagtagaggcataataagccagccgtgaaagtgaagacaccatggacgatggcggaggcaagccggtggtgaagacgcagacgctcaacaatggaaatggcgaaatccatcaatcataaagatgaacaaaaaagacggcgacggcaaacgcatccgacggtaatgataattagcggcaacagagatggatatgatgacgaagttgcccatcaacggcagcagagtaggctatgttgaagaggcttgacaggatattgataaagatgatgatatcgttgatccagtagtgtagcaatcaatgataacgatgaggtctcccataggcatttgcgtagtaggccaaccgtgaagacgaaataacaagtcagcgatgaaagttgatgatgacagaagcaaccgaaggcgaagacattgtcacccattagcaatggcggagacgttaaggccgatgaagtagaagtgctggtgatgatgtcagtgacaataatccgtcaatctgttgagaagatatcgaagctcgagcaatttccttgatgcgagcgtgtgcataacgaagattgatgcaatgccccttgatttataaagatggcagtagaacttggtgttatagctgttgtagatgcttcacttggaggaaagtagaggctgttgtacaattcattgaaactgagctgattggttgataactgtaaactcctggatatgtagattaaatctcgaactaccagctaaagtaaaatgtcggctctgaagcgaagacgaagataataactcccagagttgactcgttgattgattgattgcttcatcttgacataaaacttgtcgaattttgagtcttatatttgtatagcccccgactctttggtcagtcaagaaacaactgaacatagagtcgagaactgtagcttcttgtcgtcgagtagaattcttgaaaattggagaaccacttgtagtagtagattaacacgacgtcaaatttggtagtgcaagccgagatgtcgaggctcttgtagacgtcgtggttggtgaaataacgaagctcgtgaagtagaggcattatagtttgccggtgccaaagataataaagatgaagtcgctccaccatggtgacaaaattgcatagccgtgatgaagtaaacacgagtcggcggcaacagaagcaaaccggtagcgtagacgcgtagttgtgaagataaaaacaccagtcagcggcggcataaccagtcggcgacggaagaagtagaatgatgacaaaagcgaagacgtccttgaacggcggcaaaataggctagccatgaaagtgaagacaccataggcggcagtgaaggcaaaccggcgatgacgatgacgccagttaatgatgacgaagacgtgcaaccgtggaggtgaactagccagtcggcgtcaggcaaggcggccagaaataaagacgatgacgtccatcagtagtggtagtggtataaaccagctgtagaggcaagggcactagtcagcagtagacgagacgaccggcggtgaaaacgataaggccaatcaacactggcagaatcaggcagccgtggaagtgaagaaaccagtcagcagtagacatagacagtttgcgttgaagatgatgatgcctattagcgatggcggcgacgtagccagccgttaacacgatagcaccagttggcattatacgaggcggccggtcagtgaagatgtagacgttgaacaacggcggcataataggccaggcatgcaggcagagacaccagtcggtggcgacgaaggcaagccaatggtgaagtgatatatgcccaacaacggtggtatgaccaaccaaccgtgaaggcgagcacaccagtcggcggcggcgaaggcaaaccagtgttgaagacgtagacgcccaacaacagcgggacaataggccagccgtgcaggcggagacactagtcggcgacggcgaaggcaagctggtcggtgaagacgtaaacacccaacaacagcggcataataggccagccgtgcaggcggagacaccagtcggcggcgacgaaggcaagccggtcggtgaagatgtagatgcccaacaacagcggcataataggccagccgtgcaggcggagacaccagtcggcgacgacgaaggcaagccagcgatgaagacgtagacgcccaacaacggtggtgtgaccaaccaaccgtataagcgaaaactccagtcggtggtggcgaaggcaagccgacggtaaagacgtagacgcccaacaacggtggtgtgaccaaccaaccgtatagtcgaagacatcagtcggcggcggacgaagcggccagtcggtgaagacaacgatgtccaacaacagcggtgtgagttgtgaccacccaaccatataggcgaggacaccagtcggcggcgacgacggcaagctgatggtgatgttctgactgatccattcttggagcgtaagagataagcttaaagccatgaatccgttttatgcatatctagatctggatcctgcagaacaaacatataggatgagtagtatctaatgtaaatataatactcgaggaaaattcaagtattttaaaatatttataaatatatatttctcctgttgtcaattttgatttccccgagtagatgacttcttacgtttaaacacttagcccaactagtcatagcccccaagcaccgggagtcagcctaggcacttcccaaacatgcatatgagcgacatgagttcgtcattaatggaacaaagtttcacgaatcagaatttactactcgagtacttttgcaattgttaagagcataagataaatttatctcatctctatgcttttgatttattccgagtaatacttagcaccttgcgttactcggtccatccaacgagcccccgggtgctaggaatcggcccaaaggcaactatccgtcgacaaaccaaatggaaagcatagaaagatagaactccataactcgataggtactttatctttacttggattatatcgcaagtaatcaagataggcattatgaacaatgttgaaaaatatgatataatatctgtagcccccggctcacttgtcaacgttgatgtagtgaggcagaggaaaaggaaaataccatatataaaaaataaaacaatgatgacttagctttttagtattcccgctggtgatgacagaactagccgatgtgggaataaagtcgtccatcaatggcaatgaaagcaccaaccatggaagcaactgagtcatccgtcaaccgtataggcgaagtccgccaaccgtataggcgaaaataccagtcagtggcgacgaaggcggtcgatggtgaaatatgatgatgcccatcagcagcagcataacaagccagccatgaaagcgaggacaccagtcagcggcagacgaggcggccggtcggtgaaaacataggtgcccaacaacggtggtgtgaccatccaaccgtgtaggcgagtacaccagtcggcggctgatgaggcggctggtcggtgaagacgtaggtgccaaccgaccgtgtaggcgaggacaccagtcggcagcagataaggcggccggttggtgaagacgtagacgcccaacaacgatggtgtgaccaaccaaccgtgtaagcagaaacaccagtcggcggcggcgaaggcaggccggcagtggagacatagacgcccaataacggtggtgtgaccaaccaaccgtgtaggcgaaaaaccagttgacgacgacgacggcggccaatggtgaagacaatgccgccatcggcaacggtggcggagtacgccaaccgtggaggcgaaggcaccaatccatggctgcgaatgccacatatgtacgtgcatacgaaaataacagatcaaaaagtaattagagatctgtgaattaaatgactagaaaaatcaatagtttaatctggtttacataaaaaaaattaaaacgatagacctggtgaaggtttatgatcttgatgcacgtatgttgtgacacgtcctattttggaacttgcatgtagatggataatttatccgtaaccaatgtccggttcactgatccaatggtaacctcaatgattggaaacgcatactgtgtagcagtagtctaagcgctgtcgctgtgcgatcaggagcatacacacgtgtagataatttcttccagatttcttgacatgtggtgtgcctgttacatgtatttcatcatcggggttgatctatggtgtaaattccagattagtctgttgttgctggactccgcttcggacttcagttggagaaactcgatctcaccaaggaaattaaatcgatgagatgacaaacattgaaagcttttttcccgtagtaggatgttcgcagccattgacattagctcgtaatcaatcttgacgggttgctccgttcgaagatgtcgaggaatctgacgatgaccggatgaggttgaagtgaccttgagcccccccaactggtttgagtcccagtcagagagagtctgctagagtattcggcgacgaggaggcaaaaaatctaccaaagcgaagatgaagtgagcgacttacgaagttgattccatcgcacttttcgacaggaaactcg

SEQ ID NO: 21861 - DNA, 4778 bp, Oryza sativa
aggatgttcgcagccattgacattagctcgtaatcaatcttgacgggttgctccgttcgaagatgtcgaggaatctgacgatgaccggatgaggttgaagtgaccttgagcccccccaactggtttgagtcccagtcagagagagtctgctagagtattcggcgacgaggaggcaaaaaatctaccaaagcgaagatgaagtgagcgacttacgaagttgattccatcgcacttttcgacaggaaactcggcgtcacccctacctggcgcgccaactctcgaaacatgaattcggcaataataaaaggggtagcgcacgagacctaaaagtagatggatgcggagacaaaggatttagacaggtttaggccctctcaatgagaggtaataccctactcctgtttagggatttgaatccaccgggtgtgtattgatctgacgatcaggttgtgtcatctaccccctagagggcctcctgcctaccttatataggacggggggcaggattataagatagaaaccttaaccaatacggtatcggtttcctaaatctactttacaatattatcaaaccaggactttaggccgttccataatatacaaggaaacgtaatacccaagtcatgatttgttacatattccatagatataagttatcccctataactaatcgataaccatgacgtgtggatatggggtacccataatctctacactaatctccacaccttaagtgtttgccatttgcgttaccctataacaaacccaacgtttttcagctttgctgtgatgcatgccatctctaacactcaatgatgccgatcgcgttaaaaagctttaccaatcgataagatgatcttactagcgcgaaaccaaaatgatcttactagcacaacactacataattaaatacatatatatatcaattgttattatattgtacttatcaatgagggaataatgggatgcataaacgaccgagatgtgtctatgggggtggggtatgattgcgatgacaaccttctactctaaaatatcaacatcaacctacagggattcttttccatttgatggttaatatctagcactactctttttaatatcatcttgatatattttttagtgcaaaacttctacatcaaatcctttcaaaagcttgaaattaaaaagaactcattagataacacacgggctataaaaaaagcatgcacgactactttctagtattaaagctaactataaaggtagcccgtgcatttgcgcgggcttgtattttagattgcgtttgaaaaacttatatagatggaatatcaaccgaatgacacctgtcatttttccaaagcattatttcgccataaattttcttcatcctcgttacttagatactatttgttagcttttataatatataatattttaatacatcgctataaataatttataattatctatgatcaattttgggaggtgaatttttcttaaagataattaaagggtgttgcgatttcgcataagatgtatccataatactgacatacttataataaacataggtttttaactgtaaatttattacataaataatctgacaacataaacttacactaccacataaacaatttattacgtaaataatctaacaacataaacttacaataccatagaaacatggataggtaccacttgggaatccgtcataggtgttcgatttcccattcggcatctaggaagcggcaaagatgagggaaatcaaaggtgcgggttccaaaaccgggaccttagagaggttttaggaatcaaaaaaaggcatcgagcagctcccattcaccccgccgagaacacatcgaagaacatccaagaacgaatgaacatgaacatcaagaatattcttcccaactactgggaaccatcaaaactactcatccccatcaagaacacaattacaaaaaacacatcaagaacaaatagatagcacaaagagccaccgctcgacaccaccgccattgccgccgcctcctctcgtgcgccgccgcctgccaccacctcccctcccgccagatctagcggagcggaagacgctgccgccgctgccgggccgagagagaggagtgcgtgtgtgcgagagaaagaggaatgcgctcgagagagagagagcgcgcgttagatagagagtgagaggagagcgagactatcggtcttatccgtgcgagagagaggggcaccgagccctctcaaccttatccgctcaagaccaccgatcggctcggctcgacttttaattatccaacacttatagtaaattaaaggtgttagttttttttaaaaaaaaatacatctagctatataatagaaaactgacacctacagtctattaaaggtggcagtttttttttttttgtattttcaacccgcatagatgggaaatggtatatatgtgccggttttattacttccagcacctataacaccgagctctatgtgccttttttaagtagtgtgatcaaatcatatatgtatgatatagttactatataaataatctaacaacataagcatattagaatacatttatgatttaaatgctatagttgcctaaatgttttttacgtaaatctctgtgtcttttttagcagtgtgatcaaatcatatatgtatgatttagttactatataaataatctaacagcataagcatattagaatacttttatgatttaaatgctatagttgcttaaatgttttttacgtaaattctgctttcttttagaagaaggaaaataggagagataaatagataatagaatgaaaagagaagaatgggaataggagcgtgcagagttcatatgtatacgtgcatccgcaagaatatataggggcccaatttagagttagattaggatggatggattactcttttttctacatcttatctaatggtcaaaaaggatgggcccacctatttaaatgaaaattaagggttagatgtttctttaccacatggcagcttaggagcacttgtagagtgccatgtggcgacatatgagcatttgtagaaagtttaatggacttttagtatataataatagatagatagatttcagcccatgcatgctgttatcactttgtatctaaaaaccaaacaaagataaaagaaaggtgaggatcaaaacactcaatttggaactacgaaatatacttatattcaatagataaagaagaagctgcaaactcttccttttctttggagtatgacaccagattgcagtagttctatcctggtagacatgaatatacactcgacttcatgaaatagtagttcccatcaaataataatttttggatagacattaattcaaatagtagttttcattttggacaatcgtcaatacaacatagtatttgccagcaaagccgagtatacagggccagtacttacccatagaaaaatgaaaccataatcagtacgtacacaatcgcatgaatttgatagaaataaaacaatcataggaaaacaaaccatccatgacacctacagttcgtgatatacccggctgaaccttgtgataactccgcatcagactcataggatggaaaccatccaaacctaaagaacaaaatacactcaaattctaacaaccgtaatgctagtaaataaataccgccacttattcttccaataaacttttaaaccgaaaatctagaattttgaataaaccggtgaaaaaacttggccccactactttaattgtaatatttgaaccacataaccaaacttagcaaataataatgccttgcatatgtactgaaaattatctgcagctttcatattaagtgaaaaatctaattttatttccaaccatctcagatttaagtaaaagaaatcagctgcaccgctagaaaaatatcgacgagacctacgacttttgcgtacagcacaaaacataacttctaatggattaataccactatttcagtctacctagaaaattaaaatcgatctatggcaacaaaattaaaagtaaaattagaagtagcaaggaactagttttagtttacccttgcggccattataattcggtaaatctttcattctcctcaaccttccctttttctgctcctctgtttttgtcagcagcagtgcgtagagcagtcgacagacgactagccaatcagctgggaaggcagcagccagcaggccatgctgggtaacaacaggcagcacagcagatcagcagagcaacatactagcgtctggcctcgccacctgtgaacaccgtcacagctaatttgatcaaatggaacaaatagtgctgttgagattataggcataaaatgatttaatctatttcataaataaatcatgacattacagatgaaaactagcatgaacgcatcattagatctacacatgtaaactacacagtataacatgaacagatcaaatatgcgcaacatattgaatacgtaccgaggtagcggaaagaccggctgctcggtcgaaacttttcgcaggcgtctacgaaggcacgcagcacgcgagcgaagaggaagacgagccgtcgcggacaaacagggagcagtcgcgcaaagcgcttcccaaaaatcttattgccgccttctcccggtgcaggacgtcgaaggcagaggttccggagacctgcactcccgatcgcaggtgcacgccggcaagcgggatggagtaatctacgagcgacggcgcagcacagagtaggaggcaaaccctagattgattttgcgtgtgttgcgtgaagacggcgg

SEQ ID NO: 21862 - DNA, 1146 bp, Oryza sativa
agagtggattcttctagccaaccatatacgaagatactaaagaattcattcgaatatgttggaaatgccagaagcatggagatatcaccactcaagatgcgattcccttgacctacaactttcaagtggagttatttgatctatggggacctttcccaaagtcccatgattgtgagtatatcttggtgcccatcgactatgtgttagagtgggtagaagcagtgccgtgctaagtcgctgacaccaagcacgcccgttggatattccacgaaatcatcttcctccatttctgaacacctcaaatggtaataagtaatggagggtatcactttattgataagatcttccaaaaccttttacaagagttagaggcacaacacatcattgcaatttcatatcacccccaaacaaatggtcaaagtagaaacctccaacaaataaatcaagaacatactgtaaaagaccatgcaaggaatggggaaggcatgaaagaacaagctaccaaatgcactctaccaagaacacccttcagcatgtcaccttcctagctcatctgtagaaaaatgtgctattttcgtatcgcgctggaacacagagcacactaggccatgcggatgtggaattgaaaaggcggacgacacaaacaaatgctgctgtcggagctacaagagtagagggaaaagaccaattacaatgacaaaatatatgaagaaagaacaaagagatggcatggtaagataataaaagggaaggagttcatggcaagagataaagtgatgctgttcaattctatgtgaaactcttcgggcacgaaaaacttcgaagcaaatggatgggaccattcaccatcattgacacctctgcacatggagtagttatgcttcaagacggctgacacaatctttaatgcaaatggtcatcgtttaaaagttttcctagaattaattgctcgaaaaccaaaataaaaaattacacgtggtaaatttagtcaattttgacgcatttaccaagaccagttatcatgactcctgagctgaggaagaagggagccctccatggttcggccgaaccccttgttcgttcgacccatgggttgggccgcccctacacagccttcgtgcacgtagtccccaggaggcctccttc

SEQ ID NO: 21863 - DNA, 1788 bp, Oryza sativa
ggcgcgcggcctttcgagccgcgcgctaccagcagagcttccggcgctaccatcagcgctacgtccgggcccgatcactatgcgtcgacgacctcgtcctacgccgtgtccaaacacgtgctggactgagcaaactctcaccaatgtggaagggtccgtatcgagtgatcggcgtcccccggccgggctccgttcggctggccacgggcgacggcacagaactgcctaacccgtggaacatcgaacaccttcgtcgcttctacccctagtgggggtcgggtgtcaggtcttgggctcgggccaaccccgcacccccccgggcgtgcagggttggccgggggcttatcttttttctctttcgtatttcaataaaagcattttcgatttcctaaaggctgtgtctgtgcttttgtttccttttgaagaatcttgacttgaaataggtcactcgtgctcaatcctaccctagggggctcgggtcggctaaaatcgccaaaaggggcccagaaccgagccgtgccccgggacgtggtgaactccgggggggaatcggcaaaaacccacaatcgggtcacccataaccctcggtcaccacgctcccggcctggccagtctcgacatgtggatctccccaggcactagccttgacccgcgccgtttgaggctgggacctgggcacgagcccttgttcaagccaagacacagaaggaccgtggcacagaccatcctcgtctcatacacagaacaaatgaaattgacacaaaaatttcctctttatttgattgcagattaaatcagcctataacaagaagggggcccgaaggcctcggaagaagaaggaaaagctattaagattggcggaggcctgggggctcactccgacgtgcctgggtagccggcctcgccgtcactgtcgtccgcaccgtcgtcaccgcactccttgtcggagttgaaggcaaacgcgaagccgaggggccgctcattattgtcggtcggttttcccttgctgatgcgcgcgacttgcgaccgccgggattctgcccgaagagagagagagcagggaggagaggcccccgagccgaacggtggcccaaggcccccgacggccggagctggccctccgcctgcttgtccgacggtgccaggcgcccccgacccccaggatggccccgaggccactgcgggaaggccgcgcctgtcgccctctgaccccgaggtcgtcggcacagaagccgagtgcgccccgcgtggcctctcggatggagagcgccctggagatgtggcccctgacgaagaagatcagccccgccgaaaggtgcagcggcccgtctacttcgttagcgaggccctccgggacgctgagacccgataccttcaggcccagaagatgctttacgctatcctgataacttcgaggaagttgcgccattatttccaggcgcatcgggtcacggtggttacgtcttatcccctcggccaaatcttgtataaccgagagggtactggactggtggtgaaatgggcaatcgaactctctgaattcgatttgcgctttgaaccaagccacgcgatcaagagccaggccctcgccgactttgtggtggagtggaccccagctcctgagctcgtctccgcccccgaggccagctcgagcccatcgcagctgcctcacaccgccctctgggtgatgtagttcgacggcacctgtaggaaccggccccacctgtcaccaggccttagaagtggcgtcacgcccgaccgcttccctcggggagggcgatcgccctg

SEQ ID NO: 21864 - DNA, 1981 bp, Oryza sativa
ttagccgatgattccaaaagagaaaaggtagaggagatctcgggaaacatttcccctctattgatttcaccggagaaggaaagacgcggccgaatttggaaagagacagcggcggcgcacgctagggtttcgggcggcggcggcggcgcgaggaagacgaagactgacaggtgggacccacctgtcagcgacagcgagcgcgcgcgcgcggctgcggactggactgggccgacttgggccgggaagagagagagagaaggttttgggccgactttcggcccaaagccaaaagagacttttaaaaacatttttcaatttaaattattcattaaatgcaattccatttattaaaaatacttccttagctcaaataaatcccagaaaaatctaggaattatagaataaagcaaagtatttaatgaaattttatctggccccattttatattggaatttattaattaaaattagatcttctgttctagacttttaaaatcatttctaaaaattccaattaaacaacaatttatacatttaggatttttagggtgtgacacgggggttccggccgtaggtggggttgggtcggtacttttgtctatggctaggatgggttggaaactatgtcatgtcttccgtctgtatgccgtggtggtatgtggcacgtggttacacgtgaggaagatgtgtcttgtgggtaaagatgtacacctctgatcagagtataacctattcgaatagccgcgccctcggttatgggcaagccgagcaatgtacctatgttagtgttttagttcttgaaacctgcttaacaactaaaatgtggaatggttggcctgggttggcttgggacgagctgggacccagggtcgggttgccagttcggtctgaatcatcgtaggccttgggttaaggcaggttcgtgtgggttcacggccttgattaatagtattgtatagctctaggatcgtgtttacaaaatagctttgagcaactaagtgtcttttaatgctgtttactgcaaaccctaaccctttgtattataacccccttgtactcccttgcatttattctgcacttatgggtgtgtcttgttgggtactgtggttgtaatcagtcttgctcaatttttcccaaacccagaagaggagcgcctggatgatgaaggctttggtgtttagctcgtgcctgccgtcaagcgcctgtggtcgtcgcccatgtaataaagtaactatttacgctgtttcccgtttgtctttgtgtgtgctgggccttcgccgcccatgtaataaagtaactatttacgcttccgcttgataaactccgaaatgtatcaactttttgtgtaccttgtctcctgggacaaggaataatacactcacgtaaggaacacccgttgggttatttccggtcggacgaaaccgaggagcggccggggcggagggtgatgctacgacgtcgacgaaggagacggcgacgtcggccggcgctttggcgcggcgaccgggacgactggaggcggtacagtggcggcaacgccactgtttgccggcgaggatgcgcctccggtgatatccgcgcgaaacggaggcaacgccgggggaagaggatgcagctgaggcgccgaggatggtgatggcacggccggccggcacgtgggcgaggcggcagaggcggctggaggtggccggcggcacaggagagagatgagggcgacggggagaggtgctgcggccacggggagacacgggaggaggctaaaacgagagaacggaaggagagggttccattttatagcagaggggaatgaacgggccacgggagaggcgtggaacggtggcggaaatggcgcccggcggccatggaaggtggccaggaatggcgcgggcgttccgggcaatggagggtgccattcaagggggaaattgggggaaatcaaagaggatggaagggggattaattccccccaatcaattttggaa

SEQ ID NO: 21865 - DNA, 4873 bp, Oryza sativa
  unsure (1)..(4873): unsure at all n locations
tcgaattttaattaattctattattccttttagagaatgattttttttttcaagatgaatttatcaggacatgacatcctcgcaccacgacttctaatggtcgaggtacgactacgactggtcctcgaccaacaacgtagcgatcctcctaccacgacttctaatggttgagatacgactacgactggtcttcgaccagaaacgtagagatcctcacaccaggacttctaatggtcgaggtacgactacgactggtctttgaccagaaacgtagcgatcctcgcaccacgacttctaattgtcgaggtacgactacgactggtcttcgaccagcaacgtagcgatctccacaccacggcttctaatggtccatgtacgactacgactggtcttcgacctactacgttgcggtcctcgcacctcaatttcaaacggttgagagactcctactcctggttctcgaactcgtaggtcgtagcaatctctcgtacctccacttcaagtggtcgagttatgactataactggtcttcgacctgcggtgtagtgattctctcactacttctgtgatttgttgactacaactatacacctggccattgcccaatgtggtggtcgtcttagcatctacgtaaatttctgaaagtcagacattataacagtctagtcagatttcaaggctttgtcgcagtctctatgcccactcgattactcgagaacggttgatggagctcaacaaagaatatggaatgaagcgatggtgtacccgccgagatggaatttcttgacttcaatccaaattctcgattatagcaagatgggggacttagtcgcaaactccataccttctgagtaggcattgggacctagacaaacccaatatagtgcctgtggaggtcgataaggggaatatagcgatatctctgatctcaccgagaatggtcaggtgagcacgacaatagttattccaaagtcttcggttcaggacatgaactcgttcatttgcattgaagtcaggagctactgtcagggttatggatactatatacctaacactaattgactaagctcggcaaggcccaccacataacatgttttatacggaaacaaacctcgtatatagaaggagttatggataaggaaggacaaatagagttctacatggaaacgacaaggactactcggattgtatccatattggtctctctagttctacttggacaagggggcatgtatgggtataaatacaagcccccctaggaggagaggggacaagccaaaagacatacagatcaacatagatcaatagaagccaacacacgccaagataagtcgctggatatcgatatcagagataagtctagacaaacacaatatggtgtctgcggaggccaacaagagggatctagcgctatctctgatttcgccgagtgcggattcgagggaagactaccatgtcgtccactacgagttggttatccatgccgccaagttgatgacagctagataagttatcccaatttaatgtattggtgtgattatgatgaataaaagcaacaccggtttcggccaacaggagtagggctattacctgtcagataaggggctcgaacctatatagaaatccttgtctccatctcttttatcttaatctcgcatataccctgataccaacgatccacatactatgcaaaatactgtagtcgtgatatcaaacgtcgacaacctcggctccggtctcctagcgccacccccagatctgcgactggagcatggggtcgacgcgaccggtgttcgcgaccaccgccgatgcctagctcattgagctcatcgccaatgtctcacgtgggtagagagaggggggacagggagacgtanagagggtaacggngaagggggagctcgagctcgctgacactccaaacgncggggggggcggggggggagaacgacgggggacggggagctcgccggcactaggggggagacgaggaggtagaactcgatcttatcgccagcaccgttctcgtagtggaaggagagaagagagtgaaaaggaagacatattgggtaggagataggtggcatccgacatgtggtaccaattatttgtttttaattttttttgcctgattggatcaccacgtcagcataatttaagaaaaaccacccttgtttgaatggaaggggtaaattaaacatcatttacccggttttagagtttgggtgtgcactttagacaaagcaaagagttcgacagtgtaaaatggacttatcccaattaaaaggaataatataaattattaaaaggtaaaatacatcaagaagaattgaaatctggcttggagtatttttcttgaattctccatgctctaaattggtccctaaatttttatttgaattttcagagcaacaaaaataattttaatacaacaacaaccaatatcagagtttatattaacatgaaaaacataaaataattctctccttctctttgggccataacattttcggcccaaagtcctcctctccccagccgatgagcgaagtctgtatttgtccacccacctcctcctctttctctccctccctcttgggccatctccagctgtcggcccatctctcccctctccccctcggcctgtcctggtctagttgaccggccaccttcccatccccttcccctcacgcgctggcagatggggcccacgtgccaggcgcgtcccctacctcaagtccgccgttcttctccctcccgaccaaaccctaccgtcgccggcacgccgacctccctccccggatgattacactccgaattgaataaaaaatcattctctctcctcctcatcatcaattcccccatatttacccttcttgattcagcctttaatcatcgaattcaatctctggtgaaccactgccattgatggcctcccctcatctccttgcatatatatgttggggcaaatgagtagcccaaccgtatggaaaaataagttttgatcacatggagcaaaattgccgttgtagatttatatataacgggcacatctaccgagatttctaagactggcagcatgggtacaaattattggcaagtctgttatgttaccacaataattaattgggcaaaaaccaaagtataagatgctatagggccttctcattctaccaccctcagtctttcacacatagaagtcacaaaaatattgaaaaaaatattttttaccggttttacatgattataccgaaaatgctcacaccccggcgaccagcggggtggagaaaaatcggacgcaggttttgtcccctgccactgcatgcagacatgcaacgaatcttttattacatgcccccctctcttatttcttcaaaagattttttctcgtaaactatttatctaatttacgatctaattgtaccactaaattcgttacaattaaatctttacaacaagaccacacattagttttttattgatttttttaatgttgcatgtggtctcttctgatgtttcaaccagtagttttacaacgtttcagctagtgtactcatgatgtttcactatgtacgaatcaaatgtcgcagtggatttttatattatgaaacgtattgttgcaacaaatcacccacatattttggaaaccctctattaaatgaatttggtttattttttgttccaccaaaaaggtttcacctagattactcacaatgtttcactatgcatcgatctaatgttgcagtgaactgaaatattccagtgcaacaaaaaagccacatattttagaaaccccctgtcgacgggggatacccgtagaccagatatagagggtattggggtacgctggtacgagcatctacgtaatacgacatcgagcaagcagaaaacaaaaattatactggttcaggccccttaataggtaatagccctaatccagttgatatgggattatatgatggaaaccacagattacaaaggaaatagtggaactcgatgataccgacgagatcgtaatcgagttgattcaactagatcacccggcaattctgctcctgtaagctctggcttcgtaggctgtagtggatgtgttggctctgagattcaatgccttaggtcctcccggggggtcccttttataccgcaggtcaactggtctccaggttggactcggagacatcggacccgacacgatacaatgatgacccagttctatccgagtaggactctttccatctgtagactccatgctggactttcttaacttttgctgagaacgtccgtatatgcgcaaacatactatatcaaaatgtgacgtatatcgaagggtggagggtataccttacctgtaactcggacagtagcccccgacttctacttaaatgatcttgtgagaccgatcgcgacttctgatgttgtcatcgttctcgatgtggaaaccgagagacaaggagtgatcgacaacgtcgggtgaagctcaacggtcatgagtgaatttaaattgaagtccgaaaaactgtcgcgcataatggaccccgaaattttcggcggccatctctctcctttccttggaattcgcaccgtcggaagtacgtctatttaagggagttttggggatcccatttgaagtccgcctgttgaaggaactctccagcttccaagcatccctcgtcttctttgctcccgcaaaaaccctagctagctcatctcgatcctttctccggcgatccccggcggtaagtcaacctccaccagtgcgtcactgaagaaactgcaggaggatggcgcccttcccggtcgcgggaccacagaaagagaagtaggaggtactgaaccccagcctgtcctgggtcgcatggttgcgatcgaagacttt

SEQ ID NO: 21866 - DNA, 5241 bp, Oryza sativa
actttgttctctgtggttttcttcctccgccgtctaaatttattctattggtgttgaatttctatggtctttccttgctccatttgaaccccaattccatcgcctttctgagtatcttttctcatctgtgtgaggcctacattggggtagagccgtttcttgaccttttccgcttctactatgagttgcgctagatagaacctaaaaaagtgtccgggtgtgttggtttctgacatcgggatggcctgaagtcacgatacatccccttccagtgcccctcatcttgcagcaaatggcgggggaggtggttctatcttcagatagaggattcggatccggtcttcattgttcctgaagaacaaccaaacaagattccatcctggaccaccaaacccgctttgatctcctcccttcagtctttcatcgatgtcattaatgaccttcgagaacaggggttgtcggggtatgaagtcactgccgacttcattggtaggtggattcagccgcttcacgctcgagcccatccagcctttgattattctaggccggaggacgcgacccgggtttctcctcggggtattttcctttttagttaaattgacccccttatgcgcgtgttcttcccgacttattggattctggtctggatctacaggcttggacagtgcaaccgtggagcgccgcgtcagtcaactggtgatcagtggcccgacaacggcgagcaacgtccccgtccccctttgcgagaagggggcggccgagcgtgatgctgccatcaatgtaagtgtactcagcggtccttttccttttttcttccgggattgcattgtgacttcatgacacgtaggctctccctctgactgatatcatcgggccgctcgtggaccatcaggtggcggcgttgctgaaggagaaagttgccaaggaggcgtctgacgctgctgctgccgctgccacaacgagtggcggcaatgttccgaaaaaggggaggaaattctcctctatggtcggacatcgtcggaagacacccaccccctcggtaagtttccctgttcttttattacgtagtcgaaagatttgcacctcacatcgcatcggttgtactctaggcctcggacgcgtctcctccacctccgcgacggcagcggctagtgatgcttagcgagaagtaagtggatgattttgagatcttgtcacttcatcaaactgttgcagcctgtctcagttccatcttttcgcagggcggcacgggcgaaggtggcgcaagacgggtctggagggacctccagcgcgtctcctgccatggcctcgacggatgtcgtggtcgtgcccaggagtcgcgaggcgacacctagcggcccaatcagcgatcttgccgctggtcggggttcgccagctgccgttctcacctgggaggagctccaggtcgagatggggcgccttctcgaggctagtgctcgcggaggcaagggcggcggcagcgtcgtcggcgaatgagcgcgccgaccggctggcgcgcgacttagcggaggtttgcgaggacctccagaagatgcaggagctggtggctggcaatgagcgacaacggcaggggctcgagcaccgtatgtcagagctcgagaaccgcttgtcggagatccgcggctccctgcgtgtcacctacaccggcctgcaccagctcgccggggaatacggcgtcaaggccaccatcccggcgaaccccgacgagttctcgttgacgtcctcacttgaggagctggcagcggcgatggaggcgatcccctccaaacacgcggccagggtcggagaggagacgtccaacgggatctataccggggcgtgccatgtccttgcgtgtgtgaggctggcatcctgaactcgatctgcagaagatcttggatcagggggcggccagcgatgtgcgcaaggacgagatggaggaggtcggtgacctgggagagtccgtcctccctctttttgaagagtagggtcttagctctcttgtactctttggccatgctttgtaaaacttttattggttccaaccgcctttgtgtgcgcagtcatcaccttagcgttttcagcattttgatcttgagaactttgttgtcgtttgtagagatgttgatgtcgaggatgtccagtagcacgggcagtctgagttgccggtagtcgttccattacttgcgttcgagccacatgtgccggagggcgatgtagctcaaaattcgcccatcgaaacgagcatggcgacgactcccttaggttggttgtctttgttatcatttcctttgcccttccgtctggatcgacttgatttgttgtgttctcgggagagaagagcaacttgacttagtcgtttccatgctgagcagatctcgagagtgcacttgctgaccaggatcatcgcatccagtactggaggacgaagtttgaggtcgcggaactcaagaggactatgctggaagtgagaaaggaccaggccgtagagacactccggggtcgtgaggtgtggttcaactcgtatctgaagagttgctgcacatccatgtcgagagtctgtaaagagctccgagtaccccgcggggatcccgaggaatcggcggccggatatatctcgtggctgaatggcgctagcacccagctcgaaggcatcggtcaacgtatcgacgaagccttgaagcaggagtgtcgtcggtcgagccgatatgccggggggcatgtgttggcttgtatacgagatcatcgtcggcgagctttatttgttatctctttctaagaatgtgaatgttgtgtcctcgttgatataagaaaacaagaaaagaaagcgaactcctgatgtctcatcgaaattatggcactgtcgtttaggccatatttcgagggggagaattgagagactagttaagagtgtaattcttcctccattggagttctcagatttacaacaatacatactcaacagcgttccaagcaaatcggtgcccaaaacaccgtatgagctatggataggaagagtaccctcactagctcacctccgagtgtgggggagtcctgcagaggctaaagtatttaacccaaaccttgggaaattagatcccaagacaataagttgccatttttttggctatcctaaaagatcaaagggttatgatttctactgtccaaacatttatacaaagtttgtagaaacgagacacgctgtcttcttggaagacgaaatgattagggggagctcggttgttcgagaaattgatcttgaggagagggggtgtctgtacctgctccgtcgattcaagagcctttcttctctctacttgctgatgttgtgcctgcaatgcatgacgttgcggtaccaacacctgttgttacctctcctgtggcaacaatgaatgaaagtgaggaacctgttctacaggattcaaccgaaattattgccacaccagaggaggagctgcaacagcctcaaacagataatgtgccggaacagcaggcccctagaaggtctgaaagagttagaagatcggctattcgtgatgactatcaagtttatagtatagaagagtcgcatatggaggctgatcccacctcatatgaagaggccatgagaagcgctcgctcatctgaatggttggaagcaatgtaagatgaaatgaaataatgaaactaaacgatgtttgggatttgaaagaaattcctaaaggagccaaaacagtaggttgtaaatgagtctacaaaaccaaatatgactccagagggaatatagaaaatttgaaggcgcgacttgtggcaaaaggcttcacgcaacgagaaaggattgattacaatgagacattttctctagtctattgtaaagattccttcaggataataatggcactggtggcacattatgatttggaattacatcagatggatgtaaaaacggcatttctaaatggagatttagaggaaaaagtatacatggcacaaacaaaaggttttgtcatgaaagggaacaaaaatatgggatgccgtctaaagagatccatttatggattaaagcaagcttcgagacagtggtacttgaagtttgatgggactataaagaaatttgggtttcaagagaatgtcgaggacaactgtatttattcaaaatttaagaatggaatattcattttcctaattctgtatgtggatgacattctaccatctagtagtgatgtcagtccactgcaggaaacaaagaaatccttgtcctcaaactttgacatgaaagacctcggtgaggcttcatatgttttgggcatacagattcactgagatagaacaaagtatgcattgggactttatcaaaagacatatatagaaaaggtgttgaagaaattcaacatgtacagatgcagtgcttcacctgctcttatagtcaaagcggaaaagtatggggcatgacaatgtcccacaaatcagtatgagctcaatgaaatgaaaacaaaaccatatgcgtcagccgtgggaagcctacagtacgcgcaagtgtgcacacgccctgatttagcatttggtaccaggttacttggtagatttcagagtaatctaggctcagagcactggaaattggtaaagaaagtcttgcgctatttgcaaggaactaaaggcctcaagctgtcttacagaagatcagaatcgctccagatagtggggtattctgattctgactttgcaaaagataatacaaagtcaacatcgggatacgtgttcaccctggcaggaggagctatttcatgaaaaagctcaaaacagattatcactgcagggtctactatgtatgccaagtttatagcatgctatgaggccactaggcaggtgaactggctaaagaagttcatacccggtttaaaggtggttgatagtattgagaaaccactaaagttatactgcgataacgaacccgcagttttgtacgctcacaacaatcagtcaagtggtgctgccaaacagattgacataaagtactatgttgtgaaggacaaagtctgggatcaaacaattagtctcgagcacattagaacagaaaggatgctcgcggatccgctcacgaaaggcctatcactcaacgtgttcaagaaacatgtagtcggcatgggtttaagggaagccttatgaatcctggactacagggcccaaaagttaaagtatctatatttgaatagagatgtgtatagtggatgtcgaatccattggtgattgaccgtgacgatg

SEQ ID NO: 21867 - DNA, 950 bp, Oryza sativa
catgactacaagatggctgacaaccgttctgtagtcgaacaggctcatgagatataaaccatggctaaggaatttgaactccttaagtgtgtcttacccgacaaatgggaggtcgggtgcattattgcgaaactaacttcattttggagaagtttcggtactgcactcaaacataagagacaggaatactccgttgaggggtgataacgtctcttgatattgaggagaaagctcgggaaaaagatgccgcgtctaagggcgatggtgggcagtccagtgccaatattgtgcacaaggcccagaacaagagcaagggaaaatacaaagctcagcagaccaccaacttcaagaagcagaagaagaacaataacaatcctaatcaagatgagaggacttgctttgtgtgtggccaacttggtcatctggctaggaagtatccacagcgcaaggggatgaaggcacctgcagggcagacttctaagtatgctaatgtgaccattggcaagactggagatggaagcgggtatggtaatttacctactgtttttttagttaatcagtctacttattggtgggttgatactggggccaatgtacatgtttgtgctgacatctcattgttttcttcttatcaggtcgcacggggttccaccgtcctattggggaatgggtcacatgcttctgttcatggtgttggcacggtagatctaaagtttacttcgggaaagatcgtacagctgaagaacgtgcaacatgtcccttctatcaacaggaatcttgttagtggctcccgtctgactagagacggatttaagttagtttttgagtctaataaagtagtcgtgtctaaacatggatattttattagtaaaggttatgagtgcagaggcctattccgcttttccctttctgatttctacaataagtctgtgaaccatatttgtggcagt

SEQ ID NO: 21868 - DNA, 2288 bp, Oryza sativa
cgtgggctatcaaacccaacataaaacatggtccaaaaccttcaagagattttgaaaaacttgcaaagaaacccggtgtaagtgttgtgacaagtgaaacaactcgtgattaaaattttgacttaggtttttcaactcacacaaagatgaagcattttgagcactagtattttaccaataatatgcatgtggtatccctcttaatagtacgacattcctacgacacaatgtaaggtaaaaggtacaatatactatttgatcattgccgcattgcatcgtgatgtcgcattcatggggtatgcatctcattacaacatgtcgaggacataacaaccttcacatttgcttgaataaaagtgttagtcctctctaatcgcattgtaatcaatcatcaaaatcattaagggcctagatgcactttcaggcccttaccaccacgcgatgaggcgtgggaacgacgacgacgaacgggcgtggcggagtcagacgggaacgacggagacgaacgaatgacattgcgccggtgatctttggacgaaggcgagacacgaccggcgcaacgcttgacgacgcggaggcatggacgaagatgacgacggggccgtagcaaccttgacgaaacgcaggcgacgaacggatacggcttgacggcggaacgaacgccactacaaccgggaacgatgagaggacgacgacgacgacgacgaacatcggcggggttcagccgaaggggaggcgagggcgagggcaaccttgccgcggtgatgccggaggagacggcgacgtcggctggcgcacgggcacggcgttaggggctgccggaggagacatcgacgaggaggaaggatagtgtcacgtcccaaaacgaccctaaaatatatcctttaaattatgcctagaataattaaaatccatgtgtgaaagcctccaaaaattaaaatgtgcaaagtaaaagtcaaataaggcttggaggatttttgtatatttcctaaaagcctaaaatgtgtaaataaattttagtggaattttcagagcacaaataataattaagaagaaataaacaaagttgaaaaagttttaaaaaaaagaaaaaccctaaaagtcccccttcccttccatgggacggtccggcccatctccctctccccccacctctctctctctcctctcccccgcggctcattcggcctccctccccgcgcgcgcgccgctgacgggcgggcccacccgccaccctcgctgacgtgtggggcccatccgtcatccccgtcctcccaccgctcccgccgccccgcccgcgccaagcgccgccgctgccgcctaatccgccgcatcccgccgtccccgcgtgcaacaaagtggggggaaatactccccgtgatcccctctccctttccccccatttttcccactctctctcgcgttcaaatgggcggatttgcccctgcaaatctcgccggcgccattgatggcggccggacctcccgcgccagtttcctgcccctccggccgctctctcccccttccaaccctatttaaaccctccccgcacttccttcgcatgtttctaccctttgtcgcgccttctcatcgctggaatcgagctcacgccgtcactctctctctccaccgtcgccgccgagctccggtccgccgccgtcatcgccccggaccgcctcccacctcggcgccgcctacttcggcttcaccacatcctcgccgacctcgtccacctctccgtttcggtcgccgaccgccggagtgccgccgtccccactgacccgagccacgccgccgcctccctccgcttcggccgcctcctccgtcgccgccgtcgccccggggtgagccgtggaccgtcgcctcctttccccttttcctccgctctctcggccgctgctccgccgcgtctatggccgccgccggcgaccatagtggcgcgggcgtgccgcctctcgccgaccgcgccggcatggccgccctcgggcgcgccgagtggctgccgtgtggggcctggccgtcagccgcccgcgccctcgggtgcggctgacgtgtggggcccacggcaccggccggtgtgagcccgggtgcacccggtccaccgtggaccgtgaggctgccacgtgggccccactcccatggacccggtccgcgcgccccctcccctcggctgacgcgataaaccctttttaaattaaaatttaaatgaagaaattcgcaaatatttattttaagagtatataaacttcaaatggccataacttggccatttgaactcggaattggac

SEQ ID NO: 21869 - DNA, 1135 bp, Oryza sativa
tgttttatctagccatgcctatttacctttgttatgaccttattattgttattgttattattaccttgttcaccctagaataaacaaaaccccaactagtggacactctactcatggtaccactagtatgaatttaggtagatgcttcgccgcttaattaggtaacattaggtggttttacaactctagactttgggaatattcatatcacctagacactatggaatggttggattattgtggaattggattcacacctccccctctattcaaaaccctcaaaatggttttaggctgggctcggggtgcatggttttgatagtagcacctcggtcatataaggaccggtcttcgggcctctgttgcaaagtactaccatacttccacatgtctagtgggtaaggcttagtttgtggctcagtctggttataaacaaaagtacacggatggagatggacaaagtcgggggtcgatggacatctctagggcaaatgaaggctacacgagctgcggcccggtagtcgagatgtgatggcacagggccggtgtcctgctgctaggggctcagtcctgcctacctgtcccggggtgtcacgcccggaatttctatccaaaattccaaacgcttacatgtgtgtgaaccctcgtacaggaatcagccgaggcacacaataacaaattgataatatagtacaattattactctaattaataagcgaataaaatgtcattatagaggtagatagttcctctcaatcaataaagatctaagcagcggaaaataagataaacggcgcagacgactccactccacaggcagcttgaccaggcctacacctaatcctccacaccatcagcttcactgtagaactcttcctctgatgaatgattgcaacgtgagtatatgacatactcagcaagccacgcagcaaatatgcaagcgcacaagataacaaaggatggcatagtagggtttcatttgcataaacaacatttaataaacatttcagaatttaataaaacagttaagtattaattaaacagtattaatccaacgctacacaacataccctgttgcatgggcccaaccattctgaacaaccatcccggctgcacagttctatcttcaaaccag

SEQ ID NO: 21870 - DNA, 1329 bp, Oryza sativa
gtcgcttgggctctcaccatccaacatcacaaaccgctcaaactgccccttgagaatgtccaccttgaactcgctaacactatccgtaacttcatgcaaactccgaagcgtgtcccaaatcactttggcactctcaatgccgtccacacggttgaaatcacttccactcaaggcgctaagaattgcattagcggcttgagcgttcttgtgctcgttcttgtcgtcctccttggtgggttccacgggattctgcaaaacatagcctttttcgactattctccaaatcaaagggttaatagatttcaaatgcatcttcatcttatgtttccaagcggcatagtccgtaccattgaagtacggagctttgccgctataggtgctcacataagatgcagatgtggagggatagtcataaggaaacgtagctcccttatcaccatccttgccattccccgtttgacccgacatgatctctccaagcggttaagcctaattaggagattaggctctgataccaattgaaagggtcaattaggcctaaaggggggtgaataggctaatttaaaactttatgcggaagctaaaactgaaataaggtcggaaagtctgatccacagtcagactatccgaaaatatcagatagtctgatgttggattagactgtctgatccaccaatgaagcacaacaagtagatatatcacacaaacaagagtaaagcacaaacaacgactagatctatagcggcacaattaagcaaagctaaaaggaggatgaagggagatcaccaatgatgaagttcacgaagttgtccccggagttcaaatccttgaggggattctactctccgttgaggagctcactaagagccgagtctttgctaaccctttcctcaagaggttgcactaagcactcttccttccaataaggggtatctctttccttgcggaggcgagatccggccttcacaaacttctcccagccaaccacacgtagatcggtggctcgggagtgacacctagccatctaggagttctcaacctccaagagtaacaaacaccacacaactcttggtcaaaccttagcgctcaagatcgagtgaaacacacactaggccctcaaacaccaaatccacaaccaccaagatccaccacacaaagaacaaggagggatttgagagagggagagagagctcaaagatccaaagcaccttagtaccaagctcaacccaaagtgaatgagaatgaaatgagttgggtaaccctagaaaagggttaggtggggggtatttatagaccccccaaaaatgtggccgtgtgaggggaatcttt

SEQ ID NO: 21871 - DNA, 766 bp, Oryza sativa
tgaaacctgaggtgtggtgtgcttggttagagggggttatgcgaagggtcctgtcacggcctctttccggtatgtcgtggtgacatgtcggcgcacggaaacgtgtcgtggggctgtgtcttgtgggtacagttgtacacctctgatcagagtaaaactattcgaatagccgtgcccgcggttatgggcggtcaaccagattcaccgtgattagtctcaccttagtgtaatcttttgaatttggatagtttaggtggatggctgggcctgtcgcaacgtgggatagcgttggacagcggatgattaatattaattaattattacaactgtttaaatctttcaatttctgtttataaatgctcgctttatgcaaatgaaccacttcagctcttctttgatgattccctgcatcatacccctattccggtatgacttgctgagtacagtgggtagtactcagtcttgctctacttttcccaaccccagagtttgagttcggggtcaaatgaaggtttcttcgaagagtaggctttgtccgtgccgtcgaggatgcctgtggagtggtgttcccgctgcagttttagtcaaggcttagctcctgttgtctttttttttcttccgctgcatttatgtaagacttttatgatgtttgtaagacgtggatctgaatgtcaacattgtcgtttgtgtaccccggccggtcctggacggggattttaatgcacattctgcttgaaattctattcgggaatttttgggcgtgaca

SEQ ID NO: 21872 - DNA, 625 bp, Oryza sativa
tcctaggtctatagtaagcttcctagaagattcacccaaaatctccatagactgcgaccaacagtcaagctcacaaaggtgagttctttcaagaatgctctgcaggacaacatcttcgctaattaaagccaacagaacacattaaggcatagccaacctgccttacagctcacgagagtacatgcatcttcacttagagagggtatagattggtactctcctctagtttactaatggtttgttcttcccagattctaattcacgggatctccgatcacatagactgggttaccaccatagtataactcacatgggtctcaaacccatctccttcgatacattgtttatcacatttcgttatagtcccttcgtgaagggatttgccaggtttctagctgtttggatgtaatccaacgttataactccggagtttcttaatttcctgatagatttcatattatccttagaactattcactttaacaattaccgtttgattgtcacagtttataaggatagccggcaccggtttttcaacaataggcagatccattaatagaacatgcagccattctacctcaacagtagcagtatccagtgccgtcagctctgcttccatggttgac

SEQ ID NO: 21873 - DNA, 1620 bp, Oryza sativa
atgtaatccaacgttataactccggagtttcttaatttcctgatagatttcatattatccttagaactattcactttaacaattaccgtttgattgtcacagtttataaggatagccggcaccggtttttcaacaataggcagatccattaatagaacatgcagccattctacctcaacagtagcagtatccagtgccgtcagctctgcttccatggttgacctcgtcaaaatggtctgtttgcaagacctccatgaaacagcaccaccacccagtgtgaagacatatccactagtggctttgatctcatccacatcagatatccagttagaatcactataaccctccagtaccgcaggatacatagtatagtgaagccccaattccacagtatctttcagatagcgcattactcgctcaagcgcacgctagtgatcatatcccggattagaggtaaatcggctcaacttgctcacagcaaaagagatatcaggcctagttgcactagccaggtacatcatcgagccaatgatttgggagtattccagttgattcctagcaattctcttgttcttgcgaagcaacaaactaggatcagaaggtgttggagaaggcttactatcaatgtagccaaaaccaattcaagatcttctccacataatgggactgcaagagtgtaatcccattctcacctctaattagcttaatgtttaagataacatcagctactcccaaatccttcatatcaaaattttgagacaagaatgatttaacctcatttatcacctcaaggtttgtcccaaatatcagtatgtcatcaacatacaagcataaaataacttcctcacccccaccatggcgatagtacacacatttatctgcctcattgactgcgaagactgcagatgtcaatgttttgtcaaatttctcatgccattgcttaggagcttgtttcagaccataaaaagacttcaacaatttgcacaccttgccttcttgaccttcaactacaaacccatcaggctaatccatatagatctcctcatccagctctccattaagaaaagctgtcttaacgtccatttgatgaacgagaagaccatgtgaggctgctagggaaagtagcacacgaattgtggtcaatctagcaacaagtgagtaagtgtcaaagaaatcttcgtcttctttatgagtatagcccttagcaacaagccgaaccttgtacatttcaatagtaccgtcaggcctaagcttctttttgaacacccacttgcatcccacaggtttacacccatagggtcgctctgtcacctcccaagtcccgttagcgataatagaatccatttcactacggacagcctccttccagtagtctgcatcaggagatgcatatgcttctgaaattgacttaggagtgtcatccacaaggtacacagtgaaatcatcaccaaaagacttagctgtcctttgtctcttactccttcgaggagcttcactgttatcttgctcagtgacatgttcatttgtatgttcagtttgttctggtggtgtgattgaactgggaattatttcagatggttggctcgaactattatgtgtatccttcattggaaaaaagct

SEQ ID NO: 21874 - DNA, 8504 bp, Oryza sativa
ctctataaacctccgataatatcctgcgaggcctaggaaactgcgaatctctgaaacggtctttggttgtttccagttggttacggattctacattactaggatcgacggcaactcctcctgctgagatgacgtgaccaaggaacttcacttcagacaaccaaaattcacacttgctaaacttagcatacagttgatgctctcgtagcttctccaatgcaaggcgaaggtgttcttcatgctcttctttggttcgggagtagataagaatatcatcaataaagactaccacgaacttgtctaggtattccataaacaccttattcatcaagttcatgaagaaagcaggggcattggtaagtccaaaagacataacagtacattcgaacaacccatacctagtggtaaaagctgtcttaggtatatcttcctctttgattctcaactgatgataccctgatcgaagatctatcttggagaaaacagtggcacctttaagctgatcaaacaaatcatcaattctgggtagcgggtacttattcttgatagtcacatcttttagtgcacgatagtccacacacatcctctgggtatgatctttcttttccacaaaaataaccagagctccccatggagattaactcggtctgatgtaccctttctgaagcaaatcgtccacttgcctcttgacttctgccaactcgttggctgccattcgataaggtctcttatggatcggagttgttcctggtaccaaatctattctgaactctatatcccttttaggcggcataccaggtaaatcatctgagaacacatcgggatactcccggactataggaatctcttccaaagttatttggttcagtattgaccttaaagactcagaagacaatgcatgaacagttacaactcgaccatcattgctggtgagagttacttttctgttagcacagtctatcacacccttatgcctggctaaccagtccatccctaggataacatcaaggtctttggactctaacaagataagattggccagaaatggtactccttgaatttctattctgacagaggggctacgttgcaaagagagtgcttgattacttggggtactaaccatcaaaggacatctaagatcttctacttccatcccatgatttcccgcaaaactcatagataagaatgaatgtgtagcaccagaatcgaaaagcactgttgcaggaactgagttaacaagaaacgtacccaaaatcacatctggagcaccttgagcttctgcagcagcaacatgattgacacgggcctttgatgctgatacggtagagttgctctgggcagggacaaccttcacgcatcggggcttcggacacttgtcagcgtaatgtcctgggtctccacagttgaaacacaccacgggcttgctgccttgctccctcttggcaggttgttgctgtgtcgaggctgcaacaggacgtggaacttgattgcggatgttgttgccagcattgttgttgaagaactgacgctgcggacgaacaacagacgaataacctccctgtggcatggactggggtcctaaagtaagatgcggcctctgattattcccctgttgtgtcttgaattgagcaatccggcgtttcttctgctccatgcgattgtacttgtcctcctgacgaatagccttatccactaacttctggaaatcatgataatccccagtcatgagtgggtaagaaagctcatcattaagtccttccaagaacttctcctggtgctcttcatcagtgcgcacatcttccggagcataacgagccagacgattgaactcgtgtagatactccgtaacagagcgggatccctgggtgagcgacctaaattccttcttcttgagagacaccactcccgatggtatatgcatcttccggaaagcagcggtgaactcaagccaagtgataggttcagcagtagtcctattcaggcggaagtgatcccaccattcagaggcagggccatgcaactggtgtgatgcaaatgagaccttctcctgatcagtgcactgaagcaaatccaacttcttctctatggcatgcagccaatcgccagcttcaacaggattagtggtactagagaaagtaggcggcctcacacgaagaaattctgctaacttgttctggggaggtgcatggttatttccctggttctgctggttctggagttgctgcatcatcatgttcataagctgtgcctgttgagccaggacttgggcaagtgtgggattctctccattgttgttgttgttattgttgttgttggggccattcccgttgctgcgagtgaccaccatctggcatggacagggcacaagaagagaaaccgggggaaactacttaggacagagaattaatttgacttttattggtcttaagtgagtttcattattacaaactgaagactctcacaccactaagctcaccaactacctaacactcgaaagcaaacaaacgcatgcacttacatcccatcactgatgtaatcacatgcgagacacacacaaccaaacttaaaacaagcaaactaatacaacgatctaagacaacggcttgacaaggcattctagttcttccgagcatcggagttgattgaaggctcgttcggctcgtcttcatcatcttaagttgctccccactcaatcttggaatgggtgcgcttcgattcttcttcttcatcatcacttacgttgacgaccggaggatccgctagggctggggtaacttctttttccaccacacggacctttggtgccaattgatagcgagggacaaatagagctctcttccttgcggtaagacaaatcctggccttctgcggtggtgcttctcccttcaacgcggctagttccttctccaatcgatccactttgtcctctagcttgcaaatcttacctcgattccgatcttcacgatcttgagctgctaacacagtctctgcacgggtttcatccatagcccacagcatctcaaccaaatgccttgtggtagcatcattctcaattccctcagtctcaaggtagctgccacggtcacttccctggggttgacgagaatggtagcgatactcagtgtcggccaactgatcactgtagcgatcgcggagctcgcctatggcgatccttgctacctcctgacatgcatggatgtagtttcttcctccagcttcgaacatcactgaggggatatcttcactattactgttcaaagtgactttgactcggcacttctcttcatgacgatcatgaggaatctaggcataaaaaggggcagtcccaaatcctgtggcaaaggacatcgtacgcaactcctggacaaatccctcaacaccaaacaagtactcaggcttgtagcgcggcatctaaagacaagtgaaaggagggagttaagacatttatccaattaatagcacaagtttttggattaatttgaataaagttagaaaatcaaagtaaaaggtaagtaaataaagtaaaccaagcttgcaagataagttgaaacagttggaaataaggtcacaaattttgtacttttgaacaacaggttccaacagagataaaagaaagttataaaatcaacatgctaaatttattttcttgcagcaagattaaataaaacaatattgtaaaacttttgctggtaaaatgagccattagtacagtaatagatgtacagtactaataacactggaataaattttgaatgaggaccattaaaagagattatgaagtgcatgtgccattagtttggtttaattaaaagagaaggggaggagaacagttctacttttccaatatttttagagggcttctatgggtaaccatttggcataacctagggtcaaggaggctctgataccaacttgtcacgcccggaatttctatccaaaattccaaacgcttacatgtgtgtgaaccctcgtccaggaatcagccgagacacacaataacaaattgataatagagtacaattattactctaattaataagcgaataaaatgtcattacagaggtagatagttcctctcaatcaataaagatctaagcagcggaaaataagataaacggcgcagacgactccactccacaggcagattgaccagggctacacctaatcctccacaccatcagcttcactgtagaactcttcctctgatgaatgattgcaaggtgagtatatgacatactcagcaagccacgcagcaaatatgcaagtgcacaggataacaaaggatggcatagtagggtttcattttcataaacagcatttaataaacatttcagaatttaataaaacagttaagtattaattaaacagtattaatccaacgctacacaacataccctgttgcataggcccaaccattctgaacaaccatcccggctgcacagttctatcttcaaaccaggaatataccattccaaaccaggagctaatcaaattattaccaattatagcatctgttattatgatgagaggtgtgaaactaatcacgaaagacattgttagacccacccataaccgcgggcacggctattcgaatagttttactctgatcagaggtgtaccactgtacccacaagacacagccccacatcatgtcaccatgtgcctcaataccaccacggtacctcggaaaggagctgtgacaatacccctcgcacaacacaatccactacagcgcacctttcctggatcataatcacccccttataaacaaggcatggactccccagcgacccctgtgggcttatctccgccacttctcagtctggtgctctgcaatgaaccacgctatacaaaaggtaaagccgttgcccacgctggcttgtggttggcacggttaatgtttcacaaccgaaactcgtgaaccggtccttaattgccatgagcacgactctcaaaaccatgtgctcacaacccaccattatcaggttttagttggcaagtaattaattaaccaatcacgattgaccatcgtgaactatcattaagccatcattaaataataatgaatcataagttatcccaatagtgtgctaatatttctaagcatggctaagcaatcacacctaatatctagctgaaccaatatataaagcccaactagtcaaattataataacccaaggtatcaaggaataaagtaatcaagaacaaaaagggctataacaaacaataggttaattccacccaatgacattcgaaaataaatgcaatagttgaatagaaacaatagatttaaacgggatcaacatgctcaaagggttgtttgggatctgtgtgacttgccttgctggccttggaactcttcaaattcttctcctgcgaaaacggactctccggaaacgtcggaatctaaatagaaaagagcaaaaaaaaaccaaaacagcacataaacaagcatgaacagtacatgtggatatttttaacatgtagatctcaattttagaaaaatttagagacttgaaccaactaaatccgagctaagatgaattagttatgaatttttaaagattaaatcgaattaaaacacttatatggattttaattgaattatgacgcaataatgaattatttttcaaaaagaaaaaggggtttgttgcgtcagcggctagggtttgcggtggaccgggcgcacggcagcggttcacgggaacgaacggtcgatatcgatcctattcaaaacggacggacgagatcgagcggtccacggtcggaccacgagggacgacgaccatgacgctagcgacgacgttaccaccggcggcggctcgggcgatcgggcgcgcatgctcgacggcgaacgacggcgcgaggacgcgaacggaggacaccaaaacgatgcggacatcgcggcgaactcaccggtgaccaaagcgacgacggaggagcaacggacgacgtcggcaacgaggtctaatcggcggagaagatcgggtcgacgggggcgacggtgctccggcggttgacagcgatggcggaggggcggacgaggacggcgaccgacggcgaccacgatggcgatcttcccgaacgacgacgacgactggagcgacggtgacacacggctggagcggcggcgacaacggcggcgctaggtcacacggcgctagggcgctaccgacggcgagaggcgaaagcaagggtggcgacgggtagaggagacaccggggatccttttataggggcaaggaggcggcggcgaaggcccacggcgaccggcgacgcgaaggaaacctcggtgtcggtgacatgggaccgggagtatcatgacttagagacttgaggcagacacgatcacccacgtggcctaaccccctcgggggggttgggcccgagggtgatacggccgcccttctctttgtctccccgaggggtcggaccgctcccgtctcggccccgagggccgaggcgccctgaccccttgtgggttttgcgccgcgtatatggggtaggtgagcatagcggggctcacctaaccatatttattgcggtttggacgagcgcgtcacgccgcatgtaacgcagtgcagcgcgctcgtttatccggtcagtgaccagtcacagaccgatcagatcgtgggttaggtggcgacaggcggtctgacgcacgcctcgccccatcccgtcaggatgagagcctccaagcactcgtccctagccggagccggcgtgttagctcctggagatggcacgttggtcccggccagatatataccaggcttcatcctaaccattacaagcaagacattgtatgaagaggggcgaacatgcagattgataaactgacgcgtggtggacaagaatgaccgatttgtgaccggtctgacactggtcatgtcgtcagcagacagccatgttcccacgtcgcgcctgcttccggcggaagtggaggtaggtatgggccgtcccatcagaaggtcattcggacggtaaccatacaagtctccgtctgtttatgaaaagataggataagtccccacaaaaaagagagagatggtgcatgtggtatccccttgaggtataaaaggaggaccttgcccacttagaagggggatttttcggatccagaacgatcagagagggagagagtaagagctctctggttctccagctcttttgtagcttcttcatacatagatccaccaaaacacaggagtagggtattacgcttctcagcggcccgaacctgtatacatcgcccgtgtcttgtgtgtttccattctcgcgaaccttccacacacagactaggagcttaaaatctcacccagggcccccggccgaaccggcaaagggggacctgcacggtctcccggtgaggagccccacgctccgtcatctggcgcgccaggtagggggctctgcgggtgtttttctaagctctcgcattctttcgtgtgcgccaagcttttcctgttcagcccaatggccgaacaagcaaaggcgcacaacctctctccgagtgttagcggtgacaacggggagccgaacccacgccgtcgagctcgtactccatcgccccctccacgccaaagtcctaggcgggaggaggcgctcgagagggtcgaaggatccgcgacttcaacatccacgggtgatggggaagggcggcgagatggggagcgtcgcctcctcgtctacggcgacggcagcacgcctcagggcgcgctccaagctgcgggcgcgctcctacgtcacccgcccattgtccctgacccggagtctccagcccaacgttggctggacgacgtggccaacttggtcatgacggtacggcagcgcctaggtgctggtgggcggtcctccgccaccaagacctctggcgctgctaccaccggctccatatcgtcaaggcggagggcgcggcgagcggcggctgttgctcgccatttggccgccactccttcgtcagcgcctccgacctaggaagatctgcgtggggggccggatgcccgcatcagtatcgagcgccggcgtaatggccgacgtgctgcccacgcaacggagggcgcctcctcgtccggagtgtcacatcaacacggacgcggggatcagccctccgtgcccccggttggtggtgtcagctgtagagcctttgtggcgagccttcggaacatccgttggcccccaaggttccagcccaccatcgccgaaaaatatgacgggagcgtcaaccccgccgagtttctccaggtctacacgaccgggatcgaggccgccgggggtgacgacagggtcatggcgaatttctttcccatggccctgaaggaacaggcacggggttggctaatgaacttgccacccgcgtccgtccactcttgggaggatttgtgccaacagttcaccatgaactttcaaggcacatatccgcgcccaggtgaagaagcggacttacatgcagtccagcaaagggatgatgagtcacttcgctcatacattcagcggttctgtc

SEQ ID NO: 21875 - DNA, 2496 bp, Oryza sativa
acgctccgtcactcgggctcggagagagagagaccgatccgaatcgacctcgaatcaaacactttccaagcgattttagccgatgattccaaaagagaaaaggtagaggagatctcgggaaacatttcccctctattgatttcaccggagaaggaaagacgcggccgaatttggaaagagacagcggcggcgcacgctagggtttcgggcggcggcggcggcgcgaggaagacgaagactgacaggtgggacccacctgtcagcgacagcgagcgcgcgcgcgcggctgcggactggactgggccgacttgggccgggaagagagagagagaaggttttgggccaactttcggcccaaagccaaaagagacttttaaaaacatttttcaatttaaattattcattaaatgcaattccatttattaaaaatacttccttagctcaaataaatcccataaaaatctaggaattatagaataaagcaaagtatttaatgaaattttatctggccccattttatattggaatttattaattaaaattagatcttctctcctagacttttaaaatcatttctaaaaattccaattaaacaacaatttatacatttaggatttttagggtgtgacaaacctaccccccttaaacagaatctcgtcctcgagattcggaagaactggtgaacagatgcggatgagctgacttcaattcatcttctcgttcccaagttgattcttcttccgagtgattactccattggactttacaaaaacggataactcgatttctggttcttctctcatctatttccaagatacggattggtttctcaacataggtcagatcctcttggacttctatctgttcaagattagcttcttcggtaggtacccttaaacacttcttcaattgcgacacatggaacacattatggactcctgccaaagattgaggtaactccaactaataagcaacctctcctcttctactgacaatcttataaggtcccacaaaacgcggtgccaattttcctttggtgtgaaaacgatgaactcctcgaagaggcgtgacacgaagatacacataatctctttcgtcgaaactcaaatctctgcggcgattgtcggcataactcttatgacgagactgggccacacgcaatctttcttgaatgattttcaccttttcttctgcttccctcaggatatccgtcccgaaaacctgacgttctcccgtttgatcccacaaaagtggagtgcggcactttcgaccatacagtgcttcgtacggagccatctgaagactagcttgataactgttgttgtacgagaattccgcataaggtagattcttatcccaacttccaccgaagtctaaagcacaagctctcaacatgtcttccaaaatctgattcaccctttcggtttgtccgtctgtctgcggatgataagcagtactaaagttcagcttagaacccatctcttcctgaagcttcttccaaaaatttgaggtaaactgactgcctcgattagacactattttcttagggacgccatgcaaacacacaatccttgccatatacaattccgccaaccgacttccggaataggttgtctttactgggatgaaatgagccactttggtaagtctgtcgactatcacccaaatagagtcatggcctgatgacgttctgggtagaccagtgatgaaatccataccgatttcctcccatttccattcaggaatcttcaaaggctgcaacaaaccggcaggtttctgatgttctgccttgactcgctgacaaacatcacatactgctacgtactctgcgatttcacgcttcatacttgcccaccaaaatctttccttgagatcctggtacattttggtactaccagggtgaatggaatataaagtatcatgagcttctttcagaattgcatcttttaaatctttgttgtcaggaacacagattctctcgcccaaccatactgttccttgctcatcctccaagaaaccgatagctcttcctcttctcatattctttttgatttcttgaatatcaggatcattaatttgggcttctctaatttgatcaattagagtgggcttcgcttctaaggctgcaacgaaacctctactgacaattcccaaatttaatctttcaaattccttgcataattccaatggcaactgtcgtccttccgtagcattgcaatagcctttcctcctaagagcgtctgctacaacattaacctttcctgggtggtaatgaattcccatgtcataatccttaattaattccaaccatctcctttgtctcatgttcagatccggctgagtaaagatatactttaaactcttgtgatcggtatacacctctgtacgagtaccgaaaagataatgacgccaaatcttcaacgcacgaactactgcagctaattcaagatcatgagtagggtagttcttctcatgcggacgtaactgacgagatgc

SEQ ID NO: 21876 - DNA, 654 bp, Oryza sativa
cctttcacttgtctttagatgccgcgctacaagcctgagtacttgtttggtgttgagggatttgtccaggagttgcgtacgatgtcctttgccacaggatttgggactgcccctttttatgcctagattcctcatgatcgtcatgaagagaagtgccgagtcaaagtcactttgaacagtaatagtgaagatatcccctcagtgatgttcgaagctggaggaagaaactacatccatgcatgtcaggaggtagcaaggatcgccataggcgagctccgcgatcgctacagtgatcagttggccgacactgagtatcgctaccattctcgtcaaccccagggaagtgaccgtggcagctaccttgagactgagggaattgagaatgatgctaccacaaggcatttggttgagatgctgtgggctatggatgaaacccgtgcagagactgtgttagcagctcaagatcgtgaagatcggaatcgaggtaagatttgcaagctagaggacaaagtggatcgattggagaaggaactagccgcgttgaagggagaagcaccaccgcagaaggcccagatttgtcttaccgcaaggaagagagctctatttgtccctcgctatcaattggcaccaaaggtccgtgtggtgggaaaaaga

SEQ ID NO: 21877 - DNA, 11583 bp, Oryza sativa
tccaaattccatagtccacatcgccaatttcgtccatgtttgtgaagccttcttgggaattaagccccacttcgctctgtttcgccggatcttctttctcaagccccaaccgaacaagagtaagccatgtgtagtcgggggggctggatttcagctgagggggactctgagccagaagtacttctctatgcctttcaaaacctcaaacaaagggtggcatgcaaactggttttatattcagaatcctgagcctgctcttcccgagtactcttgtcttcctccggtgtacctagatacctggaactctcttccgattggggatgaagcagcccaagccttggagttgatggatcgcatgctaaaactcaaagaacaaggcttacaaggagagcagattactcggcacttcatcaaatgccgattggcaccaattaaagaaagatctcgtacggcattcgagtttgacggcaagcatgatcctaaccgcgaagaaccagattctttggattttaaaatcatgaaggagagaatgtataaaatcttctcaaacgctattgtcgtcagctactcacatcagctgccagttgtgccatataacgcattcaatccgcctccgcaggtatgtatctgaaatcttcaacctatgaccaaaacattatcttgtcttcatgttgagttaactaaccgtggaggcatctcattcaggaatatgtattgatgaaatctgatcctccaatcactcagcgccggtctcctcgccagcacaccgttcagggaggtggagggccaacaatcagatcagatccgcaacctcaaacctccaatccaactggacagacaggttctcgcaagagaaaactggtacttgacaacgatgaaggcgacgacgacaacaaatctggggacaagggctcgcctaataaactcccaaagcgtaccatgcccaggaaaaaactggctaaccgcccaacgccaaagattagaacatcttctaggtataaaacctcttggtaccatttcacttcggcacgcttctctcatgaaaataatactgaatattgaaagaacactttgcaggaaaccatctgacatagacccaactggaaaagatcctgatccggctgtgacagagccaaatttatccaaggatcctgagccgactggcgcccatgcttcgggtgataaggccgatccgagtgaccagccgccgactggaaaccagtcggcagcagctgaaactgcaacaacccaagagcccccgactggaaaccagtcggatgtaggtctcgatcaagaaatccccgaagttgaagcgcagacgacaacttctcaaggaccagaggctggtaacgactcgatgattgggtctccaaataaagaacaaggatcacctcacgctcagctaggaacatcctcaggtaacccgtcttctcaagtgatgctgatttaaataacctcggtttattcgtctaacgtattggaaatacatcaggaccaccaggcgatgatgaagaagagattcctcgcataaaagcggctgatgactctcgtcctccgatcttgctcaaatggtgggatgaaaactcacaagctgccggcatcgtcataaatcgtcaaaaagaggatgaggaagtgtgccagctgaagaaggcacttggagaagccactcgcatcgtgaatgtaaatattccgggtgactgccttttgacgactttgttttctcttcagcaaaactaaaccatgaaccatcatgcagagaatccatcttcgtaatgaggccaagaccgcaactttagaaaagctggttcctcatttgggaactcttgaagcagttagggaccagctacacgaggccaaggagctcgccaaaaagacagagaaggaattaagggaccgaattgcccagctccaggattcaaactacgagctgagtggttcatcaaaaggtaatctctagatctgtcccattaatttatgctgtcataactgtatcctcaactattcggatttcaaacagcgcatgccgccaggatggctcaaatggagaaacaaattgaagccctggaaagagacaaggtagaactggctgcgcaaagggactcggccttgaaggaggttgaaggtactgccagctgacaatctgaacttccctctttttaatgcagcagattcttattataaatatgttttgcagaccgcaaaatcaaatctcaagctcaattcgacgtcctggttggtaagatcaagaggcttgaaggagcaagagatgaagtcgctaatgtcgctgccccactcgtccaagctatgttcctcaataacagtggtccgagtgcactcgacgcaaccgaaattttcgacaagctgagagttgctccggatgtatatttcaagaacatcaagaaagctggaagtatgggagctagcatggcattggcgatgaccaaatccttgtacccgaggattgaaattgacgccattgatggctttgcagacgggacaagcgaagaggctgctcttgatcttatcagcaatgctcaaaacgcggctgacaagattgcaagtgacgttgtagatcaattccgcaatactgaccttcagccgagtagtaacaactctgatgatgaaaagactgattctgagtgagtatgaatgtagcaaatggaggctcaacttgtacaatactggtgtatttatgctgtgcttgataattctagccaagtctttgatttcttaaaagcttttatcaagctttgttgagcctaaaacccaaagaagctattaaaaactttcagtcctcgcaaactaagtagaaaaatcgaacaaggcaatgataaaccaagtaagcaaattgaattgataaaaaatcacactacgttattatgatgatagcccccgactgacaacttcaaggagaaaacttgatgttgacagtcaagatagggaagtacaatgataagcctaagcgtagaaacgacgaagatgttcaatgttccaagagttgtcgacgagagtaccgtcttcgcgcttgagtcgataggaacctggccgggtgacttcagagatgataaatggcccctcccatagaggagataacttgtgccgatcccgtgtagtttgaattttcctcaaaaccaggtcgccgactaaaacggcacgggatcgaacattgcgattatgataacgccgcaacccttgtaagtatcgagccgaccgaatcaaagctgcttcgcggacttcttccagtcggtgcaagtcatccactcggtcctcttcatagcgttcttcgcggaaattacgaaagcgcaaagactcgaattcgacttcactcggcaacattgcttctgccccatagacaaggaaaaaaggcgactggcctgtggcccgactgggtgtagtacgcaaagaccaaagcactgatggtagctgtttcacccatttgccggcatagggttttagccggtcaaaaactcgcgctttaatcccttgaagtatcatgccgttggctcgctccacctgtccattgctcatgggatgtgctactgaggcataacaaatcttaattccaaagtcttcacaaaagtctttaaaaactccgccagtgaattgtctgccattatcagtgatgatccgattgggcactccaaatctatgcacaatattgatgaagaagtctcgagcgttatctgctgtaattgtgacaaccggtttagcttcaatccacttggagaatttgtcaatggccacaaagaggtgcgtgtaaccgccgactgcctttttaaacgggccgaccatgtcgagcccccaaaccgcaaacggccaagacagcgggatagtctgcaactcttgagctggtagatgaatttgtctggcgaaaaattggcaaccttcacatgtgcgcacaattttgtcggcgtcggacactgcagtaggccagaaaaaaccctgccggtaagctttgccgacaatggtgcgtgcagcagcatggattccgcatatcccagaatgtatgtctttcagcaattgtctcccttcctctaaagatacgcagcgttgcagaactcctgaagggcttttcttgtataactcagcttcatgcataacataaagtttgctccgccttgaaatccgctcggcttcatctttgtcttggggaagttcttgagaagtcaaaaatcgtatgaggggctctcgccagtcggcttcaaccatagctacgtcatgagtgcccgcaacttgagtagtatctttgtgaggtactgtcggcgtataaaggtgttcgacgaaaacatcagagggtgccgcctcgcgcttggatccaaagttggcaagtctgtcggcggcttcattattgtgtcgaagaacgtgactgagctcgagtccatcgaacttgtcttccaatttgcgtacctcttgtcgatacgccatcatgttgtcgtcaaggcaggaccactctttcataacttggttgacgaccagctgtgaatcgcctcgaactattagacgctttatccctagggaaattgcaatccgcagtccatgaaggagcgcctcatattcggcgacgttgtgggacgccgaaaaatgtatccaaagcacatagcttaatctttctccagttggggaaattagaactactcctgctccagtgcccgaaagtctttttgacccgtcaaagtgcatggtccagtgctccatcttctccgcgggggtatcctcctggcactcggtccattcggcgacaaaatcagctaacgcttgggacttgattgaaattcggggcttgaatgatatgtccaaagacatcaactccaaggcccacttagcaatccgtccgtttgcttcgcggttgtgcagtatatcaccgagtggaaatgatgtgaccaccgtcaccgagtgaccttgaaagtagtgagatagcttcctggtagtaattagaataccatataacagcttctgaacctgggggtacctcgttttggagtcggctaggacctcgctgacaaagtaaatcggtcgctggactttctggacatggccttcttcctcgcgctcaacgaccaagactgtgctcacaacctgggaggtggctgatacatacagcaacaacggctcctgcggatgtggtgaagctaagactggtggctcggtgaggagtttcttgaaatcttcgaaggccttctgtgcttcgggtccccactggaaatcatctgttttcttcagtagcttaaagaagggcatcccccgctcgccaagtcttgaaacgaatcggctgagcgccgccatgcatccagtcagcttctgaacatctttctggttacttggcggtttcatgttgaggatagcagtaactttctccgggttggcttggatgcccctatgagacaccataaaaccaagcagcttccctgacggtactccgaaggtgcacttttcagggtttaatttcatcctgaaagcgcggatgctcgcaaaggtttcttctagatccgagaccaaatcatccttttgcttggtcttgacgactacatcatccacataggcttcaacgttacggccgatctgcgttgagaagcatctctggatcatacgttgataagttgctcctgcgttttttagtccgaacggcatggtgacgtagcaatatgctccaaagggcgtgatgaatgaagtcttcaagcagtcagattccttcagtcggatctgatgataccccgagtagcaatccaaaaaactgagaagctcacagccggcggtcgagtcgactacctggtcaatgcgaggtaacccaaaaggatctttagggcaacatttgttgaggtcagtataatcaacacacatgcgccattgccccgttttcttccgaactagaactgggtttgccagccagtcgggatgaaggacttctttaatgaagcctgccgctaacagcttagttaattcctccttgatcgcgtctttcctgtcttgtgcgaatcggcggagtcgttgtttgataggcttggcatcttctttgacatgtaaggagtgctcaatcacctctctaggaataccgggcatatcagatggtttccatgcaaagatatctttattgttctgaagaaaggtgatgagcgcgctttcctatttacaatctaactcggcgcctattacagcagttttagtagaatcagaaggatctaggggaatctttttagtcttggcttcgctttctccactttttgagatcttggtagcgggcacttctccttcgctcgccgtggctgcagccagtcggatatcctctcgagcagacgccatctcgcgggtttgggccatgtcgcaactctccttgtcgcatgtgacggcttgcttgatgtcgctccgtagggataggactcctcggggaccaggcatcttcatcatcatgtaagtgtagtgcgggacggccataaacttggctaacaccgggcgtccgagtatggcatggtatgctgtctcgaaatcggcgacttcaaagctgatattctctgtgcggaagttttcccgagtgccaaaagtgaccgggagggtgatctggccgagtggagttgcggataatcctggaattactccgtgaaaaggcacattgcttggttttagctcggagcgaggaatctgcatatcatccaaggtcttggcgaagaggatattgagtgcactgccgccgtcgatgagggttctgcgaagtttgacattacggaccactgggtctagtaccaggggataccgccccgggtggaccactcggtcaggatgatccgagcggtcaaacttgattgcaatctctgaccatcgaaggtattggggcgtgtcgggctgaacagcattgatctcccgttcggtcaacttttgcttccttttagactcgtaagccaaggggccgccgaagatatggttgagctccttgcggtggtcttgaaatcctgccggggggtcgccgtcgtccttcttccttgacgtgctttgttcttcgtcagagctcttccgtgtaatcttggtgtattgctccgcgaattgcttgtagacgaaacaatctttggccacgtggttggagttaggatggtgcgggcattgggagttcatgatcttgtcgaacgtgttgacgcgcgaacgttgtcgagaagagtgactggcggttgcaacaagttccgcaggcttacgcttgcggtcctaatgattgttacttccacctcctcccgaagccggcgtatccttttttggcttccaactgggacccgactgctttgatgcggtgacggcgtcttcagctttggcgtactcgttggctttttcaaacataagcttgactgtcctgggaggcttacgcccgaacttgccgaccaattcttcgtggcgaatccctttggtgaatgcagcgatgatgacgtcgtcggtgatgtcagaaatcttgttacgttgttcagaaaatcgccggatataatctcgaagggattctccggacttctggacaacgttgtagaggtcgtattgcgtgccgggacgctcgaaggtgccttggaagttggcgatgaagtggtcgcgtaattcagcccaagatccaattgtaccacggggcaatccatggagccaagatcgggcggaatccactaaagccactggtaaatagttcgccatggccttgctgtctcctcctgctgcgcggattgcgagaccgtagacggtaagccacgattctgggttagtggtaccgtcgtacttctctattccagtcggcttgaagccggctggccaatccactcgacgcaggttgtcggtgaaggctgctactccgtcaaggtcgtcgtcgtggcggtccggcgaatgatgatgacctcgagctgctcggcgctgtatgattgtgtcgcgaagatcgacggggcggcgacgaggtggtgagcgaggccgttccactcggcgctccctatgatagtcgggaggtgagtgaacggaccgctcgtcgtgacccctgctcctgcgattagatcctgcgccggtgatgctgaggctcggatgacggtagtcatgagatcggaagtgagggactcggctgccagtcggcgtgtggacgctttcggagttaactgggaccgaagccgcaatcatggtcttcgtctggttcaagatattgatgacgtgatcagattgattaagctcgttttccttgaggagggtgtcgaggagggtgatcgcggcaaccgcattctgttgaggggtgcgaaaaaccgcgtgtcccttcaacatcttgttggccgatgagatcacgcgctcggcgccctgcttccaaagctcgctgccgtcgatcctcagcctccttcgcggtccgctcacgctcctgttgctcacgccgtaaccgttcttgctcttgtgcttgacgctcctcctccagtcggcgacgctcagtctcgcgacgtgcttcggtctcccgggcttggcgttgctcctccgtctcgttatcggccatgaagacgccgaagtagagaggggtgtagttgtcatctaggctttcgtcgaagtcgtcgagatccgggtcgttgtagcgagagcaaaactcgtcgtactccacgatgtcggtggggcgcgagtcgacggtgggagagctgtagtagccatccagctgatccgtcgaaaccgtgccgagtggttggaggatgacgccgacttccctgaagctaggcgaaatcggtgttgaagctgacttccgcctaggcctacgggatggagacgctgtcgtgatggagatggccgccaaatcgtcggggagcttcatcatgatcggtgggtaagccccatcatcttgatctggtgacgttggagaagatgcgatctcacccgagtggtttgatgccaactcgattgagatggtcttgaagtaactttcagccgtgtttgggagtccaaacgggactgaaatccggttctctcccgactggtctgacaccgagtcaaggagagagatcttgccgaagttgttggtgacgaagtcgaggctgccgaaccgaaacgtctgcccgggtgggaagacgaggtcgtcgatgccggagatggaacccattgcactgatcggcgaaaagcttgacgctacccctacctggcgcgccaactgtcgaaactagatttcggcaataataaaagggggtggctatcaagctggaaaagtgtatgggtttggagacaaaggatttatacaggttcaggccttcttattgaagaagtaataccctactcctgtccggggatgaatccgccgagtgtcttattgattgtatgatttggagaaaatcaacatatgcccctagaggtacctggaccccccttatatatgggaaggagtccgtgttacaaaagataatctatatccctaacggaatacgcagatacagataaaatacagtcgtaaccgactaagtgtcaaggtatttccttgatgtacaagttgagaaacaaacccaggatacaaataagatattctatctatattcggtatcctatattcagtccaaatatcatcgccgtgtagatatgggatatccataatctccacagagctcattctcacaagtttttcctcttcgtaaaaaatcatcttcgctatgtcatatgcagctgaacattaatcttgaaagtgcatatgtcttgttgaaaatttgagcattgtggttgtataaaaagtttcaagtaatagttctttgttgtttctaaaacttattgtattcttgaactcttttggatgtgttccttgcttgaactcttatggtttatgaaatgccaatgatatatgattccaccgaaactcaaaagtcatttttgcacttctcaaaaccaagcctccatgggtagactccaaattccaatctttgccaccaaatacaagttgatccttgctaccaaagccaactaccatttcttgattccaaatttacacttgcatacacaagtagtgtccatataaaatggtagtatcctttgatcatcttgcactcggtatttgccaatcttagtcattccattgccgagagtactcacttgaccaaaaatctctcaagtatctttgaccaaactcctctcatagagaaaataattgatgagtatatttcgagagaaagttcaagtgctcataatcactccctcctagaaataaaatccattctaattcttcttgtctaagtaacaagactccgagtgtaagggggagcatttcttaaatggaccgtttctcaaatttttgctttgagctttcatcttttttttttggtcttgtgaatgtttgttcttgttttgcttgagcaaaattgtttctcttcggttccatgcaaatctttttgtgattaatgccaaaaggggggaatatttgaggatcctacatttgatatgatcgttgatatacaaagggaaaatattctaggatcccacattcatttggtgcatgtcgtgaaaagaagcataccatcatctatcatagcatccaatatgcaccatatgcacaagcatcacatgcatggatataaatcaattgtcaatttctcatatcatgttgatttatatcattgatttcacccttcatatccaaatgtgatcatttttaatggatttgtcatcaatcatcaaaaagggggagattgaaagttcaagtgccattaatttggttttggtgattaatgacaaatccaattatatcagactaatgtttttataagcatttctttgcctagtctcatgtggatatgaaagtggagtgtgtgagaggtgattcccggacttcatatgagttgagatagaaacattcattgatggtggaactaaatcacaaagatgaaatgcatggagatcaagctatatgtatcactctttctctccatgtacatattgatatgttcatatataataattccacgtcattgacatatgcatgtgagactaatattttgtttgaaccatatcttatttagtctctttacattgagaacatggagatggtgaaggtatgtttttattttaatacctatatttgataaatgccttctattcttgtataggataagctctcaatgtttcatatcttactatgcatactcttgtcacacaaacagtttgtatgcatatatttaaggggaggaaatcatatactttagttatgcatgtaattgatccaagttattcattttcatttaattgagatctttacatttgagcatatgtttgagtatatgacacttgtggtgttgattaatactcatcatttattcatatccttttatacatgcgatcggttggtcaacgtgtggaggttgacaaccggatcattgggactaataattttattgagttgaataaaagaaataggtcccaaggattacaaaggtgttgatgttcaagtgatatcattacacgtaacgataccaagaatgacaaagtaaagatattgaagaggtgggatacgaagtggctactatggcaagacagtgaagggcaagcgatgctcggtcgcgatggactatgcggtggtgaagggcaagcaaggggcttggcgccaaagaaccaaatccggtggtgaagggcgagtgacgg

SEQ ID NO: 21878 - DNA, 37485 bp, Oryza sativa
tgagagctagtgagcctcactccatactttgagtactcgagttcatagcaagcaaatcttcgattgggtttgttactcttggagactaaggtctcctagacggctaggcgtcgccggtgagcacccaaggttgtggtgtgccacggaaagtttgtgaaggcttcgatttcgcctccgcaagggaagaaatcaagagtgaaaccgaggagtgcatttgtgcaacctcgtgaagaaagggttgaaatagacccggccttgtggcctctcaactgagacgtaggatccatggatccgaacttcggaaaacaaatcaacgtgtctcttctcttggtttgctcattcttgccatctctcatattgtgcttgagtttgttttggcccgatctacttgcatgcttaattaatatagttggtgaccttatatcttgcttagataccttatttgtcaccttttgattcgtatacattttgtttattcgtgcaacaagttcatagctagtgttttattccgttacccgccgaacttttcggttgagaccggaagttcttatcccataccggaagttccgatttgaaccaaaagttctctaatctctaatatgctatgaagttgtgataattttttaggaacacctattcaccccccctctaggcgacatcaagttcctttcaggaagaaagttgatataggtccaggtgataggccaagaccgacatttattagtaaaaatttatctccggaattcagaaccaagttgatagagctcttaaaagaatacagagattgctttgcttgggaatattacaagatgccaggactcagccaattgattgttgaacatcggctccctatcaagccgggggttagaccatatcagcaaccaccaaggagatgcaaagccgatatgcttgaagctgtcaaggctgaggttaaacgtttatatgatgttggttttattcgtccatgccgatatgcagagtgggtttccaatatagttccagttattaagaaaaatggcaaagtcagggtgtgtattgatttccgagacttaaacaaggctactcccaaggatgagtaccaatgccggttgccgatcaattagtcgatgctgcttcaggtcataagatattgaattttatggatggtaatgctggttacaatcagatttttatggcggaggaggacattcataagacaacttttagatatcctagtgcaatcggcttgtttgagtgggttgtgatgacttttggcttgaaaagtgctggagctacatatcaacgggctatgaactacatataccataatctaatcggctggttggttgaagtttatattgatgatgtggttgttaagtcaaaggaaatagaggaccacatagccgatttgaggaaggtttttgagagaactaggaagtatggcctgaagatgaatccgacaaagtgtggttttggtgtatcggctggttagtttttaggatttcttgttcatgaaaggggaattgagataactcagaggagtgttaatgcgataaaaaagattcaacctccagagaacaatacaaagttgcagtagatgattggcaagataaattttgttagaaggtttatctctaatttgtctggtagattagaaccttttacaccattgttgagactgaaagccgatcaaaaatttacttggggggcagagtagcaggaggctttggataatattaaagaatatcttagttctcctccagttttaatccctccccaaaggggaataccttttagattatatttatcggccggtgagaagtcaattggctcggtcttgattcaggagcttgaggggaaagaaagagttgtgttctatttgagtcgtcggcttttggatgcagagatgaggtattctcctgtggaaaagttgtgcatatgcttatatttttcttgtacaaagttacggcattatctattgtccaatgaatgcactgtgatatgtaaagccgatgtggttaagtatatgctatcagctccgattttgaaaggaagggttggaaagtggatatttgctttgacggaatttgatcttcggtatgagtcaccaaaggcgattaaggggcaagctatagccgattttattgttgatcatcgtgatgactcaatcggctcggtcgaaattgtgccttggactttgttttttgatggatcggtgtgcactcatgggtgtggtatcggcttggttataatttctcctcgaggggcaagtattgagtttgcctatactatcaagccctatgaaactaataattaggctgaatatgaagcggttctcaaggggttgcaattgctcaaggaggttgaagccgatgctgttaaaatcatgggtgattccttgctagtgatcagttaattggcaggagaatatgagtgcaaaaattatacattagtggtttacaatgagaagtgccgagagttgatgaaagaatttcggctggtgactttgaagcatgtatctcgagaacataatgttcaagctaatgatttggcccaaggggtatcgggatataagccgatgatgaaggatgtcaaagtagaagtcgccacaataacagccgatgattggaggtatgatgtgcatcattatttgcaaaatccatctcaacggcttctcggaaattgcactataaggctttgaagtattccttgttggatgatgagctatattatcagacaattgatggggtattgcctaaatgtttgagtgccgatcaagctaaggttgcgataggcgaggtacacgaaggaatttgtggaactcatcaatcgtctcataagatgaagtggttgcttcggcgggcatgatatttttggccgacaatgttggaagattgttttaaatattacaaaggatgtcaagattgtcaaaagtttggagcaattcaaagagcacccgcatcagctatgaatcctatcatcaagccatggtcgttcagaggttggggaattgatatgatcggtatgattaatccaccatcaagcaaaggacacaagtttatattggtggcaaccgattactttaccaagtgggtagaggcgattcctttgaagaaagttgattcgggagatgctatacaatttgtccaggagcatattatttatcgatttggtattcctcaaaccatttcaactgatcaaggctcgatctttgtgtccgatgaatttgttcagtttgccgatagcatgtgtatcaaattgttgaattcttcgccgtattatgcacaagccaatgggcaggccgaggcatctaataagagtttgatcaaattgattaagagaaaaatttccgattatcctcggcagtggcatactagattggccgaagcattgtggtcttatcggatggcttgtcatgattcgatccaagttcctccttataagcttgtttatgggcatgaggctgttttaccatgggaagttagaatcagctcaagaaggacggagttgcaaaatgagttgacagccgatgagtattataatctcatggccgatgaaaggacttggttcaatcaagattgagagcccttgcaaaagttactatggataaggagagaattgctcgacattacaacaaaaaagtggtgcccaaaacttttgctgagggtgaacttgtttggaaattgattttgccgatcggaactcaagataacaagttcggcaagtggtcaccgaattgggaagggccgcttcaaattcataaggttgtatccaaaggggcgtatatgttgcaaggacttgatggagaagtctatggatgagcgctcaatggcaaatacttgaagaagtattacccaagtgtttgggttaatgcatgatcggctggtgttgccgatacatgacagccggtgtgttcacatcgccttgagatggccgatatggttatatcgcccttagttgtttttatgttgtaatcggttgtgttttgctgatgtacaatggtcgatatggttatatcgcccttagttgttttcttattgtaatcggttgtgttttgccgatgtacaatggccgatatggttatatcgcccttagtccagattataattttattaatgtcttcgtcattgcaaaattaggggggcacatatatacacaagttgcaaatttgcaaaaatttttagcaaattgagaagttatattaatcggcacatcagttcaatgacaaaaggagaatcaaggtttcatagccgattacaaaaagaagctataaagtctaagtcctattacatagaaggtcactgagatagatattgctggatagctgatacagcccggtgtctgatttgttctacttcttcgattgcctgggtatcttgtgcatcagttccagggatgacttttaaggacttagtcatatcggcaacatttctaatggccaatttcagcctagacttatgttcttcaacaacacttggaagatcggctagcttttgcttttcaagatccaactcggcattgcattcttcgagttaagctataagatcaatcttgcgggcttcaagccgatctatgttcgactgaatcggcccaacagagagttgatcgagcttggctttctcttcatgcacgagttgccgattggcttggatggtagcttcaatgtctttccactcccgccaatcggctatccgttacttagccttctccagcttgaattgatgttgctcgaggtatacagctggagtaatgatgttcgccagatcatctaggatgaaggcttggatttcagcaaatcgtgcccggattgaaccacaatcagccaccaagctgtctaatgatgaccctagccaaagggatatatcctcaagtgttctcttgatggtttcatccaaaggggctagagccttgcttgtggattcttcttctgcttcttcatcaaaataatccttgatatcaaaagaaaacagatcggctaaggcctgcaacagagaaattcgaagatagtcaaatatcaaacagtttcagccgatctaggttcttatgtcaatgaaggacttattgggatggcaggagtggctggttgttcctcttcttcaacatagtggcttcctgtagccgatggggtacggtcacttgacatctattgcacaggtggtgaaggaggacgaggaggctgcaaaaaaacaaagtgttatgtaaatatcagctgtgattagataagtgagaggatttatatacgacaatcttactggtgtagctggtttaagtgttgttgctgccgatttcttcctcacagcagtcttctttttctgcaaaaacgagatttataagtaatcggctatgaataaaatgattgcaaggggaaattaatataagtgatttacccttgaaaaatgagctggagcagaaggagttggaggagttcacttaggtgaagccgatggagttttttttgtatcacttacttcggctgcagcttgatcaacatcctcttcaatctcttcctcatccaaggcttgcccgatggatggatctaaggcaggcaagtcatcggctggcttaggcttattcttcttgatcttctttttgggagccagagccgatggatctataaccgatgccttggtctttctcttcctgccgacatcggctggttctctcatctgcccttgaagcagacttgaagtcttgggggcatgatagccaatgactggaggggtcaatccaccaccgtttggcaaatggcctggagcatactctatatccctgccactgttgctcttgcggggaggagaagattctgttgtctgcaaggtaaagagaaaagttaatcaagattcaagtcggctaatagttgtttaaataagattgataagagcagaggtatacctgaggaatgacatctgggaacaagtctatcatgcacatggaggctgactgatggaatatgtgttgcttccattctccccaccatctgtcaaagtttttgctccaaaacctggccaactctatgttatcaatgctggccaaaggaggtcctgggatgttgagtagccgatccatcatcagggttgatgaaatgtctcctcggcattggattttatcggcaaagaacaagccgattggtagctgtcccattccaaattgcctagctgagctcatcggatgataaaactcataggagacttgaatatttcttccttgatgtatgctgacagggaggatgcatgggctaatagcagcagcaaagacttctctggacttttgatatctctcatggttgatatcttcaaatctgaagtctgctgggagatccaaattgactgaatcttcatatgggaaccaaacccgagcatctttctggaagccttcataaaagctacagaaccaatccttgagtaattcagccgataactttgctccagcatcggctggtgtggatgcatattccccataggacatacacctgcggtgggtgcgctcttctccatcatcatctgtgatcggctctaatcttggaaattcagcttctgttacggctggccgattgacagctttcatggctaccaagtttagccaagtttgcagcaaccaccatggcccgcctgcgttaacgactgagccgacagcaatcttagccgatgcgttgttcaacatttgatacaaatagccaagaaggattttgcccaaagggaattgcttctttgtatcaagggcttcggctaagaactaccagttggtggtagggccacaacttgatccataaaaaaggaatttctcaagccatatcagcaggagggccacatgttatcgggaagttacaggtcctttgcccatatatgctgctacataaccagaccagcctcttgctcttagttctgaagtcaaactggttcttggtgttcaaactcatggggttagccgatgaggtcacatccaaatcggtgatcatagtaatgtcaagcaaagtgggggtcatcggcccttggttgaataagaaagcgttgatggtgttggaccaaaagtaggtcgcggcagccatcaggggttcatccttagctgaatttgctatagtgagggcgagtgcctggccgattccgatttcatcctagtgaacctgcttgctagccgatatacgcttataccacacagcccagcttttctcaggggcagttttctcaagagaaggccaagacttgaaggtgtttttccagtgacctagattctgattggctaatctaaaagggatcctattggtttcggcggagatgaactcagtgggatcaagattgccgatcggaccaagaaaatagtgacgctcatgtgacaaactcggagtcgcaaccagatcggacaagtgctacagatgtgaataagaatagagaagaagaaaacaagatgaggcaaggaaaaaccaatctattgcgaaaagatgggatctagccgatgagcacttacttctgcgtactcagccgatggcgtggtagacgggctggcggaagtcgacatcgccgcgggcggaaacttggccggggaggagatcgccttgaaatcgccttgcgcaccgagggaatcgccggagagagggaagatgagtttggcttaagcggtgaaaacggaagtaacagtgtgaagtttctcggggacaacggttagtatttaaagcagagtgataacggtcggaaaaacggcaagtgcgatattttctcggagatgaaatatcgcaaatccgaaacaatatcatatattccggacttggggggaatgtgttaacaaccaaatttggtaatccaagtgtcagagatgaagataagatcgaagcagaatccaagatcaagatcgtttcagaaacatagtaagaatcggctaagtccgaatcttctatgatcttaatcagtagagtttgagtcagacaaggttagccgattgagccgattccgacaatacgactcggtatacgttgtcgggttgtgttaatgtgcttcatatggattgccacacacggattgggtcctggaaaggcaattgtatctattaattaggatattttatgtaattcccttatagatatgtttgggcaaaagtctaccgcaaagacttatggtatcttagagtttgttagagataagagtcgtgtccaacacggacatactttgtaatctcgggtataaatagaccccgagccccatgtaatacaacaacacacgttcaatacaatctcggcgcatcgccacccttttactttcgttttgtttcgacgagttcttgctttcgggttgagctgcatcggtttcgatcttcaactagaggtaaaagatgttatggcggcttgcgttctcgggattagtgcttccatctttatgatactctaatcttgtttatgtaattcgtcgagttatcatatattttatataatcttaggcaatattgttatttaaccatcaatcggctaacatctatcgctagaaggcagttgatcaggttaaataccaacgttgacttagattatataggatatccaccactctatgaaagatccagcggcttgattgtctagatattgtccttcttttcatacttatagctgcatcaattgggtttgaccttataagtcatgattagaatcttatctctagcctgctttatggttgccgattagtgtagcatcggggttttagccgatcttacctgatttaatatatatttcgatctaagtgatttatactgtctcggcatggcgaccgttctatcccaatcacttgatttaagtatatatcgacataaggattatatattattaatatctacagccgatcgagtagattcagttctttcttacttgttcatgactgccgatcgatatacatatgacatcggctcaaagataaatgatatgttatcggcaactagccgatcggctatcgtttatggatttaaccgcggtttctttgtctttatttcttgttgattgcaggatcaaatcagctgcacactcacgaacctaaaggcaagcttttggacctgcactggagttaagcagatctcccaagcctcgtgttttcgcatcaacaatcgtatagttccattagctagctagtgttttgcctgcaagtacagtgtgatgaccgtgacgccgctcttctcaacatcactctcaatataacttgtgaaattacgtgcaaacaccgtgaagagctcctcaagtatgccctccccaaaatggctcgcaatcagggactccattgccgcccttaggcttgcagacatgctctctcccgcagtgtgagtggctgaaatgccctctgcttgctctgagtcatccatggcgttcccatctatctctaagagttggatgtcacttatgtcaagtagctcgcactgctgcaccagctgcttcagctcgtcagctgaagggcagtagaatggtatgttgaaagagtccagcttctccttggcaacacgaccctatttatgcaaatgcagattaattaaacacgaattaagataatagttttccacgtatgagtgtttgactatataacattgttggtttttattgcccttcaaactaaaagcaatgtacaggtatttaatttaagcccaatatatactgtttggacaaacataaacatttaattaggtagcttctgaatatatatttgttttctatagcacacatatatatgttcatatttttgcacgtttcctttgcactgtcaaacgttccaaagccgtaacaagcaaaaattcctatttgtatagtaaaaccaactggtataactatccaatgaattgagagccttccaaaatccaaaccgaaggatcagattgattcttgtactatttgtactagcagtagtagaagacacaactatcaacagtaacaaatgttaaatggtcaacattactcgaaacaacaaatatttttatttctcatatatatgtttatacttttaagcatttctcgtgtgtcatgcacaagaatattttaacatgaatcaaactttagaataagtactaaaataagtaagatgctagctattttcactaaatctttgataagtaccacaatacaattcaaactttagaataagtatctataatgtttttttcctaatatgggagtaggtcaaccaggagaataattactttttctatcaaagaatatcattatggtttaaaccataatgtggtatactcttgtcatgtgcattatacctcagcaacaagagtgcgtagcccctgtgacagcaactcgaataaggtggttgtccctcctgcatggaacacatctttgttcttcctcccagcaaccgtcaggaccatccggcctccgggcacaatctccatgcatctcatttggaggaactgtgagaagtccttctcaaactgattttggtagagctttgccaccgatggtggtgtagtcgctcctatgtgaatgttcccctcgttcatgctgccatcaagatgctcaggaacctatccaaacaaccaacgttgccagtgagctcaaagttccaaaggtcaataacttagtgtcctaattttaagcttatgcaatgagacatatataaacaagcctcacctgagagagccacatgatgctcattgaggaatggaagagatggacgctattggaagggaagagtctactgtagaaggaacccggcagacctgcgacaaagtgcgcgggaggttgtaaccctttgcaagcgcaatcatgtattgtcgactgctcgaactgctctagtgattggaagatgtggttgaagtcattgccaggtagatcattgaggaagaactggatctccatggggctctccttgatagtgttgttatggtcctcacatattgtggtgatcgcctcagagacgaagagaagtgtgtttgctccgaaggagcaaccaaggtcagcaatgaccattaattgaggatgaagatctatgcacacttcccgtacagctttctcaactattggtttggcagcaagaacagctcttttctagacagacatggtaagtataaaaattatggtcaaacaaatactccacttgtcatgtgccaacttcggtaggcccctggatttgatacatgactttaattaatttaaagtcctgttagtatttgcacatgaacaagtaatgttagtggttaatttctctatgctctatatatactaccgagtagatgcatgaaatctacagtactgcatgagatagaatttacaattaacaattttctcagggcagcatgtttaatttgtaatgaagcaataatttcaagaatttgaatggaagaaaagtagagagttggtacaaacttgcatccttgaattctcagcataactgaactcatcgtcccctttcatcatgtggaaatcgcgctcgatcttcatggctgcaagatactttggctagaagcttaattccctgtatgtgttcctatctgctgcctagacaacaacagtgttatgtgtggagtatgagagctcacgagagattatttcttccttttatagagaaaccaaatgcatgtccgatttcgaacaagaaaataaaattgtatcgatgatagttattcattccaaatcagggtgcttgattctggggtcataatatacattgtcctcggcgattgcctcttgttatgtacataatagattttgcaacttgtaaagccaatcagttgatagtttggggttatactatggggatgcatttaaggtgggtcttggaaaatctcacgtccagtttggtgttcatgcaaatggatttgttgaaacaagagttagggatcatgtatgtgaaggaaaaaaaaagttcatttgtctccaactgaactatttcaatgcatcacttaacctccaaagttttttttcactcattttacacgaagaactattaaaaacgattcactttgctctctatcgatatttctctttttgttcttctaggacaatgaaatttagtacgattgatagatgcgctataacttacctctctttttttttacaattttttttatcaccgtttatatagatcatgaaaaaaattgataatattttgaaattttgataatgatgttatctacggctctacaaagttttagcttaaaataagactcgtaaaagtgtaacaaatcatagaaatgctattaaggattaaagtgaataattttttatttgtataggggtaaaatgagccaaaagactgtttagggtctaatgaaatagtttgggggagtaaaatagacttttttctacgtgaaatggaagaaacggtgatgggttcctttgacatacattcattcaagaatgtagaggaatttttcctgtggtattccttttttctatgtgcatgctagatttagattctaatctgaatcagtgtgcttaattccggagcattgcccacggttgcaattgctttcaaaccctatacgtgctcaaatcttacacctcaaaccaattaacgcacgttttaaacgttttaggggtccacacaagagtgttctaacgatttccagctacaacacggtacaacaccaactttctttttttttttacatgggcacatcgtgtgtaacaataaaaattaagttcataaggtacgatgaatgtgtccatctagccttttatacttgacaccattgaccagtgtaattttatttttactaaaaaaatattttaaattgcactgttgtaagggatgccagttatatttatcatgcatagcactccgcattattttgataatccgacattgttctaaatatttgtaaatcttttaaaaaataagagcggtcaaagtttgtagatcaacatatctggtgacaaagagcaccaagggagtaattaattactccctccatattttaatgtatgacgccattgacttttcgaccaacgtttgaccattcgtttcattcaaaaattttgtgtaaatataaaaatatttatgtcatgctcaaagaacatttgatgacgaatcaagtcataataaaataaatgataattatataaattttttgaataaaacgaatggtcaaacgttggataaaaagtcaacggtgtcatacattaaaatatggaggtagtattacgtatcatcactgaagaaaccaccactctaaagtctctattgcctaatagactttccacttgtacagagtacagatagagacaccatctatatctttgatcaacgcaacgacttacctgccatgcgtcaaacctagcctccgttttttttttctgtaaggtatgataacgtctccaggagaaaattttgacgcgtcagattattttatttaagtaaagaatgctgtaatttctaagcttgaccttatgctacaccgtttgttggcaaaatcgtcacaagaaggacctcctgtcttttatttgttcttgttgctccatatgttactgctgattttgttctcctgaaattaaaattcatacgcagattgtacctgaacaggttcacataactgacaaagccagttcaaacccaaattggccaagttagtttaaaaagttcaacataaattcaaaattttgagaaatcttgttcgatttttactgattttagctagctagcttgatggtaccgggttgtatacatctctagttgcagatattggatgtttttatttgcttaaagaatcttagaggaaatgtgtctgggcctcagggaaagttagatgatgggctggcatgctgacatggccagtttgcacgcatggcatctcctagctactaacacaaagggctcataaacctgccaagttgttaaaccgctggtcaaactgcataaatttctcaaagacattgcacctttgtgtttcaaattggcaaagagaaagcaaagaagtgttcaacaagagttactaaataataactggattatatccttcaggcaaataacaacagttgaagagctccacgaattagtgaagttggggagtttacttcagggagttgaactaacgccgaaccctgatgatatctcatggaagtggaatgaatcaggaacctactcaagcaaaagtgcatacctgtttcaatttgagggatcattcgcttccatagatttcacctcactttggaaagctccggctgaaccaaaaacaagattcttaatttggttggctcattcttcatcagaaaactcttacggtgcaaaatttacttcgaatacactggccatgcaattggatttgctgtttgtgcacaagcacctttgaagacactaatcacttattcagcgaatgcccttttgtaagacaagtctggagcatggtctgtgcttgggagaatttggtgctaagcaacggccttaccctagacggagtttcaaaatggtggtctgcaattgagtgtgctggctcgaaagatcaaaagaaggcggtaaggggggcaatgtttcctacttggtggaacgtttggcttgagagaaataagagaattttcaacaatatcacaagatcggagagagaagttgcttatattacaaagcaagatttagaccttcttagatcggcttttaggcctccttgagtttcgattttgttttgtttttatcggtgtaagtttctcatagtttctctggactgtaagcacttaattcccccccccccctctaatgaaattccgccaggtctcctgccgtcgttctcctcaaaaagactgcataaatttcaagagttaatttggtccatgctattacaaatatggtatattagaaagatggtattacaatccacgttatcggctgggtgccattgaaaatttcaaaaattggaaccatgccactcctgtcactatttacgtcctcctctctcatgtcgccgttgtcaccgtcatagtccacccctaacgccaccgccgccgacgacgaccaccgccggctgtgaacctgcagcacctcgtgcgccgcctctgtcacggtcgccgccgacgtgccccaccacctccatggcaccgtcggtgtggaagctggtgcttgcctcggccgttgtgtcgttcgtgctcgcactctatgatggcgcagaggacgacgaggtcagggcaaccgccgttgtggaacccttcgtcatctagctcatcctgatagtgaacgtcgtcactaaagtctggcaggagagcaatgccgagaaggcgctcgaggcactgtaggagatccagtccgaggacgcaatcatcaagctcgacgctcggtggtcccatgggcttccggcgcgcgatctcatcggcggcgaccgtggcaaaggtagcacacggtgcggacgcacggcctcttcctctggtatcccgtccgcggctggcggtggtcgtcagcggcggcggtggagtttgggagggctgtgctgcggcagcaagggccgcgtcctcatgctcctgtcccagcagcggcagcagcagcacgcactcccttgacgccagcggcaggcaacaacagcagcagcgccgcacttgattctctccagcaacaacaaaacatctgcaggccgaagcaacagcagcagccactaggcgacgacatcggcgccgtgcttcgcctggtcggcgcgtcgtcgcccctgccgtcgtcgtcgatgtaggaggcacgcgaggtcagctgcggcggtggtggtaggacgaggcggcgcatgggtgccgacagtgacacgatgtgacggtgaggatggcgacgtgagagagcaggacggaaagagtgacgggagtggcatgattccaatttttgaaatttttagtggcacctagccgataacggaaattgtaatagaatttttctaatatgtcatatttgtaatggcatcaatcaaattaacccaagcatgaattctttatgcatgaatgacccaatcatatttctaatatcttcccttcaagcggagttttatgcatgaatgatcctccggcagtgacgtctagatagaatgcagattctttatctagacccgaatgaaaatgttgcaacagcacatgatcgggtatagataaaggttggccagattgcactagattagtgaacctggaccaaactacactgattgattctttgtttatctgctgtaagctcagaatttctacccacagagtagtgatacgggttaccggaaagaatctatctcgcggtttttcccagtcaccgttcacacatctgacggtagatgtgcaccattgtttcactctctcgtgaagagagaacggaaacaatttccaccgaacagtctcttgcttcatgcctccaatcttaaggcacgagcaaagtgctcaaattcccacagatgatagtaagggttttcctggtctaaaccagagaaagatttctccctaaccatactgatgaactcgggacaaatttcatagccaggtgttaaaataggctctaatgaaggaggtggctcgtaaaattcgccccgaggagcagataattggaaaatagattgtggctccattggttgagaaggttttacaggaaggggtgaaggtacaggaaagaaaaataaaaagggtacgaggatgaatgaggttccgagatagacaacaaaggttcctcggcaacggcgctagaaatgcttgttggtatttcttacgatcatagataaatccgcaagcgcacggaatatactgatgtagcacttcacccgggagtattctcaggtatcgatttccacaaggaacgtgtgtgctaactctggttcaggctcatctaaggacacgaagctatggataggcaaaggatagagaggtttcacgggtaagaaacaatgtctacagaaagcttaactttaatcctaatgtggtactttgggcactggctagctcgctactcccagatatcgctctactgcgcacctggatagggaggacttcagtgatattgacggttgtcaccacctctacaccgacctcacacctattgtgggatgcggagcaaacaccagaaatcaactatctagacaccgcgtctaagcagttaataactactctagtgtttataagtcactaaagcaatcactatattttagttgactatagtgaacgatgatcccgtactctgtttaggaactaaccaagaaataaatctcactgagcaaaactaaattactcaaaagatatttcaattataatcagagtaataaacagagcagaatgaaataggaagaggattaccaacaactccggaactcctccgacttcttctactctactctctcgctaatctagtatacaataaagtacaattagagcctcttataatttagcttatgcttcaagtgtttgtgaatgagggagaaaagaggggtatttatagtgtagaggtgacttgagagagtggagatgctatggaatattctccatagtatccaaagagcatatttcttctcctcttgccatgtgacctgttgatgatgggttccaccggtattaatgctcataaccgtcataggatgaggagcacaaccgtcatatcgaagttgggctggattgggccacctgctggtttggctgaaccaggggttcggccgaaccctggctggcccatccagcccagccctttctctggtgttctgacatgtgggtgccactatatgttccactgaagattggccaagataaatgtatcttattgggtttctgggctcaaaactccataggcttggatatggaagttatattgcatttcatctcaactttggtgggttgtattctacatacaaatatacattaacactcgtgaaaatggttagaaataaatcctaccactatgttggatgttttacttttatggtcttatacaggtattgacggtgagaattttgtacttaacagccgtcaacaaacgtgtacgaagaatagaagaaaatggagagaaaaaaagataaagaaagtaattcaacatccatgtggcatgctacatgagcaccacgtaggatcccgcagaggttttcgcaattttggactagaatgacaaacactgacaagttcggaaacctaaaaaatacatttttgagagtttggggacctggatgacatggacgaacaaatctaaggaccggcaatgcaatttactccttcaaaaacaattttttttttgcttttctccatactggatcattactcccagatttattttcattgaggcgtgttctagatacctaaacaagtttttgtaaaaatctgtgatatacttcaacaagttctactgccctttaattatcccttcttcctgttctccatatgttattatgtctttccttttcccaccattagctttgccatgataatacatggtgttattatcccccccccaccctctcaagccaacacccagtaaattgtgcggctgtggtggtggagggcctcttcccaagccctatgcacctcctccacctcgatacacatccccttggaagggggagtggtgtggatgtcacatgcttgaacggaatatgtccgccattggagctttccccaccaccttcaccaccgttgcaaaaccttgtgaatctcccatcccatcccctttccatctccaatgtctccactgtaacaccttctctcgggcaatattcctctacccaaactcgcattgctctagccttcgaagatgctagaaagtgttttgagaagtggcgctagtgattctagggcaagccatgacttgagaagatcaggaaagaaactgggaaaggtagcagtgcaccaagcatgatagctctcaccttaccgggtcggatccccattacaccctagacccaatcgccatggccaggtcccttgtgctttactgtcgcctctagagtttttcctaaccaattgagttatgctcactttgcgtgtattattaaatcataaaaaaattatactcactctgtcccactaaataaggcatgattgaacttatcacggactcgaaaactaatcttttacattaaatttctcttatacaactgtttgtagcaacaaaatcataatcataggaaagtaaattcaaatgtcaatctaatgcaggggcgcatctacagtaataccactggtgtcaggcgacaccgacgacttttggcaagctatgcttaaaccgcctatccatatattataacactatattctaaatatagttagcatgctatgacaccgatagacacgttatgacaccaacgaactaaatttctggatccgccactgatccagtgatattattttcatcaaataaatttgaagttataataaaatagttattggtcaaatatttaaagagttgaatcttaaaatacatttgtgccttattcagtggttcggagggagtaattaatagtcaaaaccaaaaaagcaggagcttcattaattcttgttttaataaatccatatattttgtgctagaagatcaacagattggataaatggacattgttgatttaatgtttttgactaatgtgagaatttattgcatttttaggattaattttggggcttatagattctgcttataggagagactttaattagaaattaatacaaagatggggatccatcttaccaagtgagcaaccaaaaggccaaaagcctcataagcttgctcttattaattgggaagtgcatctctagttgttttttttttatcgaagtgtatctctatttgttattggagatactgatgttatcatttgcttaacataatcttgtaggagaagttgtgagcttcgggagaattagatgcacatattctcctaacaccaaagaacccaccatcttgcatcatatcacaccacattattttcaatttcttgcattaactttcaccgaacttgccaagctggcataccatgagcgcactttactctataaaatcaccttatatttaaactttatatgtttctctgccaggatatattgttgacactctaccgtatagtaccattatctagctagtgttttgcctgcaagtacagtgtgatgatggtgatgccacttttctcaacctcactctcaatataactagtgaaattacgtgcaaacaccgtgaagatctcctcgagtatgtcctccccaaaatggcttgctaccagggactctgtcgccacccttagagttgcagacatgctctgtcccgctgtgtgagcggcggtggtgccctctgcttgctccgagtcatgcatgcggttctcatccatctcgaagagttgaatgtcacttatgtcaagcagctcgcactgctgcaccagctgcgtcagctcatcagctgaagggcagtacactggaatgttgaaagagtccagcttctccttggcaacacgaccctgtgtatgcaaatgcaaattaattaaacaataattaagagaatatattttccatgtatgagtgtttgactatatcaacattgttggattttattgtccttcaaactaaaaaaatgtacatgtaattagtttaagcccagtatatactatttggacaaacaaaaacatttaactaggtagcttcatttgacaaaaaatatatttgttttccacggcacacatgtatatgttcataattttgcacgtttcctttacattgtcaaacgttccaaagccgtgacaagcaaaatgtccaatttttagagtaaaaccaacagggtatataattgtccaatgaattgaaacccttccaaacaggatcagattgttactgctactatttgtattagcagtagtacaatgcacaagtataaagagtaacaaatattaaatggtcaactttacttgaaacaaaaagtatttttctttcccatatatatgttcatacttttaagcatttctcgtgtgtgtgcacaagaatattttaacatgattcacatgctaggtattttaactaaaattttgttaagtaccaaagtacaattcaaactttagaataagtatctatagcactttttttataatatgggagtaggtaaacaaggaaattaattactttttctatcgaggatatcattatggtttaaactataatgtggtatactcatgtcatgtacattatacctcagcaacaagaatacgtagcccttgtgaaagcaaatcaaatatcgtggtcgtccctcctgcattgaacacatctttgctcttcctcccagcaaccgtcagcaccatccggcctccgggcacaatctccatgcatctcatctggaggaaccgtgagaagtctttctcaaactgattttggtagagctttgccacggatggtggtgtagtcgctcctatgtgaatgttcccctcattcatgctgccatcaagctgctcaggaacctttccaaacaaccaacgttttaggtgagcgcaaagccccaaagttcaataacttaggatcctaattaagctagctagtttatgcaatgagacataaataaataagcatcacctgagagagtcacatgacgctcatggaggaatggaagagatggacgctattacaagggaagagtctagtgtagaaggaacctggcaggcctgcgacaaagtgcgggggaggttgtaaccctttgcaagcgcaatattgcgttatcaactgctcgaactgctctagtgattggaagatgtggttaaagtcattgcttggtaggtcattgaggaagaactggacctccatggggctctccttgatggtgttgttatagtcctcatatattgtggtgatcacctcagagatgaagaggagtgtgtttgcaccgaaggagcagccaaggtcagcaatgaccattgattgaggatgaagatctatgcacacttcccgtacagctttctcaactattggtttggcagcaagaacaactcttttctagacatacatgaaaaatataaaaattatggtcaaacaaatactccacttgtcatgtacaacttcgataggcctgtggatttggtacatgactagtaattcaaagtcccgtttagtatttacacatgaacaaataatgttaggggttatttcctctatgctctatattactgagaacatgcaatctacagtagtgctcaagatagaatttacaattaacaattttcacagggcagcatatttataatttatattgaagcaacaattaatttcaagaacttgaatggaagaaaggtaagagagttggtacatacttggatccttgaattcttggcataactgaactcactgtcccctttcatcatgtggaaatctcgctcgatcttcatggctgcaagatgctttggctagaagcttaattccctgtatgtgttgctatctgcctagctagacaacagcagtgttatatgtgtggcgtatgagagctcacaagagattatttattccttttatagggaaaccggatatgcacgtccgatatttcaaacaagaaaataaaaatatatggctgatatttattcattctaaatcaaggtgcttaatattgtatttgatacaatccaattagtacgggattatatcaaatacaaaattctcaggccatgagatattggcactatgtaagcaatactcacaaacttacaggcggtttttctaagtatccaccagtgaaaaccatgaattttaaaggctgtttcttaagaaacagtctgtaaaaaatgtggtgacttttataggtggttctcttaaataaaatacatgtaaaaatgtttttttacactgtccttcaaaattgaagcaatatgttctggatttaaagaaaagtcaaatgattataaattttatattaaaattgtagctcttgatgagatctataaaagttttttttatttgagatcacttttcaggccgaaatagtcattacaggctctcaggacatagggtaattttgcacattgtcagggttatggataccacatacccaatagtaatcgattaatctcggcagggcccagcacataccaagtcttatacggaatcataactcgtatataaaaggagttccggataaggaaggacaaatagagttctatatggaaatgacaaagactacacggattgtatctatattggtctctctagttctacttggacaatgcgacatctataggtataaatacaagcctccctagaaggagaggggacaagccacaaggcacaacatacacacaaggcaatacgccactaaatatcgacatcagagattagcctagacataccctatccggcgcctatggaggccggcaagagggatctagctctatctctgatctcgacgagatcatattcgaggaggaagactaccctgccgtcgactacgagttggttatccatgccgccaagtcgacgaccttatctcaaatattgtactggtgtgattatgatgaataagagcaacaccagtttcggccaacaggagttgggctatcacctgtcagataagaggtccgaacctgtataaaaatacttgtctccatctctattaactcaatctcgcatataccctggtaccaacgatccccataccatccaaataccgtagtcgcggtaccacccgttgacacacgtgatattttaggaatttcaaactctgatattcatagaaaattcattttaagtatgatttagatgaactaaagttctctaaaacctttgaaatattccctttaatatggcatggactatattcccttaatatggcatggtcaacaccaactttctttttttttcttttcttttttttgcatgggcacgtcatatataacaataaaaagttcataagatacgaatgaacatgtccatctagtcttttatacttaacaccaatgaccaatgtaattttacttttgactaacaaatcttttaaattatttgtaatgttgtaaaggatgcaagttatattatcatgcatattactccgtagtatatattttgataatacgacatcgttctaaatatttgtaaagattttttttaaaaaaaagatgagctgtcaaagtttatacatcaacatatctggtgtcaagtaagatacaacggaacggagagaatgattaaatactacttcctccgtttcacaatgtaagattttctagcattgtctatatttatatttatagatgctaataaatctatatatataataatgtctagattcattagcatctatataaatgtgggtaatgctagaaaatcttacattgtgaaacgaagggagtaccaccgaagaaaacaccactctaaactctaaagtcactattgcccaatagactgtccacttgtacatagtacagatagagacgccatctatatcttctattgtaaagtctctattacccaacaaactgtccacttctacagagtacaaataaaaccgccatctatattttgatcaacgcaacaacttacctgccatgcatcgaacccagcctctgattggattgtccacttgtacggagtacagatagagacgccatctatatctcctactctaatgtctctattgcccaatagactgtgcacttgtacagagtattccgtttaaattttgataacgtcccgaggagaggattttgacatgtcagattattccatttaaggccgtgtttagattgaaactttttaattcaaacttccaacttttccgtcacatcaaatatttagacatatgcatggaacattgaatgtggaaaaaaaaccaattgtacagtttgcatgtaaatcgcgagacgaatcttttgagcctaattacgccatgatttaacaatgtggtgctacagtaaacatttgctaatgacggattaattaggcttaatagattcgtctcacagtttgtaggcggaatctataatttcttttgttattagtctacgtttaatacttcaaatgtgtgtccgtatacttaaaataattttggcacatgaactaaacacagcctaagtaaagaatggtgcaatttctaagcttgactttatgctacaccatacagtcaccatgcgtgcttcactatcgatgggtatgttgcttgttactgaaaaaactaattagccgtaaatgcgagcacccttgtcaagtttaggacttgaacctgctgagtggattggttccacacaagcaaacctaaccagttgagctacactcacttcgctatgttaggcattatattgttctcctgaaattaaaattcatatccagatttgtacttgaacaagttcacataactgacgaaaccagttcaaacccaaattggccaagtttgttcaaaaagttcaacataaattcaaaattttgagaaatttcgtttgatttttactgattttagccagcttgatggtatcgggatgtacatctctagttgcagatattgcatgtttttattagaagtactattcagcagccagcgctcggattagaaaaagacgcgcctcacacatcaatcccacattcccacgcaccaccacccctcctccttagtctgattagggtaataattttacccaagccattccatgtttttatacaacaggaatgctaaatagctgtcgcatgatttttgatagctaaatcattcatgtttcaatatattagaaccgttgtttcatacgttgtagcaaaatgtttcacgaggtgatttaattgtgatctacttggtgaaacatttacggtgtttcaactttctaaaagattgaaacattttttatctacttggtgaaacatttacggtgtttcagctttctaaaagattgaaatattttcaatctacttggtgaaacatttttgatctatttggtgaaacattcagaaccgttgttttcatatgttgtagcaaaatgtttcatggggtgatctgattgtgttccagcttttttaaaagattgaaacattttcgatctacttggtgaaacattttttatctacttggtgaaacactgcttgatgaaagactaagaaatcatgcgaatcccatatagacagtccctttatactataccgtaacaatccaacaacccatccattccttccaccacgatactatttttccggattgaccaaacaacgaacaaccaccgtatctcgagcaacgtaacatgcatcggcagcggatgaggggcggatctatagtagaagggtcggtgtcaaacgacaccaacgacttttggcaaaaaaactatagtgaaacttcttatccatatgttataacatcattatttaagcataattagcatactataacactgatagacacgttatgacaccaatgaatcgattttatggatctgccactgagcggatcaacggagtgtgggaggaggcgcaggaggaggtcactactataaaaatgatttttccgtgcggaggtttttgcccgtctgcacccacgggtctggaaaaatcaacatttttttccgtacgggcgccccaaccgcacaggataataatcttcccgtgcggtcgggttaagtggaccacactggataatcgattatcccgtgcagttaaattataccgcccgcacgcaacaaaaaaaaaccaaaaaaaaatcaaaaaaataaaaaaagcctaaccctaaccgtagaaatgcctgccggtgccctccgccgcccgagctcaccactcccggatccgcacgtcatcatcgtcccgcccgccaccgtccgcgcccgctgcgcgtgcacgtcgagccggcggtgccgcctcgtcgtcgttgttgtcgcgcctgccgccgccgcccgagctcgccgctcccagatacgcacgtcatcatcgtcgtgcccaccaccgagccgcgcggggccccgccgctgtctgcgcctgctgcgcatgcacgcggagcgagcggcaccgcctcgtcatcgtcgtcatcgcgcccgccgcagctcgttcgctcgcggagccgccgcggcgcctccgccagcagccgtcggtggcggcggcgcttgatcgatggggaggggaggagaggagaggaaagaggcagagagagaggagagagaggagtgggtaggagggaaaagaggcatagagaagggaggcgagtaaacagggagagagaataaaatggaaaaaggaagagagagagtgtgcgtcaaaattttaaaatgggtaggaggaaaaagagggggagtatttttctgtgcggtcttgcacgcgaaaatcgattttcccatgcggtcctcttaagtcgcctgcatgggatagtgaggattatccactgcggtcgaattaagacgtccgggaaaatgcattttcccgtacgggtgacagcctgatgccgatccccttatttttccatgcggttccagttatggcccgccagaaaacaaaagcgctcggcgtccaggaaaatcttttctctagtgggtggtggtgttgtgctgctggtgggagcaacgtggtcgagggtggatccaggtgacagctgatatgggtcggaggtggaggcctggcggtgaccgtgcaggcagggataagccactgatgctcgctacagggagcgcggcggtgaggtttgtacgtagccactcgatctggtgtaggggatgcttgagccttgaggtcaccagagtctgtgacatggagatggaggtctgtgtggaacccatcagaccgtcggcgcgccgccaccatttgctctgccttccattggccactcacgtctctctctccatggctgagctccggccgtctgctagcctcacaccaggcgccctgcccgggatgagtttaggggaggaggacgcccatccttggcaaggaggatgacgcttggggggagcgagagacaggaacggttcccaagatgccggggagtggcggggacaccagatctggtggtggtgggatcataaccgccaggatgcccagattcgatgccagcgtgggtgaggaggatggatccgtcaggaagccttccaccagtgccacctcctccgcggcatgtcgcttccgccgctgggaaccacgccaatactagaggcggtgaggtgatggggcagggggacggttcctggcggcggcgacctcgatatcggccaccgtccggatcaaccccatccaccgttcatctccggtcacagtcccacctgtcacttgtcctgcgtagcaccgggccgatctagcgcaccaaaaaatgtaggaggcgcacgactggcccgtccttgaaactgcattggcctttgagctgtcagcaaaccggcttctccgtttccaccggcaacgacagcataggctggaaacgaatatggtatgagaatatttcgtccgtatccactacgatttcatctctgcagttaggtaggtagaatcatttggtgtgggacacgtgggttggggttgactgaggcgctcgaaataaccaggagtgcgttgcgcaagtctatataatatataatagaaaaatatatttttttaatcaaataggttagtgccacttgtttaaacaaaatattggatcattttataatattagataatatcatgggtcgatttataaaattaaaaaacagtgatggttgaaagtgagtctaccaccgcaagccttctaaagaagtatatattacattaacttgtactcactcacctagctaatacacaatgagcaatgtttgcttaaaaaaagttactcacgaggatgtatatagttgaaacaactgtagggagagcacaaatgttcacagtcgactaccattaggctgagttcggctcttcatcttctcaacccaccactttcattttccgcgcacacgctttccaaactactaaacagtatgcttttttaaaaaaaaactctatatgaaagttgtttttaaaaaatcatattgatcctttttttaaaaaaaaaagctaattcttaattaatcacgtattaaaagaccactttggttttgcgtgtaggagggatgggttcccatcatgcagtgcagaacacagccttagcttatataacaatttagtgttttggctgcaaggacaatgtgatgactggcacagggctcttctcaacctcactctcaatacagttggtaaaatagcgagcaaacaccgcgaagagcttgtcaagtatggactctccgaaatgactcgcgatcaggggctccttcaccgccctcaggctcgtagagatggtcttgccggcggcctcagcggcagcggcaccatggatgatgacaggtgcagcagcagcatcctctgctgactgatctgagccgccattggggttcccgttaatctcgaagagccggatgtcggtgatgtcaagcagctcattctgccacactagctcctttagctcatcaaccgaagggcagtacaatggcaagttgaaggagtccagcttctccttctcaacacagtcctgacgcggaaaattaaatcaattaaaaggcattctaccagtaaagcctaatatatatttggataaagcaaaattagttataaccagttagctttatttgaaaacaaaaacatgtatttgttttctgtagtacacacatgtttttacacgtacaccgtcttcttttaattttcactgtctgcgaagttgtgccaagcaaaagcaccgatttctagttttctattaacaccttaaatattggtagtcaaactgagacgtgcccccatttaaatacttttttttgcccgaaaaccccatttaaatattggtagataattgcccaataagtcaaaaacatatatataaagattgttcatgctactatttctaatagtagtagaaaagacgacgattattttttatcaacgaaagagatgaaattaattgatggatagttgtgatagcttgagatgagtgactaggtagaatagtagctatatcttgggataaaatttgaacgctagaagtaactatattttgcgatggagaaaataagaaaaaaaaatctttgttttgtcttaaaatagcacctatctttgaaaaattaactggtggactatgggaccacgcttcaagtattaaattgggtgtatgatgtttattaactaaaatttaaacattctttttaagattttgattctagaactgtacagttctagttagataggtacatgtaccatccaaacatataattagttagataggtatgttgtaatgggacagtaaaataatgttgaatttgagttcttctattgctaggtatggctatgagttaaattattacccacaagttgaaaatttttttaaaaagggagccaattcatgtattttaaatcttgaagccccgtatggccatccatttgtctttcccaatgttcatacttttaataatttcttgcctgtagagatgcatattttaacatgctttacatgctaggtaatttcacgaaataatttgataagtgccaaaacgcagctcaatcgatctttagagcatgtatttatagtgcttttttgtttttgaagtgggagctggtaaacctagtgattaatttttctatcaaagaatatctcatgatgtaaacaataatatggtactcatgtcatctaaattatacctctgcaactagagtttgcagcccttgtgaaagcaactcgaatgccatggtcgtccctcctgcactgaatacatctgtgctattcctccctagcatcgtcagcaccatccgacctccaggcacaatctctttgcaccgcatttgtaggaaccgtgagaagtccttcttgaattgattttggtagagctttatcaccaatggcggtgtagtcaaccctatgtgaatgttcgcttcattcatgatgccatcaaggttctcggggacctgtccaaacgaccaatgtggttggtgatctcaaagccccaaagaggaacttaggaatctaaattaagtttatgcaatgagtcatatattaagataatttacctgagagagccacatgaggctcatggaggaatggaagagatggacgctgttacaaggaaagagtctggtgtagaaggagcctggcagacctacgacatagtgtggaggagattgcaaccctctagaagtgcaattttttgttgtcgactgctcaaactgctccagtgattgaaagatattattgaaatcattgccaggtaggtcattgagaaagaattggatctccttcggtctctccccgatagtattgttagggttttcgcctattgtggtgattgcatcggagacaaaaaggagtgtgtttgcaccgaaggagcaacctaggtcagcaatgaccatcgattgaggatgaagatctgtgcacactttgcttatggcttccttgactgttggcttggcagctagaatagcttttctctgcatagatatgaggggaaaaagggaaaaaattgtggtgaaacaattactccatttgccatgtgcccactctggtgtaactaggcccatgacaatccaaagtgtggtgggactgtatatttggctcatgactctatagttaatccaaactagtgtcaataataacatagtacccactaacaattattatattctaaagcacaacatacaaatatgccatatcattaccactagtaattattattgtagagcatcttaaacctgatgcaacatgacaccatcatctacaatttattatattccagaggtcaacatgcatctgcatgaaaaatcataattcacatattatttttataatattttaacatatctctattcattatttctataatatttagcatacaatgattcatgcatgcatttcgcaacagaatgcatggcatcatctagttatatagcaaacagcaatagtgtggaaaatttttatatgctctatattactgattacatgcatgcaatctacgttgtggaagatgataattgcatttgacaatttacgcagaaaatcatgtttagtttgtaatgaaacggcaattaattcctttcaaaaactgaaacggcaattaataagcacacaattataacataatggagaaacaaaaggtagagtcagttggtacaaacctgcatcatagagttcttggcatagctgaactcatcatccccatcattcgtcatgtggaaatcacgctcgatcttcatgtctgcgagatgctagaagctcaatccctatatttgttgccacctgggcccaaacaacaaaacagtgtttgaatggaacttgagagttcacaggagatattgcaatcttttatagacaaaccgaatgctcaattcctgatcgactcctaaaaactggatgaatgatgcttgttcattctaaaccagggtgctcaattctgaggtttgagatacatgaattgtccttgggaattgtctgtttttattttctacataatatactttgtaaagccagtcagttttgatcagttgattgtctggaacatatactatgggatgcatatatggtgtatttcctggaaatctctctctggtcgctgctttgtggtgcagtgcacacacaacttgattgttagaataatgggttaattaagggcttctttggaatgcatgattatagacttatagtaatgttggaatagaaaaacacattattaagatgtatgattttgctagtaccatggttaggcaaaggttgtgttttggagagctcccatacagtttaattcagaacatgatcagaagctagaatctaaaaaatctaagattctaaattgacctttggctagggggaagttaaaaaaaacttcctttagctatgtagaaaaattgttactccctctggactaggattatataagggattattcccttttagcactaattaaggaagagaaaaaagtgtgaactccatcggttgccctaaaaaggcaaagccaaagctaaaatttgaattttcaaacttaattttgaagttgattttatgataggatcggggattagtactaatagtacacgtgattttctctgtgtgtcttttcagatgggaaggggtgggagtgggattgctgatggttgttgtactgatcctctcgggataaccaaaatcctccataattttggacaaacccaaggaccataatttcctataattatggatagagggagtataagatggatctagtttttttcttttaaaatacatattatttaatgttgaatgactgttgtttttattttggctcggctcattaaaaaatatggtcttaaatgtagagaaaaatatggtaaattaaaaaataatttcaaagaaacctcgataaaaaggtggccaagctttacctagccatattattgcggttcaaaggaagccctacattgctctataatgttgtgtgtggagcttggagcttatgataagaattgcttcctccgtttcatattataagacttttaaagttaatatttatgtgtctatattcattaacatatatatgaatgtgggtaatactaaaaagttttataatataaaacaaacggagtagtttcatttccactagtctataaagacaatagagatctctactttatattcatagtgtgcatgctagatcagattctagtataaatcagtgtgctcgattcctggacattccccacagatggctgccataattactttcagccgtacttctggaagaaaattttgttcatttgggaacattgtagaacacattttgttgaatctcttgaatatgaagatgaagataaaaattaaatgtttcacataaaacgatgtagtaacaatgtctgattattacaaacttaaaaaatggattaatccgatattttagagcaactttcatatagaaagtttccacacgaaacacaccgttaagcagtttgaaaaacatgccacgagtatccaaaatttcatccaactctaataagagaaacgaacgcaccaaagtaagtccaaattaaatttgatgtcaatttttgaaccgtcactcatataggactccatctatatcttgtgttccatgctaggtggttcaagtctgagacaatgttctgatcaggagtataatttgacacgtcagtttatttaatttaattaagtaagtaaagaatgtttccaactttccaagtctgacgaaactgtcaccaatgtccctatgaggcggacctcctggtctatttcttctacatagttcatccattccataaaaaattaatatgaaatgtaatatgacacatctagtaatataaatatgaaaaaatatatccaatttcatagtattaagatgtgtcacatcatatactagatttatctttttatggaatgaaagaagtacgtgtgttgtcgttgattatttctttcttctaacattcaaatccaaatggcacccgatcaggtacatagaaccgatcaaaaccgcttggtatttgtgattttctattgactctttatggctcacaccaagaaaccgcccggtaaatatgaggaaattggacgtgtccattgaggtggagcatgaaaaaaaattgggtacgtgttttaccagacccctttttgacggaaccaacctagttttattttcaaaagaaaaattaaaattcaattttgtagtaaaacttcttgtcgttttaaggttttacctattttcagcagcttttaagaactaatcgagaaaaagaaaggacgaacgggttgggaacggtattctgttgtcaaacaattctgaaaaccacgagagataaaaacggcctctcgtatcgcccctcccccacgggcgtcgcctccccggggctcgtctccccttcctcctctacatcgccgctgcccgagcgcggccacaagaatggtggtggcggggcttcgtcctcgcgctggggaatggaaggggggcctgctcgggcggcggaaccgcctagatccatgtcgcccgggcggatctggtgatggggcagctggcggcggggctgagcggtgcggcagcggtgtctagtggcagtggcaacggcattcgaggcgttggcggcggcggaggaaaccgccagatccacgtctggatttggcaggatagcggccggcagcggcgtttagtggcggggatggcgacggcggtgaggacggcgaggggatgtagccagcggcggtgtctggcggcgggggtggcgagggatggcatcgatgaggcgaacctggccgcgccggcggtggatccagtgcctcgaggagttttggacccccggcggtcgcggcagtggtggcgaggagttcacgcgacggcggcgcgggctaccacggtaggccgtctgtgtcgtcggagctcgtcgaggataagcaggtgtgggagggtggcgagatggcaatggggattgaagggcagcggcggctgcggtggtggcaaccgtcaccgtggtccggggaggcatggcggtcttggacggctagccgggggcgtggcagacgaccgcacctagccggcatagcagcgtttggaggaggggtcggaggccggcttggcgcagagaggcgcagtcgatggcagtggatgccggcaggcgcgagaggcacggccggtagcgaggaggccagcttggcgcgagaggcgcagccaatggcgggaggccagactggcgtgagaagcgtgtccggtggtggaggaggccggcgcggcgcgatgaggcgcggtcggcagtaaaggaggtgaccacggtgtgaggaggagctgccggtgggtgtggcgcggtcttcggcgcacgaaggctagctagcggggggtgccagtgtagtggtcccacatgtcggcagaggttgagcggtggtggagcatcggtgcatcagccgtggactcgcaggtgatgagcggcgggtgaaaacccagcccgtccttggccaaaccgacaacgatggttcattccccctcctgagagcgttgtcgtgacgtctcatccctcaagggtggttgcagggggaaagcccagtcttggctcttttgagtccctgacggacggcggcggcggttttccgtcgcttctctccttagagacgtcgtttaggtatactcttgccaaaactacccaaacgattagtgcaagcacgctctaggatagagttgggctttgtgttggttgtaagggcgtttattgggcgttcttgtttgtgttcctttgttgacctacggcggtcggccacgcttagcggtggccggttcgatgctagccttctcctggatctgtgtgtcggtgttgtcggtgtgtgggtggtggtatattttttccattttcccagttacgatcttctaaagttgtaatctttttttttctactctatcaatagaacttcgcatcgtctcgtgtgagtccttaaaaaaaaaacaattctggaaacctgcgcccgagcagaaattcgtgatttttttaacccaacacaaagagcaatgctaccacaaagcagtgctcggattgatgtgatatagagcatgtccgcttctggatttttatcctattgagctggtatcgaaccaaatactactaatttctaaagactgagatgagaagtaggtactccggccgtttcatattatgtgttgtttgattttttagtgaaactttgttaaggttgattaagtttatagaaaaaaataacaaaatctgaaatatcaaattagtttcattaaatttaatactgaatatattttgataatatgcttattttgtattaaaaatactactatatttttctataaacctagtcaaactttaaaaaaacatatttccagttccatgaaattcagttacggagccaaatcaaaatgtaaactcttcataagctcttcataatttccaatatcatttgactttaagctcttcataagggacagatagtttcggctcagatttttttttttttgagatgacgaagggcgtgatgggctcttaccatctgacgacagcccatgggcctcagcacagcctcaaaatgaataagtccattttgcctccctcatctcttgcccttgtgtgaataacatccccaaaccgtaaaaccgggtataacgcctccttcatctcttaaaactagagcaaatgacctccctaagcggtttagcaggcggtttcgtccgacttggcgccattgacccggttgacaagctgactcagtgtgagcgacccacatgttagtgtattgtatgtacgaactaggccgagctgagtcagctggacggtaaaattattggcgcgcggctcgcatctctctctctatccccatttcacccctttgaccaaaaccctagaccggcaggcgacggccaaggcgacgcgaggtgcggcggcggcggcggcggctggtgtggagcacggcgacggctggtgcggagcacggcggagcatggttgcggctgcggagcgcggcgcggcacggctggccggtcgagaagcgcggcaagagggttcacctgggttgaatgtgtggccgtggttcgtcctctttcccttgtctgaatgcttccatttgatttgttttgattttataatgccggtagatttgtttgtggtctcggggtgggtgtgtttgaataattttttaggttggctagcaggagctgtagctcaagtggattttttttttgtgcttgaatcatgtaaagtgtgttggaatctggattggc

SEQ ID NO: 21879 - DNA, 35419 bp, Oryza sativa
atagtgattatctgcctggtgatgattgctctttagatgatgatgatgaggaaggtgcagctatagaaagacattacaaagatctcaagaagaagctgaggacaagcaaagtggctagcttggatgatgtgacttttggggggcacaagacaaatgcaaatatggctactggtactaatgaaggagatggcaatgacactgagtatattgacagtgatgatgaagagtcagtggaagagggttctgatggggagttaagagtgagaggaagtaataatgcaaggttcaagaagaagcctggatatccaacatttgagttgggaatgaaatttagttgcaagagtcagtttaagaaagcaattacagcatatgctttggctgagagaaaggtgataaactttgtgaaggatgatcctaagagggtgagggcaaaatgtgactggcatagctgtccttgggtatgtctgttgtccaataacagtagaagtgatggttggcagattgtcacctttgagaatttccatgcatgccctcctagaagagataacaagttggtgactgccactaggattgctgacaagtatggcaaatttataattgcaaacccctcatggccattagctcacatgaaggctacaatacaggaagagatgtttgctaatgtttctgtaagcaagttgaagagagccaagtcaattgtgatgaagaaagctatggatgcaactaagggacagtaccagaagttgtacaactatcagaaggagttgctgaggtcaaatcctggaagcacagtggtagttaacagagaggttgatatggatccaccagtgttcaaaaggatctacatctgcctagatgcatgtaagagaggattcatatctggttgcaggaaagtgataggactggatggttgcttcttcaagggagcaacaaatggaaagctcctttgtgcaattggaagggatgctaataatcaaatgtatctagtggcatgggcagtgattcacaaggagaacaatgaagagtgggattggtttctagacttgctgtgtggtgacttgaaagtgggtgatggcagtggctgggttttcatatcagaccaacaaaaggtattcccaagaagcattttttcaatcttgtaggactgaaagtgcatgatttgcaatagggctaatgttctcactgttttcttatagggtattattaatgcagttgagaaatgggctccagaagctgaacataggaattgtgcaaggcacatctatgctgattggaaaaggcatttcaatgagaagatattgcagaagaaattctggagatgtgccaaggctccatgcatcttgctgttcaacctggcaagggcaaagctagcacaactgacaccacctggagctcaagcaatcatgaacactcacccccagcactggagcagggcatggttcaggttaggctccaattgtgactccgtagacaataacttgtgtgagtcattcaacaagtggatcttggaagctaggttttttcctatcattactatgcttgaaacaattagaaggaaagttatggttaggatccatgatcagattactacctcagctagatggaacactgctatctgccctggtattcttaaaaaattgaatgcatatatcactaagtcagccttttcccatgccatatgcaatggtgcatctagctatgaagttaagcaccatgataataggttcacagtgcaactagacaaaatggcatgttcctatagatattggcagttgtcaggactcccatgccctcatgcaatctcatgtatcttcttcaagacaaactcactagatggatacattagtgactgctactcagtgactgaattcaagaaaacttatagccattgcctggaaccatttgagggcatgaacaactggccatatgatgacagacaacctctcaatgcacctggatatatcaaaatgccaggcaggccaaggactgagaggagaagggaacccactgaagctccaaaggcaaccagaatgtcaaagatgggcacaaaaatcagatgtaggcaatgcaaatagtttggccataacaagtctacttgttacaaacatagttcagggggccctagcacagctgcttctcaccctacaggcagcccagcagggaccaatgcagtcagcccagcagggggtttagtactgtcaaactatacacagggtaggaaaagaaagtcaatctcgagtaccagcactagttctgcaatacactcagtgagaccagctccttctaagagaaaggtatgcacatatttcataatccattcattgctgctccaattaatagaaacaaacttggtgctaactctttcttgtacatgcaggcacaaatgcaggaggcacaacagatggtgaaagtgacagccacagcataagttcccacaaatgaaggtggtacaacaactgtagacctgcatgcaattgtaccatactcataggcttcatccagtgcttcagtgaggttgaatagtggcaaagcagttgtcaacgtttcagctcaagaaccagtcaagatgaagccaaagaaagccacacctgggccactactccttcttccaccatgggagtctgcaaagctttgaagttctgccatctccatttaactaatattagaactatgttaatgtgttgtaatgactcctgtgtctgagagctatgatgtttgatgtttttgtaatggaccaattcctggccatttgctgccatctgtgaaccatttcaaatgtgtgtgatgtctgatatggaccatttgttgtgtgtaggcctatattgccacacactaatgcagtctgaacttatgtcacaaattgagctatctgaatgcaatatcatgtgaactatcttcatttgtgctggtcatatgtgttgtgtgtgctgttacaaataatgtgttataaattgagtgctcaaatgacccaattatatttcatgggttctatcttgtctgctcaaattacacaattctaattcatttaatttcagatgtatcaagcacaaccatacaaacattttaacaggaatttttccttcattaacacagagtgcattacaacacaccacaacttgcagatatttctttcaacctgacaaagttcattacaaaacaccacaacacccatcttgctgcaaatacttcaccctacatttctccttaccaacaccagtgcaaacatgacaaatacacaacccataacaacaactaacagataacatctctccttctctagcctactatttctatccttcagcacagcaattctttcagcatagtcacatgacagctttcttgctgcctccaactctctttgagcagcatcaacctctattatcttctcctcaaccttcatcctctcttcttggatagccaaacaagtctttccttctccctcctcgctgaccaaactgcatctcgcaaatcattcaacacttctctaataaaggtggtcgtcggcccatcataccaagcataaaaaccacatccaccttcctgcaatccctagcaataaatttcaatccccaataaaaaatccaccgtccaaccaaagaacaaaacatacctgggcattgcgacatttgaagtaccggcggctggggttgtccggactccacgagatccaccatgcagccttcacgcgacagtcgcacatcacggccgactggtaatcaaaaggaccaaccctatatgggatgggactcctcgatgaatgctgagaataggacgatgacccgtcgctctgggaactagccatcaccgcaccacctctattcgcgaatccactcctaccttcaccgtctcggcggattgcgcccttgccgtcgccacggattgtgccctagtcgtctccgccctcgctatcgccagccgcgctccgcaccagccgtcgctgtgctccgccgcgctccacaccagccgctgccgccgccgccgcacctcacgtcgccttggccatcgcctgtcggtcaagggttttggtcaaaggggggaaatggggatagagagagagatgcgagccgcacgccaataattttaccttccaggctgactcagctcggcctagtccgtacatacaacacactgacatgtgggtcccacatgctgagtcagctcgtcaaccgggtcaatgacgccacgtcggacgaaaccgcctgccaaaccgctcaaggaggtcatttgctctggttttaagagatgaaggaggcgttatacccggttttacggttgggggatgttattcacacaagggcaagagatgagggaggcaaaatggacttattccgcctccaaaaccctagcccgttcccacggcccttaaacccttctcccatcttctccacctctcttgctctctcgccctcttcaccaagaaagaaaacaggcgcacgcctcgcctcgcctcgccgccggcggccaccgtctccgccgcctcctgcccccaacccaggaacccccggcgagagagctcgatggaccaggcggggtcgatggaggagcgggtcatcaccgagcggatccggcggaagctggaggaggtgaacgccgccgcgcagaagcacctcgccggcgtccaggaccacgtcaacttcaccatgcaggtcagggctcctctgaatctctctagtgttagtacatttttttttcgcctcgcggtagtatatttattgtgttttggggatacacgggaccggaaatccggaaatttggtggtattgattggttgcaaatcttgactgacttggtgcggcgtttcttggattagtctcgtgggagctgggaagtaagggcttggatgttcttgttccgatgtttgatttggcgacgatgaagcaaagtgttacggtagtgcgtgctatttatatgggatttgtagatagttcagggatagggcagtctctgctattttgataccaaatgtttgtagactctcaagttgatataaggatatcagatttggtgagccttgcataaataatttgttccaatgtagtttcagtgattcggttgggcatcaatcaatcaggtggatgcaacttagtatattttggaagtttggaaagcccaatatcggagaatgattaccaactactgaaacctgctggttatatatttttgtgtgacttttgcccggatctagcttctggagtatcttaaaaattctcctgtcactccattgtatgctatcaggtgtgggtagacagtcttggagtttgtttatgaaagttcttgaatcttctgttctgtactgtcatttgctttttgtatgttatcaggcatgagtagacagtattggagttgtttatgaaatttctttagtgttctgttctggagtctgtaaatgtaaggatatgctgtacgcttgttcaatttgtttcactgcctctcattgtggaagaccaagaataaagtatgtcattatgagagaagaatttatctaaattgagagccctgtgctaattatttattttatatctggttttcttattgatcttcagataaagaataaatgctgtaataaaatatgctacatatctttgtaagaggagaatttatctccataaaaatgagaggggtaatctgcacagagagccaatgttaatttttttttttggtttctggttttcttattgatcatcagcaagcgtacttcaagtgtgcgtatgaatgctttgatcgccgaagaagtcaagaagggatcaacaattgtgttgagaactgcagcgtgcctgtccttactgccaacaatgttgttgagactgagatggctaaattccaggtacttccagtttcattcacctattgcttttcatttttcttatgattattgccttccattacttgccatcatagagcaacatagaacccaactttgtgtctgttcatttatgtagagtttcaatatattttttgctgtacagtctatatcactctacatgtgaaagaagctatggttcacttgctgcaagttttacctagaaatatgcgtggacaaaatttttttcctctttggtttctttgtgaacttagactgatcattgatgctgaactatgcctaccacatgtgtgtttgttattgatgatatcatactgagcaacttgtacataatggtaccactgtacaaagcgcaccgtgttacagtagattatcaaaattttgttgtccagtacaaacaagcatttgtgcatatctatttgcatatgatgtatgttcctgatttatcttctgattatgtattttgttcagcaagcaactagcgtggctgtgtgctgatcttagggaaaatgatagaaggaatgacttaacaagtagtgacatatcatctaaccaaaaaatgggaatatctctcccacgcgataggtataggcatcagttgctatggacatttgttataaggtagccaaggtgtcacttatggaaacatatttttccctccatctggcagtgtaagtgtgtaacattgataaaactaaataatgcttaaatggtaaaattttgcaggactctgatcttggtgtgtaactgtttaaggatatgcatatctaactgcttgagctattttatcggaatacatatgcgaaaaatattatgttagaacagaaggaaaagtcaatggcatttcgaataaaaacatctgtttgtacaaatagtgatcagtattcagtattcacctttagctgtatgttttatcatgcaaaagcatgtctaacccctattacctttatctgtatgtgatctaagttgtgatcttttcccctgtcctcaggagcggctgaatcgatctttgatggtgtgccaagataaatttgaagcagcaaagctccagaagatgaaaacacatgcgactgaggagctagaagcatgcgtaaacagatctattgatgacagtatcagggtcctgccccatctggttgatcagatcaagtccaccctctccatgaattagagagatcagaagaagttcagaactaaacagtagaatcttcctcgtaaactatttcagcttttacaaaaagcattttcactaattttggcaccaagatcgttggccaaattactgccctttgttaacatgagtatgacatatgagcggcatatcgtattttgtgtgccttgagcattttgttcggaaccacactttgttgcagagctgatttatcgaaagatggtgcaataatagaagatgatatcctcatgttgctcatccttattcatttgcatcttgcagtttgtttcagttcatgttaccagcatttgatcttcattcatgaaccctatgatgatggcagaagatgatattcccatgaaattactggcgtttccacttgttctccctcccttgtcaagtatataccacattttttattgcttgttctcaagaatatacaattaggcctactttcgaatggaggaatcaatttgttctctatattatcaggcctcttttggaacggtggaattttaaaggatttttcgaggaactgaactagaatcctgtaaaatttatacatttcaaagagccagtctctctctcaaaaaaaaaaaaagacaaatgtaatgtgctatgtgcttgatttggtgaaaggaaatcccgaaaaccgggggatgaatttaaaaaaaagggtgaatagctaatttagtccctcaagtttcaccgaaggctcactttggttcttcaggtttcattttgttaacataaaaatcctctaagaccctgtttatatgggactaaaacttttaagtccctatcacattggatgtttgggtactaattataaatattaaacgtagactattaataaaaccaatccataatcttggactaatttgcgagacgaatatattgaacctaattaatcatgattagcctatgtgatgctacagtaaacattctctaattatggattaattaggctttaaaaatttgtctcgtatattagctttcatttatataattagttttgtaagtagtctatatctaatattctaaattagtgtctaaatacatagactaaagttaagtccttagatccaaacaccaactaagtatttgttttggcctaaaattatcattgggcccacttaatatgccatatggctatttttagtcatcaattctattagaaaatgtcccttttgcccttaacttgtatacaactatacactagaaaaaagaaaccaaaataaataaacaacattgtatatttacttcccattatttcaacatgtgcacatgaaaattgagcctaatggctatcgtatacacttgtaagcacataatttttttttgttttatctataaaaagaattcattacatgcattttttctctatatatgtgaatgagggggcataagtgtcatttatcaaaagagttgttagttatgtgggttaaaggataagtttgaattaaaatggtgaatagctaatatgacctgaagtttcgcttcgggctcaatttagtccttaaggtttcaaatcgtccatacaagtcctctaaattaattatttgggttaatgtagtccttagacccacacaaagtaccatgtgagcatgccaagtcatcctcgcatgcagcggtatgaatgaaatgaccattgtacccttatataccatatagaaaagaaagaaaaaaaagaagattaatgtttcacacgtgcatgatcattttagaattgtcagttacgattgctgcaataagcaaaaaaagattactaggaggacgtgctgcacacttaaaattcaaaatattttccttgcacaagaaaaatcttactcatctaaaagttttgatgaagttgctgtttcaaaacataaaagacccctcaaattcgtaccatcacaaatcccgcagaactgacgagcgctaatggcccctcctcccctggcggcagcgccaccgccaccgcccgccgccgccctcgtccaccactacacccgcctcctcttcgccgccgcctccgcctccgccgccgcctccctccgcgccctcctccccatccacgcccgcgccgtcgtgctcggcatctccgccaacccggccttcgccaccagcctcatcaccgccgtggcccccgcctgcctcgcctacgcacgcagggtgttcgacgccgcgcccagccgggatgcctacatgtggaacaccctcctccgcgcccatgcccactcccgcgcccacgccagggacgccctcgcgctctacgcgcggatgcgcgccgcgggcgtggcgcccgaccactacacgtacccaatcgtgctcccggcgtgcgcggcggcgcgggcgccgcggctcgggcgggcggcgcacggggacgccgtgcggttcgcgctggcgcgggatgggttcgtgagcagcgccctgatctcgatgtactcccaggagggggaggtgcgcgacgcggagcgcgtgttcgcggagagggatgatgcccggacggtcgtctcgtggacggccatggttgctgggtacgcgcagaactgcttcttcggcgaggcagtcacgttgttcagtgacatggttgctgcgggcgtgcttccaaatgagatcaccctgatcagtttcctgccctgcttacgggggcaagaatggctgcctgttggggagatggttcatggattcgtcgtcaaactgggattcgatgcaaacgttcccatggtgaatgcgctaattacgatgtatggaaggtgcggaagtgctcccgtggcaagagttctgttcaatgggatgagtagccgcactctggtttcttggaatactatggttgcgatgtatgagcaacacggtgatggggttcaggcaatcaagtttttccgcaggatgcttaccgagaaggtggggtttgactgtgtgactttggtgagcgtgttgtctgcttgtgcgcgctcgggagcccttggtaccgggaagtgggtgcatgagctagccaggagtcatgggcttgacactgatgcaaggattggcaatgttcttgtagacatgtatgcaaagtgtggtgagattgcttatgcaaaggaggtttttcattcacatggtttgcgtggtcacagtgttgtgtcctggagtgccatgatcaatgcatatgccaaccatggggaggcagaagaggctctcaagctcttctccctgatgaggaatgaaggggtgaggcctaattcattcacatttacagcggttttaatggcgtgttgccactcaggccttgtcgatgaaggactgaagcatttcaacagcatagccacagactaccaaatgtcaccaacacttgagcactatgcttgcatggttgacatgctaggacgtgctggtagacttgttgaagcatatggaatcattaggggaatgccgattcggcctgacaagtgtgtgtggggtgccttccttggtggttgtaggcttcatggaatggtggagctagctgaatatgttgcaaaggagcttttcgactcaggatctaatgatgtaacattttatgttctgatggcaaacatgtactttgaagctggaatgctggaagatgctgagaggataagaggagtcatgaaagagatggagctaaagaagacagctgggcatagcttagtttgtactgatagagaaagaatagctgtcgtaaggtagcagactagtaaaattgtactactgatgctaattagcttatctgttgctagcttcgtatgtagattaattctttgatagttgagatattcaagagtaccagcactttcttttggtgagtggcttgtactacggtctttattgtgaaggcaacataacttctactgtcttcagaccaatagcaacttttcatggcaatgttgtccaatcctgggtgtctatttggtgcaatatccatgatttgttttggtgcctcagcttgaaggtaccacaccaaatgcctagatttattaaaggcacgtatttccctaatatcaaggaatggaacctctttttgcacaattattttgaccacaagcttcatactctattttgcaggtatgttctcttctgtaagcacactaattgaggacaatgttcaacccaaagtgcctaccaagtcattcatcaagaaacaactgaccaaatagtaagcctttattttctcaatgatattcatgagaacactatcaacccaggaaggaaaactaagaacattatctccagaattcatttcttgtggagaactaggttcaaatgaactcatattctttacttgtgcctactctagttctaaaaagggagctattttccgagactagtcttgtgctgaaatcccacgcttaactatttccaagatgggaggtctatagctcattcattttgctcttctgtttgcaaccactaagaaaggtactcttatttcccgtgaatgatgaatattatttgataatacatgctctgatagcctacatgtatatgctcataatcctacaatattgttttaaaaatataaactgggaaataaaaatgaaggaaattcgtttcagttggatagcatttagaatgggagccttatcattgtaggtaacaactaatgaggtagagtcacctggggttttgtaagccaagcgtggaagtgaagctgcgatgtgggctgcaagagagctcagccattcactggatggagacaagagcgtggcatgatggcaggtctatccgctcagcatgtcaatgataacttgaactgaatatgaatatgtttggtgagatagcagtttgcttatgcagttgatacatcagaaaaaccagaatactaaacttccttttgtatttttgttatatgcaattagcaattcaatttagtgtactctgagcggcaaattatcctgaacagaaatagcactgcatgtcataatcaatagttttattggtctaccttgtttcgtttgccaaatggtatgttcaaaatatcatgaatttctattcctctaagattacaattttgttatctattatctattgaatttgtttatcttgcttcagtatcatttgtcattttcttcttttggatgttcacaaactgatgatctgtgaaaagagtggaaaacgagaactttgtgttagatacaattgttgaatggctggtcaagacaaattatgagtgccctctatttggccccttgaagacattgatatgatgagactgaagatatgtgttggactatttgttgctcgatgagcaggacacagttccattggaaattaggatgtgttctcccagaaacctctaccagaaaggcatgcactattctgtttcatgtgcttgttgttcatcttgtgtgccttaccttaccatggttaacaatttgttatccatcaagtgtagttctggaataataaagaaacttcaatttgccatgaaaatcttggcctgatttattgttcgacaatattagtggaggctgggacaagcaaatcagctgtgtgtattattactgagactacgagttctgcatgctggtatattcacttccatatccatttcttgttttctttggctggttgcagcaaaattggttgatagttaaggtcttatggatatcataagagaacaaactttgatgcctatgtttgaatgttgtatagatattggctagtgggtaattatttgccagattcacccttcattcgttgtcagtaacagtgcctggaccttgattgtccatagttgacaatttgttccagcatagttgacaatttgtgcctggaccttcattcgggatgtacgggcctgtttattcagctatcatagtgttgacaagctttgctgctctactgcccctacctattcgcagggttcaatctttcgtttgtgttagatatggcaatatttctgaaattttgaacaaaatttagtcaaatttgaaaaaatattgccgaatttcatgaaagtttttaaaaaattcggccaaaataatatcgtataaggggcgggggttccataggattgaaattccgaaattttgaaccctacctaatcttagtgttatattatattcctcatggtttgttggcttataagccagacccaaaattttaattttcaggcttaattttagattattttagacttatttatttatttttttaccttaacttttaaactgctaaagggaaagatacacgaggccaagccggctatcaacatccttaggtcatatccggtttcacctaaactggaacctattaagctttcaaaagtatagtttctttaaaacatttttttatcatccttacgacttagtatttatttgtcctcgtttcattcagttatgtctatttcatcaaatcaaacataccaaaatcgaaaatggccaacaactgcatgcgggacgaccgaacgtttcccttttttaatatctaagattggctcattcaaatattcagagtttataggatcctgatatagccaggaatacaatgaaataactaaagaaacaagtagatcaaagcaagaaatggcagcatggcacgcggcattcaacgcaccagccaaccggaaacaaccgttacagtgaccggcatcccaaaccccaaatgtatgaactaattacgtaatcaaccggcctaattaagcaggcaaccggcgcaccggcaacgcataagcacgcaaatcaggctgaggagcagagaacagtaaacgaagacgtgtaaaacagtcagatagccaaaaaaaaatccaaaatcatgagaaaaacgcgaggttagaggagttattgattgatgatatcgataaacaacgagctcactcgatctagtcaatgtactttccatgtttaaccatttatctcatttaaatattatgtgtaaatgcataaaatataaatcatgcttaaagatatttttagttataaaaataacataaattttttaataaagaaatggttaaacgtgtattaaaaaacaacagcgctattgtcggtgatatgggaccgggagtatcgtgaccagaggcttgaggcagacacaatcgcccacgtggcctggcaccttcggggacgtcgggcccgagggtgaggtgtccgccctcctcctgatttccccgagggggggtcgggtgactcctgccccggccccgagggccgaggcgccccgaccccttgtggagttagcgccacatgaatgggttgggtgaacacggtgagcctcacctaaccgcattaattgcggtctggtcgaacgtgtcacgctgcatgaagcacagtgcagcgcgttcctttatccggtctgtgaccggtcacagaccggtcagatcacgggttaggtgcgactggtggtctgacgcacgccttgccccatcccgtcaagatgaaagcctctaggcactcgtctcaagccggagctagcgtgtaatctcttagagatggcacgttagccctggttagatttataccaggcttcatctcaaccattacagcctatatgttgtatgaagaagggtgaacatgcagattgttgaactgacgcgtggaggacaagaatgaccagtctgacactggtcatgtcgtcggcagacagccacgttcccacgacgcgcctgtcttcggcagaagtggaggtaggtgtgtgccgtcccgtcagaaggatgttcggaggacaaccgtgcaaatctccgtccatttatgaagagaagaaaagtccagtttggaaagagaggggtgcatgtggtatccccttgaagtataaaaggaggaccttgcccatagggaaagggggatgatcttttccagattcggaacttagaacaagtaagaggttggctcacactttgtagctccctcatacacagatccaccaaaacacaggagtagggtattacgcttcttagcggcccgaacctgtatacatcgcccgtgtctcgcgtttcttcctagctggcgatcttttcacataccgagagagcttgagacttcaccctaagcccccggccgaaccggcaaaggggggcctacgcggtctcccggtgaggagccacgagctccgtcatctggcgcgccaggtagggggctcagcgtgtgttttctgagctctcgtactcctccgtgtgcgccaagtttttcttgttcagcctaatggccgagcaagcaaaggtgcacgacctctctccgagtgtgagcggcgacgacggggagccaaacccacgtcgtcgagctcgtactcccccacctcctccacaccaaaatcctaagcagggggaggcgctcgagagggtcgaaaaatccgcagcatcgccagtcgcgggtgatgcaggagaacggcgagatggggagcgtcgcctcctcgtctacggcgacggcagcacgcctcagggcgcgcttcaggctgttggcgcgctcctacgtcacccgcccgtcgtccctgacccggagtctccagcccagcgatggctggacgacgtggccaacttggtcatgacggcacagcagcgcctgggtgctggtggacggtccgccaccaccaagacctccggcgccgccactaccggctccgtgtcatcaaggcggagggcgcggcgagcggcggctgttgcacgccattcggctgccactccctcgtcggcacctccgactcgggaggatcagcatggagagccggatgcccgcctcgacatcgagcgccggcgtaatagccggcgtactccccgcgcaacggagggcgcctcttcgtccagagtgtcacctcgacatggacgtaaggaccagccctccgtgcccccggctggtggtgtcggctgtagagcctttgtggcgagtcttcggaatgtccgttggcccccaaggttccggcccaccatcaccgagaagtatgatgggagtgtcaaccccaccgagtttctccaggtctatacgaccgggattgaggccgctgggggtgacgacagggtcatggcgaatttctttcccatggccctgaaaggacaggcgcggggttggctaatgaacctgccacctgcgtcggtccactcttgggaggatttatgccaacagttcactatgaactttcaaggcacttatccgcgcccaggcgaagaagcggacttgcacgcggtacagcgaggggatgatgagtcacttcgctcgtacattcagcggttttgccaagtccgcaataccataccatgcatccctgcacacgcggtgatctacgcgttcagggggggtgtgcggcacaaccgcatgctcgaaaagatcgcttccaaagagccccagactaccgcggagctttttcagctcgcagaccgagtggctcgtaaggaggaagcatggacctggaacccctccggttccggagtggcagcttcggccgcccccggatccgccgctcagacagggcggcgtgacaggaggaggaagaagaggtcggtccattccggcgacgagggtcatgtcctcgccgtcgagggcgctccgcgggccacccgaaaggggaggcctgcgagcgacaaaaagaaagaggctggtactcccgccagggagcgcccagctagcaagtggtgctccgtccacaacacctccctccacgatctcgcggactgtcgcgcagtcaaaaacttggctgagcgaacaaggaagtgggaggaggacaggaggaaggaacgccgtgagggcaagtcgccggcaactccctccggtaaacggcgaagtgaggccaaacagaaggcccccgctgtcgacatcgatgtcggtgatgatgacctaggtttccaagaacctggagccaccattgccactgtcgatgggggagcgtgtgctcacgtctctcgccggagcctcaaggccatgaagcgagagcttctggccgcggcccctactcatgaggcgacgtgccgggcgcggtggtcggaggttgccctcactttcgaccagaccgaccacccaccgtgcgtcgcccggggagggcagattgcgatggtggtttcccccaccatctgcaacgtgaagttggggcgtgtcctcatagatgggggagcggccctcaacatcatttcccccgcggcttttgatgccatcaaggccccggggatggtgctccagccgtcccaaccgattatcggtgtgacgccggggcacacatggccgttgggtcacatcgacctaccggtcacctttggtggatcagccaacttccgcacggagcgggtgaacttcgatgtggcggacctcagtctgccctacaacgcggtcctggggaggcccgcgttggtgaagttcatggcggcggtccactacgcctacctccagatgaagatgccgggccccggtggccccatctctgtccatggcgacctgaaagtcgcgctcgcttgcatggagcagcgcgcgggccacctcgctgctgcgtccaagcccgagggtggtgacgagaggcttggcacctccgcccccaccgccccgaggcagcggatggtcacatgcgccgaggtcccggtcaagggggttgccctgggcgacggcccatccaagaccacacggatcggtggtcttctggatggcaaataggaagacgcgctcgtctccttcctgcgggcaaacgctgacgtcttcgcatggagaccggcggatatgcccggggtccccagggaggtgattgagcaccgtctcgccgtgcggccgggcgcaaggccggtccggcagaaagtgcggcggcaggccccggaacgtcaagccttcatccgcgaggaggtggcgagacttctggaggccggattcatccgtgaagtcatccatccggagtggctggcgaacccggtggtcgttccaaaggcgaacggcaagcttcggatgtgcatcgactacaccgaccttaacaaggcatgtcctaaggacccttaccccctgcctcgcatagatcagattgtcgactccaccgcggggtgcgaccttttgtgttttctagatgcatactctggttaccatcagattcgcatggctagggaggatgaggaaaaaactgcgttcattacccccgtaggaacctattgttatacatcaatgcccttcgggttaaagaatgcaggtcctacttttcaacgtactactcgaatttctttgggtagccaaatagggcgtaatgttgaggcttatgtcgatgacttggttgtaaagacgcgcaaccaagacactttactctcagatctagcggaaacttttgaaaatctccgctccgcccgcataaaactgaaccccgataagtgcgtgtttggtgtacctgcgggcaagcttctcgggttcttggtctctgcccgaggcatcgaggccaaccccgagaagatacgagctatagagcggatgcgcccccccagcaaacttagggatgtgcaatgcgtcaccggttgcattgccgccctaagtcgtttcatatcgaggctgggagagaaggcgctacccttatttaagctcctcaagcgctcggggccgtttacttggacggaggaagctgaacgtgccctcactcagttgaaggcatatctcagctctcccccagttctagtcgccccggggccaaatgagcccctactactctacttagcggcgaccccccaagtagttagtgcagcgttggttgtggagcgcgatgaagacaatcttcatttcgcgcacccccgccctgtgttgacttggcccgggagcgagcagggaggagaagcccccgagtcgaacggtggcctaaggcccctgacgaccggagtcggccctctgcctgcttgtcagacggtgctgggtgcccccgaccctcaggaaggccccgaggccactgcgggaatgccgcacctatcgccctttggcctcgaggctaaccctgtgctgactcgacccgggagaaagcagggagaagaggcccccgagccgaacggaggcctgaggcccctgacgaccggagtaggccctttgcccgcttgtccgacgacgccaggagcccccgacccccaggacggccccgaggccactgtgggaaggccgctcctgtcatcctccgaccccgaggtcatcggcacagaagacgagtgcgccccgagaggccacttggacgaagaacgccccggggatgcggcccctagcgaagaggatcggccccgccgaaaggtgcagcggtctatctactttgttagtgaggccctccgggacgccaagacccgataccctcaggcccagaagatgctttacgctattctgatggcctcgaggaaactgcgccattatttccaggcgcatcgggtcactgtggttacgtcttaccccctcggtcaaatcttgcataatcgagagggtacaggacgagtggtaaaatgggcaatcgagctttctgagttcgatctgcactttgaaccacgccacgctatcaagagccaggccctcgccgattttgtggcagagtggaccccggctccagagaccgtctcaatctccgaggccagcacggacccctctcggctgcctcacaccgcccactgggtgatgcagttcgacggttctctgtctctccagggcgccggtgcgggggtcacgttgacctctccgaacggagacgtcctcagatacttggtccgtctcgattttcgagcgactaataatatggcagagtacgagggactccttgccggactcagagtggcagctggactggggatccgccgcctcttggtgttaggcgactcccagctggtcgttaaccaggtctgtaaggagtaccggtgctctgacccacagatggacgcttacgtacgccaagtgcggcgtatggagcgccattttgacgggatagagcttcggcatgtacccagacgggataacatggttgctgacgaactctcacggctcgcgtcctcgcgagcccagaccccaccgggcgcctttgaagaaaggcttacccagccgtcggcgcgacccgaccccttaggggagacggatgcgcctgaccggcccccgaggtccgtcggagtccaggcctcgggacccgaagggagcgctccaagctcccttagattgattgcttggatctctgagatccaagcatacctcacagataagactctacctgaggaccgtgaagggagtgaatgcgtccaacgcatttccaaacgctacgtgctggtagaaggtaccctctatcggcgcgcggctaacggaatcctcctgaagtgcattcctcaggaacaaggcgttgagcttcttgctgatatccatgaaggcgagtgcggagcccattccgcctcgcgcaccttggttggcaaggcctttcgtcaagggttctattggccgacagctctcaatgatgcagttgatctggtccggcgatgcagagcgtgtcagtttcacgccaagcaaatccatcagccggcccaggccctgcagatcataccactttcgtggccttttgctgtctgggggctcgatatcctgggaccgtttaagcgggccccgggcgggtttgagtatctgtatgtcgcgatcgacaagttcactaagtggcccgaggcttatccggtcgtcaagatcgataagcactctgcacttaaattcattaagggcatcacggcccgttttggagtgcctaaccgtatcattacggataatggcacccaattcactagtgaactcttcggcgactactgcgaagacatgggcatcaagctctgcttcacctcacctgcccaccccagaagcaatggccaagtggagcgcgccaatgcagaaatcctcaaaggccttaaaaccaagaccttcaatattctcaagaagcatggcgattcgtggatcgaggagttgccagcggtgctctgggcaaaccgaaccacaccaagccgagcaaccggggaaacgcctttcttcctcgtctacggcgcagaagcggttctcccatccgagctcaccctgaggtctcctcgggccaccatgtactgcgaagctgatcaagatcagcttcgcagagatgacctcgactacttggaagagcgaaggaggcgcgcggccctccgagccgcgcgctaccagcagagcctgcggcgctaccatcagcgccacgtccgggcccgatcactctgcgtcgacgacctcgtcttacgccgcgtccaaacgcgtgctggattgagcaagctctcaccaatgtgggagggtccgtatcgagtgatcggtgtcccccggccgggctccatacggctggccacgggcgacggcacggagctgcctaacccgtggaatatcgaacatcttcatcgcttctacccctgaggggggggtcgagtgtcaggttttggctcgggccaaccccgcacccccctcgggtgtgcagggttggccgggggctaccacacatgcactttcttatttctcttatttcagcatttcaataaaagcagtttcaatttcctaaaggttgtgtctgtgccgttttttccttttgaagaatcttgacttgaaataaggtcactcgtgctcaaccttgccctcgggggctcggttcggtcagctaaaatcgccaaacggggcccagaaccgagccgtgccccggggcgtggtgaactccgggggggaatcggcaaaaacccacaatcgggtcacccataaccctcggtcaccacgttctcggcctggccagcctcgacatgtggatctccctaggcactagccccgacccgagccattagaggactgggacttgggcacgaggccttaaatcaagctaagacacaaaagaggaccacggcacagataatcctcatctcatacgcatagcaaaataaaattgacacgaattttttcatcatttttgattccagattaagttgatctatacaaaaaagaggcatgaagaccttagaagaaagaaaaagaaaaaattggaaattggcgggggcctgggggctcagtccgatgcgcccgggtcgccggcctcgtcgtcacggtcgtctgcaccgctggcatcgccctcctcgtcggagttgggggcgaacgcgagccgaggggccgacccctcgaaactgtggacgatgtggtcggcggcatcccggacccgcgcgcgcgcgtcgtcctcggtcccgggagggaactcttccagcgccatccatggagagaagttggggtccctggcctggtaactcgccagtacgagttcaaccgctccttgggcgaggtccctcgaggatgacttgatggtcttctcgagctcctcggggagttgttggagagcccaggccatcttcgtgaggtgcggagcgaggccttccaggttggtggagtgcgtccttgtctggcctttccagaggcccgcttgccgaccggcgcgatccaggcgggagaccgcatcccaaagcatgccgggccctatttcgcccgccaagcggagggcctcggcttccccggcggatgagtctagcgcgcactgcatgtcggcgatggtgagttcggcagctgcgaggcgggcggctaagtcgctttcgcccgcagccgccccgctgatatgcgccctcgcgtccagctccttttcccgcgcctcgaggttggcagcccgctgctccagtgcggctctctcggcgcggatggattccaaattgcggcgtgcctgctctgccagcgctgcctcacgaagggaaaggctatccgccaaccgttgcgccgcagcctcggcctcttcgagagctcgctcccgctcagcgagtgcgtcctcgcggaggcggagcgcggactcctcttcggcgcaggcggcctcgtgcaccgccagcgttgcctctcggatagcggcggcggcctcgcggtccgccaagcccctctccacggcgccggcgtgttcctccaatgccatagcacgggcctcaagggcctcctcgcgacgccgggacgccgcttcgatctccgttgcccgccgctctcgggcagcggcggtgtcaaggaccccttgggcggcgtcgagctttttctttagctccgcctcccagctcccgtgttgaaggcggagggtgtcctgcgcctcgatcatcgcggtggtggcaatgagggcgacctcccgctcctcgtccacctctcgggcgatctctgccagcgccgctttgcgggcttcaagctccgagacgtgacggcggtgagccttacggcccacctccaccatgacatccaccgagcgccgcccctcctcgacacgcgcccatgcggcctcgagctccgctcgttccgctcgcagggcctccacttgggcgctgaacccatctagcaccgcggtgtttgcggcggccaaggcctgcagaaggggctcggcgctcagcggggcgacagaagacgaggagaagagccgccttggagagaatgcgacgcggctcggcccgccggaggacgcactgggctcgggaatgtcccccggacccgtttggtcctaggcgtcgcctggggaagtgcgcccaggcgatccgcccgcggcctcgtcgcgagccgccccggaggctgtcgtctgagcgtcgcccgagggagtgggcccaagcgacgcgccagcagctttgtcgtgagctgcctcggaagacgccatcgcctcagcctgacgagcccgggcggcctcctccttagcagcttcttcggcttggcgagcccgggcggcctcctcccgagcggcctcccgggcggcctcttcagcttcccgaaggcgatctgcggcctctcgccggtcagattctcgcctccgttcctctacggcccccggatcttcggcctcggactggccggacttgggatggcgggaggaacgtgacgggacatcgctgaagcaaaagaaaaaaccagaagacaagcaagataggtaagagaaaacttgcttttgggataaaagaaaggcggtcgcaatgagagtgggacgaacctgcgagggggtcggttaaatgaccaccttggaggggaaatcaggtttccccgggatggttccgtctcccccatcttgcggagccgtttcttcttgcgctccccctcgggctgcgatgtcggcgcggccccctccgggtgccgactgctggcacgcaccgccccgccccctcggggaggagatgggggaggtgttcctcccagcttcctcttcccctgggcgtcggcagggcggctgctccccgagcccccgacgcggggcccagaagcacgaccccctcctggggtagattgttccccccggcggctctcgcccgcgccgtcgtggcccttaggagtttcttcctctgaggccccgacccccatcataatggtcagaatggaggcgcggtcgggatcgctgcagagggggaggataccttgaggaatgagagacgtctccacggagctgagattcagcaccctttggaccacgatcttgaagtcctcgggagcccaatcccatctgactccctggtgggtccgcatgtagtcttcggacccggtgtactcccaggcgccccgggcgcgccgttggagcggcgcaatccggcgacggaggtagtcgccgtacaccatggcccctgtgagcccttgggatcgcaggcccgccaggcggtcgaggacggcgtcatagtcatcccccagatctaccggcgcccgccagctggagacctgcgccgggggctgacttggaagtcggaggcgcgcttcgttggcgaggggggtgtagaaccagtcgctcttccagtcgtcccacttcttgcggagggcgcaggggatgtagcggttcaacaccggcccccgcggctggaagtagcagccaccaaccaccgacggcggcgacaccgactgcacggtgaagaaccaccggaacagccgaagagatgggcgcaccccaatgaacatctcgcacaggtgcgtgaagatggccaatgtcatcactgcattaggggtgaggtgcgccatctggagatcgtagaaatccagaacatccataaagaaagaagaaaatggcggaaccagccctgccattgcgaaggggaggaaaaagacggaccgccccgggtagtctggtgccgggcgtccctcgcccagcatcactatctcccggccggtggcagattccggcataaagcggcgcggcagcccggcatgcctctcgctcacgatgcgagaaggcggaagtacgcttccgtcgagcagagcggaaccccgagccatggcgccggaggaagggatgattgagagcgagcgcgtgtggcgaaggtagggcgcagcagagaaagagttagggctcaagcggcgaaggcaagaggaataatggcgaaaggaagggagcaaaacttttcctcggtatttttatacccttgccatagctgggcccggctcctcgtttctcgcgcccactatctcgctccctcgtttctcactatctcgctccctcgtttctcgtgcccacgcttccactaatcccattcgcccgcttgcggcgcatgaggtggatatgcgattgtggcagtcgagataggtcgtatcgtgcgcgcattaattacgctcgccggccgaagcgacgttaccatatctccaggcgaagcaaatcagctcacccagattcgtgcgctgcttaggtgatgtggcagtcttaaagagaccgcccattatgaacagccaagttaccattaccgatgtgcatggtttgagaccgttgggtttctgcgcaaccatgaaaaccggtcccacctgtcaccaggctttaggagtggcgttacgcccgatcgcttcccttgagaagggcgatcgccctggcataacgccggggactactgtcggtgatatgggaccgggagtatcgtgaccagaggcttgaggcagacacaatcgcccacgtggcctggcaccttcggggacgtcgggcccgagggtgaggtgtccgcccttctcctgatttccccgaggggggtcgggtgactcctgccccggccccgagggccgaggcgccccgaccccttgtggagttagcgccacatgaatgggttgggtgaacacggtgagcctcacctaaccgcatttattgcggtctggtcgaacgtgtcacgctgcatgaagcacagtgcagcgcgttcctttatccggtctgtgaccggtcacagaccggtcagatcacgggttaggtggcgactggtggtctgacgcacgccttgccccatcccgtcaagacgaaagcctctaggcactcgtctcaagccggagctagcgtgtaatctcttagagatggcacgttagccctggttagatttataccaggcttcatctcaaccattacagcctatatgttgtatgaagaagggtgaacatgcagattgttgaactgacgcgtggaggacaagaatgaccagtctgacactggtcatgtcgtcggcagacagtcacgttcccacgacgcgcctgtcttcggcagaagtggatgtaggtgtgtgccgtcccgtcagaaggatgttcggaggacaaccgtgcaaatctccgtccatttatgaagagaagaaaagtccagtttggaaagagaggggtgcatgtggtatccccttgaagtataaaaggaggaccttgcccatagggaaagggggatgatcttttccagattcggaacttagaacaagtaagaggttggctcacactttgtagctccctcatacacagatccaccaaaacacaggagtagggtattacgcttcttagcggcccgaacctgtatacatcgcccgtgtctcgcgtttcttcctagctggcgatcttttcacatactgagagagcttgagacttcaccctaagcccccggccgaaccggcaaaggggggcctgcgcggtctcccggtgaggagccacgagctccgtcagctatctattaaaagtaaataaaagaacagtacgaccgtatggtttgtctagttaaccctgcggcttacaacaggtataacagcagactataaaccagctataagcgcatatcgagaagataaaagaagagaaataagaacagtgggttataaatctatagccaaccgtaccacagactctaagacacaatttgtgtatgataggtgggaccatgtattaatagtgtagtatatatttatagataactattatatgaattgtgattatagttgatttgaagctagtagtcggctacttgctcttagagcaagtacaatagcaaggtataagctagctataatacatatcgagaagaaaagggaagagagaaagcgggctacagatttatagccagctataacacggattataagacgttgtgtgtgtatgagaagtgagaccaggtattaatagtgtactatatttttataggtaactattatataaatgggctgttagattatctatagatgatttggagttaacatttagttatactactacctccgtcctaaaatatagctatttctagcatagtgtcttgtcccaaaatgaagctagtttttcacctatctcaatctctcaaccaatcacaactattgttcttcacttaccttttcttttcgaccaatcacatacgttttccaatcattcttatctacttttttaatacccatatcaaacttaaaaatggctatatattttaggacgcaggaagtattaaacttgctcttacatggaattattagcgtggtcgtttcgcgtgaactccacccgcagacgcagacaatctccgccagcgccaaagccggacatgccgacgtggcgagcaatgtggggcccaccatctgactcatcccccctaaacccccccacggcccaccgcctctcctcctcctccttcctcgatctctccctccctccctccgctcccaatcatggctaccgccaccgccgcctcccgcctcgcggtggccggcgctgaacccgctcgcgcccggcgccaccgcccgacgacggtggcagtctgcgggggcgcgaggccgaggtcgcgccccgcggccgtcgttgccgccgccggcgccgccgctccctctccggccaccggcggcgtcgcgccggttccgccaagccccaggggctcgtaagatccgtacctgctcgaaaattatttttgttggtccggtttgatttgggtttctgggcgttaaggactacggaaatgggagctcccctccattttgatggaactctcgtcgtatccgggttgacctgatagtgtatagatagaactgatcctatcttttatttctccccgtctcgtgtcgccgtatcggatcgattatggtgttaggggtgtggaattcggggatttagcattccgttgtgaaatctgaaatggttcgttctgagcagtcatttctgtagcgcctgagcataattgaccagaattacaatcatttttcaaatcaagcattcattattgggtgtttgtgacatgcttgtttgcatttgttgcccacaaagcctgtaaagtgacttacgtcggagtccagaatattagctgctgaatggcaattctcgtaagatgatttagttgcacagaacatttgttatttgtttggtccatgtcaatgaaaattgtataacagtatctttcagttatgcaaccccttttttcttctgaagactagttgtgttaacaaagggaccaactttcaagatgtgtataatatgctttttctgttaaggttgatttagacaactaagaagctttccatatttatgtatgtatatgatgaattgatgaccatgtaggcctttgaaccagagtctagcacaactcctctttaacatttctatgatgatttcttcaacatcaaacggcaacaatagtttctcaagcaaccttttaatatacctctttgcatatgtatacctaaagagatcaccaattgttatacatttctattgaagattgcaatcaacacagttttgtcgtcctttcatgttttttaggacttccttttaagttataaataatagcatctgccatatagaaatgttaaagatgcctgtattagttccattttgatctatatttttttctatgtttatcttgtaggattataaagcgtcatacactatcagtttttgttggagatgaaagtgggatgattaatcgaattgctggagtttttgctagaagaggatacaacattgagtcattggcagttgggctgaacaaggacaaggcattatttacaatagtagtatctggaactgagaaaatactgaaacaggttgtagagcaactaaacaaacttgttaatgttatacaggtcagtattttcctccttatcatatgaattctaagatgtttgctgattaatagtagcaagagtgactgtactaactcgttcattctttccaatatatctgatattcatagcctaatgtgaatgcaactaggttgacgatctgtcgaaggaaccacaagttgaaagagagctaatgcttataaaactaaatgttgagccagataagcgaccggaggtatgactgcacaaccttatgagaaaaccatctggggatttatatttgtgctgtgtttttgattttacaactttcataatgtctggatttttttactctatctgcattttctggatttaccttaaaaaggagcactgaatactgattactgagttggtgcaaaatttaaagaattaagtggataatggacgaaacatttgcacatttacaaattacaaatgtcaactggatttgcaaagctgcaaatctacatgctaaaccttgtttatttatttatttgtttatctgcttttacatgtaggtgatgggtttggttgacatcttcagagcaaaggtggttgacctttctgaccacacactaactattgaggtaatcctatgtttatcttaccttgcagatcacatcgaccataattcttgtggtttttatgaaagaaaaaaaatcttctttttttttttcatgttgaaggtaactggagatcctggaaaaattgttgctgtacagaggaacctaagcaaatttggaatcaaagaaattgccagaactggcaaggttaaacttctccagaaagaggctagaaaaatatgctcttttcatctctctatttttatgtaataaaacttattaatgcaacagatagctttgcggcgtgagaaaatgggagaaagtgctcctttttggcggttctctgcagcttcctatcctgatcttgaagtggcaatgccatcaaaatctcatgtcaacactgcgatgaaaacagctaaccagaattctgaagaatcttcacaagtatgacacatcaattatcctcgttcatgtgaactcagccatgatctctctttaatttcttcagaattgtaataatatattttatacatatattactctatggtgttgttctaactttcccatgcatgctaaactgtcgaacactcataatatcttcaatatttttctttccaatcaagttgtagtttttattttttcaaattgatcttattaatgctctcctgctgctcattccatgaagtttgatactataaaccattttattctttgcaatatattactatcattatgtgttaaggctgagtttagttcggcccaaagtttggaatttggttgaaattggagacgatgtgactgaaaagttgtgtgtgtatgaaaggtttgatgtgatggaaagttggaagtttggaaaaaaactttggaactaaacagggccttattcccgtgcattcattctttttttattttgggaatcatttatgcatccaggactggatgcattatttaatttgttgttcctgactaatgtcagcattgtattgaacaatattaccttaattagaaatatttaaaagtgttatctatcttagcataactacacggtaggctgatatttcagaattgtaaaactgagtatcgctgtttagaaaatgatcatgggtactgtgttgcatgcactaatatgggttgttatcattaccaggatgttcatttggattttgactattttatatgtgattatcttcttactcctagggtgatgtctatccagtggagtcatatgaaaacttcacaacaaatcaaattcttgatgctcattggggtgtcatggctgacggtgatgtaagttcttgtgttctgaattgtttggttgcagctaccctcacctccatctagttctgcacttctacactgaattatgtatttattttgactgacttgtaatactgaatttagtgtataccctcgaactaagctagcataattttgctgcttcagccaacagggctttgttcacattctttgtccattttggtgaatgatttccctggagttctcaatgttgtaacaggtgttttctcccgaagaggctacaatattcaggttcatttccccttgtatattttatgttgtctcacttagacaactgcaggtttctaggttccactgaatgctaaataatttcatcacttgacagagtctggctgttggcccagctgaaaaagaaggcacttctcggatcactactgttgtccctggaactgatgagtctattgccaagctagtacaccaactgtataagctcattgatgtttatgaggtaaatcctattcactttgtggtttgcatggttattgatgctgatgtaaacttagctcaaattttgtttgaattttcaggtccaggatcttactcatttaccatttgctgctagagagttaatgatcataaagattgctgtaaacaccacagcccgcagggctatcctagatattgctgatattttccgggccaaaactgtggatgtatcagatcacaccgtaactcttcaggtaatagtcatgggctatttttacatacacccacctcattggcccttatatcttactgatctttgaaactattataattatcagcttgatgtaagatattgagatagactagagaaaatctctctagtgtagctttcaattagctgatgctaatttcaatatagatccttgaacataagctatcattttttcttgaaatatatatggcgggagcctctcccgcagttttgattcagtaaagaaaatcaatataggtcaaatagagacaatgctattaggaaatgatgtaatttgttgatttggattgatttgaacattatgaatttatgcttttttacaccaatgaacaatatacctgatgactgaatcatctcctttagtatttgcatgaagtagttttgagggcaatgtatccattctggcaccaattgcttttctgtcaaatatttttccttaatagtttgcttgcatgcaacaattgttttaccattcagaaaacttttaagtttacggatgatctcaatttctgaatgtcatgaattttatattttttgcacattagtgaacaacataatctcctttttagtagtttttatgaactagtttcaagagccaactaatcatattggcaccaatttgttgtgttatatatttttccttaataatttgcttggcgaacaacattgttttggcatgcagcttactggagaccttgataaaatggtcgcattacaaaggatgctcgagccctatggcatttgtgaggtttgtattgagcttatcactttgcatcttgcaccatgtttttcaaccaacagtagtgaatccaacgtaaatcatagttcagatggttgcaatatattgctcttgatcctcctctttgcaggttgcacgaactggcagggttgcgttgcgccgtgagtcaggagtcgattccaaatacctccgtgggttttcccttcctctgtagtttgtttgtcagttggcaaagaggtcatccccatcttgtcatttcgattcaattttgttctcttctgttagaatcacaatcttgaagtgatagaatcattcgaaagcaatacaataagaaaatagtggtcacagtttgtgtcagttgtattagaaaagattcaataaaagtatttgagttggctcaaaattgttgtatctgaccattaaagctgtttatttttctagttcttatattgcatagtttctggctttctgcgtatttgggtgaatccgtgtatggaattgttcattagggtgttttcaagggtgaatttcatcgtttcgtataagttttttttttaaaaaaatacatgtattttggttgaatgaataggatgagatgatttggatacaattttttttaatactcctgagatctcgcatcgttccatacactaaaaaaaatgtgcatcacagtgtcccggatggctcgcaacagagcttatgtaatagctcagcatctgctttggtctatcagcaactttacgagatttttgcagtattatttagagtatttactccacgtctctagaactacgttttcttaaaagaaacattgttttgttgtattgtttagaacttattttaatctatctgttaaatttatttattaaaatatttaattcatcgttataatcaaggaggcaatgcgtggcaaataatatgatcgaattattagtggtgttgtgatcgagtcctttcagaatttaaatcacggcgcaaaaaaattacgcacaagcaagtgagcttctagcagaaatttagtaagatcaggagtgtgtatcattggttttcgtctctttaagcgtgtgttcaaaagagtatttacagatacgtgagtatggtgttacgtgtatagtggtgtatatctatcatgtactttatgaaaaatataccatgaataacctgttttgcatggaaaagggaggtgtatatggatgtttgaaacagaaaagagaaggacgatttttttgcctcccacccaaacacccccatagtgtacagagagcagatggacttcaataccagagcaagcaattggccaccatggttcatgggtttcacctaacagaaagtagcaacaagggacaacccacccataccgacataggaggatttactactggcaaaagaccgtctcgtgaaaacgccacaggtgcgcaacgaggagcatagggaggaaagcgaactggaggaagagacgggggaagccacgtcatttgatggaaatggaaggtccaagcagcccattcattcttggaataaggggagggagcctatcttctacaaatactccctccgtttcgaaatatttgacaccgttgactttttagcacatgtttgactgttcgtcttattcaaaaactcttgtgaaatatgtaaaattatatgcctacataaaaatatatttaataatgaatcaaatgataggaaaagaattaataattacttaatttttttaaataagacgaacgatcaaacatgtgctaaaaaatcaacggcgtcaaacatttcgaaacggagggagtaacaaattttatagctgaaacttttagacatcaagtggccagcatggcatcgttgaaacttttcggatagtgaaaaccaagtcctctttttccattaaagaaacaaataaacaactttaaacggttgtgtgttgattttcttttgaacacatacttgaatggctccttgctacctcataagagttcaaaaaaaatgacaagcagtcctctgaggttttctcaggttttgcctatataatctggttcaagtttttctggtctatctacccttaagtggtattaccaaccattccggaggagcagttgatttagcaaattttagtattcatctattagatgtttcatcaaattggttctatcaattttatacaactatcttcaacatgtgtggacctagaatgactatgcatagtgacatcatgcctgtatctaccaatttcgctatggtggttaagttgaaataacatgtttattaaaaaataaagttattttctcgtgatttgtttagattggaagagacattagaaaattcattacaatagttggctttgatcgattgcttggtgttacgctatttactactttgattagctaaattcatttatgacaccaattaatttacagctgatccattcataatatcgtttagaagcaaaggcttactattgtactatccatacaagtaacttggtcaagtcaaaagaagtttgttgactactactaaatgagtgcacgaagaaaggaaggtaaagcagggacaatagtatatggtaagtagctttgcattgttctatatgtagaatacctattagtttttcacaaaatagtactatatgtggatggtacataggtatgatgaaagagggctagctctgtttgaataatagttaccagttaagataagactactaaataatctgctacttcgtttccaacggttacaaacatacaaagaagagataactctttcacaagcgattgtgggcattcctagaatatgagactagtgccttacttggggttcttcttgaaataaaacaaatgcccattcaatcggaattagaagtaatactcatctttcctgagattccaaatcccaacatatgaacggggggtgcaggaa

SEQ ID NO: 21880 - DNA, 19097 bp, Oryza sativa
tatactctaaatgtttattatatttatactatgtattaaggtgcttaattaaatagagatatttttattgccgtacttcagattttatttgcctaattacctttttaaaattttattagatcatgccatactacttattattatatagttagttatagatgaacatagttcctttcttacaagaaaatataaaaagtgaagtgcacaactagttgtagtatactatattaaatgataaaaatagaatttttgatttattgttttagaaaaatattagctacatctcttcgttggtttgagaagttcaatttaaaagtttttatgttccaataaatatacattaccttattcgctccgttttcgcatttaataataatcgattccatagtcatatctggggtttctgaaaacgaaaacgatgaacatggtttccgttcgtttccgaagctaggtttctcgttcagcgaatttggctgcgcatgttgtagcgaaggagtgttactccaggaaatgcattacgaccattatgacctggttgttagtgcgtcggtgcgtccgattttacttaggtctttttttttattttttttattctttcagagaagggtattttttattctgcctctatattcaattagatatatgtagcatttttaaattaggaacttagcctatcaaataggggacttatagcacttaaataacccaatctgaaataattcgctcctatggagatttgaactcaggaccatagggaatttatagcacttaaataacccaatctgaaataattcgttcctatggagatttaaactcaggaccttggttgctactcaggtcactgcaaccagtagaatacgtgccctttcacatattactacgaggattttatccagcagaatcggattgtgtaatgtggctttaggcctgctctcaaaaaaataaaaaaaaactgggacttgctagttcgcgcatacgcgctgctacagtaactcgcgcgcactaccctatcacgccgcgctcccatcactaaacatgatgattagtgttaattacggtaattagagttaattacgccctacagtaattcgagaaagttgatcggtgcgcgcaacgacggagtggttagggattgttttgttgcggttttcttttttcttttcgggagttttttcgtgagacgcgtaactaatccgtttagttttagataatgatgataattaacgtaagatttgtagctttgtcttatttaaaagattttttaaagtaacagattgaaaataaatcgtgaaatcaaattttgaaaactttcaacccaaatttgaaaactttcaactcgaaatttcaatttgtttaaagtcaaaatttgaaaacttccaacttttcatctcaaatttgaaaaactttcaactcaaatttaaaactttcaatccagatgtgaaaactttcaaccgagatttgaaaactttcaacgcgaaatttaaatttgtttaaagtcaaaatttgaaaactttcaacttttcatctcaaatttaaaaaactttcaactcaaatttaaaactttcaacccaaatttgaaaactttcaactcgaaatttaaatttgtttaaagtcaaaatttgaaaactttcaacttttcatctcaaatttaaaaactttcaactcaaatttaaaactttcaatctagatttgaaaacttttaagtaaagatttgatatctttcatgtcaaaattaaaaactttcaattctacatttgtaaaaaggtgtgtgaaagattgaaaaaaaatatgaaagaaacggcgaaagaaaagaaaaacgcgcgcggcaaaatcagaaaaaaaaatgcaaacagaaaaaagggaaataacctttacgtagaaaaaaaaatataatggtcaccgtaattcagatcgtgatcatgattacgctaattaatttgatcctatctgctgcccatacgaacgtatacgtgtccccaccttccacactgtgaagctgcgttatcatgtggtgggctggtcccaaaccgcgcgccagcgaacatcatgtggtgggctgggcccaaaccgcgcgcgacttcgttcgctggcgcagacgcgcgcaataggaaattcgaaaaaactaacttttttaagtcaacattactgtaatgtacataagacgaaaagacccttgaataaaatacaggaaagtgtaataagtatgatcctcgaataaaatacacgatgtagtaagtacagaaaaatatactagctagactgatgtcacgagcaaataaactgtgtatattgacaagttggtgcatacacgaccagtttaattgtttcaaattctagtcgtaccgacgttgcaccaaaatcccaatgcatattgacgaacccgtaaaccctaaactatagataaataagaaatcatagctagatatatctactttgttccaaaacaacccaaaaagtacttgcgaaacgcctccttgtggctctgccgggtgccaccgctcttgcatggctcatcgtcattgtcgacgctgcatttgcagatcatcatcaggccatccaggtcatccggcccgagctccatcgacatcgtcgccgccgccgcggcctcctcgacgacggcgacgtcgcagtggatggcgaactcgtcgtcggtgctgaaccactgccccgctaggacgtcgtggcggatgaacgtgaagcagcggtactccgccttcccggtgccgtggaacgacgtcgcgtagctcctcacctcgttcgtcggaggcacgcacggctgcagattgaccatacggaaccggacgttggttcggatgccgccagcggcggcggcggtgccggagtcggcggtgtggagcttgaggcacacggtggagtagccgttgcccgaatatttgctcgcgttgaggtggaagaagaagctccaggtgtgaccggcgacctggaacttggacgactcgatgtcgtatttgctgccttggtgagatttcttgatcgcgttgcggaccttgatcttgagaaggttgcaaccggtggcggccaccgacgtagaggtggccgtcgacgcggtgacgacgtccttcgtcggcgacgatgacatggcaagctaactagcagctacctggtggtggtggtggtggtggtcgacggcgagatcaatcggggacgaagaactcgatgcagggttaacattggttaaatagattaggagaggtaattaaccacacgtttgacggacggacgcgcggctataatccgtatatagttttgttccgatcatgcatatagcatagaagaaaagccagggtaaatatgtctcgttctcaaaaagaaattataagtttgtccttattaacttcgaattcgataaagcagctgttactgggatacatacggatcagttaatattatgcaacacaagttaccacagctattaggttagttaattattaaaaaatataggtcagttaattttagtttggttcagatcggatacaaacagttacgtcaacagacaggaaagtatcaggttgttacggtagataggaatagttttcatctacatttaatttcaaaaattactttatcatttactcttatatatattctaactcaattcaattaaatctattatttacagtagtccctatttaattcaacatcgtaagagagtactaaacactgatatataaaaaaaacattttcacagacaaatcaaaatctagtattcacagcaatatctcttctacctaattcaacacggtacaatagtaatactcactattagaaaacatatgttgcaaacgggcaaaatagattttttcaggttgtcatccaccctgcctgtacataaaggcttgtgaaaatgcacggattttacaggcagccattggctccacctgcgaaattgattttcgcagccagcctttccatctttgcaagcggtacagtcgaaaccgctaaaaaaagatcagttgcatgcctcccctcccacacggcgcggccacgtggcacgcgcagagggggggggggacggtggaatggcgtgggagcgtcacgtgcggcgcattttcttggttctttttcggttttttcttttcgtttttttgtttttcccttgattttttttggtttttaacttatacgtatataaattttgtattcatacgtatacaaagtttgtatacgtacgaatacaaagtttgtatacatggtgttttctgtgtttttctttacttttcggtttattaaatatgtttgtatttacgtatataatgtttatatacgacatatacaatatgtcgtatataaatttagtatatgtcatatataaattttgcatatgcacatatgtttttatacatataaaatatatacttttttatagtagtagtatattagtagcagtagtgtagtagtaagtactactagtagtagcctagtaggtgaccgagtaggcggctgggccacgcattatcagtcccccggttcaatcacccgcctgcgaaaatatactccatgaacaaataaaagaaaaatcccccgccacccctcccacccccacctactgttgaccctccttttatgcccgcgccactgccgtcgccgtagcctgctgcccggcaccactctgccatcacctattgtggaaggagagggaagggaggggaaccagatcttggaggtaggagggtcgcaccggtcgccgccaccatcgctcctcttctctgaccggatctaggagcaggaagggagggaggggaggggagcgccgcctacgcgccaccactgtcactccctccaagacgcctccatcgccgcttgcggtggccgtcgctccccctcctccggccggatctaggagctgggagggatctaggagctgggaggaagggaggggagcatcgtctctgtcgcctccacgctgctaccactgctggcatcctctgctgccctggtttgaagtgggagggagggaggggagccgcctgctgagaagggtggtgggtgaggtgagggagagggaaggagagctgggaggggagagaacttgcggaaattactggggcttggtaggtggtgatgtttacgaggtataagcttttcgtaggtggaacatattaaggtcttgcctatgaaaattgattttcacaggcatggccttaagaggtctacctgtgaaaattaaggatatttttgtaggtggagctcttttgaccatgcgatttaaacaggcaggactagatttggtatctttaactatttttacaaatggtgattttatagtttgtctggaaaaataaatcgtaaccttgggaaaaaatgtttttctactggtgagtgatacagaaaacattcgcatagacagtcagtaactctgacgaacgttttgtaaaccgcctgcagctcaaggcaggtaaaagtcggttatttatacagatggattctgtaattggccacgaaaatgcaaaaattagctatttttatactaatggataatatatatttttacttcaatgtgcgacaaaaaatatttcacagcttgtattggaacacaattgtccaaagttgtccccgggcaaatctcgtctgataactcatcctccgtgattcgacaatgttggctcggtgttacctttctcaacgattgtcacgatcttgtaagtcttccactgctgcagaaaccatctttggtcgattggccaaattctacaatagtcccggttctattaaaaaccgggactaaaaacgatttttagtcccgggttataagagcaacgggactatttgatctttagtcccggttagtaacagtcccagttcacattgtgtcagggattgtcaggctccccggatctttattccagttggtgttactaatcgggactaaagatctcgtggatcttttcgcccggtttgtaacaccaaccgggactaaagttagcttcctttatatatgtctttttcctcctccagcccgagccaagcttcaaaattttttcttgaggagggaaggtgctgccaaaatttattgtgaatttattttgatgattatatacaaattggatatgtctaaaaggttagcaacttcatcctccaaagttttttttatcatattacatttagatatttgttttgtatatattactgcctgtaaaactttgatggaagttgatgagggagaaaatttgtgtagggagggaagaatatagaaattttgtttatttacaattttataaaaagtttttataaaagagttgagaaggaaaaaatattaaaaattatttaaagaatagaaaactaactaaattgaaaattaaaataagtacaacacattaaaataagaacaaacaacctcccgttaccttgcccccatcaggccggacatcacgttccccattaattgcgatcgaggaggaagcaagacggtgatggcagcggctccgatcgaggggaggattgtttcacgacgtttatctctccactctttttttttgacaattatacccttgtacttttttttactattatatccttgcacttttttttaagaattacgcagtacaacgcagatatttacaacgcacgcgcactcacccctataaacacacacacacaaatcctttccctatcagcatctttgaaaactgagccggcaaatccttgagatgcactcacccctataaacgcacgtatccaaatcctccaattatgacgactgttcacaggatgacaactgtttataccaaaccttgtatctgtcataatcatcgtcacactatactctgcatgggctctatgacgatagcacgatgacaatagtggatcgtcataaaatatagaactattatatttttagaaacaaaaaaaatattgttatactacattgctaccagaccacaaattgtttgttctaggtggactcttcttgtctacagcatttcttgtctcttattttaggatttaggattgaagtcatctctactctcattttatgaatgaaaaaaaatcaaaattatggcgtttcattttatgatggctaaaatggctataaattggtctaaattattctttgaaattttccatgaatcttcggagcacaataactaattttaataccataaagtttatttaacttattaaaataaatagaaaacaaattaaaattcctctctatgtctttgggccttttatggcccaagtattactctctccctcccacagtctgcagcctctctctcccttctcctccctttctgggccgccggcccagcccttttcctcctactttgccgacaagtccattttacctcactcctctcaattcaaataacttttcacgtagtaaatgatttcaaatgaaaaacttgtcaacaacaaagttgtataacttatcaagatctacaacttttgtttcagtcatttttctatatgactttgtttcaataatttgaatttgaattccaaattatgacaacttcaaacactattttcaaatagtaaatgatttcaaatgaaaaagtcattcacaacaaagttgtataagtcatcaatatctataacttttactttggtcatttttctatgtgactttgtttcaataatttgaatttgaatttcaaattataacaacttcaaacaacgttttcaaatattgaatgatttcaattgaaaatgtcatcaacaacaaagttgtataactcatcaatatctataacttttattttggtcatttttttatctgccaaagtgatagtaacatttttcacgaaatttagatatctctcttacagtttataaaaccatataagagatatgtaaattttgtgaataatgttactatcactctgtcggatgaagaaatgacaaaagtaaaagttatagatattgatgagttatacaactttgttgttgatgactttttcagttgaagtcgttcaataacaaaaagttctatttgaagttatcaaactttgaatttcaaatttcaaattgttcaaatagagtcagatggagaaatgaccaaaataaaaatttgcatctcaatgatctgtacaactttggttttggtgacttttccattcgaaatcatttattaaccccaatttttgttcgaagttgtcaaattttgaaaattcaaaatttgaattgttcaaatgaacttatatgtaaaaaggaccaatacaacagttgtagatctcgatgagttctacaattttgctgtttatgttttttgcatttgaaacataaaaatcagtctaaaattaaatttaaagttctcataagtttaaggtgaaatgtccattttgtccataaaatttcgtaactaccctcacaccagggacagtttggtaaattcgcataggattgcttcttatccatatactctgttctctaaaccctagccaaactccatccatccactcagccgccgccaccatctactcactctcctcctccatccactgcgccacctgcatctccttccctagccacctcttcgcccttccccgcctcactcccccacccagggaaggacggtggcgtgcaaatctgccacctcccatcctcaggagcgacggcggcgcatgaatccagcggcctccgtcctcgggagcggcctggcgtgagcgggagcgccggtagcacgcagatccgcccgcctccgccctccggagcagtggcggagggcttaggaaggcgggagcgagcggctacggtggcggcggctgcggcaacgacggcgatggtggctgcaacgacgacgacgacggcgacagctgcgacggtagctgcgatgacgacgatgatgatgaccagcggcggccggcgacttgcaatcgcgaggcgggcaggtggcgtggggccgcgggggcgcgccggcgcggggcaggggtgcatggcaacgggccagcgacacgtcggcgcctcggcacaggagctgtacgccgtcgcggcggccagcgagtcggcgaccagcactggaccagcaatggttgcgccggaatgccaaccaaaggtccagctccaagcgtcgttcactcatctgtccatgtgcacggctgacggctggtatattcagtgagtatttctaggatctctctctggtttggtttttctctttgcagagtgagattatttgaaaagttgaaacctagaatgagtaaactcagttcagttcaaggcatatttttgtgatttgtatgcagagaattgagatcctgtgtctttacttcatggttcaattagcaatgtgtaaaaatgaagcgctataattaggaatgattaattatattgttgtgaacaagttttttatttgattcaactatactatgacatgtgggcacacccatgacaaaaatctgacccttgttttctgctaaattcgaatgcgctgttaagtttaagtacactgggtttgtttgcttagcttgttcttctgatcgtatagtcactagaacaggtgctttactggtacaggtggacctaattacttttatgataattcatgagtgaattggaggcatcgcacaactcaaattgacttgaggatcataactcaaattgacttgagattcatagcttggacaagtgagcaatccatccaaggaaattaactaactgaaccaaagggtgaaatttgatggcaccgcttcttttgggctttctgttttgcaatgggcttcctgataagttctttcaagaaaaatgcatggttaactaattatagttatgaagatgtttatgcctgcccaaccgatcagagctgttgtttactgctttgatctctactatgtaccaaacttatcacatgcattcttcttgaaaacaaacaccttttttttgttaatgttaggtgtggtagtattaatctgaactcagtttaatccaagtatatagatcatgatatctctaaggaagaaattttttctagcttttttttgttaatattaggtgtggtagcattaatctgaactcagtttaattaatccaagtatatagatcatgatatctccaaggaagaaattttttctagcttggatcctttagtgcagtcagtagaagaagtaggaagggaagctactgctgcatctccacctcagtctgtagttcataaagctgaaaatgtcactggtaaaagggaagcatcacctcctgagaagaaaggtcatggctagcatctctctgactccttctgtaatccaatataatgtctgtcacagaaatatccctttaagaatgtaaataagatgtgagatttttactaaattgcctattaacttgctcaaagagtacatgttccttaaaatcatgttccttaaaaccctactcaactaacatatttgcctagcaaaaccggttactagtcagaagcttctgcaactctaatgcaatgttgtgatcctttcttctgatcctttcttcatctgtgttgcagaatgtgactacaggaatgagggcctcgggactgcaagatcaggtggcgctagtgagcatcggcgggtggagccctaaccagggcgtgccgcagccggccatcatcctcaacccttccttctcgcgccacagacggggcctttgccctgggcggccatattgggcggcggcaatgggattgagcaaccgcactttaagtacagaactggagccaatggaattgagcactactgaacaaggcaagtaacttggattcttgttcttttgtccttatatgtgctatgcttcattcatatcaagtgcaggatctttttattgacacctgtaaatgttttatgttaggcaccctcactggcagtagacaagtggagccaagggggaagaccatgggcactgcaattgacagtgagcccactgcaattgatctctttaaggagttgcattgcagcaaaactaaatgttttagtgaacctgtgaagaaagctatagtaagtactaaactattacttcttctttccttcttttattaagtaccttatgcaatgaacctttatttatataataatgcaaaactgaaaccttgctttgattgataggaggatatgcatgcccgggaagtcctcacttcaccatcagtagaagatgggcagccagctaagacttctattgaagctgtttccaaagtgctgcggaagtcgaacacatttttgcgcaacgtcggaatttagcagctcgctgccaagacaaccaatgtgatgaaagagatacaagttgaactagatgcaaagaagctagagtctgcagtacttcaggaggagcttgaaagattgaaggcacaggtacttgtgtagttggatggtggatggatcattttgtattcatgttttgtgcttttgtatggaacatgttggaaactctattctggaacttgcttttgtatgggctggaaaattaattatgactggaatgtgattataatataattatgcaactggctgtgatttatattctgtgattgctttttaattgggctggcccataatatgggctagaattgtactgttgagctataatgaaaaaaaaaacgtaaaagcaaatttgtagctgggtcaaaaaaaaatatttgggccaattgtaattgaaaataaaaaagcccatgctatatgggccgaatgtgaattgccacgtcatttgccatatcacccgccttgtcatctgcaacatcacatgtcatcgtacacgtggcgttattcagttcaatttgttatgacgaatttgtctcgtcattcatcaatgacaggagaactatcgtcactgcatcaatgacgatgtcctctggtggtcacagaagctggttagtgacccaccttctgtgatgataaccatttcgtcactgtgggcagtcagtgacaggaaacaagctgttatcgtcataatgtaatcgtcacagaagcccaaaattcctgtagtggccgttgcccgaataattgctcgcgttgaggtggaagaagaagctccaggtgtgacctgcggcctggaacttggacgactcgatgtcgtatttgctgccgtggtgagatttcttgatcgcgttgcgtactttgatcttgagaaggttgcaaccggtggcggccgccgacgtagtggtggccgtcgacgcggtgacgacgtccttcgtcggcgatgacgacatggcaagctagctagcagctacctggtggtggcgctggtggtcgacggcgagatcgatcggggacgaagaactcggtgcagggttaacgttggttaaatagattaggagaggtaattaaccacacgtttgacgtacgcgcggctatatgtctctatccgtatagtagtttgattcggatagcatagaagaaaagccgggtaaatataattatctctcgttctaaaaaaaacaattataagtgtgtcattatcaacttcgaattcgataaagcagctattactgggatatatacgtacggatcagttcatatgcaacacaagttactacagctattaggtcagttaattttagtttggtcccgatcggatgcaaaccgttacaaacagttacgtttagagacgggacaatatcaggttgttacggtagataggaatagttttaatctctatctctatctcgtccataatccatgtttgagtcggttataaaaattaaatatgtttccgcggttcgttatccgtgtttgagtcggttttaattttatattttggttttaatctatatatcctctctatctctatctcttatcataaaaattaaaaatgtttttgctggtattttagtacgtcatccgtgtataagtcggtttttaagtttgtttgcttttggaaatacaaattgaagatgtttccgtgatttgtcatccgtatttgagtcgattttaattttatattttggttttaatctatatctcttctctatcgctatctctatcttttctccactattataaaaattgaagatgtttttgtcggtattttggtacgtcatccgtgtatgagtcggtttttaagttcgtttgcttttggaaatacatatccgtatttgagtcggtttttaatattgtgcacttttgataataaagaaggaatcatataaaaaatatgtttaaaaaactcgcatgctaacttcagacgatcgaactctgaactgcaactcatgattttctaaaaaaaatatatatatccaagcgaagtcccacagtaaatttcatcttaactaaaccatataataataataagattaaaatagacttcacccgttacaacgcatgggcatttttactagtatatatttaatttctaaaattaatttatcatttacccttatatagtatatatatatatcctaacccaattcaattaaatctaatatttacagtaatccctatataattcaacatcgcataagagcactaacagtgataccgaaagcatttccacagacaaatcaataaaattgaatcttaatattcactttaatatcccttcttcctatataattcaacatgctacaagagtagtattactcattactagaaaatagattgttgcaaacaggcaaaaaagatttatccagatgatcatccaccctgcctgcacgtgaaggcctacaaaaatacatgatttttacaggcggacatcagctctgcctgcgaaaatcattttcgcagacggtctctccatctttgctggtggtacccaactgtgaaaatatactccatgaaaaaaaaaggcccctgccaccccaccaacccccacccaccgtcaactgcgctcccctccgctccctttctacccggcgctactctaccattacctgctgtggagggagagggaagggaagggaatcgaatctgggaggtacgagggccgctctgctgccgcttgctgtggcgaccgcggctaccctccccccttgggtcggatctgggagggagggagagggaggggagcaccgccaccatcgctccctccgcgctgcctccaccgctgcatgcggtggctgctgccgccgccaccctctcacggccgctccggccgaatctgggagggaaggagggtactatgggaggggagcatcgccatcgtcgctccccttctctaaccaaatctcgcctcaactactaacaccacttgaattaaaagatcagagggttgcaaataggacatagaagctagaacctagatcataaacaatcacaagctaccgcatgcatagattggccaaataaaattaattactcaaataaatatgttaaaaagggtgaggaggcaaacgataaaattaattactcaaataaatatgttaaaaagggtgaggaggcaaacgattttagcgcggattttatatccagtaatcctacttctctgtttgagtagccccaaaaggataggtctgttccatccattttcctcgctatagcaacgccttattgctctgtgggttcaatcttaattccttcccctacggaggtgaaatcgaagcactcacaaacttatggtgagagctgtctgtcttgaattatctaggaggttctattcgacctgggagttatagcattagccccctatatccaggacgacaccatctctatccatagtatcaatttttggtgactctacaaaagtgtcccaatgtaacattaactactttttcgaaaataatgatgcaaacctttacaccatggtactaatattttgaaggaaaataagtgttacctataaagaaatcgataggagcaattccattaataaatgaaagaaatgtaactaaagacatgaaggatggttgagattaaactcaaaagagatccaatgactaatgttttctaggtgatgtctcaaactctcagtagaaattaatctttatacatacttccattttacaccatggtgtatcaaactaagttttacatgacattgccgcatcaagatgcatcatcaaactagtagaaatttccataaattccacaaaacctgaatgaaggtacttcaagaaaaatggtctaaattcttcccaagattttccttccaatcgtgcaacatgaaactagttgttttcatatacccaatgtaaattgaaatctattaacttattaaaggaatagaaaaaggagcctccacgttcgctctcatggccaaaaaattcccacattaatcggagaaaaagaaaagcagagtccatatagaaatacaatttagaaatagttgaaattcagaattaaaaataaggaatattggaagaggagactagtatccatatagaaatacaatttataaataactgacattcggaattaaaaaataaagaatattagaagaagagtatagagtccatatagaaatacaattaagaaataatagaaattcagaattaaaaataaggaatattagaactagagtatagagtccatattaaaaatacaattaagaaataatagaaattcagaattaaaaataaggaatattagagatagagtatagagttcgtataaaaatacaattaagaaataatagaaattcagaattaaaaataaggaatattagaagtagagtatagagtccatataggaatttaaaactaactaaaatttagaaaaaagcataataaaattaaaagtagagtttagagtccgtataaaaatataatttacaaatatttaaaattaggaatttaaacaaaacatgggaagaagagtataaagtcaatattggaatacaatttagaagtaactgaaattcgaaattaaaaattaaagaatattgaaagatgagtttagagtccacatagaaatacaattagaaattgttagaggtataccacgaagtgccttccgccgggcctgccgaaaccgaaaacttgggcgacaggctcggaccagaggcaagcgacgaaggtcaaagaggaatgacccaagggcgaaagactacagctcaggagtacacgtgcttcgccggacaaggaccccgtcaggaggccacacaggcggagtcggtgagacgaaagcctcagcccgaaggcataggtttcgccaaggcaccaaaccccaccgtgaggaagcccagcgggccgttgcgcccccgcagggggattctccagattaatgggccaagccatctagcccaattggggcccatacatgtaaaggacgttgtgtacccctaataatgtccctatcataagggtaaccatataaattcccctgtaaagcctaaaccctaggggagagaacctgtaataggattataaatagcccctctaggccatgtaatgggtggatctgaaaaaatttctaccaagtaatacaattgtcctttttcccaaccactgttgagagaaccacgcctctcggggcgtggcgcagttgtctattcaacaacagaaataatgaaaatttcagaattaaaaataaataatattagaagaagagactagagtacatatagaaatacaatttacagataacgaaaatttggaattaaaaaatattgaaagacgagtctagagtccatataggaatataatttacaaataactaaaagctgatattaaaaataattaataactaacacatatataaaatacaatacgaatattacacatttgtagtttcgtaaagttagtacaaaatttaaaattatgttgtcattttaatatatttgaataatacattaagaaaacatatatgctattatatgagagaaaatataatgattttgtactaaactaagtgcaaggtcacatgacgtaaagtctaatttacttttttccatatcccacgaagctttgtagccaaatgacttgatcgatttgtattgtagccaaatgaaccaattcctattagtatcattcggtttataaatataaaaataaattcttctttcctacacgttatagagagaacataggaaatgtttcattgactcaaaactcgtagaaaattcctaaagattgaagtgttcatacatttttattcctccattttttttctattcctattgtttaaaatttcttcaaaccgaaaaatcccttagtcttagtttgaaccagctgtttggcctggatttttgatggtacgcgaaataacttgttaatgtttgactaacgagggtaaaatgtatattgctaaagttttacaccgttgtgtgtgttgactcacactaacttgctaattaattagcattaattatacacaaccttcattcttccgaaacagctttattgcgcccatggttccaccatgttgcatgtgctagagtatatatgctagttgtaggaatattattacgataggattgatttgattagagtccttccttatctccatctctagtaccttccttatctctctacccatgtaatctctatatatactggcctacgaggttcaatacaaagtatccacgttacacattattcctctctttctatagtattcaacatggtatcagagcgggcgagttagcgctgcagctcaccgcttctgctacccttgcccccgagaccagcaatatcgctcccgggtgtggccacccgttccctttttcttttctttcgtcgttgtgcttgccacgagagagatcgatctcggtctcctccgacatgccacttcttgacgtcattatgagattatcgatctcgatcttcttggacgacatgtcttcgtcgttgcattgtcatcgtcgttcttcatcgagtcttcgtcaagcagcaagcagcacaccatcttccacctttggcaccactaacgaaccacgacctcagattggatataagggacgtgttgctagctgcccccttcatctcccgcctcgtcgtcacgggactgcgccgccactgtcaacgtcaccctcagccgaccaccaccaccttgactcctctgccggccatgctgacccctgcctctcctcagacaccatcgcaccgccggtcaccctttccccggagacctcatcaccgccggttgcctgactgccaccaccgcccaactgcttccgcttcaatgacgacgacgtcacctctacggccggggaccgccgtcgcccgagcgatccgtctacgcagctgctggggggacgaccgcgtcgagggccaaggccggtgtcgttggattccctctgccgcgttgctcccgacgacgcccccaattccaccagtctaggccgccggcaaccgggtcccctaggatggcgcccccgactccaccacgccatttcgatgtgggcctgctccatggcctccatggctggtcgccaccttcctcgccgatctccagacccttcgttggccgcctgacggcctggcgctccccactggcaccactgtcacaccctgaagttctcctcccaagcctaaattgaatttataattcacccaaagaaaatatcggtgtaaaagcaagagtaaaccctaataaatcaatgcaaataataatcggatttggcatatggaatttttcttgagttctacatgtcgaaatatgctaacaagacttttagtggaattttcagagctctagaaataattttaaccaattaaaaatgagcacaagcattatttattccctggaaattcctttttccttttctttttcctttttctccccctttttcccaaatgggccgccggcctatttcctccccctccctgcgctcttgctgggccgaccgaaggccacggcccagccgctcgcccgagctccccctctccccctcggacgctgacaggcggggcccgcctgtcaggcccatccccaacctccagtcgccgccaccgcgccttgcaaccgccgccgcgcccacgctcccgcctcctccgggccgcgtcggccacgtcggccacgcccgcgcgtgcgcccgaatctcccgcgcccactccctctctctctcgcccgcgccggcgctcgagacggccgggattcgattttcgaatcccgcctctctctcctctcccactcccccacgtcggccggcgattcccagcctctctcggccacgtccggacccctcttcccctatttaagcaccaccaccatcccctctctctttttcctcatctcgccgagtcctcccgtgctctctatcgccctagtgccgttgccctcctctccgccgccgccgccgcc

SEQ ID NO: 21881 - DNA, 15152 bp, Oryza sativa
ctcgtctcgccgtcgtcatcgccctccgtcgctcgccgtcgtcgatcgtcctcggtgattctccctctctcccgcgctgcttagccgccgcactgccgcctagtcgcttagccaccgctatcgccgctcgcgtcgccgcgacgccgccgccctccgccgccggccggtcgccgccggtcgccgcctcgcgtcgccgctgcgtgcgcgcccctccgccatgcgccatggccgccgggccagtttgagccgtgcccgcgcgcgccggccgcgagccgcatccaacatccgatctaccgggcggtagatcggagccgtcggtttggctgcccgcgtggctgccgcgtggccgccgcgtgtgcgccgcgttggcgccacgtgtgcaccacgtggtgcgctgctcctccccggtccgtggactcggtccaccgtggaccgccctccccgagtcactgacatgtggggcccacatgtcggcgcctccctctctctccccatgatcttaattattgcacaataattcaattaaggatttttctgtttatagtaaaaacacagtgaatcttctaaaattcatatctaattcatccgagctccgtttaagcccattcaagtctcagtaaatcaagaaaaatgtgtagaatccattaaaatggttttgttctctgtttcagtagtcttatagcctgtttatattgtttgctttgtatgtcgcttagattccggctctcccgacgctccggtgtatttcaaaatagtcgccgaggttcctccagcagcagagcaaggcaagtcatgcttgtcacttgaacatgttgatcctatattgcaaatgttctattgtttttcttcaaatattgcattgttttacaataataccatgggttgtttacctactattatagccatactatttttgtaccttgcttctttgttagcttgggatataacatgactaggtattggactagggattgcttagccatgcttagttcaactagcacacaatgggggaaatcatattaatgtatagactgtaggttctaatattaatgttggattagtgccaccgtcctggtgttgcttaattaaaataaatcttatggtaggctgtgggtgcatggttttgttggtcgcgcccatggcagttaaggaccggttcgcgggatgccctggaagaacttatcgtacttaccacaagccagcgtgggcaacggctgggcttgtagtgtagctttcctctagctgacgcatccaggcaagggtgggcgtgatggagtttggatgggccctacgacggcctatgcggcttccagattcacctaggcacgagaggggactgcccgctgccttgcgaggagtgggggtaaaacctgaggtgtggtgtgcttggttagagggggttatgcgaagggtcctgtcacggccttgatatgtcatggtggcatgttggcacacggaaacgtgtcgtggggctgtgtcttgtgggtacagttgtacacctctgattagagtaaaactattcgaatagccgtgtccacagttatgggcagtcgaccagattcaccgtgattagtctcacccctagttagcttctggaactggttagttcaggtggtggtttgggcctgctgcaacgtggtgtaacgttggacagtgattggttaatatggattaattactacaactgttttactgctttcaactactgcttttaaatgctagctttatgcaaatgaacctctagcctcctttggttataccctgcatcataccttcttttccggtatgacttgcttagtacagtgggtagtactcagtcttgctctcttttcccccacaccagagttgaagtccttctcagttgaagatgtctcgaagaggttggtttcgtcgcggccgtcaaggatgcctgtggaatagagtcgcccgctgcaggagtcaagtcttcaggcttagctcgcttttatcttttccgctgtatttgtaatcttttatattttttgtaagacgtggatatgtatgtcaacaattatcgtttgtgtatcctggctagttctggacagaggtttaatacatattcagcttagaaattctagttcgtgaatttttggtcgtgacaaccacctagctcaccacctctctcctggtgcccctgactcctccgccccaacctccatcactaccggcctcccgctgttgccgatgtgctacgccaagccgtgtgccctactcatcggccgggttaccggctcccttgcttccgccagcctcaaaactccccccccccccctcctctctctgtttagtgttcagacatggagtaggtagcgggaggataaggctgatgtggggtcggctgacattgggttttgacaggtcgtggacttggtctatggaccattgagcactgtggattactgggctggttactgtgctgctgctagcttgctgtaccttttgttttttctctcgttcatagagtgggtttgcctctctcagcgcctcatcgatatctgcacgtctccgacatctacatagactttgcttcgacttcatccttctgactcgcatatcttcgacttgatcacccattcaagtgcttggctacaatgacttccgcaaatgatcatcatcaagtgtctacgccatgaggctccgggttgccgctgcgtcaccctctcgggcttcagtgccaccgctcgtggtccacctctattagttgttgcagtgctgagaggtgccctcctcagcatgacttcatcaccgatggacttctcgccgctgcattgacatggagctacaactgtgtcatccctttggaccacagcgtcaccgctctcgtcgtctccatcgccgcccgcacatcgacatcctcgtcgtctgcactggtgatcttcagctgctaggttcttctttgtctacttcgagcatcatcgccgcgtctccacgctgccatcatcactgctctagggcggtggtccagctacctctacatggctaccgacatcgccgtccaagccgttggtcccactacttcatcttcatctccgtccagaatgcctcattggcagcgtcgtcgtatcttcctcgactacaatttgctcttctccgacaagtgcgtgttgctcaatcaattctctctcttcactgctctcgcgccacgatcatctcggaggccttctctgctagtctcctctgatattgccaaagattcatggtggtctcctacctcgcccgtgcggtattgacaacatcattgcgcgtgtttgtcctcccgggtctggcaaacccggcggaacgtctcgtcctccacggttcggcaacatcgactcttcggtgtcatcttccttaacgaccaccgcattctcgtcaccgtcatcatctttagttcgtcctcgctcacgactactctatggtgccccatgcacgccgtgcggctcggctacctcgacatcagctttccgatttcggctacatcgatcatggctactctacgcacggcttcatcgaccacggctccctcacaaccttcgttttggctacgtcgactatggcacaaagggctatgatatgtattgagtactctcgtcggttttttctctagtctaagcgttcacactgctcacgctcggaccgtggggagatattagagtatatatggtagttctagaaataataggatataattgatttgattagagtctttccttatctctagtacctttctaatctttacccgtgtaatctctatataccagcctacgaggctcaatacaaatattcatgttacgcagtattcctctctttctatactattcaacagcatgatccatctctttcatcctgtacatcagcttcactagattaattggcacatcatctgacttcttgaattgattgcgcaattgagttatgtaaccaaagtgtatactttgaaaattttgacacggttaaggtacgtagccggtgacgttaggttggatagatttttctagagctacctctgaccggtctctgcagatgtagggcccacacacaaataaataaactttgaattgaaagaaatgtgtcaataacggacaaaacttctacgagataaataggtaaaggacgatgcaatatatatgtaaaaacatatcgtaagtatgaggctttttctactatggccctttttttttgtgtgtgcggtgctttatatacagttcaaattgttgaagcaacatttactgtcatggattatgtcaacagagatgtcagtacataatataagctttaatgaaatactctctccggtcacaaataataagtgtcactttagaatcagtgtagtcaacaagagttaactttgactatctttgttttgaatacatcacttgtgtattggcatagccaaacttttaaaaacaataactttcataatataatattagtttacacacaattcgttttggatttatacaaatgaattaagtgatcaaattaagttatctcctgatgactttgcaaagtttaaaacaacacttatttatgattgattggagggatcaattaattactcattctccattcttaccgatcgagcgtcatgagtgacagaggtttggtcattcaaactgtaaacctcatctatttaaacccaatcgcgagtgctaagcttgcactcccccagcttgaacttagaggtgggttgcttagcctggttttacaagaatctaaaccagcaatggatggaggaggcgtcgatggctatgagatggagatggtgaggaacaggaaggtggtgctaaggaggtacgtgacggctgggtaccctacagtagatgatatggaggtggtatcctccaccatgatgccacgcgtgcctcttggaacaatggcaccagcggtgatggtgaagaacatctacctttcatgcgacccgtggatgcgcggtcgtatgactaagcacgacgatgctaccgcggagatagccgaagacttcgtgttaggagaggtacatagataagtaattgttcttgtcaaaaattaataaattctcctatatatataacacctttataaaacttttgaaatctttttttggtacataaaagataaaaaattgtaagcatagatttgtatcgtaaaatatttttataatcctataagcttatctgaataaaacttatgatccaaaccacacatgaaaaatacaaagaagtcaaaaagttatatacaatgatagtagtgaacctagggttcacggttttggaaaccaccaaaatttcataattttcgtgaatttcagacttttgttacatgaaattatttgaaattttaacaaactcctacttaattcaaatatattttcagaaaatatcacataaatttggaaaaccctaaaatttcggtcgagatggttattgcttgctaggaggtcagaaattactgaaatttcaatccctgggtgaaactcgcctttttaaaaaagaggggggggggtacagtggcttctacatgaagactttgcactgactttgttatattattttgagagaaaaattgggctgacttgtgctggtgatggtgggattgacaggccatggttaatttcggtgtgagcaaggtggtcgactcaacgcacccggtgttcgctgctggcgacctcgtgtggggactgtgtggttgggaggagtacagcctcatcacccaaccggagacactgcacaagatcaaccatcctgatctaccactctcctactacaccggtgttctcggtgagtcaattcttgtgcatggacggacacatcagttctcggtagacaagaagatcggtttggttacatcttttctcttttctttgtactaatttcagatgatatgtggtgttaattgaccatgtaggtgtgactggtctaacagcatatgccgcattctttgaggtcggcaagcccaagaaaggagagaccgtctttgtgtcggcggcatctggtgctgtcggccagattgttgggcagcttgcaaagattgccggctgctatgtggttggaagcgctggctccgacgagaaggtcacccttctcaagaccaagtttggctttcacgatgcattcaactacaagaaagagagcaatgatcttaccggtgctctccggcggtgcttcccagatggaatagacatctactttgacaatgtcggcggtgcgacgctggatgcggcgctggtcaacatgcggcgtggtggtcgagtggtggtgtgtgggatgatttcacagtacaacctgcaggagcccgagggggtgcacaacgtgatacagatcctatccaagaccatccgggtggagggatttgccgtattcaaccacttcggcttatacccgatgtttgaggatgagatggctaggtacctaaaggaaggtaaggtgaccgtcctgcaggatgttgtcaagggcatcgagaaggcatcggaggctctcattggtatgttttctgggaggaatgtgggcaagttgttggttgctgttgcagatgaatgactctagttaattaataataggcagttatagtactgttatagaataagatgcaggacaatatttccaattcagttcatatatagcaaatgttgtaaacccactttatactcataatcttatatatatcacagtgcaaatttcaggttctagtttaaattccattataacactcatatttgaatatcaaggaccagcgacgttacgtgcggctccttctggccccctcctccacctctggtgtcctcgacgaacatgaggcagaagggagggaggggtgtctcttgtccgtttgcaatatatttttagcattttaataaagtgtttagaaatcaatataataagtcaggttaggttttctttccatggtgtttatgaattcaggtttgtttagagccttttgcattttctatctctttgttggtggctacttcattcgcgaggtctccaacaaaggcctataaagtcttgtctaccaagttgtcgatcaaatcagcatcgctggatttggtgtccaggtgaccaactctgttggtggcatcggttgcctactctgttagagggacggagatggtgatctatacttgttcatatgcttttatgtgtgccggagttcatcagcattgtggctgtgctcgtctgtttgcatttcctacgacattccaagatgtggagtcttttttttttaccgaattttatgctgggtaaaccaaactgatctattctcaatcttttatttaatataatcacccctagtggcgtatctaggatttatggtctgggtgatctgacttagagaaaaaaattctatacactgcaaatgtgatgacgctaatatatacaatacaagtatagaggataaaataaacccaaaaatgcacaattcacaagagttcaaactgaaaaattgaaaaaggagcacaaggagaagacctaaatacctaccactgctggccacagccctgctcgtcgccgttgccagccgacgcaccgcatcatcagcgctgccacgcaggtcgctgcatgccccacgccggccgcgggctgccggtgttgttgcggtgctgagcacctgaggccggagatagagaaagagaggcggagttgcggactcgcagtcgctgcacacaccaatcgtgcaaggtaggtagccgggagagtagagtggagagccggagaacgggagaagccagaagccatcaagcgaagttgacaatgagtattcacaccgttcttgtggcggaaaagaattgatgctagacattgtgccgcgttaagtttgattctttcggctgtgtatttcttacgccctctgtcccaaaacaagttaacctagctgttggtatctttttttggtaagaagacaatcacgatcgaggcacctaaacgccttgcggtgatatggagtcgccaaccaccccaacctagcaaaaagctagaccaagatgggttttgataaattaaaccggctaacgaagccaatttagatagaatgatggataactacccgtctcgtgtgcaaatgaaaggtttacgggacaaacccacaaaggatttcgcactgtcgcagcgaaggtggacaatttacggtgcaaatcgacaaagatggacgaactaaactagaaacatgtgaaaagtagatgcaatatttaaaaaagcgattcaatagcttgtatgtagattgtgggttgtatattacaattgaaccggccttgtcccttatatagaggttggtctttcctcctacaggtcctcctccatgtccaactcggagtagaaaccaaaggaaacccgaaacatacattttcgagcaaggaaatccaagacccgacgaaaacagactcaggctcggactctgccagtctgaccagccacatgtcgccggtcagaccggccacatgccgccggtccgaccggcccttaagctgcggtctaaccggcccatactcagcggtcagaccggccctgtgggggaaatcgatgactttcccaaatcttgacaaatttccttattttgaacctaggtgccaaatttgggtgtaaacactagctagtacgggatgtggcatatcttagcactataagtatcaacaatacctgtcaagattcatagtactgggatatgttaaatctcgtaccaacttaacttatattttgtaatggaggaagtactttccttttctctttatttttttttttacaaaatctataccttgatgggccttgggcgggaattttttggttgtccggggacctacaatccgcctatgatcacctctagtttcgccaaaaaaaaagaagaatattcacgtgggtggacttattccccccccccccccccccgcccaacaaaaaaaaaagaagaaaagggccaagcccaggaattgcgccacaattataattcaattacaccgtaactacactatgactatattataacttttatataacatattcaatcaagatgccatccacctgttctccaaatgtaaacatgtgaagctagcatggcaaactctgaaccttcaatcacttggaggaaatcttgcgctacagtcaaaaggaaaaaggagtcatggagaccatttgtgtgaaatacgagaaacagagaagacgaaggtgatgctgcttttgtggcacgatggaatgaaagaaatcgagtcagggatggtgaaggaggtcccccagccgagttagcatacatagttgcggcacaagcggatgaatgggtggcgttgtcgacaaaagacaataatgaatagggttacaggggcaacaaattaacgacaacgacgtggaagaagcccggggcagatgtcctgaaggttaattaactctgatggagcttttgatgaggttgggggtttgtcatcagaaatcaccagggagaggtggtgacggcaggggcaggtaaactttagcatatgatggatgctttccaaactgaagtattggcaagaatgaaggagactaaatctgcaagtgaaatgggaaacaaaagtgatagttgagacacgctcaattcttttgaagataattaacggtggaaggctcatccttcaatctcttgccaatgggtgtcatatatgaactccaaagggagattagaagcgggtttttttttctgatttttcaattgtatattgtcccggggacaatgtccccgttcttgaaattgtgtggcgcatgctcgggcggcattaggatgtaagtgctctcagctctcctgggatggcatgtcggaaggcatagagcctggtgacaagcgatttagctgactctataagttaatggaaagtttttttttccaaaaagtatattaaaaaattgcatgttagtaattatgatatagttacagtataatcatactatagttaccatgcaattacattataattactttaaaactataattatattaaattcaaaagttcttttacctaaaaaacttagttactacagttttttaggaattcccaattttaaattaaattctttcgatacgatagatatatatatatagtaatataacaaatgacaccgttttttctattttggtttactatctgatatatatatatatagtatgtttgataaagaaaataaataatttactagctttcctattgcctacaggggagcgtatcctatgcacacaggctctcgcgtctacacaccgtgtgcaccaactaaaaattatcacaaaaaattctaggaaaattcatacatgtactttcaatagtattacatctacgtgcaaagtcacatcttcaaattcattctacatagagaataacaaaaaagataaaattctgacaaaattgcaaccttaaaactgtcagattttttgttttttttattacggctaaaatataatgaatttgacgttaagattttaaccctaggtgtaatacaattgaaagtatgtgtattattttttctagattttttggtgacattttttagttggtgtgcacgtatgtacacgtgagggcctgtgtgcataggatatgttgccttcctacagtgcccaaagttgataagtatatgtgggttgtccattcttctggattcaacaaaggatttgtcatattccatacttataaataaagagcatatggacagcttttcaagtttggtgaaatgctaggcagctgaaatttgagaagtgctcttgtataatgggattcaagtcctcttaagaaatgactacagggatgcgcgcgattgttcgttagtcttaaccttaaccgtaactagagaccctctatacgaattttctatatatatgtcaacaaattttactcacaaatttgtcaaatgtaaatatattatagtgcaactagtacgattaataacattgtaactagacgattcaatcatgtgacctctcttccctagagcagcacgcgctaccacagggtttataacaattacatacagttgagttatattacaattacgagttaaaatgtaattatattacaattatttgtacttagcaaattattagaagaaaaactatcgatagatgtaatatagtcccctgcttatatgtacaacaattgaagtttcgaaaattcagatatgctgttgcgccggccgcaggtactaaaaggccctttacaaaaaacggctagcgggagcaccacactcataaaggcattgccgtacatgtttatcccatctttccaaactgaaaaaatgtgagtaaaacagacacgacaaatcaattatttaccagcaagtgaccatatatatgtcacattctgaaaccgatcaactagatcatcaattaatttagaccctcgtgaaaagttctggcatttcacatcggatatgcggacacacatttaaagtagagttaattacactttggtccaccttttattaccaaaattttactttgggctatcctctagctcatattttcactttggaccaggtaagattacctttggtgcactttggaccaccttctttagctgtatttactctataatgttgtaaaaaattacctacgtaagttggaaaagattaccgggttacgggttgttgatatgtttaaagttggaaaagtcttttatgtattcctaaaaagtttatgggatggtccaaagtgaaagaaaggtaaagtaacctagcccaaagtgaataaatatgttaaagggaggtccaaagtgaaactttggtaataaaaaatggtcctaaacgcaatttactctttaaagtattaaacgtggactaattaacaataaaacaaattatagattatgcctgtaaacggtaagacgattttattaagtctaattaatctatcgttagcaaatgtttactgtagcacaatattgtcaaatcatgtagcaattaggcttaaaagatccgtctcataatttacacgcaatctgcgtaattagtttttttttctatatttaatactccatgcatatgtccaaatatttgaggttacaggatgaaaagtttttgcgttggaacgaaacatggccttaaccgcaacaagtactccgatctaatcaatccgccatgcatgatctgatcaatcccccagcaagaaaaccaaccaatcatgtaacatgcacaaggtagcctccgctttaattccttccctttttttcttctccccaaaacttatccggccatgcatatgatcatgatcgccaaccgccaaaaagtttgtttctaacttcccgccatctcccacctctcccgccatctatctctgacctctcctctccacatgctcatcgatcagcttccctttcactgctcaaatggcgttttgccgccccacgctacaactcttatcatatcttcgcctatatatatcgctcaagttccagtttcgtttcagctcattgaactgaataaagtcggtgtgctatagctaccattcccccggacctgtgtgttggcgctgtcggtatctgggtggtgatatattttttctttttttttttacgatctttctagagttgtaatcttgtaattttttttctgctctatcaatagaacttcgcatttccaaaaaagttcatttcagctcactcaactgaataaagtcagctagcttgtattttaggtgaaaaccgtgcgaaatgctgaggtgcttcctggtcgcggcggcggcggtggcgttggctgcggcggcggcagcgccggcgagggctatcccgttcacggagagcgacctctcgtcggaggagagcctgcgggcgctgtacgagcggtggcggagccggtacaccgtgtcgcggccggcagcatcaggaggcgttggcaacgacgacggcgaggctcgccggcggttcaacgtgttcgtggagaacgcgaggtacatccacgaggcgaacaggaggggcggccggccgttcaggctggcgctgaacaagttcgccgacatgacgacggacgagttccgccgcacctacgcgggctccagggcgcgccaccaccgcagcctgagcggcggccgcggcggcgaggggggctccttccggtacggcggagacgacgaggacaacctgccgcccgcggtcgactggcgcgagcgcggcgccgtcaccggcatcaaggatcaaggccaatgcggtaaaaaagcgtgaacatttttttctcgttctaaaaagcatataacatttctatggaaaaagccaaatgcagtcaaaaaaacatatggatagatatagtacaaattatgcaaaatcattagattattacggcacattattttctaacaggatttaaaatttcggtttccgaaattttggaatccctgttaacacgaaatttttggatttttttctaattattcttaaatttagtcaaaaactcaaaatatatttaaattcagttagatttttaaataatttcttgcataagtgaaaatacgatttttttttcaaaatggttttttactgttggctacacttttttctcagaatattttatctatccatataattaagcatatagtttatggcaaaagatcttatatttacttcgaaaataattaactatttgccactcttacgagtggcgataaaggatttgccactgaacccacatgtcatagacacatgagagccacatgtcatatataacaagtgacaaatccttaatggccacatctcaaaagtggcacaaagttaaatgtcccatttacttcgtgcacgtgtgtgctagtcactcggctcttattggtgtgattttaagggagctgctgggcgttctcgacggtggcggcggtggagggagtgaacaagatcaagacggggaggttggtgacgctgtcggagcaggagctggtggactgcgacaccggtgataaccagggctgcgacggcgggctcatggattacgcgttccagttcatcaagaggaacggagggatcaccaccgagtccaactacccatatagagcggagcaggggaggtgtaacaaggcaaaggtaattgcacggtgaaatctcatgaaaaattatatttatgttaactatactaaaaaaaatcaatgttgaatttgaagaaaaaaaataacttaatttttgcgcaaagcgttcggaggaaacataaatgtttatcatgaaaaaagatctgctccgagtaaagaaagatgcatggttaataaacacttgttttaggactaaaatgaagttagtctgaatacaaactgaaaatttgccatctggtgtttatgttgcaggcaagctctcacgatgtaacgattgatggctacgaggacgttcctgccaatgacgagtcggctctacagaaagcagtcgcaaaccagcctgtggctgttgcagtagaggctagcggccaagatttccagttctattcggaggtaattaacaacatgaccaacaacctagctacacgatatgtctgaaattaatcaacagttcaacacatgatctacacatattcagtgtgcgtgtgtctaattatactcaaagatactaataccatcatatatatatcacttgggaataatcaaactagggtgtcttcaccggagaatgcggcacggatctcgaccatggtgttgccgctgtcggttacggtataactcgagacggcaccaagtactggatcgtcaagaactcgtggggcgaggattggggcgagagagggtacatcagaatgcagcgtggtgtgtcgtcagactcgaatgggctgtgtggcatcgcgatggaggcttcttaccctgtcaaatcaggagcacgcaatgctgctgcaagtaacagagtggttaaagacgagatgtgagcctgtgatcgatggagggatatgatatggatatgatcgatgctttatgtgtgcttcgctgaaagtagtgctagctaagctttcgttgtcaactggatttaatcttctactgttcacggttgtactgtacgccaggtgtcaaatcagaagttaggtaaaataaattcaaagaggagcatgactaacataatgtgctcaactggattgctgaaaaatttgctcaaatcgacattactgggaaaatattttttgcagacaaggtgcacctatcttttcaacgggtactccctccgtttcaaaatgcttgacaccattgactttttagtacatgtttgaccgttcgtcttattc

SEQ ID NO: 21882 - DNA, 760 bp, Oryza sativa
tcatacacaaattgtgtcttagagtctgtggtacggttggctatagatttataacccactgttcttatttctcttcttttatcttctcgatatgcgcttatagctggtttatagtctgctgttatacctgttgtaagccgcagggttaactagacaaaccatacggtcgtactgttcttttatttacttttaatagatagctgacggagctcgtggctcctcaccgggagaccgcgcaggcccccctttgccggttcggccgggggcttagggtgaagtctcaagctctctcagtatgtgaaaagatcgccagctaggaagaaacgcgagacacgggcgatgtatacaggttcgggccgctaagaagcgtaataccctactcctgtgttttggtggatctgtgtatgagggagctacaaagtgtgagccaacctcttacttgttctaagttccgaatctggaaaagatcatccccctttccctatgggcaaggtcctccttttatacttcaaggggataccacatgcacccctctctttccaaactggacttttcttctcttcataaatggacggagatttgcacggttgtcctccgaacatccttctgacgggacggcacacacctacatccacttctgccgaagacaggcgcgtcgtgggaacgtgactgtctgccgacgacatgaccagtgtcagactggtcattcttgtcctccacgcgtcagttcaacaatctgcatgttcacccttcttcatac

SEQ ID NO: 21883 - DNA, 11109 bp, Oryza sativa
tgtagtagttctcttctcaatcaagttgaatttaaactactccaacaaaaaatgcaattttgggaaccactagtctatcatatcacgaagaggtgacctaagaagaaaccaatgccaacaaaatgtaactttgataaccactagtctattagatcaagaaaggatggtttaagacaaagctttactctgccttccaaattatgcattgtccctgacttagaaatgagcagtggattaatttgtgcaaacttttttatgagtctatcttttgagctgtcatcttagtaagctgcaaataattatgcagtgtaattttatttatttgaaaaaaagaataaatctgatcatgtctgtttctgttttgtcctctgttgtagtgccaataatatatcaggttcatcgggcgcgcgatggaacaagctttgccaccagaaaagtggaggcaaagcaaaagggccttgtcattttcaccttgattgcttcattccaggtgtttatccttctggtacccagttttgtgaacaatgtacagcctcaggaaaattttggcatattagtattgatcaagcatttgattctctcgatggcttccattttgggcctgtttggttctcttccattgctagccttgccaattttttggcaatggcaagatttggcaagccaaaaaaattggtggaggtggctgttttgagtgataccaaaatttttagactaggctagtgcttaagttaaccaaaccaaaaaaaattggcaatgacaaatttgtggcttcattcctacaaaccaaatgagcgacatttttgtagcagtgcattatttggtaaggttgggtttggcaaagaagcaaacaagctcaactccctcccatcataaatatttggtgtttaggacaagaattattaaaacttttgaaacttcgaccatgaatagcttctcaaatgcttagtttaaaaacaaaaaatgggtatagacagatttatttttaaaaataatatcttaatatcatgaacttactagatttggtaagcctattctaatataaaactgatagttaaagttttaaatgtttgacaatcttgtcctaaacgtcaaatatttatgaccatagggagtaaaattttaactacacttttaacaatatattacagtaaaggtagtggtcaaaactgtgttgtggagaccacatcattgtttataaactttttttgtgactagagggaccagtagaatgttctttttgcaatattcaatattcatactgaacgctgtcaacgataacgaactgtttgaactcttgttaaatcctgaggaaatgtgtattttcatgtttatactactttatacattaagccaaaaggttcgtgagactaaatctgccagcagaagaatagatggtatctaacttctgcatgatcaattatgttgcagaaagacgaattagggtttgagcatcaagctgcaatcatgcctgatgttcctcctccagaagaggtaattttttttcctttcctgtaatgtatatgggaaagaagaattgataattaataggtaatcaaatgcagctcctgaatctggaagagatacgggaaagaagacttactgatcctcgcttcccaatgtaattttcatgacttccaaccatatatttgatgatgatagtttcctagctaatgcagttctcagatgattcatctttaatcttcagaataaacttcttttatgttattgagaaagcattatatttgtcaccatttatttctcggacactatatttgtcaccattactcagatgaatctagcatctggtattacataaattagaaattatctggtagtatttctcacgtttagtaaatcaagcattctatcttcttaagcttcaattataactgtatttggttcgtgccacagtcgcatgccacctggcaaagtcttgactgttagtcatctgcaggcaatataggaactcagctgccaagaaaaagttcgtaccttggcccatagaaatgaggttttgtgaagattcagcatctcaacataaaccaaggtatgtacacactgtgttttctttcagtgcagcctgctcataccttctctcctcccctagttggtgataactgataagtttaccacgaaattcttgtgtactttcatattcacgattctaaattccactgtgaaaacatccaattttaattccattgtgcaagaatttatcgcatttcctgctacattgcaatttaatacattgttctgattcattagtgcatctattccattatctaaaaaaatgtatccaatttctttcagcttaaattattggtttagagccagaggaaaactttctgatgatccagcactgcataggtttgccatctaatcactataccgtgtttcttgtattatagatgattgggcacgacattaaaccatggtattacaggtgtgttgtagcatatgcttcggatctactatattctggtgtcagcctaaatcctcatagggagaagggtctgaagacatactcactcagtcttgatcactcgtatgtttcagcaaaccgcacccagtactgcgattttaattaatacaactcgctagtaaaccgtttgtttgttactgttctgcaggatttggttccacaagcctgtgaaagctgatgattggcttttatatgtggtaagccattgatttttacctctcaaatgatacacaaaactaaatttctgcttgaggttcttatggcaacaccttcccttaataaacacagatcgacagcccatctgcacacggtgggcggggttttgttacagggcgaatgttcaaccgacaaggagaggtatatgccttcgttgtttcaaagcttagttcagttctgcattgcttctgtgatggaaatgtttatcaacttactatgatgtcttcgcaactgctttagctcgtcatgtcgttgacccaagaggcgctgattaggagggcgaagacgccaggacaaccgtcacaaaccccaaggccaaagctttgagaggtgcagaagagcagtattatcgtttcatttttggcactttcacagttattttccttttcaatggaagtctataacacgtagacgtgaagccgaagtatagcatactgcatatatgtagcaagaaaaaacgatggtaaaactggttctgtaattcacgaacagcttactgacataccacgtatgtattggatcgggaaaaataagcgaagaacttggtatcgctttttttttatctcaataaagccttcaattatttcaatttaagccttcatggagcataaatggttggataagtacacatctgataagaagtttgtctaagcacacatctgaatagttgatatgaaaagcacgggtaaaatttgtctgtgacgctcaggagatttactaatattccagttacaagcagctcctcgtgaaggattctcgcaatatttgaagtgtcaaaacaaacagtatgtcatcatcatgtagacacacgacattttacatccagaatcaatctagccgtggatgtccagtacttaagatagtgaaagcaaatcacacaaaaaaaaatcctacaaattcaacgttgtagtattccacacaatcacaatggtcggttgggattttgtcaacagccttacaagcaagagtggtgacaaacagctacatgttgctttctgattaaatacaagtagaaaacatattacaagccacgcctaactaaagctgtcttgttagtagaaactcccactacaaacttctgttgaatcccttttcaaactacatgctgctgaatcagcctattccaacatcaaaatgctacaaatggtatactgctgaatcaacacaaagacttaccatcaaaatgctacagatggtatgcataatgaatcatacaagaacatgttaccatcagtccatcactaccgtttagttttgaaaacgggatggatattcacattcaaatgctcaagcttctcgatctttgcgatagattcaccgattctcttcaacaccatgggcatagccccaatattcgcctcacttttggccttgacgatccttagtttttccttcttctcttggtcaactttcgcaactggtgttccagcaatatgctgcgatgcagttgtaacttctgcaatgtacataatgttgtcagcatctgacactggaattaccaagagaaattgccatctatatcttctacgttaatttgctcttttaattttttttacttattgatggcaatggcaattaaactgggacaatgcaaacttgagagtcatttttcacatacttagattaggttgcagtagagaacaggaacaggaaaagcctcacttttctatgtctaacacttcaacaacatactttcatggtttacagttagtgactggtgcaaataattatcatcaacaaacaggtttgatgccgaaatcatcgagcttgctaggtaactgaacaggaatctaccgatacgggaagggaaggtacattttcaatgcatactgtcaaccagggggtagggaccaaattcaccgattatcacaaccaaagaaaaccaaatgtcaaatcgcagtttagatccgataagtcgtcctctcttctttccaaatcaactgagccctaactaactggtggtaagtaacactagcattgctcgtatatacgataaaccccaagacctactatactaatcacgcccaaattatacgaacaccaacaaggggacgaacaaatcgaaaaccctagtacgccggaagcgcgcataccgaggaggcgggggcggagggcggtgaggcgggaggcggcggcgttgaggaggcgggcggcgtcttcgcggcggtgctggaggaggcggcggcccagacggtccacctcccgctccagctcctccatgtcctcctcctcagccgcctcgtcctcccgggccggggcggcggcagcggccgcggggaccttgcgcttccggtggctgctctgggctccagttcggcttggggtgagcgaggcgcccgccatgggggggagcttggagcacgtgaagccgcggcgagcggagaccagagagagatgctcgagcggaaggagcggagcggagcggagaggcggattcaatttgggaggggggagagatgggactttggatgagtgggacccacaaggccacaacggggaagaattcgattttgaaagtcttcgagaaaacacagttcctgcccctggacacgcatgtcagtactagtgccgatcaaccgcaataatactgtggccctgtttagttctaaatttttttttccaaactttcaattttccatcacatcaaacgtttcatacacacataatttttctatcacatcgtaccaatttcaaacaaactttcaaacttcagtgtgaactaaacaagttaaattttcttttagacgatggcgctcggcccagcttttcataaaaagcatacgaggttcatacagcaaaatgaagaaaaacaaaaactgggtaagccagttcgagagaagagcaaatgctgctggcacagccagacaagccagagagattgcatctgaatgcactaagagaaagagaaactagattaagcctgaaccgcgccttccactgtcctggaacttgccgcatccccttggacctcgagtgaatgctggcacgcagtaatgtttgaaccgtatccagctccccaatcagcttctgttgcgccaaatttctccactgcatcaaaaacgacatcaccttatgaggtaattgcatcacgtcttttagcaatttatcttcgaaaacccaatcattacgaacaagccaaatagcccaaaaacaggccgcaaataggcaaagaatagccctcctgttgctcacaattttccatttaaaatcatttactacccgaaaaattatttgaattttttgtattttaaaattcaaattttatatagtttaatcaaacccggatggagatatgaccaaaataaaattggtagatctcaatgagttctacaactttgtttttgacagttttttcatatgagtttatttagtatcataaaattcaattcaaaatttatttttgcctataaggctaatttgcctcctcaatgagttctaatacttgctaaatatatatttgatccaattaactcggttttgctagtgaaatatgtgaatggatgtgaaatatgtaatcaaaatagatgttatgtgaatgtggttgtgttaaatatattgatggttgtgtatgtgcatggatgtttaacttctttggaagtcaatccccaaagaactttgaggttaagcgtacttagggtggagcaattttaggatgggtacctgaccgggtgcacatgagtgaggacaaaatgtgtccaaaaaacaaaatttatttttttttattatactcatccgtgacgggctatagtttaggcccgattgagatgagagccatccgtgacgggctatagtttaggcccgttagagatgagagttatccgtgacgagctatagtgttggccagattaagatatgtgtcatccgtgacagccggatgcccgattgatatattttcttacatcagtgacttttgcttgggccgctatccgatagagatgaggcttagacccgttacagatgaccgaatctgttctagtgagggtctatggagcagcgagttgtgaaattcagaatacaagattgaatgctccttgaaatgtggagatcaaacggaatttcttatagtttagtttagtttctctaaaattcttttaaattcctccgttcacctgaatcttcagtcatatcgaccgttatataaccagcaaacgcaagtagcaacagaatactcctatcaatttgctgtgttcaccgaatactcctaacaacgcaagtagcaacagaatactactagtgttgcaagttttaagcaccacttattcggtggcctttatggtgctgatatttctccgggttgcgtgttgacgtgagtcagatataactggaaccatgattttttgcgagaatattccttcctaaaaggaagcctggaatttgcagcaaaccctctcccccaacaatttggcatatcctttcccatctcttttcatcacccttttttcttaacagaaacagccaccaaagaatcatagtactattctgtgcaactagtatatgattgatcgagacgcaagaacaaattccacattagcagtaggcataagtctttgtttatgtgtatgtagtgtggtgaagaaatagacggtgcgatcaagccgcatttgtgatcaggtatgcacaatttgcgtaaagcgagatggaagtttcagcagcgtgtgttcagtctatttggaaacgtagatgaagaacagaagaagggtcagtactcaataagtcactattcagtactcagtactcaacacaccgcttatgactcggtactcaataagtcactgagtatttggaatggtgaaatttgatagaactttgttcggattgccaaaattcgtttgctggacagaggggatcatttcagtgaaaatcattgcaagtctgcacaaaacgctgaaaacatatagagtagatcgcgattagctagcctatgcgaagattatttcagtgaaaagattttccttttccttcatcgaaactgatactagactatatcaaaataatctacttactccctccgtcctaaaataagtgcagccatggttttccacgtctaactttaacaactcgtcttatttgaaaaatttttgaaaaaaatttaaaacataattcacgagtaaagtagtattcatgttttatcatcttataactacaaaattgctaattataaaaaaatttcgaataagacggatgatcaaagttgggcgctgaaactcatggctgcacttattttgggacggagtaatacaagttacaagccatgatccgttcatctgaattctgacatgtatgtacattcatctgaaaaaacatgcggagtacgtaatgacagtttaccactgggcgaacaaagctacagctatggcaaaaacaaaccatgtaagtaagattaaataccacatgccacgactcgtcatgccgaggccgccgccggcgctgcgggcgggagcctcggcgagccggcgctgcgcggtggcgcgaacctggcggtgaccgtgaagtccggctcgaggcagccgtcgtcgaagttctgcgcgtagctgagcgggtcgtagttgagccccccggcgccgaggatggagcggccgccgccgcctccgccgtgccgccgcctccgccgcgccacgctgagctgacgcagcctgtgccacagcgccgcgagcccgagccggccccagcacgacgacgccatcgccggcgctcccccgccgcgcgccgtcgtcgtccgtcgcccgtacgacgacgcgtccacgtccgcctccccgtggtcccctccctcctccgccatcgtcgccggcagcctccccggcgatgcccacatggcagacaggaggcacgcgacgcgagagcgcgagaggtttgtgcgtgatgcgtgtgctggctttggtttttctctcgggtagatgaggcgcgtggagggagaggtggcgagccgttggatgcgagagggggacggcggagatggggacgtgggggaggtggtcccctttgccccgcgggcaaatgtggcacgtcgcatcgtgccaggcgggatctcggctgacgtgggcgtcgcttgctcgcatggcgacggttgggcacatcattttcaggttctcggtacaagcaacgtgttgctcgttgccgtgttcaatcgtatggttttctcttctttttttttttcagggcaatcgtatggttttcgatccaacaatcaaaattataaatactgaccacggtaacactacgtgtatagaataaaaagaaaggttcagatagatgaggatgaaaaagataaaagtgcaaggcaagaaatttctgtttaagtaactaactgaacgggatcatcttattacaaatataattcttttatataaaatttaaatgatagaaatacaattattacggaatagaatgtagtagttttcttaaaaagaaaattcaattaatatccagtaaccagtttgatctgctactccctccgtcccaaaaaataagacatatccatccaaaattacttatattttggggcggagacatcataagatttgttctatggattgttaggctgtgttcctctctacactttcatatcctctacttcctcgtttttcatccacacgttacccatacggctaaacggtatgttttgtcaaaaacattctataagaaagttgctttaaaaaattatattaatccatttttcccacttatttagctaacactccctccgtcccgctcattaaggcgcacacattttaaaattcaactctttaaatatttaaccaataaatattttattataaattaaattttatgtaatgaaaataatatcattggattatcatttacattcacttttactatatgattaagattttgttatgaaattggcagcttgctcgttcgttaaaaaatatgattttgttactacaaacattatagtatatgagaaatttaaagttaaatatgaattttaaaaaatgtgccaagtctgaccgcgtcttagtgaagtacttaattaatcgtggactaaacccacgagatctgctgtgagaccaggaacaacatgctaagctcaatggaactcctggtcacagaacatagatagatgatccccatgaccttgcatgccatttctatattaagcatcttatcgtttgaccacacaacatatacgaccatttttagaccgcgagaagaagcgtccaatatgtaacgttagttatcttggacatctccctcctagacctcatttcgtttagctgccgcactcaatggacaatcgtaaccatgggcggtgctcgttgccgcggctcgccgttggcgccgccgtcctcctcctcgccgtctccctagcggccacgccggcggcgagccatgccgggcacgatgacaccggcttgcacagcaactacctcgtcatcgtgcgcaagccgtacgcgtacgacacgaacctgtacaagaacgtgtcgagctggcacgcgtcgctggtggcgtcggtgtgcgacatggcgaaggaggcgctggagagggacccctcctccgtgtcccggctcatctactcctaccgcaacgtcgtcaatggcttcgccgcccgcctgacgccggaggaggtggaggagatgtccaagaacgactggttcatccgcgccgacccggagaagacgtaccagctccagaccacccacacgccgcagctgctcggcctcatgggcggcgcccgccgcggcggcgtgtggaacaccagcaacatgggcgagggcatcatcatcgggatcctcgacgacggcatctacgccgggcacccgtcgttcgacggggcgggcatgaagccgccgccggccaagtggagcggccggtgcgacttcaacaagacggtgtgcaacaacaagctcatcggagcgcgctcctacttcgagtcggcgaagtggaagtggaaagggctgcgcgacccggtcctgccgatcaacgaggggcagcacgggacgcacacgtccagcacggcggccggctcgttcgtgcccggcgccaacgtctccggctacgcggtcggcacggcgggcggcatggccccccgcgcgcacatcgccttctaccaggtgtgctacgtggagaagggctgcgaccgcgacgacatactggcggcggtggacgacgccctcgaggacggcgtcgacatcctgtcgctgtcgctcggcgacgagcaggccggcgacttctccgacgacccggtctcgctcggaggctacagcgctgccatgcatggcgtgctggtcagcgcggccggcggcaacaccggcccgggaccgagcaccgtcgtcaacgaggcgccgtgggttatcaccgtgggggcaggcaccaccgaccggcggttcgtcgccaccgtgaagcttggaagcggggttagcctcgacggcgagtcgctcagcgagccc

SEQ ID NO: 21884 - DNA, 4288 bp, Oryza sativa
ggccgcgcccttctcgtcgcgggggccgaacaggcggagcagggggatcctcaagcccgacatcataggccccggagtgaacatcctcgccggcgtccccaagatcgaggacttggcgctcggggccgaggaagtgatgcccaagtttgacatcaagtccggcacctccatggccgcgccgcacatcagcggggtcgccgcgctgatcaagaacgcgcacccgacgtggtcgccggccgccatcaagtcggccatgatgacgacggccgattacaccgacaacctccggaagccgataaccgacgtggacggcgcgccggcgacctactacgccatcggcgccggctacgtgaacgcgcggaaagccatcgacccggggctcgtgtacaacctgtcgtcgctggactacatcccctacctctgcgggctcgggtacaaggaccagaaggtgaactcgatcatccacccggggccggcggtggagtgcgccaagatgcccaaggtcgatcagaaggatctcaactacccgtccatcacggccgtcctggacatggagccgtacgaggtgagcatcaaccggtcggcgacgaacgtcggggcggccacctcgacgtacgccgtggaggtggacgtgccggcgacgctggcggtggaggtgaacccggcgaagctggagttcagggcgctgaacgaggtgctgaactacacggtcaccgtcaagacggcctccggcaaggcgccggccagcacgatcgaggggcagctgaagtgggtgtcggggaaaaagtacgtggtgcgcagcccgatcctcgtctgtgccggcaccggcggcaagagcgccgcctccatgggggctgcaccggcgtagagcactggtcgagcggagcctaagagatagcagcttgatgatgattactagattgccacgcgtgttaacgtttgatggtgctttactcttcgctcggtaggtttaggctcatgtatgtggaggctagcgaattaatcctttcctccgcggaagtggggtgacgggtttttcttgctgtttttaccactagtgcacgcggctgatcttgaccattcattgattttgtactccaggggacgagatgtgatttcatccccggccccttaatcatgatatatgttcatttattctttttttcctgtttctcaaatagatgcagacgtgacactcctctcaaatagatgctggtgtgttatatatgctatatatgctgtgattatattttaaagttgatgtgaaaatttaaaacatataatcattattgtagtttattttgccaattgaattacgaatagagaaaatatattatccaactttcattatttctcctattgtttatatttttcataatattactgtttgcaacatcacgaatgccaagtggagcttaataaggatcttgagttgaagcagtttgccaagacaccaaaatactaaaataaagctgttggaccaaatgaggttccaggatccatcccaaatgccaaacggaccggagcctaataagtactccctccattccataatataaggcacaactatttttattacatgtttcataatagacatacatgcaaacatgcaattaactatgatatcttctacattaaattattacttttttaaatcatccactctcaagttatctaatcatattggatgcatgcattaatatttattaggatgatccaagctacaatatgataataattatttcttggtctttgggttaagggtggttgtcccttatattttggaatggagggagtatcttgagctgaagcaatttgccaagacaccaacatgtggaagggcgggctagctccgcatctattttaagtttgaacctgggaagaaaagattagagctagtcttctagtttttcttttcggttgttctttttcatgtttctcaattatgagttttagaatgtatgcactcgtgtaaactttgattgtgtatatccactttggatatagaggccgaattttatccattatctaaaaaaaaagacaccaacatgttaaaaactatatattgaaccaaatgagattaccaaaatccaccgctaatgccaaacggagcctaataaggatttcttgagttgacatgttttttttttacttttttttaaaaaaaatctttttccgtccccattcttgatcttgagtaaaactcaataaatgaaaatcatgaacacctcgtaagtttatattgtttgttctttctttgtagtttgtacagaaaatactactcttgtatcttatcctgccaattcttttcataatttttcagggctatttggaatgtagctgagaagtaaagtcacattttaataaaaaagataccaaattataaccgctcatattaaaaggagacccgtgtggggatgaaccttaatagtatagtatagtacttaactatatttattaatttcgatttcggaattactatacggctataccaacaaaacaaactaagaatccaaagatgactacaatttggtatttcaacaccagaactgtaagtttaaaatttcaacaataagtactgtaagtaagaaggatcccaattgaccgagaaatcacaatgcgcgtaacgcgtgataatacctctgtctcataataagtgcagcaatgagtttttgcgtccaaatttgatcgtccgtcttatttaaaatttttttataattagcatttttattgttatgagatgataaaacatgaataagactttacttgtgacttatgtttttaaatttttttaaaattttttaaaataagacgaacggttaaagttggacgtggaaaaccatggctatacttattttaggacggatgaagtattaccgtctctgaatctctgatatatgatcaggcgaaggtgacagagaccgggctccgtacggtgtgcgtctccgaaacccaccgcactgcgccctgcaccacccttgcgccgccctgccccggccacacgaccaccgtgaaatccttctcctggttcactccggtgaaccgcaatgtcctcgggaacacgcggacggtcacggttgtgtccagcatgtcgaccgccgcgtagtactccgatggcacctccccgacgttcttcgccgtgcgcctcacgagcaccggctccgacgagttccacgcccgcgggaacctgaccgagatcgacgggtagttcagctggtgctccgggatcgccgcgacggcggagcagttcaccggccggcgcgcgatcaccgagacctcctggctcgtgtacaggccgcagaggtagccgacgtagtcgcaaggagcaatgtcgtagaccaggccagggtcggcggccctctccgggttgacgtgaccggcgccggtggcgaagaagttggccggcgctcgctgctcgtcgagtatctggttcccggagcggtcggtgatgtcggcggtggtcatgatggccgacttgatcgccgccggcgaccagtgcgggtgcctgctcttgatgaacgccgcgacgccgctgaggtgcggcgtcgacatggatgtcccggagatgatgttgaaggtcggtccagggaaaacctgcgccgacgatggcccaacctggaacggccatgcggcgagcacgttcacgccggggcccgtgatgtcgggcttcaggataccggggttctgaacgctaggcccacgggaggagaagaaagccatcgccggagcaggcgtcgtgccgagtaccgtgcccctggggaggatctgcgccaccgggttcgccgtgctgttgatgtacgccttgatggctaagccggcgacgtagtcaacatgcgacgccgggaggacgtgcgcctcggccaacgtagtgtagccttcggggaagtgattgggaagtatcatgccggcgccgccggcgctctgcaccaccgcgcctttgatgatcctcgtgatgttaggaccaccaccgactcgcagacgacgatcttgcccctgacgtcgaagccgtcgagcgagccgttgccgcagaactcggcggacggcttcccgctcgcgccggcgtagaccagtgggtagaaggtgctcggcgagtcgttcggctggtacagcgactcgccgtcgaagtagagcccgttccctaagcgcaccgtcgtgcgtatcgaccggtccatggtgctcgcggcgacggtgagcatccacggcgcgtcgttgatcacggagctcacgtttgggccagcgttgccggcagccatgctgacaaacacgcccttctccatggctccgaacg

SEQ ID NO: 21885 - DNA, 29374 bp, Oryza sativa
ctgaaggaggggtggtccgggaacacgccggtgtcgatcacgccgacgatgacgccagcgccagctcccgagccgcgtgggacgacgacgaccaccgcttcccctgcggcggcggcggagcactcagcccgaggaactgcggcgtgtgcgtcgtctgcagcgtgtgcgtctggtccggcaccgcgctcacgaacccgggcatggcggacacggcgtcgagctcctgccgcgtcagcctggccgcgaacccgctcgcgacgtggtggtacgcgtggaccagccggccgtcctccggcaggaacgtcttgtaccactccttccggtcatcggcggtggcggccacgtggctttcctgcggctgcacgtgcacgatgaacgtgccgatctcatcgccggtcgcttcaacggcgatcgcgaggacgaaaacgaacggaagaaaggagagcaaggagagcttgaagccatccatggcgggtttcgttctgatacgacttctgagctctgcagcatttgcacaaattggcggccattttataaagctaagcgctttgtcagattaagctggccggcttttgcctggtcttcaggccgtgacaatatgcgaggattggaggcttggagctacggtaaaattggcaatttgaagaccgggttaatgaacaaaaacggagcgaaacagacacatatggctgcttgggaattgccgcactgtgatgggatcttgctgcaggaacggagcggcagccgcccgtgcgtgaatatgcgatgtttgcctcatagtacttaaaaaaacaacatagtattggatgtgatattttctaatacaacgaatctggatagactagaaaatatcatctctaatacgttgtactagaaaatatcacctccaatacgttgtactaaaaaaaaatatcgcctccaatacgttgttgcctttttttttttttaagaacggagggaatgctacatagccaaatggcattgtgtacgtcgtcttcgtttggatcacataactcatttttctgtctgttgaaaggtgacccaatttgtcgatcatcttagcaagtcggagcttagatctaaccgccgaaatcaaccttcgtatagaaacaaggttcgtttatccccagtttttttttctttcaaaggtcgcctaattctctgatcctaactagttatagtgggcctttttgtgcagcccaatactggcgattccgcgagcctagcctatcaaggcccatgtaaaagcatttggtatcggtccagatcacacgtcgcaacagccgctcccccggccgcttgccccgacagaaaacgaacatttacgctgcggcgagccggcgaccatggcgatttggttggattgtgtcgggcgcgctgtgttccgatccaaagcgaagtgggttggcagcagggtttataatatcgtgaggtcatcgtgattatcacgtacgctaacatttttaatttttaaaatcataatataccttgtagttatcacgttaactgtcaaactgtgagatggtggtaatctcacctcaaacattttggtaagttggtcaggtatgcatgtagctagcttctgtccggccagaggaacggaaaggattatgccacgcctttcgatcgtcacccgtgaagaacacgagggcgtctccagcgcctggacgtggacaacaatgaacacgacgacgatcgagtcgatcgacgagctcaccttccctgggcgcggcctcggcggcaacgatcgcgaggctgagtagtgtttgttgcatcattgcatggatgggtttgctcgaggttataatctgagttgatcgatcagttggttatcaatttcagctttttggaaagccatgctcaaatctcaatggagacgaagaattaagagagaggaaaaaaggctgtgtttaaatttaaagtttagatccaaacttcagttattttctatcacattaacatgtcatacacacataacttttcagtcacatcatctccaatttcaacaaaaatctaaactttgcgctgaactaaacagccaaaagccaaagtaagatatctgcacctgctgggctgcatgtaggcccgctacaccttttgcttttctgcacagaacatggcctggagcctgtagggaggcccagcgctgcagcgctcggcctggacacgatttgacgtgcacaaagatgcttggcgctggcgctagtttgttttgactttggaccagctctttgggcttggggagtttcttttagctttttttttttaccaagagaagctgtatttatataatccaaaatatactgaaactagtagttgagtttctcgacttcttcaaattttcctcgaattttttattatactaattttattatactgaaactagaagtcggctaccaatcaattgtttatgagaatcttaagctcgctcaaatactagcggaattgccctcgaaaccaacttcgctatgtaatactcactttgctcccaaatataaatatctctaggatttaaattatatatcataatataagcatattcctctggttttcatgatttacattatttcgatgattctaaagctaattactacatgtctaaaaaggaaatcgaagcaattcaaaatgaacaactaaagtgattaaaaaggaatattttaacctaatgttagtatttgttaaatatagcaatttataaaaagaaaggatgtacagtagtacatatttttgttttaccattgttattataacactatgcttacttttgaaaggaaacacagctatacaatactaatttatttaggattgagtttaatttgttgtgccacgcaagtttaattaagttgcgctttgtctaactatgttgaattgccttttgtgttgaatggacgaagttgtataaattgtggaaattattcaaaggttcaaacaaataaattaaatattataaagatgaaaaatagatttaaacaattttctaagaaatcatactagaaagtttttctttttttaaaaaaaaaggcccatttaaaagctcgagaaatatacacaaatatccatcattccaccttttttttagaaattaccggaggggagagcttttccacctgaaattttcattgatatgagggagtttgaatacaaagttcgagcaaactacagcgtcatgccattaaatattttgagaacagacagggcgagagagagagaaagagagtttgtttacaggcagagacaacaatctggtctgaccgccaaatacgttctgcacagatagttgcttcatcgatgcagctcggagcatgcgctggaggcaaggttgttcatttttttaaaccactttgtatcgataattcctaaggcatcagaagcacgggaggaagaaaaggttgtttttaaaaatattttcccggaaggtccattaataaaattatttattatatactaaaaatccattaaactttctaaaaacgctctcaagccgacacgtggctcttctataaacactgctttgatatctaatcatcgattttactttaaatttggtggacccacaattttctaccgttggatttgctaaccaaaagaaaaggcccacatgactgtccatatacgtacggtgctacgtatgctcccctcctcaataatgaaaatatattttgtgataactaatatttatccacgtacgttattagattatttaccacaaaatttataattcaagatccaaactaactatatttaataagtagaaaaataaaacacatttataaggaaaatcatatagatattttaatgatctatttaacaacacatatctttgattggatattttatatttatagtataggtctaatttaactacgtatatttgcataaatttgtaaagtaatatattttatatttaaattgtaggaaatcctatcaattttctttgcaacattagtacgtacatatgatttttggctttattttttctatcgtataattacatacaaatggtcttttttttcttacggcaaacagtaggtaagcttagtccattaaacatactctattttcatttaatttgggggaaccattattaccattagatttttatattttgtaaaaaaaatactaaatcagtttatctcttaaataatcccacattaccccgtgttctcgtgtgcctgtacggacgtactgtgtcccagtgtacctgtagtacgtacttaagtacgtccgtacatacatatcccctatgtctttttctttttttccctccttatacttacattagatgaaaaactaaaaagtccatgttaactactccataaaaaatatatgttttaatatgtaagaatatatgttattttaagttttattctaaatagcgcatatcatggaaacatccataaaaatattaataaattaaaaatgaagatcatataattgtatatcacttacaaacaaagttagattggacttatattttaaaaataaaaacaacttaaattgtgagtagcattctaaaaatttactcactccctactacataatagatatttctaaatgacattacaaatttatcatgaatgtatttttatatattatatgtttctttagtcatgtatttttagaaaattaatgatcatatattttttttgacaccatgtggatgtccttttatctcttaggcttcattcgttctagctcattggatgagcttacctcggacacgcgaaacaaagcatatcatcagtgtaagactaattaagtattaaatattataaactcgaatatggatttatttgatattttagaatactttgcacaatagtttaggaaacatgctcaccataaatgagggagtagccaatctgataaatactttagaactcaatcttaaatttattactaaatatatagtatataaaatatcatgtcaatcaggaatagtcaaatatatcaatcgtatatccctactaatccctatgtatataagtttcatataaaaactactatccaccaatcgtcaagttacattatgaggcatccgtacatagcgcgccaattattagatggcatttaatggtcacgtgcattatcaagtaccgataaaggacaaaagtgggcaaacatcaacgaatgataggcaagtattgataccaaccataaaagattttaacatttagaaataaatagatgtccgcactcgcattttcctacaaacttcctatgataaacttcctataaacgctctcaagctgtgatgtagtactcctacaaacgctcctaaaccgtcacgtggcgttataataaatcccagaaattcaaagaaaaaaatctaaccgttgtttttatttattctggtagacccattgtttccgtccattagatctatcttagaaaagtaccattaaatttatctttaaaagtctcaacatctagatgcacataggtacggtatgtacgtactcacgcaggccccacgtccctctcttttgtttagttttctttgtgaaatccgaaaacaatacaccattaaaaaaaatctgaattcagctcaaagctatatttgggatttacaattaaaattcaaagctcctttgaattatatgaaaaacaaacaacagtgtgcgattaggattcctattgattgcatgactatactatccttaatttggtttgcacgaataggtcatagtaattttgaaggaaaatttcctatcctaccgttaccaagcaaataaacataggaaagtttaagtccatcaaacatcttacgaacactcctaaactattgttaggcatcctagaaatgctcctaaccattacatgacactataatgaattagagaaaatcataaaataaggaaatactcacaacatgtgacaagttataatgcacacatttagaaataaatataatggtatgatgctggactccgttgtcatatagaatataattacgattttaatgttttactgcctaaatatgttaagagaaaatagaaataagatacatgcgcatgttttttttccttcgcatgggatcaagacaatcaagctgctaaatgcaaaggttgtttggttaattgcattttatttatgctctgataggtgatgatttgatctatatgggtttaacaaattttgaaattcctcttatttctgtactccatccaaaattcgtttattctctattttacacatgtatttctaacctatttatgtaccttttatattttcctataattttttaaatcatgtgttataaaggaatcttcgaaatctttcaccaagggaaaatcataatattcaaaatcctaataacaaaaaattatgatggcttaaataaaatgtccgcgtaactgcgcgggctacttttctagtttttttaaaaggtctaaattatataaaaaatttggatgaaagggttgttggcggcggaatatggcccaggtctcgaacatcccaaattgttgaactgagattgctgcccagaaattgcgagcgaaggggtaggaccgtaggggagacagtggtggctaccagtttcttcattgagtccgcagtgaagagacaattgtttttgcatggagattttttttttgttggccatggaccattccacctatttgttacagtaagaacctgtttatatgggactaaaacttttaagtccctatcacatcggatgtttggacactaattataaatattaaacgtagactattaataaaacccatccataatcttggactaattcgcgagacgaatctattgagcctaattaatcaatgattagcctatgtgatcctacagtaaacattctctaattatagattaattaggcttaaaaaatttgtctcgcaaattagttttcatttatgtaattagttttgtaagtagtctatatttgatactctaaattagtgtataaatatggagactaaagttaagtccctggattcaaacaccacctaagttatgttggaaagtaggagattcataagaatcaatctttttaaagagaaaggtaggagctttgtcgatcaagaaataaacaaaaacaataaatttgatttccacgataattaggaagaggttatttagaccctctttgtttgggcttaggtttattggtttagatttttaagttagcttattggcttatatgatttataagctggtagatttaatgttctaagtttaatggtagagtcatgcatctatttcacataagccaaaaaagcttctccaacctagtttttggtttaatagtgttagagtggcttatggcttaaaaaaagccaaatgaaaaagccgcttgtttgtttaggtttagacattttgacttataagttagcttataagactaaacaaagagggtcttagaattccctgatgcttggtctaaactttttcgatctctcattttttttcgagtacaaatgcgatgcatgttgagttatggatccaaattcatttacacttaataaagactagcttctgccatagtggagcggaggcccgtcgccggtaggattgggtatgaatcatcatcccttttagagttccaccatatatatacatcttgtaaaccatcgtgcggcgttgtaaccttaccctgatatagtgaagatattttgctggctagcgcctgtggttttttctctcctgctttgagagagttttccacgttaaatctcgtgtctttttgtgattgatctattatttattattttttatcgtttgtttgcctatagtttccgaacaatgcacacacactaaacttacgctcatacacatgtgggcgccctatcatacgtctatgccttttcgatctgaactctactttaagtttagcaaggcttgtactaacgaataacaagaaaacatgaatacctccccagaatactaataataagattgagaactaatcatggaatccacgctccacgcagtcatacccatggtgcatggtatctttcatcctgtcatctcatctcagctatgtaattacatacaaatatgattgtgtgtgtgcacttcacagggcagatcgagacccaaatattttagatagaaatctcaaccacattaccacacatgtgacatcaggatttctcctgacatggatagacagtacattattgttattgttatttattttataatgaaaacttagatctaagtctgattatatgtgtcggcatgcttgcaaattaaattaaaccttgccacgactactataattaagcaagataaatgtcgaacttcacacatgtagccttttgtgtattacaaatggatcgactaacgtgactgtatccacttacccaactacttattctagatttaatgatataatttgtgtggtttaatttgcaagtaagtttgtcttttttaaattaagttagtgagtttttttttgaacactcaatattgtttaggtgaaaaggctaaagtaaagctctgcccaggaatcattataaagtacatcaaaggatgatgtttttgatttttcatcggatcatttccatgcctgatcagtaggaattttaagttgtaaacatatattacaagtaaacaattcaatcctgcctaatcaagtttatctacaacctactactaggttccacaaacagacagcacaattcagagagaaagccagccaaagttgagcacacatttcattccatttcattagcacacacacacgcatgtcattagcagctaacgaccataggcacgtggcgctatatcgtaggctcatcatgcgccatacagcccaatcaagagttggcataagcgtgcttacgataatcctaaactatcctaacctcctcgagctaattaagctcaccagccgagcacaccccaagcagaccaagctaaaaaaaaaaaactctgctttattcgtcctctcctctgcatgaactctccccactactcccctgttacagcttgtgacaaccaagaaataccctgcctgcttcgctgtaacacttgtactcctgaattacgcagagatctcctgagttatctgcaagagagagtgcagtaacaggaaagaaggttttcaatggagacggagatgcaaaagtggcagtaaaatggagactttgcgagggcaattcgatcgggcaactcacctcctcggggcaagcaactgccggtgtcatgatcggaaaggcaccggagccggagacggaagggggggggggggggggccttcacctcgcctttgccgtccgtaatgtcgccattattctgaccggcatgctcgccactttgtgtcagataaaggaggaggcccgcttgtgagtgacatgacatccgtgctatctaatccttgcccccgcgcggccacatggctgtgtttagtttagctgcgagacgaacgcgtgctgctgctcaaagcgccaggattagtgttgagtccccatgctttgttcagccattggtgagccggcaggcataattagcttagtgacaagtaccgtactactaagagcagtacaatagcagactatgagcccgctaataaacatacttaaaaaagataaaagagaaaagagaaaagtaacgagctttaaatttatagccagctatagcacaagctccaaaatatatacgtgtataatatgtgggaccaaacaattatatagtatatgtttataggtaatcgtatgaattggctatttaatcgattatagataatttgaagccaataattgattataatattaaacttgctctaagtagctgcgctggttaagggagacaaatggtggcgtcgattttgtcattagtgtgtgcttgcagcgtcattagtaggagtatgatcatctgtcggcagagctctgtaaaaattctgctgcttcagtgcttctggtattagcgtcagggagtgcagtgatctgcactgcagtgcacatttcttttcggtgtttacgcattttcgaagggaatttacgcgcgaagaggagggggggggggggggggggcatcgtggaaagcgagggggaggaatcgcactcttttcttggcataaagcgcgcccgacccgtttacctcatcgccgtcatcgtggggcctcaccacgccacgccacgccacgccacggcacgacgtagtacgcttctccccttgccggccacttcttccgcagtcgacagccgctgactctccactgcacccagcgcagcagcgcactcgcttgcctgcggcctctgcctcgccaccgcgagcgcactcggtgtgccgatcggtcgatgcgaggatggacacgccgtcgacgacgtgcgacgagagctcggaggtcgacgcgcgcgacgactacggggacatcgacgacgtggagcggcggcgcggccgccaccggcgggaggcctcgtcggacgtgtcgtccgagtgcagcggcgagcccgggagcccgtacggttcgccgtacccgcggtggcccgtgtgcagcatagcgaaggcgccgccgccgccgctgctgcagaagctcggcgcggcgcggcgcggcgcgggccgtgaccgcaaggccggcgacggcggtacgtcctcctaccacccgcattgaggctggcaaagatctctgctgctttcttggcttggatattctccctaatgcgctatagatgggttgaattggcagagttgcagctgatcaaggagaggttctcgaagcttctgctcggcgaggacatgtccgggagcggcaagggggtctccaccgccgtcgccatctccaatgccatcaccaacctctatggtcggtacgcgtaatctcgttttcagagatgaaatcttcagcggcagctaggaacagagtagaacacgagcgtgctcaatgtcaatctgttgcttcctctgttcgcagcgaccgtgttcggcggctgccaccggctggagcccctgctggcggagaagaggtcgatgtggcggcgggagatggactgcctcctctcggtgtgcgactacatcgtcgagctcttcccttccaaggagatcatgcccgacggcaccgtgcgggaggtgagaatttgcaggtgttcgtccatgttcttcaaggcaaaagctctcttgcgcgtcactaatccatggacgcattcccgcctctttcgtctcaggtgatggcgaccaggccgaggtccgacatctacgtcaacctccccgccctcgagaagctcgacgacatgcttctcgtaagacccgattctgctcgcgctatgttcatctccatgactccatggattggcttcttgttcatcgtgaaattgctttgcttgttgccgtgcaggagattctggacagcttccagaagactgaattctggtacgtgaacgacaagggtcagaaggatagctgcgccgccgccgccgcggcgccgtgccgtccggtgagccaccgcgacggtgacaagtggtggctgcccgtgccgtgcgtcaccaagcccgggctgacggagtcggcgcggagagacctgcggcagaagcacgactgtgcgagccagatccacaaggcggccatggccatcaacaatggcgttcttgcggagattcgcatccctgagctgtacaagcaaacgcttcccaaggtacagcaacatcaaaaatctctctctctctctctctctctccccccttctctttctcgatacaagagcttcaaatcttccaattcgaggatttctcccaagaatctgaattctgatcctgtgcagtgcgggcgggcgagcgtgggcgacctgatctaccggcacatgtcgttcccgggcaagttctcgccggagtacctcctggaccggctggagatctcgtcggagcacgacgccctcgaggcggccgaccgcgtcgaggcggcgatgcacgtgtggcggcggaaggcgagccaggggcactccaggtcgccgtggagcgccgtcaaggagctcatggagtccgacaagaacgtgatgctggcgagccgcgccggcgacgtcctgctctgcctcaagcagcgcttccccggcctctcccagaccaccctggacgccagcaagatccagtacaacaaggtaaccacaccaacccatcaccagcaacgacgtgtcgcgacatcatcgccatggacgaacactaacacgaagctgctgctgctgctgttctccgtgcaggacgttgggcaagccatcctggagggctactccagggtgctggagagcctggcttacaacatagtgacgtgtatagacgacgttcttttcgccgatgagtctgcaaggaagatctgatgatcatcatcatttgttcatcctgccttgccttggtccgggatatcaaaatataagggtccatggccaaatcccacaatatgtacattatgccaatactagaatgtagccatgtaggactaatggaagatactagcacaaggaaagcacagtactctattggcctagctaagctagcaagtagtagcaagcaatgtttgggtgtttcatactttcattgcgagggtcccttcaattgtctgccatgagtgtgatcacaattggtacttaccaactgtgatgacagctgagatgattcaccagagtatatgcaagcaatgcttaaaatggagcagcactatggtgtatctgataaacaagggaaattgttttactttcatgaggaaaaaaaaaactataattaggcagtacatatacaactgaacttattcttcctactttcacacctgtacagagaacagaaatgatagaagaagcattaataagaagaaaaattcctagtgttaggagccacatatagtcaagatttatagtatgatgcaaacagtcaggcaagcctaactctactgcgctgtatacactctgtttaaatctgtcacactcactttttcaaagctttttgtactatggtttttggtgaataaaatcctgccgaagtgccgaactataaactctatcagtttccatcggatggcaacaaaacaatcttaaagccacaagtcaaacaccatttcctccagtaaatcatcaagcaaagtatcccacacctctatagcaacttcttcagtatcaacccgaaggtccatccatgatccactctccaggtctttcagcaccacccgatctaatgtacttggaacctcatcactgacaagagaatcgatgcaattatccacctcttgaatgagccctgttcctaccggagctggcctcacactgtgtttcagataagctacccaagggtcacaaccaaaaaagttatccctgatcttgcaaagagcttcttccacacaatcaaagagaaacaccgcatcgtctgtcaggcagtacaaagttcctacttcagccaatacagatgtgtcaagcagtgatccgtccacataccatatctctgaactttcctcagacaagaagtctgaagcctcaagcacaacctttatgaaggaaagccttgcctgtttatcatccaaaatagcttcttgtggtgtgttttgcaaagttggggttcccgagggagtgtcatcctctttaaacagaatccttgtgcttggcatggacaattcatctgcataaagcacaataaaattgtgctactttaccatggatttttcaagaaaatacaaaagggtacttccactatcttaaaaaagggaaattcaaaaggggaagttcttattttgaattcaataccttgcgttcgagttttgtggctggggctgataccatctcccaggaaagaatctagaacagattgagggctcagtctctcctctttgtcatctgcattctccggggagcaagaaaatgtcaagatggatggcttggttaatccaacaactgccgatggactatgattgaattgctcgttaactttttctggagtgtgcagggatacttctggtaatgcattcatggtttgtgactcttctgcgaagcacttcaacacgggggagtaaaagaaaagttagacgcaaaattaattactaacttaactttttgtacaatttgcaaaaacatatggcttacttggtcggtatttatttgttccaagctttcagttgaagtttcgatctgaatagagacttggggggtatctgttgcatcattcatgctgtcaatccctgcaaacatttggtgtatatattagatgaaaacaaggaagtagaaaactaaaaagataaacaggaggacaacaatataccttcactagttaactcctgcgagatagtgccctctttgactggatgactggcatggtctgtcttaaattcatccagctgtgtgttagccgatgtgctggtgtccaatggtattagctccccaaacttcattggtgggtcagaatttgatgaaatatcctcttgttcagtcgtcagtaatgctgatgaagcagtcgaatcctctgacagtttaacatcctcttgaggacaatcagtttgagaaaacgtatcattctccgaatatgaaagtaatttcccaaagggttctgatttgtgtacgatctgagaagtgtcattcttttgattgtctagcctctcgattagatgcttcttagctttttcgtagaagaaagagctagcacaatgagtggcatcattccccatgccacttccactatcttcagggattgttttcttgtcaactattgagggtttctcagccttttcacattcagaagagtccatacttgtcgacatactctcgagaatgaactgttgtgttgaatcatctttctggaaagtactactcatgacatcctttcgattgttactaatggcaagccttagcctccttttaagctctctaagtgagaaatggcgagcatatttgtcactttgttcctgaccttgcaaatcagcacgagtttgtactggtgacgacattgcactacttgaaatcagactagtctgacttcttccaggacttggcttcaatattactattctgctaacgccacgaggactatcattcagttttggtggtctcctcatgactagcttatcctccttcaagaaaaaattatgtgttttttgcacgctgtatttcgaaacctcagactgctctagactgttaatggtaactttcgactttgtttgtttgtcatcttctgccagttctaacatgggatttcctagtgccgtgtacaggttctgcaggcattgcaacatcctagagcttgggtctttcagaagcatcagaaagaactcttcgtttgcgctcagcaattgtaatgcatcaagaaattcattgggcctagcttcgtagctgctgcttgtgtatttcccgtttgcagattgatgggttattactgcttcagccacagcttcaagtgctttctctatactacaggagatttgtttaggatgagtactagcatcagtattgtgctctttgtcaatcaaactggaagagtgatctgatacttccgaagtgataatatcgcgactgccattatgatttctgtataattccatgagacttgtagccaagtctaggtcaacatcagatccttcctgcaggttcacagacttcaaatcatcagaacgtatcccaaatatgttcctttgtgtttccttcaagatctgcgttccactggccatctcttcttccatcagtgctttaatacttggcctgctggcatgaattgttttaaccccatagtctttgtcctcctgacaagcaaataaatttggttttctatattcagatgttatcttcaaatgcctacaaatatttctggatacaaatacttatgcatatttaatcctccataaaactaatacgacaaatattttttatttgtaaccttttctgtgagaattctaattaatatatttggcaatagaaactatttcatctgtaatataataaaagctaataaagctgtttgcaattgctaaaacaaagtgaatatgttactatatgtttcaatcggtggcactcgagtctcatagaaaatacagttgttttcaaatccagccatgagattctgtaggtaattcagctaatcacacttaaatattcgtaaaaatgtcttgaaaagctttgtacatatactaaagcttttcatatcaatgctttaacagtactatttactccagttgccagcagaagcatctgttattagtacatcaacattacaagtattcaagaatgttgatgacaatcaacattttgcccataggaatcaagcaattgtaacactgtacacttgtagaacaagtaacataatgatgaaaaacaaattgtccaacaagtaaaaagcaacagtaagttaaatttgggaactaaacttcagtctttgtttcctttctaatcagttttgctagcgcaaacgcatgttttttgtctctgtgaaacagacatgtgactttgaactttcagatacaaaaaacagatgaaataggtatatatggatgacttacatcagaaaagatgattccatggaaatcttcagaacctttcaggtcacttctgactgcatgaagcacagaatttatcataagcaatatcattacactgcagcttacatcattctttttgttcagatgacattgcattccacttaaattcctcacctgaactcctcctaatcgtcccatctgaaataagttttggactgcgacggaagtcaaacatgtggatgaggcccgacatacagcccatatggaccttctcagatttgcaccgctgtttgtaactcttctttgccatgatagaggagaacattgtcagacagattcgtttaatcaccaggcaagtttacaacctgaatatcaaaacatagaaaaccatgttagaattggtaaacagtacaaattagacatgcaaatggcgaaagagcttccaccctatcaactactcatagttggtcatgatctcttaccaacttctgaatggttgcagaatctacttacataactaatacagttgtccaagactaattgtaaaaccaaagtaaaaaaaaaaagagaggtaaaatttgaaagaaagaagagacagaaaccacattggaccccacaaatgcaaacatgtaaagttcaccgcattacggcattacatctaattgctttctaacgagaaacatgctataagaatttaatgaaacctaattaaattagagagacaaaaacttcttgtggccatacaaagaggcaaaaatgccaaatgacgaaactctgaagatttgaaagttatttcctctcttttccttgtcaagaaaggaacagttgtcctgtcggtgaacccagaatcctaggattaagaatagttccacttccccatatgcaaagaacggctacaaatgtccaaattgcattgtatagtatctgcaggcgctggctaatgcctaaaacagctcagtaatccctattggagtatgtcaaccacagtataacacaatcacccagatgaacaaaaggttgatattgggtaatgcttatgttaccttagttcgaagaacccagaccagatgaatacaggaaaaagcaaggtggcgcctgacaactgttcctacacaatgacctgctaaatcatctgaacagccatgtctgccccttttctttgacccttgagccgtgaacccaagtacccaacaatggtactagcttcttcaatctccagacaatcaaaacccaatctttgaatctcgagcaatcgcgaaccaagagaagataagcagaaacagatgagaaatgatccgatagccccaacagaaacccttgtatctgccgtgcttcctcggtttcctcaagatgccccggactcggaattcacgtcaaaattgagaaacttgacaggaaggaatatatctcatcaagacctgaacacgcaaaaggaaagaagattgcggaactgcatcatcagaccgaccctctgcttcctttatccccctccgtcttcagccaaacatgcagacctcgccgtgaagtttcaatctttccagcctcgggcgattcagaatctcacaggcaagaaaggtccctgttgcggaacaatctcagaacccaaatgcgaaaaaaaaaagaaagagagacaatctttcccccttcgatcctctgcttcctctgagcaaaccctcgaaacacgcaggaacaggcacccgaacagaattttttttccgcctccaaaaaaaccaccaaaagaaacagcgaataaatggatacacactgcaaaagaactgcccctttttcacagaacaatgaacaggctgttggaattctagttgccttttctgatctttttcttcacttcgtttccttccaaaaacaggagcatgcgtcgaggccggagaggaggattcttgggcgaggccgcgtgggaatgggatgcctctgtggccgcgccaagccgccaaccactgctcctgctaccaccatctcctcatcatatgctccgattatctctcttccttcctctccaggaaggagaaggtaggattcggagggtggtttgctttgtacttttcaggtttttttcgcagattaatggaggggggcattgccgcattggactttgatatctgtctctatcttggcatctccctctttttctacgtcagagaagcttgatcaagctcaacacgtagtggatgggaaaggaaaaaagaaaagaaaagaaaagaataaggatttgatttttcgccggagaaaaaaataataaaagaatttgattcttgtctctatcttaggctctccgtcttgtaccagtagaataaagaacacatggcatacaagggtagttttgaaagtagaattatattttttattagtctatatttaatagataattgatctcatccaataagggctaaaatttactaccatatctgaaatattcattgtgatgtgggatcgaattataccggtagattgataaggtgtagtacaaattattgggaatagtacaattgtgtttttaaactagagacgttgcatggcaaaaaataattctatcttagcttttgcgtgggaaattcaactaattttctcttaagatgaatgttaggaggcatgcacgggccagcaaaatctaatcgtaggtataaaatggacgcttgtgattgacgaacggcaaactttactcttatgcccaaaggcaagggttcgaaaccagcatgcacattaaaaatgttacacttatgacacaccaataatttgcatgtacttagaatttgtaggaggtgtccaataactcacacaaactatttcatgattttttttcaaccatttttcgtcataaacgtgacctctgattatggatgctcaataactaataacacatattttaattcctgaacgcacatttcttgcgattggtttgacgcaatggcagggccagagtaaaattgtggcgtcggctaaccccacatgtttttgcaagatacaccttgaccatgtgaaaactagcaaaaaaagtacataaaacaatgaaattttgtatggattgatcccacatggttacatatttatgtattttgatcccaccgggttgagaacctgtctctgccattggtttgacgtatgcatgacataactaagtatcataaattttttttcaaatcagtgagggaaaaatattgaaatgcgaagagataaatcattagcaaaaaatttcaagtgagcaatactactttgcttgtatatttttttagatagtttctttaggtttccaatcgaatgatgtttatttccttctcttgcgccacagtaactgagctactaatatttactgatattagtttgcagaaagcaaactatatttatttcataagtaaagttcacataattcgaaactatcacaaaaccaggacttaaatcaatgtactagttccaaagtaacacgcttccattacaaatccaatatgtgtgctgtggtttttatatagcaaatatgctcatgttaaacttataccgctatgccctttcatggtagtatctttattatggtggaaattttaaattgggaacctatatatgacgaacgaataatttctaaatatgtctaacttaggcatcgtgtagatgcttgaaataggtaatgtaactgcatttcgccctcattgcacagtgtgttctgttctttttagaagcacacgctttcaacagttgaagtatcacgagatgtccttctatgggtatcatatatggctacacctgattgcaatgaacacttttagaatagataaatattctattccctgttccatatcttgttatcctttcgagattatatcaactttaattgttgcccggtttgaaatggtgcgtacatgtacgtggattaacaacatttgaagcctgccgacaggaaggcagcgttggaagtcattgattttttttttttaaaaaaagaagaaaattagaagtttgaaacgagtggccactagaaatatttttccggcattactgcacaacagcaacagccgtcatatccaattctttaatttcaaggattgtgacaaaccaactaatagaagattcgccggaaatcggttggattaggatgaataacaaacgactaaacatttccatggcatgtctcagagacaacatcgctcaattattgggtctcttccaactacagtagcgtccattttttttcggtttgttcagctgtctacccaaacgaaaacaaacaatggtcctcgtattacacacacaattgcaaaaccgatacatgtacgtgtaaatctgaaaggaacatacatttagctcggtgacagagacgggaagaaaaatgtaccagattcaggttataagactttttagcattatccacattcatatagatatgtctagattcattaacatctatatgaatatggacaatgttagaaagtcttataatatgaaacggaggaagtagcgaggagatcagagagccgtccgatcagccatctgatgagagcaggatgtactggttcagggcgacgttctctggactgccagtagccgtcgttttcgtgtgtgcactcgtgtcggctggtggttttcgcgtctctcgcgtgccgccatggacgcttcaacctccccggccagtgtcaacccccaacaccaccacccctcacccacacacaaaaccggttgactaccagtgaaattcgatcaaattctgtcagaaatgtaagaattttctttcaaacttgactgagaaaccgagttgtttgttgcttgtgttcctaagccgtgaagttcggtcggttttgtataccatgcccgccttgaattattcgtcttctaaattcattgacaaatttcgtcagagatcgacgcctggtgcaatattttgttccgtgtggttgcatccaactagaataattacaacgtactatattagttggtgcatacatatcatttttctttcaaagtacacacatgctatatagtgatgacagtatatgacaccgcggtgtgattgttcagtatgttctgaatttctgttcaggggcttttgtcaggcgtaagccggaataaaataggaacgagcagcggaatcagcaagtgcgtgatggatgatgcatatcatacacagcagcttacatcaggtcaggaatttcctccgtggaatgcatgcgtggcgtggcgcatagacaaatacgccggcttcgtggccaccggtcactgtacgttcgcgtgccgttccgctgttgcatgcagaagcagacgaacccacgcgaaggaaacgaagccttccgtgccggagtgcgagcgtgcgacggcgacggccgcggccggtgtctctccggtagacgatcggttcacatcgcggctcccaaccacgccgatgcaacagcacacgaaatgcgatcgtgatgtcgtgtcgttgttattcaatccatccatcactcgactcaacaacccggaattgcataaaatttccttctcgtatcattatgctttcgtgcgacgtttcttcctcctccacgaacgcatgcttgatcggtgagaacacaaggctaatttgtttttataataaatttcattccggtatttactttacaaccggttgttacatgatgaacatataaccgcaaattacaaaactacagcatgattaaaaaaaatactaaggctatgttcgcatgagctcgatgggaacttttccctccgcacgaaaaacggagcggtccattagcgcatgattaattatgtattagctaatttttaaaaaaaaatagattaatttaattttttaagcaactctcgtatagaaatttttttaaaaaaacacatcgtttaacagtttgaaaaggatgcgcgcagaaaacgaggaagatgggttgggagaagaggttgcaaatacatcctaggctaacttgtttgcaaactctgacctgtttatttctgaaaattcatgtatttgggtaagtgaaccctctggctttatcataagtatatatgttgataaacgatataatcatatcaatagaactagccgaacggtattccctaaaaaatattcttacctatttattacaaagaataatctaaaagtggctttgtgatgttgccccttgcccgtgagccaatgtttacgctacaaggtcacgcacctatctgggtaggaaatttcccctccgttaatctgtactttggaaatgaacatctcaccagccggccattaccaaggacaagattgtcaccatctgtatttccgtgcttaagagtggaactggttgttagggtgttagcgttgcaggcttggctgacttgcagtatgtaagtccaaaccgaccccatgcaactgccaatctcctttcacaagtcaagagcacgcagcaggtgagctaattttgtcttatggcatgatgtatccttgcgaacggttcggcagtggttatctagagctgcagtgagtacatataaattaattctttccagctttttttcatgtcttgctcatgatgagatagtaactctcaaactaaactaaccaaaagggcaaggaatcaggggggaaatagactggtattgtagggttttctttttcagagtaacagtgcatggcatgctgttgcaaaatgtgcaagtgagctgtagtcattaaattcattatcggcaacttggcaagcatggtttcatgcctgccgtgatgccacctgacaaaatataatcaagcaatgttccatacgcacacacctaattgtccaataaatagtgccaataattttgtcctgaatacacatgagacaagctgacgacaaagttatgggccgaattgatgcacggaatatggcctcggataagcaaggagcacttatttacactggaagtatggtcagtaagaaaggtaatagagtcagaagaaacagttcatgcttctctatctctgggccccagattatttgtatactgtgtgtacctgcatatgcacaagaggtgattctctattctatactgcctgaaatgagaaaattcggtgaatttctttattgctgcttcaaacaagaaagcactatttgacaggaagaaccttaagaccgtccataacgaccaggctactaattcagttgcacagtccatcccatactgtcctccacgaggcctttctggatagccgtaagtgctgaatagagttgctgagacacagttctgaacttctggttcccatactccactctgtaatggatagcggatgcatgagaactgattttttttttaatatagagtaacaattatttaatagaacggaggagccctttctcaatgctgcatttgttcgtatttgcagaatttgtatgacatggatcactgataaagaaaaataggagaataatttggtggatacatatgctaagtttttccatttagtgaaactggtatactaacacagtccccatgaaatatgctaccggttactttactctttttttttccttttatgagacgacattgtactctgttgatagtactacaggtgtacattttcactgtatggaatgtctactagcttcacaagctcttatgattaattcaacatctcaaagattccagctagaatatcttcaaaggctgaggttgtgaattactgaagtacttaccttctcccctggtacactatgcaaccaacagaggatagtaccacagaagttccagtacagaaaacttcatcagcgtcaagcaactcatctattgtaataagacactcttcaacctgaaaaaaaatatatcagcgaacaagattgggttcatatctcatattgttgacaccagtttccatgcttgagtttcaataaaattcaggaccctcgagatctcaaaaaatttcaggaccttctgagatctcatcaagatctttcaaaacacatttgaattctgaacgaagtttcaaaaatttcaaacaagtctgaatattttggccaatatggaaagaaaaggtggtgtgcagaatgttccaacttccaagatacaaatattctgaaccatggttacagaggcagtgttagcagaggatgggcattcatgtttaggttacctgaaatccaaggctacgggcgtattcaattatacttcttcttgtgatgccaggaagaactgttcccgttaatagtggagtagaaataatgttgtcctgccagcaaaaaggcaatgctacattgtttagctctcagaacaaaatatagtaatataaaaattatctgacaatgtagcatctgataatttggaggattctgaacttaacacatcattccttgctactcctaacaagtttgaagataagctaatgccatgtctatcaaatgataatttatgtgccataaaattattcagcccgttcaacgaaatccaaaaagtatgctgacaagttacaacatcattgcaagagacatcattgagctatacttggaactgctttacactggtattttcctagatagacttgcaaaggaagtcaatttgaacaaatccagtacatatgtacacataccttcaccatgaatatattacaggacgaaagttcctcaacaaactttttatgcactggatccaagtaaagaacatcagaatgacctctctccttagctctttctttagcataaacggcctgtatacagatgtcaaatgaaaatgaagaacaagaatttgatttcagacataaaaatatacattggcagccaaactcaaattgggagaaccatgcccgtagagtaaagatatggaatagtgtactgtgtcctctatgaggaatcagatgataaagtagagactcagcttgtagaaaagaaaaggtaattactgaagcataatttccgatagtctttatatcaccagttccacctggtgccgcacactgatattcttcctcggttaacaagctgattggagataagccatcctgaatgtaaacaagacagtaatcttgcaactataaccagataaaatgaatatgcaggaaagttaagtcaacgctgccaaccttaaaatagtgcccaactgggcaagcaaagacaacaaatgtgtactctggggctggtgcaacaccgaggatagccccacttccaatcagcagcggtctgatatataaagaacctttgccagtagggggtacctgcaacggagcgcatagctcatgagaaagatgtgcgcaccacggcgcctatcactgttgaagaaacaaaatgtccttacccagcgcttgtttgctaaaattgttagctttatagcttctaggaactgctctacacttggtgcaggcatacataaccggtctgcgcctactctcatccgtaaagcattttcatcaggacgaaatagaaggactgatccatcctcttttctatgtgctcgcagaccttcaagtaaaccctatagaaattttacaagtgcattagagcttttcaaacaaaatggagcagaataaatggacaaggctcatttagtacagctctgctcaacaatcagatagtgattcttcaaggtagaattaagagctcaactaacctgaccataattcaacactccagctgctgggttcagttctattggcccatatggcaccaattcacccttggtgaacaccccttcctcggaacatctcatcacatacataaagtcagtcggcacgggttgaaacccaagagtttcccagttaaagtcgaccagttcagcagttcctgtgctgaagcatgaagctcacaatgaacagataatccaacaaaaacaggcactgcccgtaatgtgatgatgggtcaggcaaaggacaacaagttcagaaactgtttgctacaattgtttagccgttatgattcctctttttccgcccacatgtcaatgggacacccgaatgctaatcggagcgcacctgaatagatggactgtcaaatcctaaatgttccatcaagctaatagtggactggattcaacagcctcttttcgttaacccgcatataagtctcgcctaatcttgtcttgagtagcaggacaagcacagtgtgaatcaatatccttctacaggatttgaaacctttttcctgttctaaccactaagactgtaacagtacagcgaaaaaaaaaaggtaaaccgtgatagaactcagtttgtcatgcttactaatatgctgcggtcaccagagttgaccaccggctcctcctggcgacagcccctcctctgcagacggcgactgcgccgcaaaccgccgccgatcgcttcagaatctgcaggcagcgtcaaccattagcaccgtatcgaacacaccgtgcccttccactcccgctgactgtagcccctagcatcatccaccgatcaatctcgcgctctcgcggaagaggtgctcacggggtgagagggcgcgcgatgacggcgcgtcggggacggcgacgcgccgccgcgtccgggaccgggggcggccacacccacacgcgggaggagctccattcgcggtcagccgcctgccgccgccgccgccgcccttgcgcgccgccgagggtcgaggtggttgggtggtcgcgcgccgaggggaccggagacgagacggcggcgcgcgcgcgtggttggtggctgagggctgagctggtggggaggaggaacgccggcggggcgaccgaccgagccggcggcttgggttgccattggctccgggaggtggagacgcggggcccacccctctctcggggggtgcgtgggcccaggctgtcggtgggagaaatccggccttaaaacatgcggcggcggcgacggcgaccgttgtttctgagtctctgacctggacgtgccgtggaccgcatacgtcgcaggtttccacgatgggataagggctcggggggtcggtggggcccatctgtcagggtaaacttaggctgggctttttatttgttttctaggccgtgtgcgaggagccgaggaggccaggcgactcatcagacttctattcttcaatgggccacctgagtcgagatcatcggtccattacacgataaattaaggaataagttcattttatgttctttatcttgtgctagtttaaaattcgtccctaaatcacaatacatgtaacgtataccttgatttacaaaaccggtaataccgaaatcccaacacagtatagtgcccagtaaccagggtgatactcttttgggccaaaaggcttttggaagattgacttgaaggcttctttactactccagtacgtaggagaagatttactattcatactgaaatgtacggagtactacatttgaagcaaatgatattaaagcttatacgggaaaaaaacacctccttataccgtactccctcccgtttcacaatgtaagtcttacatttacattgtgaaacggaggaagtaccttataaatgacaatacagtcattatatataaattgtaaaacaagagagtagaaatatatatatatatatatatatatatatatatatatatatatatatatatatatatatatatgcaaaatagagcattctaaaacacagaaaaataacaaagataaatacactacagaaaacacacaagaatctgagaagagataaagtttcaaaactaaagttcccatgagagaaaatctatttcctctgttttatattataagacttctagcattgtccacattcatatagaggcaatgctagaaagtctataacctgaaacggaggtagtacataataaaaagaagtatcgtagatataatgttgcactggagcatgagcattcatgtctgcatgcagcaaagctggaaatatagaaggtctgtaggtagatatgtaattcagcttatcttattaagtttgatttgttgacaaatcaggaagtcagtaaccaataagggaagcaactacaaccaataattcacaaaataggactgcaagtatgcaactaccagaactccgacctcttttttcactatcttccagtagctgttaatcactttagatagtgccgtctcactctctttcagctgctaagaaaaggaagagtttgaaactacaatgaagagtttgaaactacaattacgagactacccgaactccaatctaaacctactgtactgactcaaaccggctccacaagcagcagttacagacatcataaacttccaaaactcagaagaaatgcaccggtattatgggacaacctatcagcaactggcaaagagatgcactagtccacatgataagttttgcgctgacaaatcgaagatggataaaaactgaggagaaaaaaatgattgatttattatagcagtgtggttaattaggaatgctggtttcatggtttggtattgcggcatgaaatgaaagtctgaaattagtgtcctatgagcaagggcacaatgagctaggtgaggatggtgcgattaatttcctcatcatttcatcacttctgctactgcacgaaaggatatttcattaattgttctagagaaagaaaggacatttcgggcctgttcactttgatgaaaaaaaaccttaccaaattttagcattgccaaaattttgacaactatgccaaaattttggcagaatttcttatatagttaccaaaatttggcagcaaactaaatatagccacttttttggcaactttaccaaaatttggtaatgttgaaaatgacgtcgaagtgaacagccccttcaccacgtacagatcttgacagaattttactcctagagatctggactgattagtggttttgcgcatagcaaaatgtgtgctacttggacaactggtgcacctccggacaggataatatggtaaacagatcgcttctcttatgtatttggttatctgagtttcttaagagatgaaaatttggaaggcaaagataaaatcccaatttgcacgcacaaaaaaagaaaccctagctacatacaaacataaagctaataaaattagcaattccggtaaaattaacaccataacctccgatt

SEQ ID NO: 21886 - DNA, 662 bp, Oryza sativa
attcccctccctctccttcctagccgccacttagtgccgccgccttcgcgtcgcctttgcgccgtcgcctccgccaccggttgccgtcgccggcaacgcgttcgcgcgcgcgcgccgtcgccatcgccgtggccggtgggccggccttgagccaagccgagccgggtcgccgctgcccgtccgatcaaccccgagggcgatctgggccgtcggtcccgtggaccggcggtggaccacccgcgtggtcccggtccacggtgaaccgttccccccttgagtcgctgccgagtgggcccacttgccggcgcccctttcctccctctcccgagccgctgaccggtgggccccgcatgtcggcgccgcgccttctccccccgtgctgacgtcagccctgggatttattgcgcaataaatttaaggtttttcttttatagtaataaacacagtgaatcttctaaaattcataactaattcatccgagctccgtttaagcccattcaagtctcagtaaatcaagaaaaatgtgtagaatccattaaaaattgttttgttccctgtttcagtagtctttagcctgtttgcaatgtttgtcttgtatgtcgctagattaaggttcctctgacgctccggtgtacttagaaatagtcgccgaggttcctcca

SEQ ID NO: 21887 - DNA, 6326 bp, Oryza sativa
atgatagagacatggttcaatgtatgcctttaccatgtttcaaaaaattcacacaactaactacacatactctatctcctcttcacctatccatacatgcatgcattcagtgactttcaaaataatttttctcataaactacttatctaatatacgatccgattatactgttgtatttgttggaattaaatctttataacagaatatcatatgattatattctgatgaaaaaaaaccatatatttcagtttgtcagcactcaatgtttcatacgcgataacaatatgtttcaacgtgtgtcttcactgtgtttcagaaaaaatatttcagtgactgattttttttcaccgtatatatatctcaatgttttaccggtggtcaactaaaacatttaccgtttgattttttaacaaacaaccgggcacccgattgggagtttcttccttagagaaggaagtgtcttgcgtaactaataggtcccacgtttcggagaagcgcaacacgtggaaccaacagaaaaaaagccacgcttctcgtacggtaccatgcgaactggcgacgcatgtccagctgccacccgcgcgagccacgtctatcatgatttttgttagaccgagcctacgcctatcacgacgagttcaagccgccggcccgcagcttgaagtctaaccgtccccagccgcacgagaagccgtggtgcggccctgccgaaatttttttccggaaccaacgcctacggaaaaggctatacgtactaactttttcttactaaattcttactaacactgatgtgtcatgctatgagtgtacctagaatttttgtaacttccatctacttaaatcaaacggttgagatgattgttagtaaaagtttagtaagaaaaatttagtacgtgtagcattgctattttttaaactgtcatttatactaatggaaatggagggctctgccctttgaaaaaaaaagaaaaaaaaagaaaagtggtccccatctgttagggtaaatttgggcttgtcttcatattttatgtgggccgtcagttaggaagcgaggaggcccattacgcaaagctctctcttatgggcctaagcgattttagaagattggtttgaagtgagcgcaacgcttcttgtccttaccttttgttttccagagtagcagcctcagagtctcaacggcgggctttccatcgccatcagcccatcactcaattcagctcgattgccatttgtcaagctgatcaaagtactacgtaccgtatgagctttttccacgtcggcgaagtatagaaacctcaggacgagttaatactgtagccatcatcagcagtgctattcattttctttattgcgtacagtactatggagcacgagggctgtgacagcgcctggctaatcctcatcctcccagtctctcaaatcctgcgtgttcctcatgggattcggttctgggatatcgcagcctttgccatcgccagtatcacatggcaaagctggaaaataggagtattttaactcggtacgacgctgtcgctgagaagagagacgacgcaccggaccgaaggttcgggaggcgaaaacgtgaggaatcggccggtttttccctgcacgccatcacgagcggcgacacagtgagcccggccggcgagcgtggtggccactgcagctcagctcggcagtgcgtgcggccgctcgtcgccatccgcgcgcgtgtgcagatactgaggaaaacggtgcgatttgcggcctccgtgcctcagttttttaccaaccttttttgtcgaatcttgcagtgaatccacctccaactatgtgagccatggcaacttggcaagagcaaagcaaagccagcacagcagttgcacgtactacctgaatggcctgggttcgccgcgagctgagccgatgggcggttgcgatggagcgggagacgcagcgacgtgccgctcgtgtgcgacagctggcagccgggggcacgactggtgagttgtcctcctcctcacatgcatcatggcccctaccatccggatgagaacgacacatatgatacggctactcactgatcccccgtcagcttgtcactggacaggctgcgccgcttgctatctgcagcctcgttacgccagactactaccagtaccagattgttgtgaactgcggcagtgtaccacaataacgggttcttttttcctcatttctgtttggtgttcatggaaaattaatcaaccaagattgtaagaaattgcgacaagtatctcgagcagcaaagagctaggttgaattctggaaaactacccaggatggtctggaccatagcaaaacattccactcactcattaaaccctcttgcctgcatgtcgctctccatatcccaaataattaagccacaaccagtggtcgttgagtgatgctcattaggccttccgatagatttgtttacgattatctctctgcttaatccctccagttcctctctggatagccaatcatcaggccacaaaatacatcatccaactaaatgatgacattgataattaggctcataaaaaaaataatcagaggctagctggtgcatgcaccggaaacccaaccaaccccccaacaccacaatttcagcttcgcttacgtagtcgatcggcgccgtcccctaggggttggccggttgctactacgtactacggcctacgggagcgacggagttgtggaatttggagaggtgaagagagcgacgggaagagacgtttttttgtggtggaggtgggttggccggtggcgcgagatgtggtgagatacgaccaggttgggagaccgttggcgtgaaatgataggccatgcataccgcgcgcctgcacaagcggacaattgctaaatatgatactcactccattctaaaatataacaattttagctcttaagatttatcctaaaatataacaatttctccacgaaaattttcttttcgaccaatcacaactctccatcattcacttttcccatctacctccactactcaaccaatcacaaccctccaccattcacttttaactactttcttaataaccgtgtccagcggtaaaaatgcttatattttgggacggatggagtaattatttgatagcaaatgaatcaattataactgttataagattttaaaattgatttcaaataattcctaaaaatataaaaattcatatataaaaagcttttgcaaaaatatatgggcttgatcggtagtgttgtagccgatccacgctaatcaggtgatttgccgcggttagggtcatatgctttgattttttacagagaagggtattttttacccggcttctatatccaaccggatatatgtatttttttttaaaaaaaaaatagaaacttacctatcaaacatggaattagcactcaaataacccaatctaaaattcactcctataaagatttgaactcagaactttcggatgctactcaggtcactgtaaccattaggctatgtgtcctttcactagtcatatgttctgatggttgttgtagcaaagacctaattccttagtcctaaaatattgcaagtttagaaatataatcattcatcagttcattcctgtcacaccccgaactagtaccgaccggaactagcccgtgacgctccaaattaacctgttaatcgataccagtcccaggaaacagtgctggtatcacagggagacagaatatcacagcaacagaagtctctttattatagagtagaagtacagtcatgttgggctgcggacagaccccgagctcacaactgcattacaaaaggaaagcggaagccaggacttggaccaatcatcacaggcgcgacttgggatctaggccgaaaccctaaaactcatcgtagccagcttgctcctggaagaactcctcatcagcaggatccgcttcatcttcttcagcaactgggggggaagttatttatatagagcaagggtgagtacgggagtactcagcaagccaggggaaataaggtgtttattgcaggcttcaagggaaggctgttgttttagcaattgattttatttgaacccttttctgaaaacaactaagtgagtgcttctcaaacgacacggatgaaacagtgcgtctcgtccggtcggagtatgtgcaatgtatcagtctttagaattgaaacaaggttggcacccggccaacagctttttcaaccggccacccgggccaacaactttccaaacggccacccgggccaacaacttttcaaacggccacccgggccaacaacttttcaaatggccacccgggcctagctgatcccatcagctgcatatttttcaaacaccgaaccccttttcacacagcaatttcacaagcagtagtcaaaccaaactacgctaggaatcacctcacatccgcccatgaccgtgggcacggctgttcgaacagtttgttaacctctgcagagggggtacactttacccacatgacattactaacccggatcatccagcccgtggggatcagccacgtcgggagacctccaagctttcatgacaaggcatttcgaaagccgacacagatttaccatatgccgacgagaggggtcccagaccaacaacaggttaggtcccagaccatactgtgccaggaagcccaggggtcctccccgacaccaccccggcgaatccacatgtctctcggcatcaaggctcccctgataagctagttactcagccaggggtgtcccattccacccatgtggtcgtacttgtcttatgtttggataaaattccaatgaaacggtccttaggtgcaagagtgggaaaccgtacacctggtacgttccccggtccgcggttttggaaattcatttagttcacaagcaccgacccaggtgtcgggtttttccaagtcttttgtaaaactccagttttacccaagttgttactcagattttaagtttgaaggcgaccgtcgattctcgcacagagtgcacgattatcgaagcgcaactgggtggttacaaggggacatagtatggcaattaacaatggaaggttcaaatgcaacaagtctagtaggtccgccaatctgccttgcagatgggacaaaagattaagtgcgatcctatcaatgcataatattttgcaagcaacataattaaatttcaaatataggctcaagatgttcaagggtggcttgccttgctcgagatctggagcttgatcctcgaaatcctcgcactgcgggtcttcgggctctgaaactaaacgcgaaacggaacaactcaacaaacgacgaaaataaagccctattaatgacctctaagcgtgccattagatagatctcgagatttagggaattttggaagttgaacggagtcaaacggatttacggttgagaagatattgaatttctacgattattgaatttttgatctaaaggaaaaggacttaattaaattctttttggaaaagaaaaagaaaagaaggaagggagggaaaatagacgtttctcggacggctaaggcgcggcccaagaggaatggagcggtccggccgagctaaatgggccggccggcccaaggcggcccaaactcgcgcgcgcgcgggagggaggagagagagagccggtggaccgggttcaccacgcgcggtcccgggtgggacccgcttgtcagcggcttggctcaccgtgcggagggagcatgcggcgcacgcgcgcgggcgggggagggacgcggtgcacgcgcgcggtttgcggtggacgcgggtgcggcgggcccacgcgcagcctctcggctcgcggtggaacgcgcgcacggggaggggctgaccggggtcggttcgacccggtctggctgagctgtcgccgacgtggcgcctacgtggctgccacgcgggccggcgggaggtagacggcgacccggccgcgaatggacggcgggcggcggcggcgagcggcggagcgaaccacggcgatacgggcaacagcgagcacaccgggcggttgcacgtgacaaggggaggcgagccaacggctcggattcaccggagtttgctcgacggcagcgggttgcggcggcggcaaccggtggcgggagaagagggaaacggcgacgaggtcacgagaggtcgattcccggcggtgagagcatctacgcggcttcgggaactcgacgctagcgtcggattgggcggaattacgccgagcgaggccggcgacgagcgggtgctaccgagctcgggcggcgacggcggcgagcacacggcgagcgacggcaacggttggggcggcgccggctaactacggggagtctactcaagctacta

SEQ ID NO: 21888 - DNA, 9725 bp, Oryza sativa
gggattcgatttggaaggaatggcattcggaaatgaactcgacgatagatcggagatttagatcttgagatggcacggacactagacaacaatcaaagaaaccaatttcgcaattagggtttttaagagataattttcccgctaggcgccacgacggaacgggcgctacaattccttaatcagaaaacaacactgccgcatatagttacttggtttactcgttgttaaaatgatgaaaggaggaggaaaacaaatgaagggaagacagaagaggagaaaaagaaagtcaccagaattctctcttccgtcagtctcagcgcggtcgatcgtccggagatgcgacggcgttttcacgatgtaacctgcctaatttctcgagaaccttcgctcaatcattcaccgggactacgtcgatgagtcgatcgactctgcacgcctatctcgggccttacagattgcaccgtgtgcatacgatcgcctgtacatatagtgggggcctgattaggatgctggaggagatatatgcactgcagttttgaacagttgcacagggccttcaaatttgagaagactcttcagcaaatcaagcggttctaccgtgcaccgtgctcttttgacagggagctccaggcgatattttctttttcagaagtactaagatctattatactgactctagtacaaagtgttcgtactacactagtactactgccaattgtcttgcacaaatggtccattgcagctcactctgccatgctacgtacggaatagtaacatgttattcacgcacttttcacatgtatggcacgtacaatgtgtcaaatttcaggtacagataacttactgagaaatttgtatatacctgttatatgaactcatctatatcacatttgttaggaaaccctcataatcttagtcaccttttttttttacaaaacctactatacaccttcccaacgtgagcgccgcaaacatcaacaccatcgctgccaccgcctccttacccctagtgtgtcgccacacggtctcacctgctggttggaagacaccaatggcattggcaaggcccctcggctggtttcctccctatctccactctctgactctgccctcccctgccctatgttccttctcaagccggcggcaataaggtgcccctgctccaccatcttccatgtctctagtggctatctgtcgttggatccgtcaccccccgattgccgcctcctaaccagtgggtttgttttgcccctgtcagtcatcctccgtcacacacggttatctctctaagctttgggaaaacccttcctcttcctcctcctcctaccccctcccatcccaaaaataacctagaaccctaactgatggggggacgttgctgccttgctagagctagaggagaagaaagccgacacaaatcttggcatggaccctatggtctgaaattcgacgaaaatctttccaaatttctgccatatgaaggttagcgattccgtaaaaattatgaatgagcctgtacaatttacctaaatggatggtccggatttggaacttatctacccttaaggatggtcaaaattctcatggttacacgaagaatgtcaaatacactcacacatctcgctaaggaaaaacagaacagccaatcagagcataaatttcaaacttttcttgaaaactcaagcaatttttcactgatattggacaattttttttatcaaccataatcactagtgtcacaaacaccttgaaattcaaatacattcaaaacttttgtccaaaagcacatccgaccgggggacctcaagatagaaccgaaatttcaaattttcaaccgaaatttatgaactagatgagagtgatgcgtaagggggaccatcagggagcaaacaaccgtgaccgaattgcataggagttatggctgatcacttgagaaattaaccatccattcccggtttccctccaatattgcacccatccatcatccaccagggatgataccgttgccgttgctctaaaaaacgttaaaacagcggcaggcaacacgacagcacatcgcatcgtacgtacgtcgttcgtcccgctctcctccgtcgtcctccctgcccaccgtcccccacacccactccccgccgtcacgtccttccagaaccacctccacgactcttccaatcccccgctataagacgcttctccactcaccactgcaaccctcacccagccagctcgagcgagcgaagccagcagcagaagcagtagagagaaagtagagagatggaggggaaggaggaggatgtccggctgggagccaacaagttctcggagaggcagccgatcggcacggcggcgcagggctccgacgacaaggactacaaggagccgccgccggcgccgctgttcgagccaggggagctcaagtcgtggtccttctaccgcgcagggatcgccgagttcatggccaccttcctcttcctttacatcaccgtcctcaccgtcatgggggtcaacaactccacctccaagtgcgccaccgtcggcatccagggcatcgcctggtccttcggcggcatgatcttcgccctcgtctactgcaccgccggcatctccggcggccacatcaacccggccgtcaccttcggcctcttcctcgccaggaagctgtccctcaccagggccctcttctacatggtgatgcagtgcctcggcgccatctgtggcgccggcgtcgtcaagggcttccagaagggcctgtacgagaccaccggcggcggcgccaacgtcgtcgcgcccggctacaccaagggcgacggcctcggcgccgagatcgtcggcaccttcatcctcgtctacaccgtcttctccgccaccgacgccaagaggaacgccagggactcccacgttccggttagtataccaactactactgcagtaaagattcagagatggaagtatttttactgttttctgagtgattgatttttgttttaatttgcgcgatcttccacagatccttgccccactgccaatcgggtttgcggtgttcttggttcacctggccaccatccccatcaccggcaccggcatcaacccagcgaggagccttggcgctgccatcatctacaacagggaccatgcctgggatgaccatgtgagtttaaattcactgaaaccaacccctttctccctccttacatgtagaaatatatatatatatatatatatatatatatatatatatatatatatatatatatttgacagttcgatttgcatcatctgttaatgcgcagtaacttaaaattgatgcacaaaggtattctaggaatatataggatagctggttgtagtaaaagaagaaccttgtatctgataactgatgccatatccccatgttgaaattatatgtgatattacttaactgctagcaataattcagtagctctgtagctgtagctgacttctataggtgcaagcatggtgaggtagcatttgttgcttatttaattatagataggcttagcttaacaccctcatctgaagggaaatgttgagggactagtttcagtgtagcaggcaactgctaccatctctgacaatgactcaattggctattactgtatgataagtctacatcattagtgaggacatgattgagcaatggcacttaattacaagcactaactcccgctgcaatttgctggttctgcagtggatcttctgggttggccccttcattggcgctgcccttgctgccatctaccaccaggtggtcatcagggcaattccattcaagagcaggtcgtaacctgcatcagctattatcactgtcaagatgccaatccagagcaagctgtttctgatgggcgcggctgtttcccgctgcctgctttgttagtaattattgtggagtcgacgttcctcttcaagtttgttgtactactgtttttatctgaacacagacttgtaatttcagtactcagttgtgtatccctcttttactatgtgcaaattaagctatcctcctcctattggagttcggttcagctgccatctttctgcaattgccaacacggctatccacaaaaccttaacatcaaaagggataaggcatagtgggtgtcgagaagaataatcattgggttccaaattgagacgaaacctctctttctgagctatctgtcacacttgcatcatcgagatcgtgatgctattcagcctactccaatctgccagcacacctgggctgtggttggcagcttgtggatggagtaacatctcggcgaattgaggttggtggtgacggccgagaggacaatgatgtgagtcattgcccgttggcaattggggttggggctgtgtgtgtgggcgctctggtcctaaacgcaacactacaaaaacttacaccgtggcacatgccgtgctgattgtttggttcttgcaaacagcctagctgcggaagatctctccccctttttaccttcccctttgtttacattttggttcatgtttgcggccactgcacggtggcttggtacgatgaacccccccgtgtgcccacagacagaccgcactgatttggccggaacctgaagaggaggtattgcgttgtttgcaaggtttcgctggctggacctctgtcttctggggaccgctccaatgccagcaaacggctcagtgaagaggaccagatcaccgatccaacataaattgcaagagataccgcctcgtctctgtgcatgtgggcttcacggatcatcaattcaccatgacctgatgatgataagcagctgctacattgttagctgcacggttcaagcttgtaagaactaagcatacaagtctcagtaacaactgcaagaaagtctacacattaattaggtaatggttatagtcttatagatagctcacggtgcagatctgaagaacatgtacatgcgggagaagctagtttaaccaaggatctgattctttgtataaatttccagagtaactggtacagtgaataagttggctcattggctgagttctgctacaaaatactttcagtatgcagtttgacttgcagcagtagtttcaacctcaggtgagatattgtgtgagagaggatactgaatggctggactgtttctcctgtgcaaaatcttggctcttagttgaggttcctctgtacaatggcatcaggacgccaagaagaaaatagaaaattaagttacatataaaggcaagaggagtatacatgcggcgaactactacttcggaggtccttcaatctgtagggtaccaatatacagtcttgtcatttgacagatgttagtacgccaattgtagtatgcttccgggagttctgcctaacaggaatggacgatatctgctatttacattgaacaaaattagtaagagctattggtcaagacaaacttcagtgtcctgaaaataaatataacgactgaagcaaaaggttcaaatgtggattctgaactctcaaagtgcctgattcacctgagattctataagctgctaacaggtgaagtgcttcagaactacaccgaacaaagattatacacagcaaggcagcaagataatagacagcaaggcagcaagccccatgccagcaattaggaaaaaaatgtcactagccagtagtgctaccatctgagctgggatcagagtttttcttttcttttcttttggccacgttgagtttacaagctcaggaaacaacattgtgagccatgttgctttgacgtttaaagggagtgaatctagcaactagaatgccaataaaccagttcttaatctaatagtaagtgactaaagctgcaaatgatgtaggacagtcttgacttaacgtataatagaaagttatgaattgtgacaagtgaccatgcatacctttgccaacttgaattgtgttgatgacaacaaagattccatccattgccaactttagcttctacagacattagtgattttcttttcctcatactatgatacacttcaagccatcggatggctaaaaagcagccaaaccaccagttacctttcgaagctccaaaaaatgccatctgaatactgattcttgatattagttaccatgcttgagtccaaggtgtggagatccagacgtcaagtctaatgaaggatttagtttcacatgatccacaaaggcatgatgtgtgaaacgttcagatggtgacagcttatcacgcaaatcaaaaacatttccaagtctctttccaaactgagggcttagaatgtcagcttcagataccaccctctcctgaagcccctgagagacttgatgcactcgaataaattgcccaagatcaggatctgtaggccggctggcaaagagatcatccgggcttcttgatgggattgcaaatccctcgttgctgtaggttgattgcttcagatggttaaaaggaatagcaccattaccaccagacagaggcgtggaggtgcctgaagtagttctggggcttgaaataggagaaggtgacattctgccattggaatgttgtggggaccttgattttagcaaaggacttccacatggagaaactggacaagatatattgcttcgtatacggatatcactgtaaagttatttaaggattagaggctgcacatatatagggaagttcaccgcaaatcattttccaggtaagactgagtttcactgaagagaacacaagttactaccatatggctagtggtgagatactcattcatactagtgctaggatactcattcaacttagattagccatttttttaacagataatactttgtacttgctttattgcacacattgtttggacttaggactaatactattaataaacacaaattgggaaatgatgtacctgtgttttgaagaaaattttgcacctcttctctggtaaattgtctgaccctccaatcccaatgaggaaatatttcttgtatgcgcagccatctgaaaactcaaataataccaagcaaagtgaacaggccatgaattatccatgtaaccatgttatgtcagttatggcagtattcaagtggtaccttggcgctcgatctacaagatataacagccaaatgttccaatggttcagaaagaacagatttctctagtgatactgctttttgaacaaatgggtgctgcaaaagctccattgcagtgggacgttgagaaggatcacgttgcaggcactttctgatgaagtccttgcctggctctgaaaggtgatctggtattggtggaagttccttgctatttccgatcttgaacattgcagcaatctgcaggaaagaaaagaggggaaatgttcatgccaaagttgcttcggtgaaacttccaagtctcattacgagtcaaaagaaggaagtctttacatttcaagcacctttcataaaattgcatgcaagtaaatgatctttcaacattctacatcagacagtgataaattcttaaagaattcatgaaaagaacatttccatatcccattcactcatggcgaaaatcaccataattaggttatctatattatagaacaaataaactgtgcctcagaagtataatactaaccccttcatactggctccatggcggtttcgatgtagccatctccaggacagtgcatcccaaactccatatgtcaacagctaggttgcacccatttgagttttttataacctgcgtatgtgttgcatagtatgtgatgtacagaaatggcaataagatatgcatgaaacaaaaaattaacaagtaaagattttcagtgatacctctggagccatccaatatggactacccttaaaggagaaaggacactgctgcccattgatctgcataaagacacatttaatacgtattaatgagtaaaatacttccacattatacaaaaggcattttgtaacttatcaggagtgagggggctagcaaggtttcaagcacccttaacagcagtactcaatcaatgcattaaccagtgacaggagctacaagatcaagttgatatagatactgctatatattttttgaagagctcgatataattcaaacagttgtgactatgatatgaggcatagatgcagaaatggaatgacacggaaaataaagttcaattgacaaaagtcattttcaaaaaattaaagtgggcagaaaaacttacatgttttgccattccaaaatctgcaagcttaacacgaccactaggatctactagtatatttgcacctttaatatccctgcaaaattgtgatgaacaggacttataattacaccataattccaccgatacaaacaaaccaaagaaaagagagaaaaccaaagaaattgctacctatggactgtattcttcgcatgcaaataagccaaccctgaaagtatctgctgtgtgtagctgcgtattgcttgttcaccaagctgtccatactcttgtagaagtttatggatagatccaccagatacatactccaagtatatataaagcttatcatcaacctgtattggggcacaaataataagtgaagccaaaaaagaaaatcaaaagtggtacataaataactcattaatgaaatcctagatgctatcatgcaacttcttgttacccttggtaaagggaggaaaaaaataattatataatgaccaaacaggaaacaataattgagttaatggttccaagcaaaggaaaacctagcctatgtaaacagactgaaggcagcatttataccgtttctgatccatagtattgtacgatatttggatgctgtaggcggctcaatagtgatatttcctgagaaacaaaaaaagaaaaacagggaatcatatattgaacaggaaaagacataatctgaacttcttttgcaactgtaggttaaagcacaatcaacagactatacctgccccaactgctttgcactttcctttgatttaggatcatccaagaatagggtaacttctttcatcgcacacatttcaccactatcactgatataaatggtaaaaccacattaggaggacaaatcattgtggggacaccgaagttacatggccccaatcccctcccccagaatagagaacagtaagatagccaaaatagagctatattccgagttacatggtgtcttagctaagatcttacaaaaattccaagatgcttagtatattcatagtacgtcatatgattttttaaaaaaaaatgaaatttcaaagttaggaatattcttacctgttaaagccaacatatacatgaccaaatgttccacggccaattagcttccccttcttccatcgtgacccaggacttggtggattctcagttctaccagggctgcgaggtactgaaataggactagttggagtggagttatttggatgaaatgaactgtgagagatgctcagtggtggtaggggaagtttgtgagtttgcttcttcttcccatcatcatgacggtttgttggagattcaggggccatccctccagaccttggatgcaatggtgaaacacttccactatgcaccctcgaactagggccaggacttgtcattcttggacttggaattggtgaacactctgggctacttctgctgggctgccaaaagagctgggctagcatatcaccacccacagaattatgcccagatgtttgccctgaacctggactggaacattgaccagatccaacaaaagttacatctgtgtgaggtttcactgcccaaaaggccgaagt

SEQ ID NO: 21889 - DNA, 9965 bp, Oryza sativa
atcatttccaacaggactctgaagctgagaatccccatgatcatcactatcagaacagttactagagggagaagcaaccactatttctgaaacaacctcactatttccatgcctcctcggaggccggttgggtttagggagtggtagaagcagtggtggcttgccacgtttttccaatatgggctttgattcagtgatatcagaaacagtccgagtcactggaggacgtactccaggaatagggaggggatgggcatgtggtctatcagctgaaaagctttggcagcgagaaacttcttttgacggtgaagtaggacgtgacactgtggtagatcggcagcttttttcaacagatgaatcattgccacgtctacaactccgtttcgacttcgtgcttcccttttgatcatttggacttatcaaccgatgaaatgtatcgatgaggttttcttttgtggttttcttagcatcttttgagaaagacttcccccaccatggtggcatattgaatatgaaataatttgtggtatgtctaattggctaggtactaatcacggtgttattcaagctgataattaccatattctgccaatcagattaacatgtgtagcgcacgattttcttaacaacccatatagaacccccagcttccgcaatgcactggcaatggagctagaagcagacaaattgatgaccacaaggtggtgtcaggcaccttctttacccccaaaaggctgaaatacatatggtaacagacattttagcatttactattaatgaaaaaattgcaggataaaaacaatgggttattccatttatgtttttcctaggtaattagtgtgattcaacaccagaaacagactgcccatagcattatgagtgttttatgattattctttcaactcaatctttaatcagtaaaagcaaccattgcaaactcaatgcaaaatgaactacaattataagaagaatcttttttattgcttaaccacaccaatcgcttatttaagccagtcataaattagataaagaaattatctccactgccatcaatcatccatgggagtgcaatatatcaagtatgttttggttgaatggcataacactgtgctagaaataaataatgtttcaaacttcactcaaggagttgtcaaggtcacagttttcagtaaaacacaacggcataatcggtggtgcctcctagaacttcaaatgtatcaccaatagtgatagcctgcgtgcatggttcagtcgctcattcacatgggaaggatcacatgcatattgtacaaggcaacatatacacctaaacctaaagtaggttctgttttttttttcttgaatacacaagagagttgcatatcatttcattaagagagaagaggaaacacgggatgggagctgaaacgcccccactcaccacaaacacatacaacgcttacatttaaatgacaccttacccaaccggggttagcgacctaagaaactcactgagtttagaggttccagccatgtaccaaagaccacactcatttgccaccgattggatgatagccaaagtaggttctgtttggaattacacattacattctataaagccccccagtatactgcataacctaaagtttcgtggcgatacatacaaaatacaccactcgtgatagagcaccaggtttctgggtgtaaggtgaacttttgcagctgaattacaatcaacgaaacccagtgttctgtttggccatgtgtactattgagctttgatgctgagagaattccatgcttacctgaaccccagttgattgcactacagtctaacgaactaacagcgacttaaggcctgatagttaacatccgcagaagaatcggcacccgtccacaagtcaaaccacagcagtcgcaatcgtaaactcccagcaattccatcgcacgagagctaagtccaagctaactctagtaccctcgagacgaacctacataagcgcagccagttaccacctctcgggagcaatcgattttgccctccaaccgcgcgctcagatctcagcacaaatccacacgcctcagatccacggcgagcaccccctttcacccacgaaatttaccatcccagcttcccagcccagcgcgagcagcagcgtccacaaccagaacccaccccccaaaaaacgaagcgagcagagcggaatggcaggaggaggaaggaggcgagcataccttaccggcgcgccaccacggcgaggcgagctcgccggcgggggggagatccgacaggcggagggaaagccggaggggaatctggaggcggtggtggtggtgatggtgcgggcaaaaggagaggaggagctcgcggaaagtgggggaatcggaaaggggaggggggagaggagggtagcaacggaaaaaggcccaggccgacgaggtgaggagaggaggaggcggttttgttcgaggagagtggtgttggcttgtgctgctcgctcggagaggagaaaggagggggaggcgacggtggaggtggaggtggaggtgggatcgggtgcggcacgggattccctgtggccggtctcccgccgtccgctaggacgatgtggtggggcgcagaagatcccgctggcgctttggggatttattctcctgtcgcctttaaaatttgtttttcgaaagctttttgcggatttatttcggcgcatcggggtagcaacggttctttttttccccctgtgttctgtgttcccaggcgtgctaccgcagtaccgagtacgcttcgagcctcgatatggaggggatgtatataaggcgccgttgctacggactacggtagcttcatcgagacggtccgtttctggatctaatggttccttgacctcgtctattttgatcgtatagaatttgatattttttttatacagagggaatacacatgtacggcgatcgctaatcggcgcgcgcgccggcggcgcgtgtttcaggcccatggggcccagcaccgggcgcgcgcccctccttcgacgttttttttccgtttttatgtagcgatttttttcgttttcttttccacttttttctgattatttttttaatctttagcatgatttgagtttgaaagttttaaaattttgagttgaaaatttttaaatctgaacttgaaagttttcaaatctcgatttgaatttttaaaaaattttcaaatctggacttgaaagtttttaaatctagacttgaaagtttttgaatctcgagttgaaagttttcaaatctgaaattgaaagttttcaaattttttaaatctggacttgaaagtttttgaatctcgagttgaaagttttcaaatctgaaattgaaagttttcaaatctcgagttgaaagttttcgaatctgagttgaaagttttcaaaatttgactttaaagtttaaaactaaaatcgaaaattttcaaatctaacttaaaaaaatttcaatctgttagtaaaaaattctcccaaaaaatctccaaaatcttttctaattactatcattagtgttaagtgtattaactgatagaggtagttaagtatactaactagaagtgttaatagagtaggttaataggcgaggagtgctcgctagccgcgcgcacgcgttagctaggaggcccccacatgtacaatgccatcagcatgcctatcgttactattatttgtgtatgagaaatgtttctaatatttttgtgttttaatacctttgttctaaatagacctttcacaattgtacgacggcaaacattttagattaactttttaacaaaatgtcaaagagcaattatgatgaactcctctataaatttttttgttggatctataaaatctaaaaaaaataaaaagagttgaatttaattggtgattcggtgtacaattaaaccgagtatagacgaaactagtagttggattatggatagtcatgcaaaagagtataactgattcaccggttttaaaatatcaacacgtggtagcataaccatgtaaggttatagctacatggtgcaataaaattggttcattgatttacggtgtgtttagttcacgctaaaattggaagtttggttgaaattggaacgatgtgacggaaaagttaaaagtttgtgtgtgtaggaaagttttgatgcgatggaaaaattgatagtttgaagaaaaagtttggaactaaactcagccttagagaacctaagtcagcaaagttcaagtcgccaagtgatggatcaaaataatcataacatctacaaaacttgcgccatggtatttgatgttctactccattgattatttaatgatggagatcacaaaacttacgcttatcttcttctcacttagtaactccagcgtagagcactagagccttagatgatcacgttgtgttttaggcaatcgtgttacactacaccatctatctctcacacatctacattctatcattgtagcgttgccatatacttagggtttgttcgttttagggaaaaaaacagaggatttgaattcctagggattaattcatgtgagtgtcgttcggtttatagcattaaagtataggaaaaccaaagaaaaatttacttttctacaagttgtatagaggaaacatggaaatttttccatacactcaaacttcttataaaaattcctatggattgatgtgcgcaaacatttatattctttcacttttcatgttccttcaaaccgaataagtcctcagcattgagaatgtaatattactaatggagaacttttgaagtactacactttcactcgctacacaaaagaaaagggatgtcatttcatcattcatcgatttaaaaaagacgcgaatattagagaatgatataatatcaaataattagaagggatgaggtttttaacccagatcatctagccaccatcttttggagctagttggaaaacactagacgtttcctccatcgttcgtcgatctcgccgtgatattttggctaaagataatggtttcattcaatacactaattaactactcctgtgtatttgcatgtactccgcgcgacagcaacgtcaggcgtacacatccaaatacccaatgaaagatggggaacggcactacggcagagaaggatatttttaaggtacccttagagtaatactggccgtccactcttatcgatctaatggacctgatcttcttctactgtcagtagtagtatgtgcagtagaaaccacgtggagggcaaaaccgtaaagaaaaaaacacagtaatattacgctttatcggtgattagatggaatgggctcgaaatgtgcggtgagaaggcggcggcggcgaaggcaggatgtgatgagatcggcatctatgtcgccgtatggtggccgtcgctcttccggccttcctctactgccatatacagatttaattttgatgcttgcactcgctggttcagcgcattgtggctgtgtcgcgcaagcccagccagacgaggtcagaagctgcccggccaggagccgttttaatccgcacaagctaactcgattgtaattagattcacatgccgttaatgaagacttaatcttgattcatgagtgatggagttctattacggagtaccagttaattcgtccgattttgctagatatttgtcatcaaatttctccccctaatatttgtcagatgtaattacagtacaatcgtagtgtaattacactgtaacttgcatgtaattacactgtaactataatgtaacttgtatgtaactttcaagaatctctcggtaacatgttatttcagtaaaatagaggtcgtgggaacaaattctttcatatatgtgtgtgatgtgatttttttcttcctccatagaacaaatcttgtaatagatctaacgattcaaaattacgtgaaacttacatataagttacactgtagttacatacaagttacagtgtaattacatacaagttacattgtaattacactacgattatactataattacatctgttatatttttagtagaaaatttgtcgacaaatgtataggtggtcccaattcgtctccgcgatggccaaaaattatcagacggcagctggaccagtcttcgatgcggcagtaattcgccggcagagcacacacaagaaatgtggccagcataatcggcgatgccgacgccgtccaacgggtcgcacaaatgggaggttgacccttccgggtttctcggcggctacaccggcgatataactttctctaatagataaatggtcagaaatacccttacaatttacaggataaagtaaaaattatcgtataaatcaacggtcagttttgatttatactaccctactgccatcgctagtaaaaggtactgtaaaatgacccgcagagaaagagctgtcaagcgacatcgccatcagcagatttcatgatcagccagtttattcattgaaacttggcaagttggtattgcaggtagctcaccagtgaagacggtgcagacagcagcagcattgaaacgccgattgcaaaaatgattagatcgacgaaatgccaaatgcatcgaagaaagtcctgagcgatctttagggtgtgtttaacgtcaaaattaaaagttgggttgaaattgaaacgatgcgacggaaaagttaaaagtttgtgtgtaggaaagttttgatgtgatggaaaagttgaaagtttagagaaaaaatttagagtgtttacatggaaagcgactgctgtactgctcatgttcatcgacatggtcgatcgatcgagacttccatcgagagagaggaagctagaaccgtgaacacccactacatgcatgcaatgaagtgtttgacgagtagctatcaacaattaaaatgcccaaaattaagagagattaaccaattgatcgacatgtttcagctctctgaacaagcaaccatccaacaacaattggcggcacattaacacaaaccgcccagacgaatttggacttgccagtttgggttacacacaggagattaattattaattattgctccttaattttggtggctgcacaaccaaaatcatagtactacatgatctaagaatcttaggtttggagttttctttagacatttcctctatcgactggtaatgaactgtaaaagcaagtgatttaaatgacctcaccaaccatacaaaccctttagtaattactatcttggactctcatctatctacatatttttttgccatttccaattgacttcgtccaacgcccgggatcttctaagcgcaggccgcggtggcgcgcgccgcggcggcgtactccccggcgccgcggagctcgtcgacgatcggggcgaggtcgcgcgggcgcacctccatccggagcccgtgcttcatgaacagcgtgagcgacatcttctgctcgacgcggtggcccggcgccacggccaggcggtggcggaggagcacgctgccggcgatgttcctcatctgcaggtacgcgaggtccttcccgaggcaaatgcgtggcccggcgttgaacgccacgaacctgaacgagtcgtgcggctcgaacttcgtgccgtcggccgacagccaccgctccggccggaactccaggcagtcgtcgccccacaccgtcttcatgcgccccgcggagtagatggagtacgtgaccgacgaccccgccggcacgaacgtgccgtcggggaggacgtcgtcggcgacgacgtgcttggagtcctccggcacggaggggtacaggcggagggtctccgagagcgccgctttgaggtagacgagctggtcgagctcctcgaagttgagcggcgcggcgagccacaatgccgggtcgtcggcgccgcgcgacgcggccaggacggtgcagagctcgcggacgatcttgcgctcgacggcggggtgggtggagaccagccagaagaaccaggagagcgccaccgaggaggtgtcgcggccggcgaggatgaagttgagcgccacgtgctgcagcgactcgtcggagtaggtccccttccgcatgaagcgcgacaggaggtcgtcgtgcggcgtggccgacgacgcgtcgcccttgccgttgccggcggcgagctcgagcttgcgcgccttgatgaccgccgagaggtagcggtcgacgtgctggacgctgcgcgcaagcgtggtctccatgccgagccccatccacttcttgaaccgccacacgcactccgggaagatgaagcggttgagagtggcctcggtggcgcggtcgaacgccgaggcgaagtcgttctccggcaggccgcgggcgagcgtctcggggtccttgccgaacgcgaggccgcagatgttgtcgaaggtgaggcggaggaggaggtcctggaggtcgacggtggcgccgccgccaccgccaccggccgcggcggcgtcggacaggatgggcagcaggcggctgtggatggaccgcgacacccaccgcgacatggcggtgcgcagcgtgcgcgtggtgaactccagcgccgccgtcttccgctgcgccacccacgtctccccgtcggagttgaagatgccgtcgccgaggaggtccccgaacacgccgtgccagaaggggcccttggggtagttgtcgaaccgggacttgaggacgtgctccaggttcctcgggtcgcacgtcaccgtgaccagcccgccgcggcgcgccagcccgggcacggcgaagatgcacgtctggtaggtgccccgcgtgcggcggaggttggcggcgatccactcgtgcatgtcctccgcgtgccgcaccagccccggcaggctccccaccaccggccacaccctcggcccgctcagcccgcgcgacatcctccagaaccacgccatgtacgcggccacggccgccacgaccaccgcccacgtccccgcctccatcaccaccaccaccaccaagctaggctatggcgatcgatctataataagtgagctcacatgcatgggccggggcaagcagcgatagatagctagcagcaaggacgagagagtgtgtgtgtgtgtgactgtgtgagtcgccagtggccagctagcgcccctgacctgagatcgagagagagaagcgagacgatatataggagtagaacctgcccgagaagcaatgcgatggatggcaattaatatacagaagggaaaaatatatatatacagagttgccaggatgccactctactccagctgcaagtgcatgctcggtacagtatatatcgagcgtccgggcggaccataaatcgccggcaggggccgttgggtggccgtcgatcgatcgaaggcgcggcgcggccagtgcgcgcgcgtcgcttgcctgcctgccggtcgctgcggctctcacctacgccattcaatgcatcggcgggcggcacaccgaattgaagccgtgatttcaatggcgcgcgtacggccgccggttgtttgctagtagctcgacgcattttaaccgcgccaagttttaaaaggatcagccagtagatcgacctgttttacgacgctttccactgcgatttggtgatagtaatatgctctgaggtgccagtatcatgcagatgacggcagggccggatgcgagtagatggccggggggagtgaaactggccaactgaccaacggtttctcggactgtctgggctagttttgggactttgggggtgtgaggtggttttgacgaaggcaaaggatagggatatcatggtcgcctttggagcgtcagcaagcggaggcgtgtgatcgtgtcaagcaccagctagcacccgggttgacgatggtttggaggggttgggtcaccgaacgaccaacgtcccaacctttcacaaaagcgtatagctcccagatcgtacagaatgtcgcgtagtttgtgtgattgtgtcatttctagtactaataaactactccttccgtccctaaatataaaattttgatgtaccacatctaatcaaaatcccttatatttgtttggcaacgtgagagaa

SEQ ID NO: 21890 - DNA, 2861 bp, Oryza sativa
ttatagtatggatgaacatttgttgaagtccaggaatttattttgattgaaatttttggattcttcttttgcaggctgttatcaactatgggccctcatggtatgtaacctatctctcgccatgtgtcacttcatagtttacgatccagcagatgtgaagattatatattacgaagtgcaaataacggttcatcaatctctggattatttggtaacttcatactagtattcatatttgctgatgtgactatttgagttcaattgagtaatcagcagctgttaggagttagcggttgtcatttgagtatgtatgcacaagtatgagtatttaaacctgtaatattgattatcctgatggactattggacatttagctgcctaaggagttaggactgactagatttatgttatgcattggtttgacctcaatatgaccacctaacagctatagaaaatcggtcatcatttgctgtatattaacatgtgtaaagtcaaatttgtttagcccaggatttttttcctagcaatcctgtattggttaacaacatataggatactgtatctctttaactctgtgaattactcattccctccgtttatgcaggtgccgtgtttgcagtcagattcttccacccttctgcaggttcagcaatgaattcaagaatcttaccttcatttatgctgatattgacgaatgcccagaaacaacacaaaacatccgatacaccccaaccttccatttctaccgggatggagagaaggtcgatgagatgcttggtacaggagaagagaggctgcatgaccggttatggttgcattcttgatagggatttgccgggctgttggtctcatgcacaatattttctctctctcttttatcctactttcgtgctttgttgtcaacctctgagccaattcaaggtttatgttggtgtttgtaatgttgatcatggtcatctttagtgacatacaccattatatatcagaattggtgtaccggtttttctctcatgcttatgtcaaaactgagaaagaataccgtcgacattacgatgcaaacatttttagtatcgtccagtttgtacgatggtgctgctgcagatttctgctaatcatgtgtcgtggaaatggactggccacttattatgtcaacagtaacgcatctgtgagtacctgagcagagttccatcgcttatactcctgcccggagctaagaatagaagacaattagacaaacacctcacttttctttctttttttttgaaacgaaggtgcaaatatgtttcattcaatcaccaaatcatttacatcagcttaactactcctactacaatttgtgaatccggtaatcttcactataagattcttcagtaataagtaaatagtttgactgccgatacaagcaggttttgctaccttcgcatacccttcagatgcaggtgccatataaatctgggaaatctcaaaaatctaactagtaccgttgtatcatctaacaatcaccaaaaatgtgatatcagaatgttctgggacaaagccagcgctcagtagaagcttcatgcgaacaaacagcatgattaccaggtagaaacacgattgacaggataaagaaaaatcatgcggtcaagcttctaaatcaaagtatcagtaactctagatcataatgcagctaattcaggaactcaagatttagatttagggattccaatttttaattttgagggcctagttttagttctactgctgttccgctctgccttaatggatgcaatcacagcatcagcccccggaccaagacctttcctgccaactaatttcacaccaagcttttcacagaggtaatgcagcctcatttcatcacctcctctaacctctcttagctccatagcctgctgtcgtgatagtaatgtgtagacataaagttgttgttgctggttgaaatgtgattggagttgctgaaacaacaatttatttgagtggtgctggtccgcctttcccccttcagttgcacctttctttctagggccacctagttccaccttcagaatggctggggactttggatcagaagcttgtccaccaaaaatgacagagaagctgccaaattccaaatctggttgcctaaacaagtccatgagtagagcagcacaggcctgtgtatttgttgatggacctttttcaactttgctctttgctgctcgggcattggcatggagagtgtatttgcagcctcccgcagaccactgatgaaagcaccatgcattgttgctggataacgtctcgtggtggcctctccagcgaaaaacaaccgcccatctccaacactttcagctagtatgtcatagtcatctccagatgctccaacagcaacatgagaatacgaacctagactgaaggagtctgtgccccatctagtacaaacactctgcagaggatctgggacctcaataccttgaggttcatagatacctgagatacacaacattcaccttttagacaaaaaaccaaggttttaagcagtcgaacctattgtaacaacatactacatacatgtctacatatatttcagtgcagttgcagaggtatgaggttaatggaacaaagagtctgttgcaacttgcaaagagtcacttgggtgaggcatattgaagtaccaccttatgcatatagtcatatagtgatctaaaatacgatgatagattttacatcgctagatgaccatttacataaggtagtaaaaaattctgatggtagcgtattaaaaaaaaactgatgataggagataaaggtcttacctctcagtatcttgagaacagaactgacagcatcagtagggggtgtggtttcaaagttgtgggcag

SEQ ID NO: 21891 - DNA, 17854 bp, Oryza sativa
ggggggtgtagggaggtggttggtcagacatggtcgccggcggcggaggcaaagccggcgcgcctgctcgataaatctggtgggggtttagatggggatgggaacggtgcgagtcggagccatctatctggtcgggtgcgcggcgcggctgtgcgggacctagcgggaggtggaagacggtcgggggctccagggtccgtttcgctgtactggtttccgtcttctgagatagaatacgtaattccacgctgtacatcatcaagccttgtcagatggacaggctttgatcccagataaaccttaaaataatttcttcaaactattgggatgacataatgaatgcttttcacccgctgagcttgaaagtaagtttggatgatgctactcgcttgtttacccccgataaccttgagcatgtttcttaaaccgctaaatgatttgttttttaaatgttttttatatataagtttttttttaaaaaacaaacaaatacattttcaagtttatataataattaatactcaattgattatgtacaattaatactcaattgattatgtactaatagtgacttcattttgttttaaatgccactaaaaatctaagccaaacttcacttaacattactctactccctccggttttattttaattgacgctttggacaatgacacgctctacaagatatacctttgaccttatttttctattataatatatacaatacatgtttacttttattatagtgttttgaaagacaaatctatatatatttttctagtttctttaaattaaatatttttaaaattattgatggtcaaagttataaaagtttaacctcaaccttgtccaaaacatcaattaatatagaaccagatggagtatgtgcattgggattggggtgcaaaagtgattcccaaatccatgatataattaataggaatgtttgcttcaactaaactattcttgccgcatgtatataatgctatcacttctggattggaagtactacagaagtttcttgcagcaccattcagtgatttcctctgaatggccaagtataaaaatatgcatgatttgcaggaagtagagtttttaccttttagttgaggattcttcaacaatcaaaactgactggtaagtgataacatatatacactaatacacatggttcattgttgaatgcccttggcttcttgaatccagttgatgaagaattacaacaacaaatcaacatgcatgtattcttacattctgaatcgatttcttcaatatgctcatgaagtaataccactttacataactgtactaccccactacaatactacattgtggcaatactcttgttgccaaaagaatggtctgtcctcaacattattacttcactactattaacaaccgatggtttctcatgattctctaagctatatgtgactgaaaatgaatccgtgaaaacaccgaaaaatgagataagtggatctgctcttgcaccgtcaatagatagcttcagaaattgaccttcgacaactggaaattgaaacagcctcttgtaaccaattgttgtgccttcaacaattgtttgccacaattcatccaccaagatttccacacggaacttgattacacgttgtcccatctggataggctcctgaagctggatcacattgaatgaagcagattgtccgagatcaaagagcatttcccaggagctctgcccttcctctggagcccagtaagagtatatgctttcctgaagaacattggagggtgcaaactgctgattgccaaggccaccgcgcacggtgcttgctgtgacagtggcatttgcagcaaaattctgagagaaaattgtctgccgaatctcagtaaattcctgaaggacttgcatatcttcagtagaaattaagccagacgaatttggggggacattcaatatgagtaggcagtttctaccaactgatttgtagtatatgtcaagcagagttgtggcattttttggtttctctgaggcatgccaaaaccaaccaggcctgatagaaacatcacattctgcaggaacccagtcttgcccaaaaggatcaccacagcgtgaatatctgataatgaagttagcatcttagtaaatagactgttgaattctgaaatgtaggatgcttgtcaataacaagcaaatctctacctcatcaaaagtttatcaaatccaaaatagtccaggctgtagaattttcatatgagatgtaaattccaaaataaagatgaagcacaaaatatatctcatactagaaaaatgtaagtccatcactgctataattagttaatgagccaagggcaccattctaatttctgtactgcacaaggattcattgaactctgtggacattcttgtggctaattccattctctaagggaatgtaacatctaaagtctaaaccacataccactgaaactattgattgcactgtaaattttccttattgatgaggctacacaagaaattaatttttacaggctttgcaatagtagtctcttactcatgctgtcgctgtcacgcatgcacactaaaataatgctgaatagtagcactctaatcaaataatttcaacagcctattgtcatgagtaatcttccttaacttcaaagagaagaaaaccacattgtttgagtgttacaattagttactcatttgagaggtcatcattaggtacttttgcaaggacatcagtaattgcttaaactttaaacttatcacggcagacagttggaaggaatgcttggagttttggtcctatgcatgatacaattttatcttcccacaagtaaaaagttgtcttgttcccaaaaaatatttgcattacataattgaaatttccattgatgtgatttgggagaacaatttagataactagaaaagccttttaagaagttaggtactctgcagacctattagagttacttaattccaattctagcatttttatccaggggactagggatatgattgattaggatcttaatagaagtaaacagcactctgttttttccccagctcaataatactgttacttactcaggaatgatgtgcccaatcgtcaccgtgctcttattgaaaggagaccagcaagtataacctgcgacccctgcctcatctcctacccatcttgtatctggtccagcatctgagaagatgacaaccctttgctggagctgatggataagtgcaaaccaggcatcaaacatgtaatccatgtccttgccctctccctttgcaccatcaagccaaacttcctccacatctccatacctgcacttgtatagtcagaatctttacacaggagaaatcgtgtacagtaatcaaatcgagtgtatgtagtttactcgaagtccaaagcaaaacaataaatgcgtagggattaaacattccattttcatagataattgcgtagtgattaaacattccatcatcatagataattggaataagggtagtgactcatgaaaaaagtgtagcgactttgattaaacaacacaaattaagcactgactactgcgccccgagaaaaagttcccaaaaaaaaaacccactaataaacataactacttttgatcaccaatttctgaaaaggatcatgcagaaatgcaatgttagtttatgttcccacaagcgcacagccacatctggatcgaagctctcctcagcctgaacccaaaattcagtagtcgacctgcaagatccccattgacgaatacaacaataatctcgcaattcgaacgcaatcgctgacatacctggtgagcaattccgtcatctggcccaagtagtgctcgttgtacgcgacggtgtcgccgtacaccggctcgtgccggtcccacggcgagaggtacagccccagcccgataccttcggcgcgcgcggcggcggcgagctcgccgacgacgtcgccggcgccgcccttccacggcgaggcggccaccgagtagttcgtcagggccgagggccagaggcagaagccgtcgtggtgcttggccgtgagcacgacgcgcccgaaccctcccgccgccgccgcgcgcgcccactggcccgcgtcgagcgcggagggcgcgaacacggccgggtcggcgcggccggagccccactcggaatccgtgaaggtgttggggccgaagtggaggaagagggccatctcggagagctgccactggagctgcgcgtaggaggggacggggaggaccggcagaggcggcggcgtcggggccgcggagccggtgacgccatgggcgcggaggagggggaggccgacaagcaacccaagaagaagaagaagaatggtcgccattgtcactcggtgatccctcgatgagggtgttcagttcacctcagcgtggcgtagagttgactgctctatagtttctgttgttgccaacggctgattattgaagaattaagaacaccgtcaagaaatgattagctataagcaagaaaaaatcaggggaaatcttgtaaataatctgaaaacatggacacgagtaggggaatgaataattgtgtgtgatgtctagccggatttttaatgatgtgaagttaagaaagaaaaagaaaaagaaaaagaagaaaataatgcaatgggttaattaacagatgatctaatagatcacatacagtatatcactgcatataataccatccataacactaaatcattaattatttactattattacggataaatcgttatatcagctacatgtacattatattgatatgatgtggaacgattatataaaccataacccattgaaccattgttcaagtcaacttatgaaagaacatggagtacaaatagattagagaataatgctatatttttatattgtgggaaaaagaacaaatatattagagaacgttgctacagagtatttgttaatcgggttgttcactgcataacttaatattttcttcgagtaaaaatgttgctacagggtgataaatgatttaacttattctaggataacaattatggacaaaaattatattctattatcttaaaaaaattatggagagaaatttcaaatgatgtcgtcgttgacatatgaatcccatgcgatttacacattatatataaaactagaatattaattatacaaatctatctgaaataattatgttgattatctatatgccacaatttagtattaccgattactaatcgccttgcataccaaattgttcttggaaagtccaattatctgttacaaatatatgcataaacggaaatatatgttcactttccgtggggcacacagacgaacacatcgcgggggattaaccaggccactcgttcgctcgctcccaggagctcctccactcctcgattcccgaatcttcccgccgaaggaatgtgctggtgtgcgcctatcgccaccgcgcccgtcgccggcggccggttccctccgccctctctccgctgccgccgtcgtcgagggagatcggtccgcgcggacgcctccccggagcccgtcgacacgcagcggaagaaggtcgccgtcgccggggccggctgggcaggcctcgccgccgcgcatcacctcgtcaaacaggtctgctctcgctgctccgtggcgccggattgctcctgctgcattcgcgttctcgattcgtagcgggcaccgcgctcgttcgcattatccgctcgtgtgggcgcactcgcggcggcggaattttctcccaaaatttgtttccttcgccgtctcttttgaaacagcagtgacaaatacgcatctgccagtacgtggagcagagaagttttggtgggttttgttcttcatcactgtactttccattgatcagggatacgaggtcacgcttctgggggccgagagcggcccaaccgaggagattggtctcagaggtaaaattttcttcagctttcagtttacaactgttaaaacttggtgtgccagttctgattcagtaatccttgaatcgtggcattgcacatagggttttggtacccataccgtaacattttctcgttggtggatgagctcgggatctcgcctttcacagggtggactaaagctgcatactactcttcacaagggcttgcagtacctctctctctatgttttacttgcgaaatcgttttttcttcagcttgaatgccctcaaaattgtgatgtgcatggatttacctagtttgattacgaaacaaactagtatttttctctgtatattttagtagctttctgataagattgtaaaatctgaattacagaaggaataattttcttctaccatgtgcatattgaatttagccttatatttttgtggtaggtttattttgttagttttcttttctttcaaaattcctcataactatttggataacatgcacaaaattagaggatagcatgccatgttgtaacaatccatccccatgtatcatgttgtttcacgccgaactttgctctgaatttaaatgatctgagggacattattcttcctttaactctgatagcattgcattgttctgaccacttgcaggtggaatttcccatttttcatgaccagccccgattaccagctccctttggaatgttaacatatccagaagtatgatttattccgtctggatgtgttcgctgctacctatctctccagtcccaaccaccccatattctcatactatcctaatttttctttgttacagttcccaagtcttcctttaattgataggttgacatcgattcctgtcatggctgcaggtatgcacgtccatctgtccaggttctgtctttaaatgctaatggcctcagttctaaccacttatttgttgctttgatctagtcattgacttcaacaacacagacactgcttggatgaaatatgatgcaagtgaggaaatttagtacatattgcacaatttataagagttgacagctatagttatagtagatcatttcttcctcatgtcttattgtcatatttcctgcagtgagtgcaagagatctgtttaagatgttcggttgctctcaaaaactctacaaggaaatttttcaaccagcaattcaggccgccctgtttgctccaggtgagcaatgcagtgcagctgcaacactggggatgttgtattactatatgctctctcatcaggttctctgttctgtcttgcccttactttttaccccttttctttcttcttatcttcattcaaatttacgttgatcaacaaagctctttccaatgatttctcagaaattcccaaatttacaggaaaactctgattttttgttgtgccgtggggaagtggaagacataattttctctccttggttgaaatcactggaactgcaaggcttaaaattccatggaaacagagtgccaacaagtttggccataaataaggacactgcatgtatctctggaattgtctgtggagaggaggtacatgaggcagatgcatttgttttggctaatggactctcttcgctacaatatatcatcaagaacaggtatatacaagttacagaggtagtcactgcaagaatcttgggcctgtttcaccactaattactctcagtaacttggaagctaagattgctatagaaatacgtactgcttgaggaacagcacttttcttcacttgaaacatgtcttattttcatatatttgagtgcttctctgactattgaatttcttctatggagtagtccgtttctacagtctcggcaagaatttgttaatcttcttcatctgtccacgattgatgtggtctctataaagttatggtttgataagaaggtaatcgcaagtgacaaaatatacttcatttgccaagaagtaatacacattgttctcacatattttgtttttggtgatatgaaatgccagatcacaattccaaaggttgccaatgtttgttctggttttgatgatccatctaggtggacattctttgaccttacttcaatatatgatgattatgctgacaaatcaacaacaattgtggaggctgaatttgtatgtttcaactttaaatcaactaccccataacaaattaaagcacttccttccaggaggtatcttactgttatcaatctcttgttgcagtacaatgctagccatttgctgccactgaatgatgagcagatcgtttctgaggcttcatcacaccttatcaaatgcatacaggattttgaggaggctaccgtgatccaacaattggtcagaagatctcctaaatctacaatgcacttccttccaggtaaagtcaaactttaaccttattgcagtacaagtgcctacaggaatattgctcttgatgctctttcttcgtgggaacgacccgtgatgacaagacttacacccgtgctagctcgttaaactgcatcatgcttgataaaaataatcaagcattggttgtaaaatgattatgtgatagggttccataatcagaacatacacttgtgatctctttcagtgcacagttgtacactagcatctttagtatttataaaataacgctctaatttaccttacactgtctttcttgcctcttcgaaatacctactgtgatgcatatgccataaaaattacattacatgcaggttcttacaagtacacagtgcgaggatcaactaccttaccaaatttgtttattgctggtgattggatagtgaaccgacatgggtccttttcaaaggtgaccgagtaatatgtcacacaatgctttggagtcattacaaatttattcatgaatttagaacttttatgtaggaaaaggcatatgtgactggactcgaagctgctaatagggtggtggactattttggtgatggcgactttgcgaaaataattgcagttgaagaagacgagcctcatatagagacagcacggaatctcaatagaagagccaacgaattaaagactcagattcctttctcggagttctttctctaatcacataactgggagcttttcagtatgaccatgagatttatgctctacaactcattcagaaaaaaggtcaagccagttctcacttccctttttccccttataggtcaaaccagtttttcgtacataaaaaaaaaaggtcaagtcagcttttagtatgatcatgagatttatatttcttttactgttgtgcatattgacctgacagacctttgtcattgacgcttcaactgaattaagttagcaataattaaaaaagtagaaaagaaggtatatccagtcttctggagttgcggtaggtaaatttcttgattctatatatgtttttatttgcatactggttatcaacaaatacacatactagatcaaaccacaacagccaaagcaactgcttttggggttaacttttttgcgtttcatctgcttgcagcatatactcgaacatgtctatacaaatttattcacaaagagaccagagagtttcctcaggtttgtattcctttcctcatcatttccacaaactcttcatagtcaattctcccgtcctgtgaattcgatggaggaaataattaaatccatgggaatgaccctaattagtgaaaataaaatactttaggtatgctttaccttgtctttgtcaacttcatccagtacttgtttaatgtttgcttcatcacccattccgtactctgccatggcttgttccagttcatctcttgttatgtacctggaattgtttttcatggtctcttgttaatatatactgattttttaacaaacgagtttatagcaagaaaaatatgatgcaaggaaagcatgtgttagacatcgttacacaatgaacatgattgttgcgcagaacaagttccagtgttggtcaatttagagctctttattcatggtgctgaacgagataaaaggatgtgcattggctaacaaaatttattttacccgctgttatctttgtcaaaatgttgaaatgcacgaagtaaatcctcctccttttccagtttatgcttatttatcatagctgtgaggaactccgagtaatcaatgctgccactcttgtctacgtcaacctgtaccacagtatcactagtaaaatccttttgtaaactaaacctgcagcgaagagttagcaaaagcaaatgatcttactgcttccataagcttctgaacctcggcttcactaattcttgatcctagctttgtcagaccaaccttcagttcttcaaccgtgattgtgccacttctgtctgtatccatgttattgaacatctgtttcaagcccttgatttcctctggtgataggttctctgcaattaccttgagatgaaaggaggcagcgtgtcaatttgattttagccaaagcatagtagttatccctgttaaggaggattctcaccttaagagctaattgctttaacttgttcattgccttgaattgcttcattcttgataggactgcgctatcgataggtctgtcagatgcaccgccttctttgagccatcgatgttctgcagcatggagacatccatttaaagagttggctacactgtatgtatatatacagttgcagataaattttacattcataaccgcagattagaatagcgaaacacaattcaggtgtgctacctaaggcctgcgatgcagtaatcctcttctggggatctctatgtaacatttgtctgataagatcctttgcactttcagatatcgaaggccacgggctggtactgaaatcaacttggttgaccagtatagcatcgaatatgcctttctctgtctctgcgcagatattcaaatttgacaattatctccacgatatacttgatagaatgtagcaaaattagccaaagagtaaatatgtactatggatatttacctgcccagaatgggggcgtcccgcatagaaggatatacaatatcaccccagcgctccagatgtcggcttctttcccataatttcgttgtaacacttctggcgccacataataagcacttccgacaatgtccttgtacactttacctgcatttgttgttttgttgttggggaaattttaccttagcttgtacatatcttgttatggcgagctaaggtacgtgcattatctctcgcaagatctttcaacatgcatgatcgatgcatttctgcatctgctttgatattgtacgtttctactctttagacccgtgcatttctaacagccaaattaactcatggtgttgataaaggggggaaaagaaagaaagaaagaggtagtgtagcttatgtgtgatatcgcgaccctgaccttcttcgatgaagacggagagtccgaagtcgatggccttgagcggcgcgtcgtcgtcggcgctggcgagcaggaagttctccggcttgaggtcgcggtgtatgacccccatgaagtggcagacgtgaacgacggtgaggatgtcccggcacacggcagcggcctgccgctcggagtagctccccttggccgtgatgcggtcgaacagctcgccgccggagcagaactccatgacgaggtgcacgtggtcgttgtcctcgtacgcgcccctgaactccgcgatgttgggctgcccgctgaggtgctgcaggatggtgatctcccggcgcacgtcgtccacgtcggtgcgccgcaccagcttccgcttcgacaccgacttgcacgcgtaccggttccccgtcgcgcgctccgtgcacaggtacgtcgtcccgaactgcccgctccccagcttccggtccagctggtacagcgaccgcacgctcaccatcgccctctgcagcacggggcccatctccccgccgccgccggacgccctccgggacagcgcccccgccgccgaagacgagcccgtcggcggccggtgcggcggggccccgtgcctcgggaagctcggccgccgccacgtccccggctcatcgccgccacgcgccttgctgcgctccgcggtcgacgccggccgccgcatcgtgcccgacgtgatgggtatctcgtacgtcttggtgaagcagttgcccattgcaaagcctcctcgtttcctttccttctcctggggtggcgccgagacgaagcgagggtggaatggtgagttgggtttgggagaacgaggagccgaggttttgaagggtttctctttctctgcgcgggcggtgggcggcgggagcggagttgcttgacgtgatgccctaccccttcgtttcgctgtttgcttttggtccgggctttgagctttatgccttgtttggttatctccggagggaaaggaagattcaaagaaagcctcgggatcacgctatctcaccttatgcaggcagtacaatatacttgcggcggtgcgacagccgattttattcggctttggaggtgtagaaacacatagcactacgtgcttttattgatctagcaatagccattttacttgagggatatgctgtactagctttcggtaacatcgtcagaatcaggcgcaggcagcactaacaaagtacgccccttttcagaacggaatcaacagtgggccggagtaatgtgacgagccaagccggcccagaagatattccggcttacaaaactcagagcggaatcaactatgggctggaggtaatgacctggtaagtctatcttgactcaaaaagacgttttattaacatggtggcatgtgctttcacggcttctggcctcagcaagcggtgacgcgcgctctggcaatcgctaacacccggagccgcctcgcccgccgcccgccggtggcgccccgcgtcgatcggctaggggcgaggggctcagctgatgtctacgctacgcgagagagcgggcggatgccacctcttccactactaatctctttcagcggcgcgtggcctgagcagggagagtagcagacgcagcagcgccaacctgccccgtgacgggcaccgcgcaccatttcggaccgatatgccgtgacgggacgccgcattgcgcttctgataaagcatccggagagtcaaactcgattcggaagttcagtgtacttcgtcgcccacacggatgggttgggggcatgaatccgaagtgagatcatttccatgggaaaagaggccaaaaagataaactaaggaaatagtccattcatgtgtttctctccaatatacgtcataaaacctttttttcttctctttacggatatcaatatacaaaagttcctttgaaggctagcatatgtgtggtgtttgcagtccaaggtaagaaagtacagtaataagtacccttggtgaccgaccggtacagttcttcagttatcaattcttctcagattaaacagctgtggttgtatataacaagtaaactggttttcagaattgcagcactagagtggtgtgaaggcctgaatgggttcatcatgattcttgatgcaaactcagtctaggtctttctttgtccttaattaatatatatttgtgaagacctaacttcgagtccagaaaacaaaaggagcttttcgttgtttcttttgaagcctagtaacaaaaacgaaggaacactgtgttaaaccaaaactaaaaaggaagaatatgtgaaccttttgtatgccggtaaggccgtatggaatttcaactgcactcgttttcaaattaatagatgtggttgactaagtagaaaaaagaaatactagtatgctgatgcaagctagtgtgatccaggggttcgttttgtttcttgacacacgcttgagtcttattctttattaccccaaagcaccttcctaatcctacctattactttggttaactttagaagacactgactctaccaactaacatgtaagcaaacactagttgcataaccgttggttgagaagagtagacgagaagggacccagtctagtagtattcctctagaagattaggttgctgtagccatgactgtgagttgtgactaggttttttcagtgggcaaggcaacaccctacacatgaagccttgaagagttggtgtatatatatcagatgaccctgttgagcctgaacttacaatttagaaagaacaaggaagacagcaggtgacacctttgcggacacaccaaaactgccggccatagcccatattcccacaagaagatggcgatcccggtttacagcatcacaagggcagagatcgaggagttctggaggagaaaggagatggaagaagaggagcagcgcctcaccgccgagaaggaagctgcaagaatcaaagccaagacacttatggtcagttcttcttcttattgatcaatcgtaatttgttgtattaccaatcactatctcgtcctctgatctcctttaccagctcaggttcagtatggttcttagtcaaaaaaaagttcagtatggtatttagcatagcagataaatcgacgcatgtaaggcaataaaaatctgcgatgcagatacaggccaaattatcctaccatgaatttggagttcaaaaatactgtgacttgtggtgtctgaattgtttgaaaagcagattgaagattatgcgatcttcgagcaaatgataagggagattcttgaggagggtatcaaaggtgacagcgcaagggcggagagagacatcaccacgaacggcgccgctgccaccaagagcactgagggaaggattggcatcaaagattggtaaccgttctttctgcaaatttcctagagttatgctatccgttctttctgcaaatttcctgaagttgatatagcagagtgcgtccctttctaaatagtgcgtttccacatcctctttggaagttggataatggtccaatgtggaaaacaatctgtatcccactttccatccatttccacggttggatttcctgttacaattctatagtggaatttatagtcaagaagaattatatggatgtgagaattaagaacctaacaagctcaacgtgtagttagtcaaaataagaagcaacgcgttaagatttttttgtaacagttctaaggatcaagacggctattttcgtgtgcatgtgcaatcgcttaaaattctggtgcaattacgaccttagcatcctatcagaagtaatcttaattacttagtcttcaaaaaagaattaattaaatagctgtggatatgactgaccaccatcttgcctccctgggtgcaggtggagaaaaagcacttatgcttatctgaatgaaccagcaatgacatccacggatgagaacggcagaaggaagcacgccatcaaatacatcccacaggagagatgcatgaacttcttctcatcgattccaagtcaacataatactactacttttgcaatcttctaaatgggcaagccaatgataagctgaggcatattggcaaattagaaaatatgcaagtggtatatgcatcagcaatgctatgggtggaataaactacattgtttttaagtgtataagtatgtccaaactgaatggtactttaaagttaatcattttgtaaccttgttgccttgcgtggtatagaaagcaggccattttaacttattattcattgtaaaaaaaacaattttagttggtgcttgcaatgatatatcagaagctattgccaacacttctgtgatggtatcacgaatgttattcggcattatactgttcagcacacgtaacaatcttcttgcatatacactcttatctgtttgaattgattaaccttgcaacatcttatgtatacatcagttgtgcactgtatcttcaaatgtacaaaatatggccttcttgaacattgtttttattttttaaaaaaggctagttcctcttagagtaagtttaatagtatagcccactactagctccaaatcatctatagccaattcatacaatagttgcttactatactattaatactcggtcccacctgtcattgacatattacgacttagagtccgtgctgcagctggctacagatctgtagcctgctgctcttctctatcttccttttatctctttaaaatatgtttatagttggcatatagcctgctattgtacatgctcttaagtattactctatcttttttccccttcctgtacttgcttgaagtgtccagaggcaaccaagttctgtgaatacgagggatcaaacaaacaagaaacaggtaaaagaaaacaagtgtaagaaaacgaccttacaactaaaaactgatgttacatatctttgtcctcacttttgctaagataaagaaacagttctacctggaaactatccaagggataaaaaacaagttttctacacaagagtcatcgctagcatacaacaaaaagagtgtcgcctttgttattttgcagcgtactcggatgctgacatgttgttggctaagaaagtgcatagataacttcattagttccactaaattagattaccttggtggatgcttgagcaggtaggtagatagcagcaatcaaaggtgtctgctctgctctcctctgcttggcagaatttcattctgaattttcgctctgaagttagcagtgaccaaagcggagtagagggagctccacttcattttttttaacagatcaatattacaatttgaccaaactgaacctgtttgcccaaattggcctgttgcccgagcgtttctctcgaggaataagttcactttgggtccctctatttgtcgcccagtccgattttcatcccttgaccacgaaaccggatgcgacccgtcctccaacttacgaaaaccgggcaaacaaggtccctcggcggttttggctgacatggcgcctacgtggctaatttgactcagtcttcatctgacgtggcacttacgtggcaattcgatccggaaaaataataaagcccatgggacccacatgtcattttcacatataaaataataaaaaaaaatagtgggacccatgtgggccccacatgtcatactcatcccccctcatcttcttcctccctctccctctcccctctctccagcctccaggcgccacggctcacgaggtcacggggaggtccggtggtggcagctggcgacgcgacagccgccgccgccggcgagctccacctctcggcgcaaccgtgcagccgcgtgcgtttctgatcccgcgcgcgcgtggctgtctgacggcgtgggtggcacagatggattcatggatctatccgtagcgcccccctcccccccctcccgcgcgatgcgacggccaacgacgtcgctctgatgccggcgagagagagagagtacatcttcaactgccagcattaatttgcatcgagagagaaaattagcagtagcatcaaataatatcatttcagtttcatcgcaattaagctagctagccatgtgaggagtcagttcgatgcctcgatcgatcgtcggcgtcgaagaggggtcaagaactcaagattaggcgatcgattccatctgacacatcggctgaatcatacgagctaccgtcaattgagtactcgtactaacgtacgcgtgtaaatgctactgactgcatgagagaaactgtacaagtcctgtgcttacacaatgtactacggcctagccatgatctatatgatgcagcacaataccttttaattaattagtcgatcgacaagcgatccatgcatgcatgggagtaatttacaggcttcgagttcatacactgttgcattgcaacttgcgaaaaacacagtgctacactgagaatcaatgatggccatccgcagctaagtgatgatctgtgagcaattagcaattaccagttactgacgagaggtgagtaggtaaaggcattactagcaagaactgcatcggaacaaagttcattccggtggtcaaaactcaaaaccccagcgagctgaggcatgagagcgacgtcgccagccgtcgccgcctcgccgtcgtgtcgcggcggggggggggggggggagt

SEQ ID NO: 21892 - DNA, 15370 bp, Oryza sativa
gggattagatccatgaatccattcgtgccgcccacgctgtcagacagccacgcgcgggcggggtcaaaaacgcgcgcagatgcacggctgcgccgagaggaggagctcgccgccggcggcggctgttgcgtcgccggccaccaccgtcggacctccccgtgacccagtgagctgtggcgcctggaggctggagagaggaggggaaagagatggagagaggggagatggaaagggaggaggaaaaagatgaggggggatgacatgtggggcccacgtgggtcccactttttaaatactatttatgtgtgaaaatgacatgtgggtcccacgggctttattattattttttgatcgaattgccacgtaagcgccacgtcagataaagaccgagtcaaattagccacgtaggcgccacgtcagccaaaaccactatcaaaaccgccgagggacctcgtttgcccggttttggtaagttaggggacgggtcgtatctggttttgcggttaaggagcaaaattcggactgagcgacaaatagaggaacccaaagtgaacttattccttttctcaatcatgtactgggcctgctaaccactgtagctacatgggccaaaagagcagcaaaagcaactcgcatccataacaatcaatggatcgtggtctttttttatagctcacatcgtttgtaactttgtatcacttgttggaccggagcaaattctttttttataaaagagattttttagggtctaataggatggtgcggtaccgaatatggacaattgaatctccaatggattaaaaatggtggtactgtgaggtaccatcgaggtcaacgggtcgtaccacggttgaacaagtaagtgcaaagggcatcaacgtaattttgcatgggagtatagactggatcaacttgagtgcggcaactgcaaaaatctgaaacctaagtcgtcacttttgaccgtgcttgccctcttgtcaccgccgcaatccttaggtttagggcaccgccaccaccctttctgtactcctcacaagagtccttttcaccacaacaatattcgatgctgcagagctcatcgcatgtatcttcgtgatatcatcgcatttgtggcgctcctcggcggcgctcttctcgctacaacggtcatcgatgccacgaatctcactgcctgtctcttcaacggcgagcccgttggcacagtggaccattgcagaggaggtggggagatgtttcctttccagacatggcactggtgaagcccttgctacccctacgtcagcgaagtctttggagaacgataatggggttgacgactgtcgatgctacccatcctgtccatcacaaatggacggttagattcgatttggtacctcaaggtaccacttgttggacctatagatgatcataaggcctaaggccccacggcccgggccaagcacggcatggcatgactggtgttgggcccgtgtcggccagccgacagttggcccgtgcttgggccgatgcctttgcacggtgggccggctcggcacggaacgatcaaagaaaaatagttgaagcatccaaaatagacttaaatcaaacatataaggcatggtccaaagagaagagggatgcatcatagacttattccagccatatagacaacccaaaagagataagggacttattccattgagaagcaggatgggttgtcatgcttttgggccggccgggcacggcccggctgacctcggcccaggttcagttatgcctgggccctgtagggccgggcggcccgtttggctatctatagttggaccggagcaaattccctcacaaagaggaaaggagaatagtggtaatctcagaattctctatagaagtagtaatatctcccacggtaggatggcggaactcaagtcttgttgtgggtttccgtgtgtcgacggtgggtacccgtagaccggatatagagggtattggggtacactggtacgaggatctacgtagtacgacatcaaggaaacaagagacatagattatactggttcaggcccctcaataggtaatagccctaatccagttaatatgggattatatggagagaaccacaaattacaaagggaataaatggaactcgacgatacccacgagatcgtagtcgagttgattcgactagatcacccggcgacttggctcctgtaggctccggcttcgtaggctgtggtcgttgtgttggctataagattcgatgccttaggtcctcccaggggtcccttttatatcgcagatcaggtggtctccaagtaggacttggagacatcggaccctgcatgatatagtgatgacccagtcctatacgggtaggaacctttccattagtggacttcgtgatggatttccttagcgtatatagagaacgtccgtacgcgcgcagatgtaccatattaccgtatagcgtacatccaaaggtagagggtatagtttatccgtaatcctgacaccgtgtccaatgtatgactgttcgtcttattaaaaaaattaaaaaaataagttaggtataaagtattattcatgctttatcatgtaaaaacaataaaaataatattcatgataaaattttaaataaaacgtatagttaaacgttggacgtaaaaaatcacaaatacacttaaaactggacatatggagtcaaattttcgacacattttgctatcagcaacgggtttccggaggatctctgccccagaagtgggtcaaacgcacgtgagatcccgcgaagcacatcaatggaagaacgaaagcccctctccctttttcttttttcccttttccttttcttttcaagccgtaatgaagagatcgagcgagaggcccaaaatgaccagcacagtgcgccgccgctggtcgcggagatcacttccctccttccgagttccgagcagtctccggcccggcgcatgcatgccccgctcccccccacgcatatataatcctcgcccgcgacgctcccgcgcccgggtagcttagacgaccactgctcatcaccccgttgctctcgcgccgccctccccgccgagccaaaaagccttcctcctcgaaatagcacacctctcgccgccgctggtgcgtgcgtgcgtcgacgcgcgcgatcgatcgatgcctgtgtccctccggcgcgtccacccacgccagccggcgagcctcgtcggcgagtttcgggggcgctgattagatttgcccggtctcgatcgattgatcggtctcgccttcccgccgcgcgatggatccgcgggggaagggcagcatcacgtcgcatgcgtcggacaagtcgtcgcggtcgggctcgttcgacttcgagcacgaccaggacccggaccgcgaccgccgccacgacgacgcccaccgccgcgaggtcgtcgtcaagatcgagcccgaggcccacgtgccggtggacctccacgccggcggcagccacgccgccaacgcgccgggcgctggcggcgtggcggtggggggcgtggtcccggggtccgggtcggtgtcgagcgcgtcgtcctcgccaggcggtgggggcaacggcgagtcgttcagcttcaagaaccggccgccgcagtcgcccgcgtctccggcgatgagcgtcggcggggagggcagcgacgacccgcccacgcgtctcattggcagcttcttgcgcaagcaggcggcggccggcggcgagctggcgctcgaccctgacctggagatggaggagatgaggaggccgccgcgcgcgcccacgtccatgaacgcctccagggagctccgcgtctcgttccaagacccgcacaagcggttctccccgtcgacgtcgtcggcctccacctcctcctacgccggcgacagcaggaaccaggcttgcagcacagcggaggcggccgaggtgatccgctgcacgtcgatgtccaccggaaacaacctgttggcgcggagcaagacgcgttcccggctaatggatcccccgccgccgacgatcagtcaccccaccgaggcggagcgcaacgaccgcaagtcgttcgtcggcaaggggccgcccaagtcagggcagctccggtcgggcctcatcggcaagtcggggctcatcggcttgtcaggccccatcgggaagcccggcgccttcgacgacgacgacgacgacccgttcgtggacgagggcctcgccgccgacctcaagcgcgacacggtcgactgcctcctcatcctggaatgggtcggcctcatcgtcatcatgggcgcgctcgtctgcagcctcagcattcgcagcctcgccaacaagaagctctcgggtctccacctctggaagtgggagctcctggtgttcgtcctcatctgcggccgcctcgtctccggctgggtgatccgcatctgcgtcttcttcgtggagcgcaacttcctgctgcggaagaaggtgctctacttcgtctacggcgtgcgccgcgccgtgcgcaacgtgctctggctcggcctcgcgctcatctcgtggcacctcctcttcgataaggacgccaagcgtgattcccacacgctggtgctcccttacgtcaccaaggtgctctgctgcctcctcgtcgccaccgtgatccgcctcgtcaagacgctgctgctcaaggtgctcgcctcctccttccacgtctccacctacttcgaccggatccaggacgcactcttcaaccagtacgtcatcgagacgctctccggcccgccgctggtcgacgagagccgcatgctcgccgaggtgcagaggctgcagagcgccgggatcaacatccccagcgagctcgaagcaacggccatgccgagcaagccgcccatgccggccaagagcgggcgcctcacggtgaacccgtcgaagcgaggaggagcaggaggtggggccaacaagcagctgcagaagcagaaatccgaccgccattgcgacgacgggatcacgatcgaccagcttcacaggcttagccagaagaacatctcagcttggagcatgaagaggttgatgaagattgttcgttacggggcgctgaccaccatggacgagcagatcaagcatgcaaccggagaggacgagctggccacgcagatacacagcgagtacgaggccaaggttgctgccaagaggattttccacaatgtcgccaagcctcactccaagtgagtagcagcgcaccagtgctacacctgtttttcatgtacaaaatcttgttatcaaatttcatggctatatgcctatccattcctgaaatgtcaacgtgttgcaggcacatatacttgtcggatttgatgcgtttcatgaggcaggaggaagctctgaaagcaatggatctttttgaaggcgcacaggagcacaacagggtcagcaagaggtcactcaagaactgggtggtaatgatattgtcaatcttgacacagtcacagctccttttaatctgagagacacaaaatgttatgcttaatctgtcatgtgaactatgcaggtaagcgcgttcagagagcgcaaagctcttgctctaacgctcaacgacacaaaaactgcagtgaacaagctccaccagatggccaatgttgttgttgtggttattgtgattgcactatggctttccattctagggatcgcgacgtcacgcttcttcgtcttcatcagctcgcagcttcttgttgcggttttcatgtttggcaacactctgaagaccatctttgaggcgattgtgttcttgtttgtgatgcatccttttgatgttggcgatcgttgtgaagttgatgggatgcaggttacaattcttttcattgttctatctgcattgtatgattgcttcacactgtctgacttggttctaaactgttgcgaaattcaggtagtcgtcgaggaaatgaacatcatgacgacaatcttcctccgatacgacaacctgaaggtctattatccgaacagccagctcgccatccaaccaatcatgaattactacaggagtcctgatatgggagatgcagtcgatttctctgttcatgtcgctacgcctgtggagaaactggccctgatgaaggaaagactaatgcagtaagtatcaatgcattaacctcagtttttattgtcttaaatcatttttctcctgaacattccatgcacaagaatgtactacattgactgctttagggttatcaatcatgtcatttgaaatttcagttaccttgacaacaagaaagaacattggtaccctggatccatggttgttctccgtgacgtggatgacacaaacaagctaaaggtatccatatggtgccgtcacacgatcaacttccaagacatggggatgagattcgagaggagggagctattgctccaagaaatgatcaagatcttgaaagatctagacatcgaataccggatgttgccactcgacatcaacgttcggaatgcgccaatgatccagtctttgaggatgccatcaacatggataacgtattaattcttcttgaaatgcagtaccaagttaaacatgcctgatcagttcagtgatgagattatggtttgaagttgctaggtaggcagccgtatttcttgagtaaggtgacgtagtactgtaactgaagtgcccttctcctttcctccatctccttcttgccaagggcatattcggttgagtggattgagctgtgacagcttgccaaaatagcaagaggccgtcttactgtccttgcagccaccgcttgtgctttcctgtaactgtagtgttatgtgtttgggtacttcttatgagaactttagacatgttgctacttaataattttgatgacttaatgcatcaaaagatgaatgcaattttgacagcaaaatacaagaatatcgatctaaatatctaatgttagcttgcagcatacagtactagatctcattttacctggaatttttatgctctctggataggttaagcaggcattggcctgtcttaacaaaagaaggcagatgcttttgtttcctgtttttgccctggtatttgcttcgcctagaataaggttgagaaggatttggcatttgcatttacaaataggcatgcacttctttgtttctcgaataaaaaaaaccagttgaaactgggcagcatacatcatagtgctggaaaaggggaggcaaccgtagtaaaaatagataaatttaagatgaaatggttcatttacaaaggcgacctggacactgacaaaaatgaaacttttttattaatattgtttcggggaaacaaaaaatgagcgttctgtcgttcgacacaagaaaacagagaccagaaggtccagaacaggtgttaccattgaactctagacaagttcgttcaaagttcaaacaaaataaataaatctctagacatggaaggctcgacgctattaaattccacctactgatccttggacctgtggagaagttgccgggcgcggacgcgtacctgaagccgcacgagcaccttcatgaaccggatggcgacgcccgcctgcttccgcacgtacgagccccgcgcgagcgcctgcagcttcaccaggctcctcagcgcgcgaaacgcccgcctcgcctgaaatgaacggacacgcctttctgaatcatcgtggcagcctttgcagaaatgcagcggtaaatgcggccgggttaacgtgcgcgcgtaccaggtgaccgcggaagccggcctggatggtggccgccgcggcctcctctcttgagatctcctcacggttgttgacacctccgtcgcgcgctcctttccccacacgacgcgcagccgtctgacgccttggttcgacgacgacgatgccggagtcgggtgccacggccgtctggccgcacggaggagaccgaccgaagacacgcttcatcccgctcatcaaccggcgtaggcgaggccgaggcgtgggccgcgtctggcgttgccgagcattatcttcacgccgcgtgccgaggcagcagaggaggttgctcctggccatgttcatgtggttgagatggcggcgatgctttggtggagacggaggtgtgcagtgtggttttgggccatttttggaggtgctccagagacacccgagtcttggtggaaagttctcaaacaacgtggcgggatgaatcccaaccgacgaatcgcgtgcatcttgatttcttgaaccggatcttttctcatgccgtattattttagcgcaaaaataagttcccgagaatctgacaaaactcggaccatttcatcttatcattcgcgcacttcccgccaacactccgatttgtacagactttccagttcccaggtacaccaaaacagagcagctataatggtcatcgaaaccagagcaactaccggtggccgcgactgacgaccggtgcccactaggaggcgcagcgcagcgaatgcagtgacgcggtggtgtccatggacgcggcgtcgaacacgccgcaccgttcgctcgcctcgatgccgtagtccatgagcggccgttgctcgagctcgtcgtcgtgccggcgcaccgcctccgggacgtccagctcccccttgcgcacgtgcgcccacaggtactccaaccggctcacgtacctcagcttcccatacaatcttcaggaaaaaaaaacaataacacaaaaatcgcttagtaagcaaatcgatactccctccggttttattttaattgacgatttagacaatgatactctctacaagatatacctttcccttatttttctattataatatatacaataaataaatgcatgtttatttttatatagtattttgaaagacaaatctatatatgtttttctagtttttttaaactaaatattttgacagttattgatgatcaatattataaaagtttaacctcaatcttgtccaaaacgtcaattaatatagaaccagagtgagtaatctctagtacggcctaacatcgcgcgtaacgtatgtaccctgagctgaagaggaaccggccaagggtggagaagaagaggcgggactggagccccgggtgaaggaagtacacggcgtgtagcctctccctgacagccgccggcatggactcgtacgccgtccggaccgcgccgacgccggggaagttctcgcggcgatccacgccggagtgcatgtacaccaccacgaactccgcgtccccgatcgccggcgtcacccgcctccgcacgtaccccttcagcgccgcctccgcgtgcccgccgccgcccagctcccgcgctgcaacgccaacaaaaacgaaacacccgctcgcgtcacgagcccaacacgaacgtactggcgtgtgtgacgtgtttctgccaccgtaccagggaagttcttgccgacgatgcggacgatgggccggccggccttgtcgcggccctggacggtgatcacccgcttcttctcgagcaaaatctcctgcttggtcatggcgtccatatcctctctggactgttctgctcgagattttcgcttcgtaaaactttcgtacgagcgagtatgatgccgtgatggtacgagcgttgttggggttaaataggtcagcgtgcggtgtggggacgatcagatcgagagctgttggatcagggtgaggtttggggacgggagacggacggccaggatggcttgcggtgttgggaacgcgtgccggcgtatggggtgggggccgcgggatccggcagaatatgcggaggatccgtttcggctgcggcgcggtctgcgtctcggcacggcgcgcgggagcggggcgtctggccacgtcgcggtgcacccaggtctcggcgttcggacgcgagcggggggccgggggctcggtttttcgcggcgaaaccgcgaaaacgctatatttaagttctgggtgtcaaattttccgctacagctccacatcttcttttcttgaaaaaacaaacactgcagtgtgtatatactcactcctataaacgcatatacgcacactttacccctaagtactcgttgtcgatgggtatgtcaaccactgaaaaattaattaactgtaaatacgatcacccgtgtaaaatatagtatttaaacccgggtggattggttccactgcaaagaaattaaccagttgagataggctcacttcgctaactccatctcttttaatagtgaagcccaaccaaacgatttcagctccacctaaaaaggtgaaccaggttgaaatactctcacaaaatgagttaaagttatagagttgtttttaggctgcttcacaatttcactttagacccagctcctaaaactaaatttagaagttaaagtcctaccgaaagagtccttagctgtcagttgccaatcacttttgagagtccatgtgtacgtacgaactcgtgtatacatataaagtttatacacgtatgtatgtgtaaagtatatatatgtatatataaaatattttttataggtctaaagtgtacacatacatgtgtgtgtaaaatttatgaatgaattttagaaaacttcacgttttatatggtaaaagttaaaaaaaacactgcacgtattataacacgtggtagatttttaactccaaaccctcttgggccatctcacagctagctattcgatgagggcctttgcggcccatataagcgatccgatggtgaatagtttgtggaccccacatgtcatgcacgtgataggttgcgttggcttttatatgggacgtaaactttcatccccgcctcgtttcctcgccgatgggcgatggccatggctgacggcgccttctgaaccattaaccaaccggttccacctcatcttggaaagaacgtgcagagcccgttcgttcacattggcagcctagcaggcaatggaagtcgccggcgatgtgtggttccctacctcctcagattgtgcgttccatggcatcgatcattctacggcggcaacggacacatggagcagtcaccacctgctatacagcgatgcggccagtacttgaggggaacagagcggatcagcggatagaaggtggcagactggctgtcaggatgcgacggcgctgcggtcaagcacgtcatgaagtggcggcggtgttcttgtaatcgacggcgatccatgccatgtcgcatccggacgccggcgccaacgacccctccccgtcccccaccccggccgcgaggtcgtctctgtcgtggatcttcgtgggacgccgacgacacgcggggtggacgacggcgagggcgcacggggtggcctctctctccctctcccgctcgcgtctgtccctccctctctctcccgttgctggcggccgcgaggtcgtagctgtcgcagatctttgcggggccgctatcgcagatctctggagtgtcgcgtcgccaccgctctccctccgtccgttggtgtcacggggttgtcgctaagccatctccgttgcacggatggtcaccgtcccattctctcccgcccactctcctgccccccgccaccactccggctaccgcccgccgccgctgccaccgtagccgtctccgctgccactgccgcctcctctttcgcctccatccgcgccagcaccaccccaaagtgcctccccaccctctctcccgatgccaccactccgcccccgtccgccgctccatcacccgccaccaccgctccaatcccattcctcgcagacgaccgacgggaagagaaagagagagacataaggggagagtgggagaaagaagaagggttggagagatgatgaccatgtggccccacggtcagtgggtccattgtattttttacgtgtaaatgacaaatgggtcccgcatatctatttttaattctaatattacataagcgccacgttaacaccacgtgggacgaaggctaagttaacaccgccacgtcagcgaaaccaccctctaaaaccactagtgcagtcaaattacaccggtttcaatagatcggggagtcttcttatccggtttatggttaaggggtacgaattagattcagtttacttttaagagagtcaaagtcagtcgactttttccttgtttttaactccgaacctccttgtgccatcttacagccgttcgatcagagcctttgcggcccagattagggcaaattgagttttgggcttgaagttaaactgtctcggtaaacactgggccgggagagggcgctagtcaccaaacaccaggctgtgtcatagctcacgtgcctctgttacatgtagggcaaattttgctacaggacattatgacttcgtagttttagctccaggacaccacacaaagtcacttttggggtaaaacactctcaaaacatgttatttgccaacagacaccgcgtccattaaaataataatttctggttaaagaggagagagaaatcgcgtgaaatgtcaaaattacccttgggcccacatgtcagctctcttatctctcttcactctttctccctctccctctcccctcccctctcttcaccgacagggagccgaagctcctctctccctcaacctgcaggccgaggaggccatgtccacaccgtccccacacgagcggcaactgtagatacagccagtagcggcggcagcaacagcagcggaagcagcaaagagcggcggcaacgacagtagcaagagcagcagcggcggcggcgcgacgagggtggcgctggcataggcggcgcgacggcggaggacggagtcgagcatctcgtgtcggagcatggggatgggggcgctgggtggtagcgcgtaggagaagtcggcggcgaggttggatggcgagaggacgcgcatgcgggtgacaaagtggttgacatggacatgcgggatggcgaactcgttgagcatgcaaagcgggatggcgccgccgcagggcttggcgccagacgagttgcgctcgaggaggaacgcctagtctcccacgaacgccaacgcctctggcgctgacgtgccggcgtggtcgccacccaccacggccatgcgcagcgggcaacacaggtgtggtggagctcgagcaggagatcacgaggcgacgtcggcgtaggtcggctcgagcaaatcgtactcgagcacgcgcgaggttgcgcgtggtggtgacggaacatctacttgtcgagttcgagctacgcgagcacgttcgttgctgatggttgttgccgatgcagcatagttgatgcccagcaacgtcgacgacgtcgcgtcggccattgtcgggagcagcagcgaaaacatggctccggcctccacgccccgcctcgcctcgtagacaaagagctaacatggaaggaggaagatacaaagagaaaagaagagagataagtgttgacagaaaacacgaggcctgggagatctgcttaactccagtgcaggtccaaagctcgccttcgagtgttagcgtgccagttgatttgatcctgtaatcaacaagaaatagaagcaaagaaatcgcgattaaatctataaatgatagtcgatcggctaggtgccgatgacatatcatttatctttgagccgatgacacatatgtatcgatcggcattcatgaataaataagaaggaactaaatctaatcgatcggctgtagataataacaatatatactccttatatcgatatatacttaaatcaagtgattgggatagatcggtcgccatgccgagacaatataaatcacttagatcgaaatatatattaataatgggactatatatgttcatagcatagtcgatcagatagatctagcatgtatcggctaataccccgataccactctatactaagatattaaagcaggtagaatacatcaaacaaaagcttaatatacttaaatgcattaagatcctaaaataaacggtagatttaacatgtcaataaagcatatagggcaaatatagttaaatcaggtaaaatcggatgaaactccaatactaccctaatcggcaaccaaaaggcatgctatagattgatattctaagcacgacttaatagatcaaactaaactgatacagcattaagtatgaaaagaagaacaatatctagacaatcaagccgttggaagtttcatagagtggtagatatcttatataatctaaatcaacgtcgcaatctaacctaatcggctgccctctaccgacagatgttagccgattgtagattaaatagcggtattgccggagattatgtaagatatatgataactcgacgaattacagaaacgagatcagagtatcataaagatggaagcactaatcccgagaatacaagtcgtcataacaagttttaccttttgttgaagatcgaaaccgatgcagttcaacccgaaatcaagaactcgtcgaaataaaactaaagcaaaaagggtggcgatgcgccgaaattgtattgagcgtgtgtgtgttcgtcccaagttacatagggctcgggtctatttatacccgagaattacaagatacgtccataacggacacgactattatctctaacaaactctaagataccataagtctttgcggcagagtcttgcccaaacatatctctaaggaaattacttaaaacatcttaattaatagatacaattgcctcctcaggactctatccatgtgcggcaatcaccttgaagcacctcaactcaacccgatgatgtgcaccgagtcgtattcttggaatcagctgtatcggctagccctgtctgactcgaactctgccgatcctgaccgtagccgattcagattgtagccgatttttgctctgtttccacaacgatcttcgtcttcgatttcgcttcgatctaatattcttttccgatgctgatattaccaaatttggtcgttaacatgtggtcccaagggtattttgaacatttcacgctgtcggagaatgaactcctccaccagggaaccgtgaggccccctttgtgagttcggccaggggcaacgggtgagattcgagggcttggtgagcagagctgtgtgatcttaagggggttaggccccccaagacgatgaaacaaaagaggtttatacaggttcgggcgctgagaagcgtaataccctactcctgtgcatgattgattgaatgtagaacacaagtgcttggggttgcgagacccaagtgccagttcgctccgaagtcccccctccaccactaggcttagacctccttttatacctcaaggggttaccacatgggcccaacaacctaacctaactccggtggagaagtattataatctttccattaaatgcatgtcttgtctcttgacttgggaagccaagcgcacgtcgtcttgatgatggggcctgtcaaatcttgccgcctgacatggggggtgcccctgtcagtcaccatttaatgggtgaagacttctaggctcctattacaccgggaaacgggagccttgctttgacca

SEQ ID NO: 21893 - DNA, 6344 bp, Oryza sativa
cacgtggcgcctagaacggccttctccctttagtctcggccagggagtggccgccgccctacctcgagcccaacccccctcgggggagggccacgtggcattggagggcagcctcctccatccagtctctgcgaaggagtggccgtcgtcctacctcgggcctgactcccctcgggggagggccacgtggcatcggggggcagcctcctccgactagtctttggggaaggagtggccaccaccccacctcgggccttactcccctcgggggagggccacgtggtatcgggggggggggggtagcctcctccctctaaacttgtacccccgggtccatatcatcgacagtagcccccggcgttagtcctgaccaaaaccttccccaggtggtcaaggttgacggcactttcctagtttgatgatttgtgggcccgatctcttattctttctttgctgacactaggacccatgcgcctttttcgcctagcctgagggcgactcgctagcccgtactttaggctgtaaacttattttctgtatatatttagcaaacgttgttatattctctcgggcccgtgaccttacgccgcgtacctcgcttgcccctgccatttgttaacctctgttcatgttctacttcatctattcaaacgattattttcgcgagtatgaggactgaacttttcatagccagcaatcttcacccgtgatcaagctaagctgggcgctgtagccagccggcggggccaaagccagccgctacggaagagctagcacagagggccccaggcgtcgacagtactcagagctcgacgcagggctaggatagagctaggaatcgtagcccccgcactttaagcaaagagttgtttgaatggatgaagcgaatacaaactttttgttaccaagggaggcaaaccggcgcgcgacacataggtaccgcgagaccgcgaggaagagatgggcgagagataaatataatcaataataattttatgcaaacgattatcttcgcgcgagtgtgaggactgaactttctatagccagcaatcttcgcctacgatcaagcgaagctgagcgtcataaccagccgacggggccaaagccagccgctacggaagagatagcacagggggcctcgggcgtcgacggtacccagagctcgacgcagggctaggatagagctaggaatcgtagcccccacacttatagcaaagaattgcttgtatgaataaagcaaacacaaacctttagctcgaagagggccccccaccatgggttccgaaccatcttgggaagcctgtgaccacttagcaaacgaggtcagatttccacgagcctgtgtccccacgctacatattctgtttgctctttcctttcggtggcctccttccaatctcttttccttctacatggacgattactttcacacgagtgtgagagccgaaaactctagagccaacaatccccgtccacagttgagccaggccgggtaccgtagccagccggcgggaccaaagccagccgctacggaagagccaacacagggggtcccgggcatcgacggcacccgaggctcaacttaaggctaggataaggctagaaaacttagcccccacacttagcgaagaatcgttcatgtagatgggagagaggttgggctcttaccaccgagggagcaaataaatgcgcaacacgcgggcgtcgcagggccatgagaatagaatgggggaaataaatataagatttcaagctaatgaattgaaaaattgaaaatacttgaagcttgaaaggacgatcagttgagcctggccgggcaccgtagctagccggcgggaccaaagccagccgctacagaagagccagcacagggggtcccgggcttcgacggcacccggagctcaaaattgcaagagtcctcccaggagtgaatcgaggcggcagcaggttcatgggccaaccccacgcttggcccctgagggccatggggaagacgttcgccatgacccggtcgtcaccccccgcggcctctatgatcgccgtgcagatctggagggactcggaggggtcggcgccatcgtcgtacttctcggtgaggcagggctggagctttgggggccctcggacatttcgaagactcgccacaaagacttggtagccaagcttacctggtggagatgcggggagccttgccccctgcctggggtggcgcgacactcctgaggatgctgcgccttcccctgtagcggcggcacgacactcaccacgccgacgctcgaaagaacctaaaaaatcacgaatgcgccccctaccaggcgcgccagatgtcggagaatgaattcctccaccagggaaccgtgaggcccccctttgtgagttcggccggggtcagcgggtgagattcgagggcttggtgagcggagctgtgtgatcttgagggggttagccccccccccagacgatgagacaaaagaggtttatacaggttcggaccgctgagaagcgtaataccctactcatgtgcatgattgattgaatgtagaacacaagtgcttggggttgtgagacccaagcaccagttcgctccgaagtcccccctccaccactaggcctggacctccttttatacctcaaggggttaccacatgggcccaacaacctaacctagttgcggtggagaagtattataatctttgcatcaaatgcatgtcttgtctcttgacttgggaagccaagcacacatcgtcttgatgatggggcctgtcaaatcttgccgcctgacacggggggtgcccctgtcagtcaccatttaatgggtgaagacttctaggctcctattacaccgggaaacgggagccttgctttgaccagagcgggaggaccgactccggctgggataagaggatgagaacctctcaccattactatttgatgggacatgtcaggctgcacgccgcctgacacacgagcagcgcacaggcgcactagccagtcccatcggtcattcgaccggtcacagaccggttgagtgcactgcacgccgcattaaatgcggcgtggcgcgaccgctcgggacgccataaatgtgggtaggtgggcacctggaggcggacacctaacccaccgtacgtggtgacctagagagggggtcgggggagcccgacccctagtcacgggagggggcggccgccacccgacctcgggcccgatcccctctcgtggggagccacgtggcgcctggggcggccttttccctctagtctcggccagggagtggccgccgccctacctcgggcccgacccccctcgggggagggccacgtggcattggagggcagcctcctccatccagtctctgggaatgagtggccgccgtcctacctcggacctgactcccctcgggggagggccacgtggcatcggggggcagcctcctccgactagtttttggggaaggagtggccgccaccccacctcgggcctgactcccctcggaggagggccacgtggtatcggggggcagcctccttcctctaaacctgataccccgggcccatatcaccgacacacgcaatttctctctccccttcaaccggaaattattattttagtgtggtatcggggtatccgctggcaaataaccttgttttgagagtgtttttctccaaagtgacttcgggtggtgtcctcaagttaaaaccacgaagtcgcgattctctgtagtaaaatttatctatatgtagtggagtgcagtacagtacaacaacttcaatggcaaaatttgcctacacgaagtcgcattgaatcaatgcgcccgtgcgtacatgtgggctgtggcttcaatgcgccaactcggatattcgcagccatgtctgcatctgtcgatcccttgtcaagagccacgaatcacaacgaagtttcgtgttcctgatgctatcaaagacaatgaatcgtggtattaatggattgaccgtttcttagactgaaatgattgcttgagacacgccataacgtggctctgattgtgaatggcctaatctctagactctgtacttatttatggtattgggcctcgaggttcatcaaccacttgcctgatgaacgtgtgttttactagtagttctaattgtaacccgtagatcctcttcctctaaacgaaaagctccttaagaaactccctaacacttgggtgcatgtaccgcaagtccagaactaaacaaaaatgacgggggatagtgcacgatttgtcaccttcctctaagcctgacaaaaagttctgcataccagataaatcagctaaacaattagataccccaaatctcaaacgcagttgatgatgaggtgaaaacgagagagattctcactgtacatcagtacatcctgccgagaatcttgacagtaaaatgtatggctgcgaagcccgaaggaggtaataacaaaactagtaatcccaacaaggccctgacgcctgacttttcattgagccgtggtctccgcggtgaaagcgacgactccttttggtatggcaacattcttacacccctatggcgacatcctttgtagcaagtctgcaggagtgtgtggtctcgcactctggcctcggcctgtacaacgtatcatttatctcccttttttttagagcaaatcgaatcctttttttcctgcccacagattcgcacagctaaaagcgaaagatgatgtataaattacttagtacgaaactctgtctgtcatttggaaatactacttttttctttctttctctcgctctatctgcaattcctgcatttatcaaactgcctaacctctttacgtgcagagaaaaagaaaatgccccccacgtgatcacatcctgcactctatattgacggcattatatcaaacatcctgtacttcgttgtcatcgtgcgacttcttcgcgttgtgagttgtgacccgtgaagaccgctatatatacacacgctactagcccctgttgcattgtatacacatattcattgcctcattggtactttggtagctatgggctccctacccgccgccgacaagccgttgccggcgctccggtaccctccggctcgccgcgacgacgacattgtcgacgactaccatggagttaccgtgccggacccctacagatggtgagtgtcttgtcgacggctgtttccgttcctctgtaatcgattctgtcctgttttgagaggcactctgtttgttacgttatgttatgcacatctgctttttctgaattttaccctttttacccggcttgaaccatttctctgttcgtgcaacatgaaaaaacatagttcctaaattcatggaaagaagtactgcttcaggataagagtgttagaattcctgaggttcagtttttttttaatctcatttcttaataaacttcggccggcttagggcctggcgaaacagttttttttatataaaaatattcattagattattgacatgtattatctactttattgtaggataaattaaatattttttataaacaagttgtctaaataatacttcctccgtttcactatgtaaatcttttttttttgcggggcactatatatgtctaaatttattaacgttaatacgaatgtgaaaaatgttagaatgatttacattattaaacggagggagtacagtagaagagattttcttttgaaaagaatgtaagtattttagcatatggtgtgcagtaagaatgtaagacgcattcccttgtataccgcagtcaaaacacttggtaaatcccagaatgattgcgtttggaataccactatatagtgcagacgaaatgcaaatcgaagcagagttgaacacttgaacacgattcttcccgtacgttctcagtccatccgatcgaaacaaagcatgagtaattttgttcttattattgttggaccgtgcgtggttgatgatcgctgatgtattgtaaaattgaccgcgagtgaaggatggaggagctggagtcggaggaggtgaaggggttcgtggacgcgcaggcggccgtggccgaggcggtgctctccacctgcgacgaccaccgcgtccgcctgcgcgggcagctcaccgcgctcttcgaccacccgcgctaccgcgccccgttcaagcgcgccggcagctacttctacctccacaaccccggcctccagcctcacagcgccctctacgtccaggtcaatcaaagccccccacgcgaatctcgaggccacccagcagagtccgagagagacgctagctttctgcaatctgaaccgtcgcttttgttgttggagttgttgcagcacgggctggggggcggggaggaacctgacgtgttgctggaccca

SEQ ID NO: 21894 - DNA, 6714 bp, Oryza sativa
atctcaatcatgaagtctattaccattttcttggaaccgatcagtcagaggacctgttgtgctgggaggaccctgaccatcccaagtacatttacacccctgaagtttcagaagatggcaaggtatgcagctatggccatgagtcgatcaacttaggacgaagttttgtacaactctgaatcttttctaagcattgacaaacatgagctactcctgagctgatatctcatcacttcacttgttgcagtatgtgattctgtcagtcgcagaaacttcagaaccggtaaacaagttgtactactgtgacctctcggctctccctgacggcctggaaggcatgaagggaaaccatggcaatgccatgcttccttttgttaagcttgtggatgaatttgaagcatactacgcactcatcgccaatgacgacactcaattcacatttctcactaacaagaatgctccaaagtacaagctgtcgaggattgatgtcaacgagccacactcatggatggatattctccctgaagacgagaaggctgtcctagagtcggcttgtgcagtccatggtgataagcttctggtaaactacctgtcggatgtcaagtatgtcttgcagatgaggagcttggttaccggggagttgctccatgacatacccattgacattggcagcgtcaatgggatctctggcagacgtgacaattcagaggtgttcatcgagtttgctagcttccttactcccggaatcatctataggtgtgatgtcagcaaggagactcccgagatgaacatatacagagaaatctcggttggtggttttgatcgcacagattttgaagcaaagcaggtaattttcaatagcattacgagctcttagcacgatacctgaactttgtagaagtacaatgcattttcagagttgcacaattcctgtttgtaattcagctagcatttctccctatttttttcctctccatttttttcaggtgttctaccctagcaaggatggaaccaagatcccaatgttcatcgtgtcgaagaaaagcatcgttcttgatggatctcacccgactctgctgtacggctacggtggcttcggcatgaacatgacgccccatttcagcgtcacccgcatcgtcctcatgcggaatctcgggttcgtgtcgtgcatcgccaacatccgaggcggcggggagtacggcgaggactggcacaaggccgggtcgctcgcgaacaagcagaactgcttcgacgatttcatcgcggctggtgagttcctcgtctctgcaggctacacgaacccgagcaggctgtgcgtcgagggtgcgagcaacgggggccttcttgtagctgcctgcatcaaccaggttttctcactgtaacctcttcagttttttcagttctctgcagaagattgagcaagaactcactgtggattgtgcattttttttacagcgtccggacctttttggttgtgctctggctcacgtgggtgtcatggacatgcttcgattccacaagttcaccataggttctgactcatccctgaaacccatatacttgaactttctttttcgttgaaatatttcatctcaccaatgtgctcggcaacacttgcatgcaggccgtgcatggacctgtgatttcggctgctcggagaaggaagaggaattccactggctcatcaagtatggcactagccctctctctgaccaccaaggaattcttaatccttttttccttcagtcacatcataagttaggaatgccaaactactgacgcgcaggtactctcccctccacaacgtcaggcggccatgggagaaaggtcaccggaggcagcagtacccttccaccatgctgctgacggcggaccacgacgaccgcgtcgtgccgtcgcacacgctcaaattcctcgcggtgcgacccgtgatctctcctcctaccttcgccgccattttctctggattctgatgaattttctctgttgattgggggcagacgatgcagcacgtactgtgcacgagcgtgaaggagagcccgcagacgaacccgatcgtcgcgcggatcgaccgcaagagcgggcacggatgcggccgctccacgcagaaaatcgtaggcgaaatctttgctcgtctgtgtgtgtcacgtttttttctgctgatttaactgaattttgctccgtccgtgggtggcagatcgacgaagctgcggacaggtatgcgttcgcggcaaagacgatggggatctcttggatcgactgaacaagcctccgagcagttggtgccttggtgggtgctaatgggtttaacttcttatagcatataaccctataaaatttgagagttggatctagaatgagatgaacacaacttctgtatatttttggcttaaaaatatttatgggctagatatggttgtgaaaaaaatccatgggtctcaccaatatttagagattggttagttggctatggtcattagataggtgtctaaaaaaaccgtgatgtgagaaggataaaatttattccctcttacactcgccataagaaggtgagactcaaacctgggtgaatgtattcacaaatatgtgcgctcaccacggtttttttttttagaattacacagtacaacacaggtagtcataacgcacgcacgcaaactttacccctacgagcatcttcgaagattgggccgacaaatccatcttggagattgacgaagtcaccacagaatttgtaatgtaattggttgggtttttatagtgattggcatggtaactttgcatcttctatcttcttatgtagttcgttgaaaaaaaatagtgattggcatggttgatactcgatatgtacatatattacggatttcatcacctattcctagatggaaaacagttgtgaaactatgaatgtataaaaggagcttgatcatgattttctacccatatctgggagtgccgaagtttctctaatattttgaagacgtattcattctcctcccaatcctaacctaccatgcgcagcgtgagaaaaccatgtaaaaaaccaaaccagcccacccactgcaccccctaggctcccttccccgactgtgtgagagaaaaaaaactaacagcgccttatcgttggcatattttctgatatttgcaaacgaaaatcaatttgtgaataaaactttttatatatatgtgtgttcttagcgatctaaaagtaaaggctgaaaaataaacttcgataaaaaaaatctcaaaatcagctccaaatttaaagttgaaaattcaaattttggctgataagcatatgaatatgcgagcccataaagcaccatgtcttcttctcgctagaaaaaccatagtttaaataaccaacagaaataccgcctaaaaagcaatccaatagtcccaccgggaatagacatctaaaatcagtttgggcctaaaagacaagtatgacagttgattttatgggtctattgcaatgcaggtccatttaactagtggggagaaggagaaagagagaagggtgtgttcaaagtaaaacaaaagaaaagtggccaaattgcgagcataattattcaaagctagattaaatcatactatttcatatggtaactgtagttgatatacaaccctcgctagagttatggtaggcaagattacaactattttttatatagatcaatatcaataaagtataattgtattcgatatacaacactcacttatatggtttaaaagtacaaatgtattttgtatatacattttatataccaatcaatcaatttcaatcaatcaatttctgttgttataatctaatagactactactgcatctatttcaaaatataataatttttagctatatatctagataagaatataattggatggacaatttattactatattttaggatattttaggatgtatgtagtaacttatattggatggatgatttcaggtgaacttgaacatataaacattgctcaaagggcactaccgtataaaccgaaacttggagatgcccagctcaatatgcaattcaggttctcaaaataaaagaaaatgcaattcagtggaaaagatctagaaaagtggtaaccggcacgcgaccacgcgtacagagtaagctgatcgcacgcgtacactatccgggcaccaaaaccgctgctcaaaccaacaaaccctcccggccccggaaatcccacgaatccgcaaaccagttcgccccccaaatccgaccgccgctcaagccccacgccgcgccaccggccgccaccgccgccgcggacagccgcgatgccgaagaagatgggcgtcaactccaaggcggaggcggcccgcgagcgccgctccgtcgcggaggccgaccgccgggaccgcgtcgagcgcgccaaggaggaggagtactggcgcgaggccgagggccccaagtcccgcgccgcgcgccgccgggaggaggacgccgagaagcgcgccgaggccgccgcccgcaaggccgagaaccgccgcctcgcggaggccgaggccgcctccgcctccgcctccgcgccgtccaagacggccgcccgcaaggcctcccgcgtcggcgccccggcgcccaaggtcaccgaggccgagctcgcgcgccgccgcgaggacgagcggctccgcctggagcgcgaggcagaggccgccaataagcgcgccgcgcgcaccgccgaggaggaggagtacgagcgcgtcgtcttggtcgccaacaccaacagggacgactccatcatcgaggcgaggtcggtcgacgaggccatcgcgcggatgtcgctggttgactcagagggagccttgcccgccgacaagcaccctgagcgtcgcctgaaggcatcattcaaggtatagtgaccaaactttgtgcttattttaactcaattgctgcccgatagtgtggaatcgtgtttacttctcaaaatatgttgcttgaagacaatgaattgagcacctcactactaccatgtatgcatatgatacaatggtagtcgttggttgtagacttgtagtttctactttctactgtgattgtaaatcacaacaaaaatgggaaaaaaatcacaacagattgaagtctgaatgcaggttagtatggcatgtattatttttcctctccactttgtgtcgtaacttaattatggaaattgacatgttatcccattttgtaatagaatgacaactgctaatatggtacttcattagacaatcttaagtttgatgtagcacaaactcggttagatttgattttcccatatgattatttcattatttgacttactaggatgtttgatgtgcaacgattgaacattcggcgtttgaatttatttgtgataatcttgatgataggcatttgaagaagcagaactccctaagttgaaggaagaaaagccaggcctaacactgaatcagtacaaagacatgatatggaagctatggaagaagtctccagacaaccctcttaaccaggtttgctcacataaagatatttaatttagcttgttcctgcttacacataatccttgcacattctaggttattgttgtgtattttaatctgcatgctctaccactaaaacattttattcaaaattatgttcccttaatgttgtgaactcaaaaagggttacgattgtcaattgtggtggtctactcgaatgtacgaagaatggatgcaatatgggtatcgcattaaagttaaggttttcacttaacaccacatgtttttacattggattgggctgttctgctggcttacgatcatcctagaggcgagtaggcagcagcctgcagcttctcttaagcaccggcattcatgaccccgccggagttgttgcgatggtgcagaacatgggcaggcaacaaccaaggaaagagggacctagggcaggcatgtgtggtgaaggcaaagtgttggtgagcagcatgtccatgcatgaggagaagaagagcggctccggggtgaattgtcatggatggtgggaatgtgcagagacgttggtgatgacggtggctaggacgcggacagggtgaatcctcgacggtggcagtggtggtggctggattgtgattttctgacacgaaggttagtgacggtggcagtcaggaagcgggcgtggcggcagcagcgtggacacagggaaggactgagaagatggccagttcatgcttgcttgcgttgttgcgttgatgggttggcccaaataaccaaacccctggccccgtccaaggtgcaatggaatgcaaaatatgtggtgttaagtgggaatctctagctagacctagtccagtgttaaacttaggttaaaaagatggcccagtgtgaaatttactctttctaatatttgctttaactaaggaaatcagaagtactatgattcttagatacttgtatcaattgtccatcatctgactggtatttatatttaggctgcagagtgatgatgcattcctgctgaattgtagaatttccaaggtaagttttcatggcatgaccagacacacattttactgtcaacaattttcttgaacaataatgcactaaaacacactttttcttgatgtgcagacttccaaatgggtcagaacttcatcagatgctcatggactgaatgtgtgggagatgatcagcttctcggctaataatttacaaagtgatgcagtatatatcatgtgagctcgtttttgttagagat

SEQ ID NO: 21895 - DNA, 10415 bp, Oryza sativa
atgcatctgattcacttaatatttgtttatcatcatctgttgagccccttttactgcttccatctcttgattctgttgagacatcagacaaaacaataaaataaaatgttgaaaaatgaccgcccatcaacaatgcagtctttcttcattaatttctatacctgtttttcttttacgaccacggtcatttggcagaagccttagaagcttttgtgaaccttcatcatgagtataagttaagcgaattcgaaatgaattattaccatgtttcacattctgcacgaaattagtcaaccgttttgagataagtaaacaagcaatgcttgatttcaggagatattatcagaaaaaggcatttaccatttgtttttctactgacggtactagcaatattctcaaggcctccttcactgacattgtctgttgagaaaatattttttcatcgaaccaatttgcactgccatatttctctttcatatataacctattaaagacacaaatgccagcacgttatgaaaatgccagtgcagtgtcatcatagatttaatataagcacacaacagaaagttccatctgtggttgagaacaaacacagtaaattgttgaagtataattattatccatcaagactgaatatacttcatttctctgaattttttgctaattaaaaaaatgtaaatacctttcacttacaaatggttgcattatatatcaccacttacataattttagcttttaaaaatgattaatatgtggcacccccttcagtcacaaaccaattcatggtgctgtataaaaaagtgaggcaaaaattcttaggtgcagatggttacctaatggcacgatcattagctgctataactgcaggcagtgaaatttctagggagaactcatcgacttggtgaccctctctctggactgcttcagatataattgaagtaacattatcgataggagaaacactacggagtggttctacaccatcatcttgatagcaggtgggcagtaacactccaaagcaaatagagcagtacgcctcatcttttgacaaacatgaacaagacccactttttgcggaatcgtcatgctcttcaagaaacgaatgcagaactgatgccgtaagagaaaggcatggtgctgcataactaaaggctccaaagaaccgaaagatgcaccgcacacagacctgcaaatattgtgcaaaaatgttgacaaatttctccgtgtgtgaaactgaaaaatcattgggttcagcatggcatcgaaatgttcattcagtaaaggggaggaaatggatcccacaacataatcgtagtaatacacgaacaatacgtaacacccagtacgctatccaaaaatatttccgtaataggtgaaatcggaattgggggaagttgaacatggattggatagtgaaaagtgtgcagcagagggcatgactgagaagacgaaccccgacggagaggaggtggtggatggcgtggagcggtgggaaggaggacgccgctgcgcgttcgaggatgctcctcgcctccgcatccacctccgctgcggccgccatggtcctcgacgcggttgattaaaccctagttaatcccctctagttcagactagtcctatggagagagagacctccttccttcatctgaacttgggccacctgatttaacactaatctcaaagcaaacaaacctctcaaaatttcacccttcttcttcccccctccttgctgctcgccgcctaccggcggccaccagcaccggtcgtaaaggtcagagcagagcgaggagaagggtgcattcaacacaacagcgaggctcgcagtccgcccatcgccgttcctgctgcggttgggcgtgagaacaccgtgatcctgccgcggccgggaacggaccggtgcagatcccaccgtaatggagcggaaatcgccgccgatgcctcggccgtcgggggcgccgagccgctcgccgccgcgtcgccgtccacggtggttgtcggcctcgaggcgaacagtggcgggctccgcagagagaagctttgcgccgtagaggagaacagagaggtacgctgctctacgatttgtgctaaggcacgtgtcacacagatgttcaatgttcttcagagatcaggtgaagggcgggccaagatcttcagagtaattcttttcttattagtgataaaacgatctgcgatcaattaacttgccaatgttgttcataaccaatcctgacaaaaagacaggtacgtgaagaatctcgcacgacaagcacgccgatgtgcgaaacctgctgaattgcactctatataatacaccatctgtttttaatagatgacaccgttaacttttagacatatttaaccattcgtcttatttaaaattttcatgtaaatgtatatataagctttaaattatgcttaaaatacattaagtcataaaacaactctcaacaaaataaattataattatgtaaatttttcgaataaaacgaatgatcaaacgtacgacaaaaagctaacggtgtcatttattaaaaacggagatagtaccgtgagacaccaccacttattagtaccagcactaacactttgccaatccaagcacacgtacgatgtgcccttctacggccgcagctccgccagctcgtgcacgttcatcgggtggacgaacgccccggggtcgaagaagagctcgcgcgcgaagacgttcgacgcggcggccgtcgggtggaagttgtcccagaagaggtaactcccccgatccaggcacagcggcgccgtcccgttgcacccgccaacgccgccgccgcagcacggcctgtccagcaccgtaaaatctgcagaaaaatcgctacaccgtcagggaccctgcaacgttttcgtatgcccagccactggtgcagcgagatgagaggacgtactcgcgccaggtaggaccgtgccgttgaggacgagctcggccatgccgaccgagtcgccgagggagtagtgcatgccgggcaggtcggcagcgaggccgcgcagcatcgagcccagcatcgggtacagctgcctggagaggccgttcgccgcgcgggagcagccgtggaagtcgaggtcgttcgtgtcgtgcgcgaccgccctctgcgacgggcagcaccccaccagcgacgggctcaccacgctgaatttcctcgccccggcaccgtacaggtcctgcagccaccgtttctcatcttgttcagatttcttgcataacttttagagggttcgttttggagcattggatatacagctctgcaccttgaggtggcccttgtaggaggcgacgaggctctgcaagaattcggtgtcgttgcgggtggtgttcgacgggaagtcggtgtactcgaataggtcgttgctgccggtgttgatgaagatgagggatctcgagatgagatcggccgtcccgttccccatcttctgaacggccgacgtgaagctctgcacctgggcactcatgttgaacacttccgtgcactgctcagacaaaagccatgtcagtgtgacacacaccaacaattaagcggacaaaaaaaagacgagtcagtgcacgtaccactttccaacccgtgctatctatcagccctgatcctcctgacgcgaagttgatacctttgctcatctgtgaaatgatggtcacgtccggcagggagaggtacggtggcgggctcttgtcgaagccaagtttttgagctgctcatcgatgcaacgatcaaaccgcccggtcagtgacattatctccaaatcttactagggaatgctagaaaataaaagcaaacgtttcttctcgatttcagctacataccgagctggtcggccaagttgtatccattgctgaaccgcccggtcggcgactggaacgggtagtcgacgccgtacctcgggtagtttgccttgcagttggccttgcagttcgccaggaagttgttgttgccgacgtccaccgtggagtccccgaacacgaacatggccggcaccgcgggctcctcggcgagcccgcgccgcgcgagctcgagcaagcacagcgccgccacgagcgcgaatgctccgcggcggctggccatcacagcgatcgattctctatgactctcgctgtgcttcttcactgcgatggcgcgcggccgacttggcagtgtagacttgcagagctcgtcaacgtgcacttatatatagcatgcgtggcgaagaacgtgacaagagaagagatcgaaagatcgtgtgtcagcaatgcatgaactgggacgagcctgaacagcagcaggccaatgtcactatcttcgaatccctcgccgcggttaataacaccaaaggatatcctccttgtaccttaatgcttcgtgttccttgatcacgtcgacgattaaaaaaaaaaggcaacgaagcaatgcaacttcaacttgccaatttgacattgtggctgtgaaaagagagcgcatatctggactgaaacgtgctgtgccagcgcaaggcagaatgtcagagtacgggattatggtttggattttcagtcccgtaaatccgttttccgttgcaaactagcgacgctacgtacatcccgtcggtataggacaatataaatccgttttcagtacgtaggcacttccgcatcgcaaaagcatagaatatatcagcgacgaacaggacacaatcgacatcagtatttcatacgcatctaaatacgtacgctactagttaagactaaacaattagaggaatcgcctgttcatgttaggtatactgaatccagcagttcatgttagcctgttaggtataccaatcgactaatccagcaatggtcaattaaaaccgagggaataagctagatgattatgactttttatataaaaaaacactttcagtaattattactccactgaaataattggttaaatatattgactttcttatattattagaaaagatacactgatttcataattcataagcatttgttggtccacttgaaataaatagcaaatttcgctatacctggtggctggctgctcatatgcatacatttcacatcgtagactattgtccgcatccatggtgttttttcatttgcgtagacgagcacatgagcatcgctatccgatgcggagaagcgtgtggaaagagatcgattaagaaaccggatcttcgcttcgaacttcatgttcggcagcaacagacgggcatgctgcattaactgttgatactaactgaaggcgtctgttcactgcagacagcatcacggaatctggaattgatctggacggcgaccataccatgctcgcttgggcaagtggacgacaaatgtacacgctgacatgcacgtacggctcatgtcaacgaagttcgaaacctggttctgtttcaggtggttggcctgtttccagtgtccaagcgcccgcaaaactacaccactacagaagtacagatcggttctctgtaccgctgtacgtgccagcgatttgagaaaacaaggaactagcttactagcgtaacttccggtccgatggcagattggcaggccgcggcaggcaccagagtgagaaacacgaattacagatgagtaattgcgacgattacgcaagtgacctgggccaaaacttgggtaaatccctcctggcccaactacagtagcccgcccattttcagactactcagactaatagtaaagggaggcagaatcgacttttttccgagtccaatcaagttgatgacgctgcacgttactatgacttttttccgagtaggtataatcaggatgatttttttaaaaaacaaataagcaaaaacacttaacaataactaatttataaataagctgaagtgcatatttactggagaatgataattgtgcaatgcatggacggttgatataaaaaacgggagagatctcaacttttattttttagcttgccacatgttgagcttggttgtataataactagatagaaagaaaagaatagcgctgttaaatcttgatttcgggggatttgcaaattaaacctggcaatgtgcattggcgagtaagaaaaggcatataggctacactttggtcccaccccttgtttatatggagttcatttacgccttacaaactgaactcacgctaaataaacccaaccagccaaacttgtgatatggccgagtaaaactttgatgcatttgcgtatacggtatatatacctggccaaacttgtcatggccgagtaactcctggtgttgtgttagggtcgttgacaagcaccagccggtttgtcaactagtaccgcgacagggttcggcttctgccgctcgcgttggtggcgcggccgcagcggagcgcgttgctcgggatggggagctcgtcgcggaacgagtgcgacggcgtgtacacgcggaggtagaactgctggccctgatacctgcgcgcccagtcctccgacctgaggttccacatccccacattgtccagcgccaccaacaccgccgtccacgccctcgggtacacctgcacagcgccatcaagcgagcaatttagccagtccgcaattcgttttcgtgtatatccgcactgctcggcgcccgcgtcgagtgaaacgtggctgcgtgtgttacctgaaccgtgcaccgggagactgcgtcgacgaggttgtagctcttcctgctctgctcgctccacactcccctgtccatcctgcgacaatgccaaaatcagcgaacagatgagaccagatggtgcgggctgcattagtcaggaggcatgtaacgtgggccgtacccaactacgaacaagctgtagccgtcgaggtgccagatctggacgctgtcctcgctgttctcgaacacgatctcgaggaatgaccggtagtcggagtccatcacggccgcctcgctccgcggagccgccgcggcgcccgcgggcggcgcgtccgggatgccgccgagccggaacacgtcgctgatcctgtagtagtcggccagcttgagcggcgtgtcggcctccacgaacgacacgccgttcacggcgtaccgctgcttgccggcgacgcgccccgccgagttggcgagccggattgtgcgtgtcacgttgatcgagccgtagtggtacgagccctgcgggttcggccgtggcccgctcgccgtcaggttcgtcctgggattgggaaaacatcaaaagaaacccaccggtcagtaccagcatctgccgtccatcgcgagaaacggacggtcaggatgaggcgatgcggcgaacctgatggagcgagcctggtcgagcgagaagtcgatgtcgtcggcgaggccagccggtggcggcggtgaggagatggtggcgctcgagccggcgtagcgcaggacggcggacgagttgagtgcacgcttggcgaagcgggtggagacggtgatttggtagacgccgggcgggcggttggccgtgaacagcacggacagcgactggccggcgtggacgtagagggagctgtaggtgttctgcaccgtgtgcgtgccctccacctcgaccagcgtcatgttgtggtcttggatcctcaaattgagcgtgctctgcaggccgacgttggagacgcgcaatctgtacgtcttccctgcaaaaagaaaaaaaaaagtacacattacccgtgcttgaaaatctcacggtatgatcagattggtcaaggtcactcgaaaatagttgtgttctacgtaaaggcaaaaggcctcaccttgctcaacggtgaagcttgcgccatttggacctttgccgttaatcaggatgccatcaggggaaggcagctgctttccactgtccagcatggcttgcagagcctaagcagcaacagcaaaacaatcacttagtacaaggatccatctactgttgatgaaattagtgtaactgcaatgccatgccttgtggctggtcttgtaccagtcgccgatcagcatggtgtactcgccggccggcggatcgaaggggacggggatcagcgggcggctgcggatgcggatggcgccaaagccgccggcggccttgtggaaggcgagcgacgggaagtagaagaagctgccgatctggtccttggcctgcatttggtaggtgaagttctggcccggcgggatcgggcagttcgtgccggacacgccgtcctgccacgagttcttcctgtgctgaagcccgttcctgcaattgtttgtgactttgcatttttgatttttgtagttacggtaaagaatcgatgtaattgtgagggatggcatgtttgaaataatgcacatatgcgtgatctaagattgtatttcaggaccgaaaataaacgtcggaggtgatctaaaactagcatacataacaaaaacggaaacaaagtggaaacgtatgccaacaaggctgtgtgtagattcaaattttggatccaaacttccaactttttccatcacatcaacctgtcatacacacacaatttttcagtcacatcgtaccaattttaacccaaacttccaactttggaaggaactaaacacagcctaaggcaataactaaactctctctctaagtttgtggtgtattagatgcacggacgcgactacaaaagctagctaatcatgtaatcaacctaatctgcacgcaaaatgcgttccaaaacaaacttccacgttttgggttccccatgacaaatctagcctagttgatgtttagcagtatattcaatcaaaccaaagataagttcatctacagaatagtgcacataatttgtacaaactaatgatgaaaatgagcaagaacgcagattgactgggtgcaacgcttgagagcgtttctgtgtaaagtgaacttgccatgacagaagaaacggctccgacaaacggttgtgcacgttgacgatcaagttatcattcgtctggcagtcaatctccggccccggaaattgcccattgatcagaataccctacatgaagaaaaaaacacacacaaacaagtactaaaagaattagagaaacagcgtacacatcaaccctgaccaaagatgaacagcagaacagatccatcaaaatctacacctgctgctggacgccgagaggattgatgttcccagtagtaacctcccaatcgaaaaatctatacggatcttctgcccgtgcggaggagacgaagacgaacatgcagacgcagacagcggccagggctcccatgcttcgccgtgacgacatgacgccggtcgacgctagctgccgggagacggtggtacggcggtcaggcggcggagatcgatagcgcgcgcggcgcctgctgtggactctgctccgggtcccgtacgtcgcacattttatagatgagatctactgggacgcaaccgcaacagcatcgatgtacgtgaaaaaaatcatcgttattgagtttaggcagggtggtttagtttaggaggaattttaattctgttacaaaagagataagatattacaaggggattggtaacagaatttgtggtatgtctatggagcgatggacggtcgtaaaattcgtggtgtttctgttcatcttagctgatgcctttggggatagacgaacttccaagttccaatgtcttatctgccctttgtttgtccggttttgttcatgtccttatattttcaacgcggaacagttttatggatatctcttctacatgtccagcattgatacgacctaaattaaactggtccggaataagttttgtgacaaagttgtgattaatttacagaccgcgcgtgtactcatatgtatgcgtaaaggaaaggaacacgtacgtttgtgctcattgttgactgcattacaaggcagtattaccaccgatctcaacttggaaggcaaggttaaaaaaaaatacaagacagttgtagccaccgatcaactggtaaatttacaaggcaaattttgaatccgtatttgccagcaacgcggactatcatagctagtatttttgacttgaaagaaaaactggtaaaactcttgggcacttcaccatgagatcgtccaaatgggccggagctgcaccgcaaaagcagcccacgggctacaaagcacgcgcgtcactcgctctcgcggcaaagcctctctccctccccctctcgctgtccggtgggcccaggtcgtccccacacgacagcgctccgcctctccttcccgactccaccgaccccccgccgagctttctcgcctcccgcgaagtcgccaccgcgcgctgctcgtccgtcgtcgccgctgcatccgcctcctcctcgtcctccctacggccgtagggtgcggcggcggagggggcgacgatgccacgctgcggagccggaggtccctgcgtgtggatccgggccctatcccagccgcaacgccacggtgcgcgctaccgttgtttggttcgattttggctgtggttccgatttcgctgtgggtcttaccgatt

SEQ ID NO: 21896 - DNA, 4107 bp, Oryza sativa
tgctgctgcacgcgctgttcatcggcgccgtcttcctgctcgatccgacgctccagaggcaaatccacgaggccaagtggtacgagtacgccccccccccccccccccttgaaatttctccgaaatgtttccgtcggagttcgtgttattggtttctgtttgagctatatggagtcgatttgctcctagcttcgggtggcaactagggctctttacatgggcaacatttcgtcgggtcgtaattggcaattggcttgtgtcaggtcgcagcctgctttagttgagagcaagcatggtttttatgtatgccttctatctgcaatgccgtctgtgaggatgatgtcgtgaaattactgggctgagagccttccagcatgttataatagtgtaaattgtatttaagtttgatatagaaaaagaaggattgcgtgacatgtttggacaattagcatggtgtcccgcaaatggtgacatgggggctaagggcatattgcttggcactcatttgtttcgttcatcctattcaacacctgaattaatagaagttttaaatggaacaacatgattgccgtatgattttcaccaaatatgttgtctaaaatttgtagtttactatggacatgccagggtaaatctgcttcgaacaatgctgcagtagcattatatcatgaactttataataatattaatggataaagcggcatgttattgaccttgaaaactaaaaacaacatattttgttacttagataacaattcgatattccaaactaagatagtataagccataaagcataccgcatacacctgatggaaactgatggtttttgtttgtaatttagagattgttgtctcagatgttctagtgcacattttatgacttggacaaagtgaccttcataggaactgaataactatgctactagaacataagtgaattataaatgcctattgatcaataattcaatagatacaatgtgttgctcccttccttccttatcaagctaccaaggtattatcggaaccacaaatcactttttactgttaaaagttgatgaaaaacgtgtttatttaaaatattatatagtccatagaccatgtgcatatttctttgttcatcttgttgtccttgagctatatgtgaaaatagagcatcggatcaaaagttgtgcctatatttaaaaaagggaacatgtatgtttaacaaccagtgctgacatgatgatggcatcagcagacctttgcccctttcctataatccacatgcacgtacttcttcttctagcaggtccacgtgtatgtgctcagttctcatgagacccgtgttagccagcttttgaagttttaaaaaccagcagttatgctttattgacacatattttcaatgagggtccactgaatcaatggccagatgtttttttttccttttttgtgagaattcgtgattcttctctcttttcttagcacttctaaaaggcctttgaccaactcttatatgtaatatgtagtttttttttctatttttatcttagcacctctaaaaggcctttcactaactattgtatattatatatactacagctgaatgtcagctgatgctgtccagcctatttggaaactgaaaacactattgtgtcatttctctgtttatatgtatatctagaagaaattccatcacccctctatttaatcttattctacaatctgctttgatggcaggtacataattctatatgggttgctggttttacttaccttggtacaatacctatatacagccacttcttctccagggtaattgatccttgcggatgttgaagttttccctagatgatgacacttatacgttgcgtttacttgactcttgtgctgttagatatttacctgatatgttgacagctggctcaaggatgcatgcaacctttattaatacaacaactctctcaaagtaatgtcttactttatgttgttttgccttatgatatatatgtattttaagtgctgagcctgagtatcgtacaccacttatttatgctaaattaaatgcctttgtgattaagaaaaggcaggccaattccaaaagtggaagcttaaactctgccatgagtcgcagcaaaatagatcagcaaaatccacaatccactacagctttgttactacagcagacgatggatctatatcctcctgggacatccaccaggtacacctgtttatgtttggaatttatgctgctgaagtgtaatattcaatatcttttgtcatgtaatttctgtcctgtgatacagttgtatgcctccattttattttagggatttcacatgctcttactgccggctcatccaggtatctttggttttccaaatttggcatccagagatagtattaactgaatacagtgctccaaaaatatacaaaaacaaagataatttgacttgacataatgtaggtctttcaaggatgtaacaaactaacaatctgcattttgtaggaggtatgcttattatggtgattagtcttgtgttatgccaatgtactgaatgacaggaccagtgtatcttagattatggcatgtgccaatcgccctattttttttgtatctactaagttgaatgttggtctgccaatgtatgacatgaccagttatgactactagcatcctttctcatcagtgtgtccagtcttaagaccccttatgctttccaaagtccaaacgataatgagagtttctctggcttgatttttgagaagtcataaccatcaccagtcacaatctatctaattagaaaaaggtagacactatctgaaaaagagagaaggacacactgaacttcttttccttcatgaacacaccgtgctatgctcgttgttcttctcaattaactttgtaactgctcacatttgtatgcattatccatattttttagttactacaaatttcattcatactagcgtgtctgaagttttttgtcctgtctactaccttttgcagcctccacgcaccaagcactgtcatgactgtgataaatgtgtcctccaatttgatcatcattgtgtttggcttggaacatgcattgctaaaaggaactactgcagattttggtgagttctgaatttatatattgtgcagcttagtttgaacatatgcttctcaggtgcagcataatatcctgtgtggtgtatgtcatgcaatctctacataagcacccgagtgtcctgcttcagttaacatgtgtttattgtgagaaatcaattatttgtgtgctcatccatccattatttctttaggtagtcaatttgtgtcttgtcttaatttttgtactccaagtctctgtggcagaactgtagatcgagaaaacctgtatgaagataccaggttataacggttatatgccttttgcctaattatcaaaccatgccctcacactttcttcatcttgattcttatcaaggatttatttggctgcaattaactgtgcacggaagctgtgctaaatcattgccatgcctttcctttaatattgatctagtaggaattagcaggactgtgtgttcccagcaattcattcaacctatacctcccatcttccatagtccagaattctagaagtctgatgcttgttattgtgttacattttcttgaggaggttggtcagggatcatgttagtcttaattcttaggcatcctaaatggaaaaaaaaaaggagctaacatgcctcattgaaatgtacatataacaatctaatgttgttctattatatgactcatcgaaagtcttggcagctatcctcaggacatattaatgtttttcaggtggtacatattcgaacaaacagttttaactgtctggactgttgctttctacattcagttcttttatttgggcatcgttgtatcctggtatgtattttaccccttttagaccctatatgcacaaagatttttcagttgtgccttttagttggtctccagtttgattcgccagacatctcatctgagtatattggttatttttcatggacaggtggaagtttgctattggtattgtacttttggtagcattgatattaatcctcgtggtcctgctgcccttgttgatattccatgcgt

SEQ ID NO: 21897 - DNA, 586 bp, Oryza sativa
ggacattggtaagcagtgactcctttaagcatccaaggcccccaaaagcttatgaggagtcaaacttctccactgtataaaaaacgacgcaactttgtgaggcaagtatagaacattcgacattagtttactattaacacacccaatcgtttcttgttagtcaaatggaccagaaacctgcaacaaacaaatacaacatataaacgttacaacataagatttattaagtcaactctatgtaagggcactctgtcctattggaacatttctctgaagcaacaccatataaaaccttgccacacttttatatgcaaaatgatatatcggacccacgtcacgatggaggaatcatgccataagcgtggcacaaactaaatagacaccttgcctaatctaagctatgacatggtgagataaactttggtagtgaaccaaataagctacttttttaaatccataaaactttggtagtgaaccaaataactctgtataagatacttttttaaatccataaaatttatggtataggagtattagctaaagtaagtactttatatttttgggggatcctctagagtcgacctgc

SEQ ID NO: 21898 - DNA, 571 bp, Oryza sativa
agtcagcctaatgtttcaggcctaatcctcgctggttctgctgattttaagacagaattgagtcagtctgacatgtttgatcaacgacttcaagccaagatacttaatgtggttgatgtttcttatggtggcgagaatggtttcaaccaagctattgaattgtcagctgagattctagcaaatgtcaagttcatacaggagaagaagctaattggcaagtattttgaagagatcagtcaagatactgggaaatatgtctttggggttgatgacactcttaaagctcttgagatgggtgctgttgagactctaatagtgtgggagaaccttgaaaccaacagatatgtgcttaagaacagtgcatctggtgaaactgtgatcaaacattttaacaaagagcaggaagctgaccagagtaatttccgtgatccggctagtaatgctgagttggaagttcaggaaaaaatgtctcttctggaatggtttgctaatgaatacaagaagtttggttgctcgcttgagtttgtcactaataaatctcaagagggatctcagttttgtagaggattcg

SEQ ID NO: 21899 - DNA, 687 bp, Oryza sativa
agcttaaaatatgtcttaccaagccagcagttgagcatgatcacacgggttcaattttaaaagtgcatggtataatgagaacgagatgctgcattaggtgtccattttagagcaaaaggaaggattatgagagaagttgggaaaactaaatgatttccttggaagatagctaaacttaatttcaataggtggttacacgtacttgaattcattctatcaatcttgtatggatgtatgtaaactctaacaagttctcatgacccctgtggggctccttcacactccacaagttggcttctctgattatgccagtgaacaatttcatcacctatttgattgcttgtgtttgtcatgattcagcatgcacagcgcgtaggttaaatggtcatcatactgtacttattgagatctgtcatagggctcctcagttcttttgtttttgtatgcagggtccaagatgtgtgcttgctggagaccatcttcaacttcctccgactatccaaagtgctgaggctgagaagaaggggatgggaaagacactctttgaacgccttactgaagcttatggagatcaaattacatccatgctcactatccagtacagaatgcatgagctcataatgaattggtcatctaaagaactttataataacaaggtgcacttcggggatcctctagagtcgacct

SEQ ID NO: 21900 - DNA, 952 bp, Oryza sativa
cgcaatctggtcacgtggaggcataataagagagatcatgcttgtgccatttcctctagctgactccagagccttgattagcttcttaatcttccagatctcaatgttcctatcagtttcatggctgtcagacatcttgacagagcttggatgactggctcacctgtacaatgccaaaacacagggatataagggatttgaagggaacattaaccagacagttcactcaagaaaaacttgcaaacagattaaaaaaaaacacagaacaaagacaagtcatattattgttatatagtacattcaactttcttgttgacacaagctctgttcatgataccaaattggacatggacatgctaaataagaaatgatacctgtctcctgtacaaattaatcaataatgagactgatttcttcaaagcagcatgctctattactttatacgtaacacagtgaaagaacaagaaaaacaaccaccgtttatcttactaaatatctcacaacaaaatttcggcagcaaaggtactatcaaataaccacaacactcagcagacaaggttaaaattaaaccacaacactcagcagacaaggttaatattgcccaatgggtggcaaattttggtttggtttaggaaaaggtaggttacgaaatgtgaaaaaggttttcatttgcatatactcaaatgatttttgcagctaacatgaaacaatcatgaacacatacgatgttatcactaggttacaggtacttggtaacattttttatgtgggacaaacatactgaaataaaataaagcatggagttaacccccaagacaaatgaaggacctgcatagccatgtaaaattttcagaatcggaatgtcacccagataaaataataaaaccaacataaaatctaaattatatccaagaaacagaatttagtttcaataatcacaaaaccgaaatag

SEQ ID NO: 21901 - DNA, 878 bp, Oryza sativa
acgacttcaccgccggcctgcctccgtcgccgccgagtggtgcctccgcctacacggctggcctattatgccgccgctgttgggcgtctacgacttcaccgccggcctgcctccgtcgccgccgagtggtgcctccgcctacacggctggcctattatgccgccgctgttgggcgtctacgacttcaccgccggcctgcctccgtcgccgccgagtggtgcctccgcctacacggctggcctattatgccgccgctgttgggggtctacgacttcaccgccggcctgcctccgtcgccgccgagtggtgcctccgcctacacggctggcctattatgccgccgctgttgggcgtctacgacttcaccgccggcctgcctccgtcgccgccgagtggtgcctccgcctacacggctggcctattatgccgccgctgttgggcgtctacgacttcaccgccggcctgcctccgtcgccgccgagtggtgcctccgcctacacggctggcctattatgccgccgctgttgggcgtctacgacttcaccgccggcctgcctccgtcgccgccgagtggtgcctccgcctacacggctggcctattatgccgccgctgttgggcgtctacgacttcaccgccggcctgcctccgtcgccgccgagtggtgccttcgcctacacggctggactattatgccgccgttgttggccgcttatgccatcaccaaggggaagcctccgtcgccgccgagtggtgcctccgcctacaggctggtttattaagccgccgctgttgggggtttacgactttaccgccggcctgcctccgttgccgccgaatggtgtattcaatggtaatgaaggaagactttggttccaca

SEQ ID NO: 21902 - DNA, 785 bp, Oryza sativa
agatgtcaatggcacggtaaagtccgtcatctattgggcgggcataatctggtatagcagcagccaaagaccgaaactttggcagctttaggttgacatctggtgcaacttcagctaggtagccatcaatcaacttagcgaccattgttataggcataagtgatggtgaagctaacatttgtgcatcttcaccaaggccaggggaagccccaccagtttcttgatccattgccaagaaatggtcaagaatcttgtggacacaatccacatcatagagcgtttcaacagactcagagatgtttggaatcagaagatcttccagggtagccttatcaagctgcatacctatccgtctctccaagtttgacacgcaagaagggctggcttttaggatgattgctgtccgcagaagaccaaataacagcttgcaagatgtgacccccctttggaaaggtaacagtctatcaatttcctcaagtaggtacttttgttcctcttcagaagggattgatgttaaagatgatattgaaaggcaactgctgacatcactgatgcttttacgccgattcaggccaggtaaacgccttttggcatagtggttcaaggatccaacaataatatcctgattgattcctcggtattccatagctgagattacttttttgtataatggaaggcttaagcatgaaacatcatcataccaccaatcagggctgctatgtcttggccttgctccggtgctaatgccattccacaagacgcttcctcctggactctgcatgggg

SEQ ID NO: 21903 - DNA, 8577 bp, Oryza sativa
  unsure (1)..(8577): unsure at all n locations
cctagaatcaaaatctaacaaaaacaagttcaaattcagttcaacttgctttaaactagttagtaaagtagttaatacctaagtaattgaaaaagtttcatactcatttgaattgggtatatactcaatttcaacaatggtgcccgggcaccatggagcaccaaacaaatttaatatatatatatatatatatatatatatatatatatatatatatatatatatatatatatatatatatatatatatatatatatatatatatatatatatatgtattaaagtagttaacgttaatacctaaatatttgaaaaagtttcatactcatttgaattgggtatatagtaaatttcaatcatggtgcccgggcaccatggagcaccaaacaaatttaatatatatatatatatatatatatattatatatatatatatatgccattatgtactcccgggagtacatactccctccccagtattggatcacccgatggatccaataggacctgttgaactggattggaaaaactgccgtgtaaaaataaataaatatttaatttgaaaaaaaaaaccatgaatgtaggcgcattggatcggctagaatttagcggggttcaaattttgaaattaccggccacactccaatcaacgtgcagtatatttcctagctaagtatatgctgttattttctacacgaaagtatatactgttttttttgtaagaaacggtatgtactgattttctacacgaaagtttatattctttttcttgcagtatattcctatataagtatatgctgccatttcaaaataaaagtatgtactgtttttagtaagcaaaggtatatactgttttttattagtagtagcagtttataggcagctgccatatacttctttttcatgtatagaaatatatacggataaatatcccacatacgtgttttttatgacaatatatacttctttttctttacttagtactgtgcttcaccaacctagtataagtactgtgctacagttaagtccagtatatacagtactgtgcttcagttaagtccagtatatactatttcttaggtggtagcaatatatatactcttctttttaaggtggtagatatacctttctttaaggtgcaagtatatactattcttaagataattgcagtatataccatttttaacagtagcagtactcagtgttagtagcagtatatatgctatttttattacttgcttttaccctgccgcagaactcagtgttcgagctgcatgcacgtaatgatgatccaaaagtttcgtatattctcaaagatatatagttccaatagaactagcctcacagacatgagaacatgttcaagaacatgaattgaagtatatgctgaatttctgattgaaaaagaatgtacatccaaatcgcagtttgtaaaaactaggatccttccccttgcgcgtatatatatatatatatatatatatactatctccgctggtgccgttggattgcggcgttgagtcgacatgttctgccgacggccggccggataccatctgcaagcaacaaaaagattaggggcttattcattcagggaactaaacaaatccatccaaaccaccatccagtatgtgcagtatgtgcagtacagcagtagccaagaaatgaaggagatgcacacattcactcatttagtaacaacttgcctacattttgcataagctagattgagatattagactccactgataagaatacacatctaaaacaaaaggcatacttattcaagcagtatatataggacatattttcagcaaagcgcccgtaccccattgacccagaattattagacaaactaacctgggcgtcatatactgatttcttcttacataggtcacatactgaattagaaatacactcgagatgttagcatgcaccgccatcttcagggatctgattggagttgatggttgtgggcatgttaattatcgcagtatcgtcagcctactgaatgtttgtacctgtgtaacgaaacaaaattagtatttttcattctgaactctaggattaatttttatctacatacgtacagagattaaaaggaagatggataagaaatagtgtatactcatctaactgtggatttgtgattcagaatttcatatataaactaaaaacagtacacaccaacaaaaattagaaagaacccctccattaaaaaaaatgagtatatactatcgtctaacaaagttcagtagaaagctccccatataaaaattcagtatatactatcgtctaacaaagagttcagtaagaaccctgccatagaaaaattcagtacataataacgtttaacagagttcagtaagtatccctccaaagaaacaatgagtatataccgtggaaaattcagtacatactaccatctatatttttttttggggggggggggggggctaaaacagcatttactatatccacccaaaaaaccatcatatgcactaaaggggaaatttagcatctgaaactgagagcgtacatgaaccgaactacacataatccctctctacaggcatacatatattcaatttcagccgactccagatcgattacttctgcttcagaaacataggctattgagagaggagccatcgctggaggaaggggacgagtcttcactggaggaaggaacgagctgctatctctgtaccgccgccagccaccccagtcgccgctgaatcactggtccgtcgccgcgccgccccccaaaaccccaattttcgggataagcagttcggcctcttacgagcaaaccccaaatttcgggataagcagttcggttttttaattagaaaaactaatcggatccaccgaggcaaacccgttatgatgagggagggagtataacatatctaatcgatcagatgaacggtggatgggagggggagtacgtactccctaggagtatagatccattttcatatatatatatatatatatatatatatatatatatatatatatatatatatatatatatatatataactactatacagcaccctaaggtgctacgtattaaacagcacctgatacagcctccagccccacccacccacgctcccaccaggtctatagtacgtagttaaaatttaactcaccgacgaccaatcttgatcccacccctgcgccccctcccctcactcctatagtccgagtaaattttttacttcatgctatccaacttcttagtagttctatatatatagttaaaatttaactcatcgacgatcaatctcaatcctacccctgcacccctacccccactccaataatccgagtaaatttttaactcgcgcaccaccaagagccacacccaccccaccctgtcaacgctcctacccaaacgatagtaatttttttactcacaccaatagttctatttataccatccataaccatctcaccgtatccaaacccccattcatactcccgtcctcttccatttttttcggatctgagaaattggggatagagcggcgacggtcgatgggtgactggtctgctcgtcggggcgatggcatggaggctgagctccgagtggtggcgaggagatccatcggtgaggggtggtgtcgtcatgcatccaggtaggagagggcgattggcgtcgggctgccctcctcttgaaggtgcccaatctgaaggccggcgccggtggtcattcttctttggagcccgtgagggtggcggcggccggctacgtcgtccatggcgtgcctcatggtcggttcagggagcacgcgagtaggtggccagcggcagtggtggccctgaaacaacgttcaagccggaaaggaggggaaggttgctttccaccttgtgcggcggcaacggtcttcaggcccggcgactagcttccaggccagcgtcgatgcgtatagggcaggagaccgatgtagacgttggttgctgcgccggatctggagggagcctagcgcatgcaccaccaccacgtacagcgtgcttctcgggtcatccgcatctctgttgtttctatcctcccgtggacgggggtttcgtttcatttttttctctttgttggttctgtagtttgttatgcacgggggattttttgtacgattgatatgcatatgattgattgtaatactccataatctaatattgactgtatgtgtcaaaatatgcgccataaaaggatagcgatactagtattttgatggcttaaaaattttcactcactttttttacggacagattgagtaagtatattactatgaacacactgagagtgatgtttaaaatatatggaagtaaaaacattactaaccctgataagtattatagggaaaaatatgtagtgcaaaccctatatataatgcaaacgtagaaaataccgttggatcgaaaaatagacgcccgatattcgtccatgtcaatatgagttaaaattttactcgcaaactgtgcagcaaaagaatccttgtgagttaataaattgctctggatattacgtttacagaagaaatattgattagttaaaaatttactatcatataccgaacaaaaatacccattagtaaagatttcaccaacggcaagaagattttttcactggaaggatcgcctgtcacgtgtatatttcatttaaacgtaccacggcaatcaacccctatgagtaattttttaacttcaattacgcccgctccaagtcaaatctcataatgagtaatttttttactcagttgtctgttgcgggggggggcagggtggtcgataatcacgtgtttctctcataaaccaaccactgtaactgatttgccccacggtaatttttttactctgtttgcacctgcaggatggggatggggtggcgggtctgtgctggggatgcgggctctcgctgagtggcgccacggtttagctggcgcgcatcgcctgtctcgccatgtataccttgataaaactaccatttatatatatactggttaaacaacgtaattttttcactgaggcagagacgtcgatttctttcctaagaaggcacaataattcttttactctgtgttcaggaggacaactcaattagaactgagaatagatgacagagatgagtaattttttaactctctataggagcggtgcaccacaggggagagaagtggaaagctgcaggtggacccaaaaaaccggaaaatcagggccggccacgattaaaatatcatcaaataacctttaaattaaaattttactcatcacaaaacactctatgttcaaacttactgcaccgatgtctatgggttattttttaactctaacctaagagtgtacgataacttgaaactacactacaagtgaaattttaacaagaaatattccatatgtggatttatttcacgagtaaattttttactcaggccctgtttagatgggactaaaacttttaagtccctatcacatcggatgtttgaaaattaattataaatattaaacgtagactattaataaaacccatccataatcttggactaatttgcgagacgaatctaatgagcctaattaatccatgattagcctatgtgatgctacagtaaacattctctaattatagattaattaggcttaaaaaatttgtctcgtgaattagcttttatttatgtaattagttttgtaagtagtctatatttaatactctaaattagtgtctaaagacagggactaaatttaagtccctggatctaaacaccacctcaatctacatgcaggcaggggatggggaacgtggcagggggcggttagaagcgctagaaaattcgctggcaaaaaaaacggaaaacaaggacaggacgggcggaggcgcgccaggaaattggtggcgcgtgtgaccccatcccgccggtcaaacccacgtcaaacacgcacattcactccctccccgccaaccactttgatgttcacgtctcgcaggaattccgcagtaacatgacggtcatcgtgcagtaacaggataactttctcgcagtaacaacatcgaaaattagtcatgatatatctagttttgttaagcacttttttacaaacatcatggtacagacagattagaaaaatactatataatgtgagagatattgccctctaaagattgagatctacttttttttaagttctcgtctatctagaacggcgtagtaatgggacaatcaatgtgcggtaacacgactactttccacagtaataacattataaaagaatttttgtctcgatcatcatatagtaacaggactattgtctcgctgtaacgtcgttttaaagtattatggtgaaaacggttctaaaaaacaatatatgatgtgagagatattattgtttaaatattagaatcctaaaagtttacttgtattaagtttgctactatgtatctttgtatatatgtatctttgtccatacatagtatctttgctaaaagatactatgcatggtcacaagttaacacaagtgctaaaagtgtttttctttgtctatacaaatatacatagatacatagtagcaagcttagtacaggtaaacttttataattctaatatttaaacaataatatctctcacatcacatattatttattattttttagaaccgttttgactcactcaaatagaaatatcatttggagtgagagtcatattagtatctgaggggtaaattgagaaaaataataatttagggtgttaagtacatctaagaaatagtttaagtagtaaaaactgcatttaactagggtgttaagtacattgaagattgttgtatgatggctcattccttggcaacaactaacactgttgttccttggcattactcggctggacttgtctgatgtaatgccatgtgatcggaattcaaatgctggaattaaccgtgaaagagatggaaagaaatgctaccctgttagggttgcctgttgtatatcagttggaaggaagtgaacttcatttttcattaaatcctccaagcgatatctaagcaattactacttttaattactagatatctctccaagcaatctctaagcaattactacttttaattaccagacatgacgtctggtaattaaaagtagtaattgcttagagattgcttggaggatttaatgnaaaaatangaggttcacttccttccaactgatatacgacgaaccagaacatctagttggtaattaaaagtagtaattgcttagagatcgctcggaggatttaatgaaaaatgaagttcacttccttccaactgatatacgacaggcaaccctaaaagtgcagcatttctttccatctctttcacgattaattccagcatttgaattccgatcacatggcattacatcagacaagtccagccgagtaatgccaaggaacaacagtgttagttgttgccaagtgtcgaaacatgaattcggcaataataaaagggggtaacgcacgagacctaaaagtggatggatgcggagacaaggatttagacaggttcaggccctctcaatgagaggtaataccctactcctgtttggggatttgaatccgccgggtgtagtatagatctaacgatcatatatgctcatgcccttagagggccttctgcccaccttatataggatggggagcaggattacaagatagaaaccttaaccaatacggtatcggtttcctaaatctattttacaatattatcaaatcaggactttaggccgctccataatataaaaggaaacgtaataccatgccgtgtgggtatggggtacccataatctccacagtagcccctaagaccttcatgtcttgggtcatataaatgagaaacgcatggagaagcttcatagagatggacttctacactcgtttgattttgaatcatttgagacatgcgaatcttgtttacttggcaaaataacaaaggcacctttcacgggtcaaagtgaaagggcaagtgaactattgagactagtacatactgatgtatgtggaccaatgagctcaactgccagaggtggttttgggtactttattatctttaccgatgactttagtagatatggttatgtctacttaatgaggcataagtctgagtcctttgaaaagttcaaggaatttcataatgaggtacaaaatcatttggacaagacaatcaagtatctacgatctgatcgtggtggagagtactggagccttgaatttggtaatcatctaaaggagtgtggaattgttccacaactcactccgccaggaacgcctcagttgaatggggtgtctaaacggaggaatcgtacattgttggacatggtgcgatcaatgatgagccaaactgatctgccgctaagcttttggggttacgctctagagacagctgtgttcacagtaaacagggttccatcaaaatcaatggataagacaccatatgagatatggacagggaagcgtcccagtttgtctttcctaaagatttggggctgtgaggtttatgtaaaacgtttgcaatcggacaaactcacacctaaatctaaatcagata

SEQ ID NO: 21904 - DNA, 767 bp, Oryza sativa
tcctgcagcccagaaccataggagcatgtgaagaagcaatcatcttagcacgacgacacaatgtacaaaccagatcaagatctttcttaagtttagacaaaccacgaacaagatccaaaccacttaacctcgtgagatgatcaaatccaatatgtcgaagtttacgatgcgaaaacatcgcatccttattaaacttagaaaccaaacatgttatcataggtaaaacagaattttcaaaatcacctttaaacactcttccatagcgagagatattcatcataaaatcaccacaagaatcaaatactttacttacaattttcttaaagtgaacctcaaaattttcatcgacaatttgtgaaactaaaagcaaattatactttaagtcctcaaccaaagctacatttttcaattcaaacttgtcatttaccttgaccaaacctgtggcatgaacggcactagtagaagcatcaccaaagataatcgattcagtcttggatgcctattcgagggaggagaaccaatttttattaccggtcatgtgccacgaacaaccggaatccatgatctacatgttcttcttcctcgccaccaaagcctacacacaagaagatgtcgaagccttagtattggggctagataataaaaatttaggaatccagtactgagatacacgaccattagatccaataggcatatatccctgtcacgccgggaatttctatccaaaattccaagcgcttacatgtgtgttaaaccctcgtccagga

SEQ ID NO: 21905 - DNA, 2692 bp, Oryza sativa
ccaatgatgcgtgtcgggttcaatgtccaagaaacaattgaatcactaaataaaactcattacaccattctttcctgagatttgcattgattcgctgaagaatgtgttgttattgttatgcctttaacattaatggtcatccacgaggacaaaagaaatggctaccaaccattggaacgtttctgctttttttttgtttgatatattcatattttgacaataactattctgcacaagtggacacatagttgtatgattcacagctgatggttataaaataaattacaacgaaactaggatatatgtgattatttctgctgcgacaaaagttcggcctgcgtgataaaacgaccatgaaagccatagggaacacgggcaggcagctgcaccgctgcaacaatttccagttctggagacatggcatccatcaccacgaactggctctctccggtatcctctttgtgtgtatagcacaccacatatccattgtcctcattaccatccccattatcattgcttggcacgaaaaatggctccccaacaaagcacccggggccaaagtcacggcgtgcaaccgtgcagtcgtcagcaccaaccatggcaaagtcgagctttctgattccagagaacctgggtaacggtgcgcttacaccaaagtatccatagcggttgtatcgaccgacgtagccctgatgaattacaccaaactcaaggctctccagtgagagtgcagtgcgcaaaacggtaccagtgcggagattgatatgtatcatgtcaacctgaacttgcatgagttccatgttgccaagcatgtgtgacagataagttgttggttgacaccaatataatctcctctccattagcttcctcccaggcattagctgtatgtagcatattgaatcctgggaccttgaaccacctcatctctgactcgtcctcggcataccttggtagcacaccaatccgttgtaccattgcactatccaatcctatcagcgagccaccacgtagagccatgttcatcggacacatgacaagttgcgactcagggaagatggcataatgctccgtgattgcaaagtcatgtagcattgatggttgctgcaaggagaagatgggcacatcatcagccttgttgccagccttgtcaaaccaaatatacgtgagaaatggctagaacaagctataacggaacgcgaataactctccagtgactgggtccttcttgggatgcgctgtcattcctatcatgcggcgaccatcaaagtcacaacggtgctgcggtagggataatagtggctgggtagggacaagccatggcgacaatggctctgtccagcctgcaaacttttgtaacggatgggagcatggtattggtgcactcagctatatatatatggatcgccagtgaggtgtcgtacagtaagtttgttacgctatctctatagaatggtgtagattgaagccaatcatagcaaactatcagcaaggtttgcacttcagtaaacaccgaaatttcgagagtttcaattggttttttttccacgaaattatttaaatgtttaacaaattttgactgaatttgaataaattttcaccaacttcattaaaaaaatgagagtattcgaaaatttcggatgagatgtttgcttgtcaggggattcgaaatttccaaaatttcgaaccaagattttaaaacctgactatcaatatgttgacgaagagaaatttcattttaataatacaaatgagatataatatggtcttcatcattcactattgtagtgtcgcctttgcatttttggcaactagcaagagtcctatttggacaagctagttttctggctcacaatcaaagaccacgttacggcgtggctcaagcattcattcgagcccaagaactgctcaagccattcatatcggggaaaagtacacccaaggtccctcaacttgtcatcaagatacaaaatcgtccttaaaccgcagacccagatatcagaggtccctcaactaacaaaacagttcgcttgaggtccctcggcggttttaacaccggttttagcctacgtggcggctgagtcagcgtgtccacgtcagcctcctctctctctttcccctcttctctctcttcctcatctctctctctctcttactcttctctccggggctctctgggcaggggagcaactgagaaaggcggcagcggtggtgggagcaggggagcaaggtggtggcacgcagcgggggaagcaagtcggcggttgcggcctccggtctcccccgccctcttcgctctgggctgaggccgccgtgctcgccccgtcgtctacgctctgcccaaagcggcggtggggggagcaaagacgtcgtcagtggcgggggaagcaaggtggcggcgagcggggctaagtggcagccggtggagcagagcggcggcaggcgagtgcggggcagccggcgaagcggagcggaggcgggcgagtgcgtggcggccagcggatggggagaggcaaccagtaggccccctagtggtcatcactcggctgccgcgtcctcgccactgacgtccccgaccgcgtcactcggcgacgagcgtgttggagtccaggttcccgccccacggaggcgcagccgccgttgccgcggtgccggcgccgagcaccctcgaaatatacgggcggtggcaagcggg

SEQ ID NO: 21906 - DNA, 604 bp, Oryza sativa
tgccgccgctgttgggcgtctacgacttcaccgccggcctgcctccgtcgccgccgagtggtgcctccgcctacacggctggcctattatgccgccgctgttgggcgtctacgacttcaccgccggcttgcctccgtcgccgccgagtggtgcctccgcctacacggctggcctattatgccgccgctgttgggcgtctacgacttcaccgccggcctgcctccgtcgccgccgagtggtgcctccgcctacacggctggcctattatgccgccgctgttgggcgtctacgacttcaccgccggcctgcctccgtcgccgccgagtggtgcctccgcctacacggctggcctattatgccgccgctgttgggcgtctacgacttcaccgccggcctgcctccgtcgccgccgagtggtgcctccgcctacacggctggcctattatgccgccgctgttgggcgtctacgacttcaccgccggcctgcctccgtcgccgccgagtggtgcctccgcctacacggctggcctattatgccgccgttgttggacgtctacatcttcaccgccggcttgcctccgtcgccgccgagtggtgcctccgc

SEQ ID NO: 21907 - DNA, 612 bp, Oryza sativa
tactttgcttatatggccattgacagtctacctggcaaccagttttgggaaagaataagacttatattcatcccatcaagccgacgctacaagtaatatctctatctgcatctgtttaccccatttgaacaatgaattgcatgcttgactacttgcggtgcagcctatgtgcctccttttggattaatcgtaagataatccattttttgtcaaaacagtgattaacagctcacactatgcttcaacatttgcagggttttggagggtccccatgcgtctttcatggagtcagtgccttcaaaaacaattactgtcttcacgatcttccagttggtttacctcttgatatgcttcggcataacatggataccaatagcagggatcctgttcccgttgccattcttccttatgattcttatcaggcagcatgtcctcccaaagttttttgagccaaatgaccttcgggaattggatgcagctgagtatgaagagcttgaaggtgtccaccacgatcacacgctggtataaatttatctcccattcttggattatttacttgtcagtgatgattgtgtttcactctttaattctccgatgggtaccgagctcgaa

SEQ ID NO: 21908 - DNA, 622 bp, Oryza sativa
tcctgcacgggaaggttctacgacgacggccagctggtggtggcgctgtccacggggtggttcgacgggaggagccggtgcgagaaggacgtcgtcatccgggcgagcggcggcgcgtccgtgacggccatggtcgtcgacgagtgcgactcccagcgcggctgcgacagcgaccacaacttcgagccgccgtgccggaacaacatcgtcgacgggtcgccggcggtgtgggacgcgctggggctcaacaaggacgacggcgaggcccagatcacctggtccgatgcttgacgacgacgacgacacacgtagtgacgtagacgccatgtaacacggccgtataatttcccattaataagcttatatatattccctaacagtgatgtatcgtaatttttcttttgtaaaattaaacacctcttgatatatcaagtaataaagagggaatactaaattatactaagagaattgatacctcttggtacatctcagatactataaaaatttttcttaaattttatcattctttggtgacagatgaagctctaaaagaaaatgaaggatggagatgttgtaaccgaacacaacacataccacaccatatttatatatttatattgta

SEQ ID NO: 21909 - DNA, 627 bp, Oryza sativa
cgagctggccgcacgtgagttcggcgcccgggtgaagggcgtgacgctgtccgccgagcagctgagctgggccgagcggcgcctgcgcgacgcgggcctgcaggacagcgtgcagctgcgctaccaggactaccgcgatctgccggcccagcatgccgccgagcccttcgacgccatcgtctccatcgagatgttcgaggccgtcggccacgagtactgggcgggctacttcagcacgctgagcgcctgcctcaagcccgggggccgtgcctgcatccagagcatcaccatccgcgacgacctgttcccgcgctatctgcgctcgacggacttcattcagcaatacatcttccctggcggcctgctgcccagcccctcggccttcgaggcgcaggcgcgccgagccggcttcatcgtcgagaaccgcctggccttcgggcgcgactacgccgagacgctgaggcgctggcgcgatgccttcgtcgagaagctcgacgccgtgcaggggcagggcttcgaccgccgcttccagcgcatctgggccttctatctggcctactgcgaggccgccttcgataccggcaacaccgacgtcgtgcagttcacgctgaggaagccggggtgcag

SEQ ID NO: 21910 - DNA, 3864 bp, Oryza sativa
cgccaggtttttttatcggacttttctttttttttcgctcggtttttttctcccgttttttgacggacgacagaagcacctagagaagtgttttttttcttttctccaatccaatacagatcggatctcttccagggaaatcagattttttttctccagggaatcggactctttttttttcgctttttttattcattaaacggtttgtctctcggactttttttccctttttaagggatcgggtgtttttttgccagggacgggtgttttttttgcccggtttttttttcactttttttttggatcggacttttttttcgtccggtttttttatcggacaaacttggttttttctgcccggttttttttcacccggtttttttgacggacgatggaagcacctcttattttttaagtagtccggttttttttttcactttttttttggatcggactttttttttcgtccggtttttttatcggacaaacttggttttttctgcccggttttttttcacccggtttttttgacggacgatggaagcacctcttgttttttaagtagtagtagatacgaagtttctataccaaatgtttctacttaaaaaagtttatatgacatatatttatatgtaatatactccatccttttcaggttataagacgttttgattttagttaaagtcaaactgttttaagtttgatcaagtttgtagaaaaaataataacattttcaacccaagacaaacttattgtgaaaatatattcaattattgatttgataaaaataatttagtattataaatattactatatttatctataaacttagtcaaaattaaaatattttgatttttacctgaaacggatgaagtagtttctataccaaatattttgggtgtaaaatttgatattacggagtgtttatacggagaaagtaatgctggattaattcttcttccatgcatgtcattccctcatatagttagcgtgtgccattacgaaatttctaattcttcgcgaacgcgcaaaaagattgtacgaaatttccaattcgattgcaccgcctatcgaaatcaaatcggtaagcgccgcgatgacgatctgatggcgcgaacaccagtgcctgaaattctcttcttgtgcttggtggaattaatagatgggctaaggcccattcgaaaattaattatttggaaaatcacaaaagcctacctcatgggatgacatacatgtggagtttagtttagtaccaccttacttattctagaagagggggacctccttaaaaggaaggatgccctcctagccacttgaagcatgtatggtggagagaagagggggaacacgcgcgctcgctcgcctagcagggcaggcggcgcgcgcatgacgtacgcgtcgaatggtccgcaaaattggctcctcacccttgagcagatgcagcctccttttgcaattttgtttaaaatccggtgcgtgaaaacggcgtggagtccggataagttacgcacgaaaattcggatttgttttgttgttggaaacattccgaaaaatccggtgcatgaaaacggcgtggagtccggataagttatgcgtgacttatctggctcggttacgcagagtggagatcgtgcgggcgccctgatcaagcgacctatctctatataaaccgtgccgccgccttcacgcaacacacgcgaaattaatctagggtttgcctcctcctctgtgttgtgtcgtcgctcgtagactactccatcccgctcgccagcgtgcaccggcgatcgggagagcaggtctccggaacctctgtcttcgacgtcctgcatcgggagaagacggcaataaggtttttgggaagcgtttcgcgcgactgctacctgttcatccgtgacggctcgccttcctctccgctcacgtgctgcgccctttgtcgacgctcgcaaccgcgagtagttcctgccgagcaaccggtctttccgccaactcggtacgtgttcgacatattgcgcatatttgatctgttcatgttttactgcttagtttacatgtgtaaatctaatgatgcgttaatactagtatacatctgtaatgtcatgatttatttatggaatatattaaatcattatatgcctatattttcaacagttcttcggttaatttccgcacaagtgcacaacctgccagctgaatttggcagacaattaacgaacacgacatacggattatgcactttgctatcatcttctggaaaacacttctgcatcttactgtcaaaaatctgatccctgatacacgaacctggctgcctctgaattcttcggtccaaaaggcagagtagacttaacgaaagtaacaagatgcttttacataagcacattaatttcttcctcgtagaactttatggctatacgcatgaagaattgaagataggagctcgatcacaatttcttatatccatcccgataatttggagaaacatctcccattcactgggcgagagctgagctagtgaaaagatcgcgttcttgtgcgtgtcctcgtcattgggctctagcctagccttgagcgtagcgagtgatcgatcatctcgcgtgcttatgtaaaagttacatccatggaagttgccgaatcattatatgtaaatgttattttctttttcaatatactagaatataagccatggttaaagtttatttaacggtaaaacatatcaaaacaaataaataacatttatataaatattttaataggatgaacgatcacatgtcatataaaaagttagcatcatatattaaaaacagaggaacaatttttttttaataaaagttgcataaatatacatgtcttcccattggacagacaccagccaccacgatggtgtcgcgatagggacgggcaacatgcgttttttttttaatttcgatagaacatgagttagggcctgtttagttggtgaaataaaaattttttggtgccatatcggacgtttaatcggatgtcggaaggggttttcggatacgaatgaaaattttcataactcacctggaaatcacgaggtgaatcttttgagcctaattaatccgtcattagcacatatgggttactgtaacacttatggctaattatagactaattaggctcaaaagattcgtttcgcgatttacatgcaaactatgcaattagtttttctttttatctatacttaatgctccatatatgtgtccaaagattcagtgtgatgtttttggaaaaagtgtttggggaactaaacagcctcttaggccgtgtttagttacatttcaattttttttaaagtatacggacacacatttgaaatattaaacgtaaactaataacaaacaaattacatattacggctgtaaactacgagacgaatctattaagcctaattaattcgtcattagcaaatgtttactgtagcaccacattatcaaatcatggcgtaattaggctcaaaacattcgtctcgcgatttacatgcaaactgtgcaattggttttttttttcttccacatctaatgctccatgcatgtgtccaaatatttgatgtgacggaaaagttgaaagttcgaagaaaaaagttggaatccaaacacagccgcagcctatttgtagtactttttatagataatagaaataggttacatctccggtctctttccgtaggcacacagcaaaaaaagttcagaaatgaacagaaaaaagctttaaaaagacgagatggaacaaactcccaacttctgccgataatatgatttactaaaataatattttttaaaatcacgtagattctatcacgaaattctgtaggtactacgccatccaagggctgcaggaatt

SEQ ID NO: 21911 - DNA, 6464 bp, Oryza sativa
caacaaaataacttgacaagtactttcaggcttcagcggtatgctaagcgttaagttttgcgcttatcacacttctatgttagctgcatctgtgattaccatgtgccagaagcaaaattctttccatacaagtactattaactttctaagaaaaataatttgatattatcgaataccatgtcatttagacaaacttgtagcatatagagatggcagccccattgtttggctgtttggtggaataagccaaacggtatattcgcaaacgaaaagtaatttgtgaaaggctaaaaaataaatttcgataaaaaaaaccctaaaatcagctctaaatttaagagtgaaaatttaaattttggttgataagcataagcattagtaaaaagatgaggccgtctatattgtcactgttcaccggatcttatcattcctttctttcttgtatacgcacgaaagctgcgtatcattccattaagagagaagaaaaggaaaaaaaaatcacggcaaggggagctgaaacgccaccactcatatcaaacacaataacacatacaagctttcaccgagtctagggactaacctatctaacgattcaattggtttccaccattgtcagttaaattacggaaatttagttagcagaatattagtgcctaatggctgacagtactgaccagtgaccaaagatcacctggtaatggtcgatcaccatcaaatttcacctcaagtaggagcacttgtgattttgtgaatacaaataagctgattatttcttagctacaaaagaatgacatgagttttctttctcacatgagattggcttacgaattccacaaaagaaaaaaaaaactttacatactcctgtacgcgacccgaaaacgcataaccgatttggattctaacacttcaacaaatttggcgtgaagctacaaatatcgccaatccggcagtcagggcaatgaaccagtgttaccaagcccagctatcatgcctgtaaatgtggccactgcaaatccaagcaccccaccagcaaaaacctgagaaatgcatcttgaaatcattaatgtgtttcacatatgtgctagaaatcagaatatcatcttatgcaataacatgcacaattgactttctaaattgctaacatatacattcaagcaacagatcaaacctgagctggtgtgtgtccaaggagttctcggagtggtcttgtttcagccagtggatgctccgatgggagttcatacacaatttgattcaagacctaacatgttaaagtagttagaactggaatgcaatttaagcatccatagaattaaagaaattatggagatatccaacagaaaaatcgacaacatccttctcaacatatgataaatactaggaataacatgggctattaattcagactatcacaaacataagcatgtgcatatttcaaatagaaccacacccttccttctctctccagcaaatgactcgtgtccttttgcttttaattaaatggtaatagaaacgtgaaatattcaggtcatacctctgcttgcttccctgcatgtagcctgacaccaaaagcatcatacataacctgcaagtaattgccgaaaagttagcagcttccaccaagtgaaaagaacaatataatccatgatgaaaatgcagcatactgcatttctgaagcagatgactgtaaaaatccataagaatcacaatcaattatgtgaggatgctacattgccaggtgcgggacaggtagggtgagagctaaatcacaggacacttgcaatctttaaggaagaggctagctgtcagctgtttgtattattgcgatgtcctcgactgatttttgtagtgccaatataagtagaacaatcatagtgctaacatgctattgtccttccttccactagtttaatcaactaaacaaagaaggcctgatcaattataatctcaggatacatcttctcttccatattgcaataaagcgagaaaaaaaaatgcaaccttgctgccatgattatcagagaaaattgattgaaccagttgaatcggatcaagatttaaaatggattgaaccagttaagagaactgtagaaagaacatagtaaatttactcgttcccgaccaatcaactactagtaatattccaaaaaccagtgatcagatccacaccccattaacaaaagcctgaacattcggatgaagaactaaccacggacgcgaagatggcggcggtggcgaagagcgagctgccgaacccttcctggaggccgacggcgacggcgagcgcgacgacggtggccgagtgcgacgacggcatcccgccggaccccaccagctgcttcgcgtcccaccgattctccttgtacctacaccaccccccacccacgccaaggtcaggtcaggtcagatcccgccacggggggagctcggatccaggtcagtgtgacgtaccatgtggtcaacaccttgatgaactgcgcgatggcgccggcgaggacggcggcgacgagcgggcagttgccgagcgcggcgaggtaggagaacgacggcgcgtcaccctcacccgctcccaccggcggcgccagcacggaggcggaggcggaggcgttgtcccccattggatggagcgggcgggttctagaagcttctggaagatctggcgcccggcgcggtgcggggaggggaggcgagcggcggccactcgtcggcgtcgtctgccgcgtgtgcaggtggaggtgagggttcgtgggtgtggccgcgcggaaggtggaggcgagggccgaggggaagaggaattggtcgggtccgagctggcatgtgggcccggctagttgctgacactttgtggctggcattttcttctactctcaagtctgaacagctgcgtttgagagctgaacatggtggttttagttcgcgaaaaaaaaatttaggtgttaaatcagatgttgatcggatatcggaagaggtttttggatacgaatgaaaaaactaatttcataactcgtctggaaaccgcgagacgaatcttttgagcctaattaagccgtcattagtatatatgagttactgtagcacttatggctaatcatggactaatgaggataaaaagattcgcctcgtgatttccatgcaaactgtccaattagtttttgtttttatttgatgtgatgttttttttgggaaaaatgggaactaaactaggcctctgtatttggctgcctttaagagttgaaagaagagtatattttcacgcacatatttcccgaaatgttaaacggcgcatttttttatgaaacattttatagaaaaattgctttaaaagaaaaattaatacactttttaagtttatttttttttgagaaacacgatacaaacgcatgcgtccacaatacacacccactcacctgtacggacatcttcgaaggactaggcccacggatgtctcactgttgacgggtacgtcatctaccactgaaaaaataattagctataaatgcgagcacccgagtcaaatctacggttggatttgaacctggatggactggtttcaccacaagaaacctaaccagttgagttagttcacttcgcaagtttaaaataattaattatgcactaatagcttaccttgttttttatatcttctttattcctctcttttcaaacacagaaagctaaccagatgagttagctcacttcgcaagtttaaaataattagtacttaattaattacacagtaatctagcttaccttgttttgtgtatcttctctattcctctcttttcaaacacagccaatctttgcagttacaaggatacctgatagatatatggtggcatttgaatttgatgaagaggaaatactaagttggtgtatgtaaaacgagaaagtcattagcacataataattaagtttaattattataaacttggcaaatggatatatatttgatattttaaagcaacttgtatataaaagttttcgtatggaacataccttttaagtagtttgaaaagcgggctaagtaaatagaggtaattaaatctgaatctcaatcataaaaaaacagggtagtaggttgaaaagcgtgctaacacggaactagtctctttttcttttttgaaatgttaaaaatttctcaatgagttgaaactgattactgaaaaaataatatggaagaaactcatgtatttctctacctctttttttacacggtatttctccatctctaacgctttaacaacgcagttccgtccatatgtcctcccgctcctactgaagcattccagttctttgaaagaaccataggcatgaggaaacaaaaaaaaataaaccggcttcagaaaaaaaaattcgttttgctaacccatgagatcattatgattctccatatgagaaaacaagaaaaacacatatgagaaaactagttccggatcaattttggttacaatgcgcgagcaattatcatatcattagaagaacatctatatatacatgttgttctagaattttctgtgacatttgatacctattgtgcatcggaattttatgtgtataggacatatttcatactatgaaatgttaaacccgtatacttgcatgagcatttggtaatggagaaactataatcacatgagatatgtgcattagtagacccaacactaaaatttagtccgaaaaagtgcaatgtactttttattaatgaaataaaatttattatacatgaactgtattacaattatacttatcagaatgaatggtcctaactgcaatgcaatatcaacaattataatcctaattttccatgtaattatataattttacaattgaaataatcttcacagaatgtgttccctatttcacagatgtcgtgcttgatcatacccctttccctttgttgctgtcattgtaattgcattttgcttaggcggccaggacaatcaacagttaggcgttgcatttttcttaggccgtcgagacaatcaacaattaggcattgcattttgctcaggcagtcaggacaatcaacaattggtctgaagaaataaagtactagttaaactagtggtcattagttaacatcacaaacttatatttagtatttgctcttttagtgaccaatattttgttgttaggcacttaggatctttgattcatttatgtagaatctttgttcatttatgtagacaagtttcaacgaagcctttactctctcccttatagtatcaaacaattaaacttctaccaaaccaaatggccaattaatcacttgggctcactcctcgccctacgagtctcgattgattgcgtccatgacccaatcaagtcggacaaataactaataacaggggtagcgagatgtgccttgcgtccttaagccaattgttgccatcatcaagttgtgggggcaaaaccatggcttcttcattttctcgggagattaggggtaaagaagaagagggaattatagcttctaagttgcttttccggtcatgtcatacgccaatgtcatggcataccataggagtaagtataccttcggatatgtgcaaacctactttcaatgaatacattttaatgatgcactaaaatcaataaaactctcaataaataaattattcatatatacctccggatatatgaagcttttaaaggttctttttccactaactaacatcggaccactaattgttatccacttaaaacatgcattcagggcaggtttgttttgaggcttaaatttggcttattaatatttgtgaatttcaatagtgtttagtgtctatttggtttgaagccaaattttgatatgcctaagaaaataggccatttcaatagttaacttatgctattttggcttcaatccaaatacaactttgccttcccaaaattaatcatgccaaaacttaccaaaatttggtattgtcaaaaaattagtaaggccaatttaggggcctgttcactttgatgctattttcaaccttaccaaattttaataaagttgcaaaaaaagtgactacatttaatttactgccaaattttggtaactatataagaaattctgccaaaatagcatcaaagtgaatataccctaggtcacaaaccaaaccagccctcaaccttttatcatcaaaaccttgcggattagcattagcttatccctggaggcctttttttaatcagaaaaaaatctcatcgcagaagtttttttttttgggcaataggtgcttctaacaaatggtaaaagccctagctagccccgaggacacgcaaccgcccttaccaccgtccacccgaaaaatccaacggccaggatgtcccccttcgcaacaagccgcgcagcccccgtcctagtcactgccacgtgggtcccacagctcagcgaccgagcagacacctaaaaccgccgcttacaaatgggcccccacccttggcgattcgagcccccaaagctcgcgaggtcg

SEQ ID NO: 21912 - DNA, 5922 bp, Oryza sativa
cccggtggtgccaatcgagctgcttcgccccccggattcgagggttttgtaaggggccgcccctcatccgtggcggccgtggaataataagctgggcctcctccccctccttgaggggttagggttaggtttttgaggaattgcgggtggattttctttggtccggcctgacgcgtgaggggggtttgcgcgcaatgatggggaagacgcagaagttctccaaggggcacccgctcggcttcgtgccggattaccggcacggcgtggagacggtgggggagtcgaagggctgtatcgggagcccggagcggatcgtatcggggagctcgtgtgctgtgccgaagaggaaatgcggaatcctgaagacagaggatggaggggagcttccggggttcaatgtgccgcgggacgtcttcatgctgccgaggatgtcgccttcggataaaaaggacctcgagatgaggctccgcaaggagcttgagcaggttaaggccctacagagtaggctgtttttgaggccggctgcggtgagcatgaatggcggggcggcgtcagcttctggagacgtagttgcaaagagaaacgatgcgaagcttaaacggagcaattcagtgcagtctggcagaggagtgccaccatcagcagccacacctgtggtcaggtctgcaaactacgcagaagcttttaaacaatgtggcaaccttctgaagaacctcttcaagcatcagtgggctggtccgttccttgcgccggttgatgttgtacagttgaacattcctgattattttgacataatcaagaagccaatggatttgggtaccatcgagaaaaagttgaatgcaggcatgtactctacaccttgggattttgctgcagatgtgaggcttacttttgacaatgccgtgacttataacccagtcggtaatgacgtgaatttaatgggcaaagctttgacatgtatttttgaaactagatggaagtttatcgaaaagaagcttccttcactagatgatagattctctgtgagaagagagccatctcaaaagggtgcagttaagaaagataccattgagaaagattacccttctgagaaaaagcactcgacaaaaggtgtacacaagaaagatatgtttaaaaaagaggatgcttcaactaagccagctttgcaaccaaagaagagaaaagcttctcccttggttcagggttctcttgaaatacctgtagtagaagctgataaggtcattgatgatgctcaagtggtacagccttctaaggtgattgatgatgcccaagtggtgcaggcttttaaggtgattgatgatgctcaagtggtacaggcttctaaggagattatgacggacagacaaaagtatgagctaagcgtaagacttcaatcatatggtgggttgattccaaatcatgtagttgatttcataaggagccaccttcctgatgataatgagggtgatgaagatgagttagagcttgacatgaatgtcctaagtgatagtacattgtttgaacttcagaagcttcttgatgactatgatagggtaaatcagtcaggaaaccctacaaaagatgagcatcgtgaggttgaggtgggtgctgttgtattatagttatctttttcatcggttaattagctgattactgttttccaatctgtttggcagtttgaaagtgaatatgggcttagcaactcatcgatgcatcatgaagaaggtgtacatctcattctttgattctttatgataattattgcttttgtggttttgaacttttatatgcatgtttgtaggtaatgagctcgttgaagaagatgttgatattggtgggaatgatcttccacctttgacgtatcctcctgcagtatttgaaagtgaaactgcagaaagaagcagcaagcatagcacttctagcagttctagtagtgattcagaatcatcctccagtggtatgttgtttatgcaatctattattgttttacagtcgctaactttctgtcttcacttctcttctgatgctgagttcagtaacatgttttcaacagcctgggctttataaccttcttaaattctatgccatgttgcgtgatacaaattgatggccttgttgatactgtcatccttattctgtgatgctgttttagtacttggtctgtacatgtatatagtttacaaagtagatagaagttcaaagtcttaactttgagatcttattgatatgtctggactgtttgattcttgtttagttcagactcatcccgatgtttaatatgccgagtgttatttattgcaatcctgtattagctattggactgcaccaaaaagaacctaaattctcatgcgtatgtgctgcaaaagtggacaaacaagtcagctgaacattcatgtcagtgggcaagtattgcaatttttatttggcaattgacattgactcttttgactgtttcctttaggtgcaagttggtaatcatccttatacagtatttagattttttgaaattctgtgtttcttttataatttatttcgcaactctatctctcagattaatatggtatgttcatgatctttgctctatgagagtccttcaattcatgtttctttttgttcacatcgatgatcacataccttgaacatatatttgcttgaatctagaccataaggcctggttatttcctccttgtttccccttctgtttgcctgtgcaattttgtaaatgctatcaaaccacaccattgtgtaaatcatgttagtcttgaacaagtgattctactccctctgatctcaaatataagtcgttttagccttctcaactctttactaaatataagtcattttagaatttctagataactttcgactacttttccttgttttcccttggtaaataaatgatatctccctaacaaaataaagcgattcatctttcccaatgcaatataaatggagagcaacaacgtcatttgattgttttcttaattcttgtgcccatgtctaaaacatccatatagtacagttcccgtgcgtgcagctattctgaagttaaaaaaaaatacaaatataactatccaaaacttaatagattgcacacgtaatattcaattaaccggctgtcaatatatacacatttcaatcaattgaacccttattgtttcccccttgaagggaaattgtattttattttatagtttcttgtatatcctgtctgtcctgatgaaatgtatatataacacttcattttttgttccatttaaatagctaatctaaatagtcattctttaccggaccaacagatttattgatgtctttatgactgattattctggtgcaagtttactgaattcagctctgaaccatcaaaatacaaaacttcgattaaaatcatatattatatatatggaggtgcctaagcgtctcttgttatgattctccctctagttacaatattgattgtttggacattgacatggcctataaaatgcaacttcgtccagtagcatctgttggtcaaatcctaggataccatggtattacggaaacacattttaagacaaatctacgtatatcatcttttataatcccagtatataaatgtccatataaataccgatagttgaaaatgtttgactgcatgcaatactaaaaagacacatgcctatgatcccttgccccttggcgcatgagtcatgacatcattctttttctctctcttttcattttcctaccctgtttagactttcatgtccaatgcgtttatgttttccttttccttctttacctcttcagattcagattcaagtagctcttctggaagcgatctggatgtcaatgttcctccatcaacaagtggggccaaggtgcttatctcaaaaatcttggggacagtgaatgtcttagaattttgggacatgagttgaatttctcaatggttcctctctttttcacatgcaggacaacacgcaatctgcggttaggttggatcaggaaaacggtatggtgcttaccctagtattccccccgtcccaaaatataattacctttagctatgtagctaaaggggctatattttgggacttgagggagtattttggagccgaacgcatacacttgatacagttgcacagtccatcctttaaaaattaacaccaataacctatttatgttattttgggctgaacaggcaaacgaaccgttattttctactatctcaagtgatcctaagtgctacatcactatgcatatatactggatccatgctggccaataaaatttgttgagaaaacatgtctgtctttagccaatttattcagacttgttttaacacaccaaatatcaaactgatgtggccagcttacatgctgggtacattattgtgacccaaacaagtctaactcctaaattcattttaactatcacatgtcaaacaattagaagtagtagttgatatagactgcatttcatgtgttctaatgttgggtgtagtcgggtaggacagtaatttaacctttcttatcccaccaaatatcacactttctgggaaatgatttatccagatatcattacacaggctgatcgttggatgtatgtgttacctttggtcaattcatttaaatatcttttgtaaaccatttgcactttgatgtaactgtcatagatattggagcatttataggaacagcgtgagattcagcaggccccatgtctgcttaactttttatgcatagttttctttgaacttctgcaattctagaatagctatttgtgtcttgtgtacttcaacgtcttcctcttatgattacagatccactgagctcgaccaatctaccacaacaaagtagtgatcctgtacctatttctgccgaagatgagggtaagcatggaatttcttaatggtctcattaaatacccaaagccttatatatatattcatctaaatatttcaggggagaatgtgtctgagaaacaggtcccccctgcaaagcaataccgagctgctgttttgttaaaccgctttgctgatacaatttttaaggctcgtgagaaaactcttgatcaggtatgcattggaaacttttgattgagagcactgttgcctgggcagctgatgacattgttagtaatcttcacatgatattattaatatcaggtcgcgaaaaaggatcctgagtgacttcaacccgacatggaggagcttgaaaggttacgaagagaaggtgagaaggaattgataacttttggctgataagccaagtacacttctgtgtattgaggcgcggtcttccttacagagagagctcggatacaagctgaggcaaaagcagctgaagatgctcgcaagagagctgaggcagcagcagctgctgaggctgctgcagaagctaaacgccaaagagaacgtgagagggaagcggctcgtaaagccttgcaacaggtaaatcatggatgagattctggccagaagcactatactctgttaacgtacatacttagtgtgaatgctattgaccctgcagatggagaaaactgtagacatcaatgaagggaacctctttttgaaagatcttgaaatgcttggaactgttacatcaggtgaacagtttcccagctcggttggtgagacgagtccaactcatacgcctgaaggccttggatttcagctaggtagcaaccctttagaacagcttggtttgtatatgaaaaatgatgatgaagaggatgaggaaggtgagtctgcagatgaaccaacgattgatgttgaggagggcgaaatagattgacatcttatagaccatttttggatacataaggaggtcaagcatgactggggcggatgcttctaacgtttcctgtctgcacagaaatttgtgaactgcactaattttgggagccaaatgataggttggcaaatgtgtgtgg

SEQ ID NO: 21913 - DNA, 6855 bp, Oryza sativa
cccattatgcatgcactagcttttattcatccggatgtatgtgccatcctactactgcccaaaagcttacccttgtgttactgtggaaatcaacctttttctttttttggattaggttagaaatatatttggaaggtcttgttggcagtcagtgatgtgagtggctagtttctgagaaactttcggggttcaatgtttgagaatggtacgcattctcttcatccaaatgttggttggatccatgtagaactttcaatttattttgtattacaaacttaaaaccaaaggcccattcagcttttttttaaaaaaacccaaatttcatgataactagttcaactgttggtaaaggtgataagagtaaaactggtgctagtttcaactgttggcacttggcagtatccgatcgattacggtgataatccgaagttgcggttttagggcagcatgccaagattcagggtaaaaaatcgcagcatgtggtaaatatgtacacgcagtagacttgaaagcaaaagaatcaaccagtaattatccatccctttcatctttctgcacacagtttccatgtccagcctacaatataatagtagattgaaatataaaaacacagtatgattaacccagcgacaatgcacaaacacaacctctttgtttttaattaagtcacataattaacgactgatgcatgcatgacacgtctcaaaagatcatcgtcgtagtgacaatgtatgaacttggtgttgaactttcttcttcctttgttggctaaaaaaaaaacttttgcagtaactggtttcatcatgtgtgcctatgagtagaacttgaacttgcagccacatgagattactatgatgaacatgtaatctacgagtagaacttgtatgtcttggcatctatgatgatctgccggagtcctccgattggtgacaggatcatgagcatcactccaagaatgatgcagatctgaaagagaatcagttgaaaaaaacaaatcagatcagaatgcaagatcaagcagaggcattttcatttcagacaaaaacaggggagaagattgaagaaaaacagagcataattagtttgtgtgttcttacccagttggtgaaccatgagagactgaaccttcttggcttgtagattgctagccacatgatgcagggaagctgccaaagaacacagaaaaaaataaccgtcagttctgaactctgatcatctctcagactctcacccatcaaaacgaaatgatcaatggaaaacttacgaagtaagtagttggcgcgaaggcgaatccaccgaagaacccaagcaatccaccgaagaacgggaaggtgatcgcgatgaacatggtgaacgctgcacagattccagatcagtttcagccatgccaagatctaataaaaaattcagttaagttcagatgatgaacacttgaacagtgcttaccaacgtagagtgttcttgcgatgaggcgaagcgtgaggccgggagggaatctgagcttcttgacgagcacggtctcgatcatgtcgaacaccggcatggcgtagatctggtagctcccgatgacatggatgacgaccatcatgtttgcgagcgcgatgagccatttgggcctggagagcgtgatgaggatgttgtcgtcgacgtggttgccgaacgcccagtatccgacgagcgccacggggaagtagcagagcgcgacgatgatgtaggcgacgacgacgcccttccacatcggcttcttggacggcttctccggcgtcgacgggatggtcgcctggatctccagcaccacgttgtgccccgcgtacgcgaacgcgacgtcgcccagcgcgctgaagaagccgaacaccttccccgtcgacgtcgtggcgcgcaggtggtagtcgacgtcggccaccttccccttgtccaccgacgcgccccacgcgatggtggagtagctgagcgacatgacggcggcggcgagggacacgccggagatggagttgaagtttgggagctgcgagaggacgaagtggacggaggcgaagatcatgatgaagtaggtgagcttgatgttcttgcagccgtggccctcgcagagcacgtcgtggaacttcttcagcgacttgccgccggtgaccatgtacacgatgttgacgccgacctcgacgacgagctgctgcggcaccacgatccagaggcccagcttctcgccgaacgcgtgctgcccgagctcgtggtacctgtcgaaccgcttcccgggcaccatctcgtgcatctccaccatctgccacagcgtgtagagcgtgatgatccatgacaggatcagcaccgcgatgccaggtcccctgcaaaaattcaagaattcagttagattaatttcttggttcgttcgtgtgttcttcgttcagatgaagatgaagaagatagtaggactgaccagccgagctcggacatggcgtaggggaggctgaggacgccggcgccgaccatggcggtgacattgtggaaggcggagtaccaccacttggcgttcctggacgacgtgatgggaagccagtcgtcgatcgccttctcctgcgcgctccggccatcctgccaccattgtttcgccattgattaattcaagcttgctactttgctacagatggttgatctcaacagtactagtacagactacactctatgcaagaaaggtttgttcttcttcttgttctgaagaattcggctcttctttatacatcaatatgtacgccgaatcgggaaatttttcccaaattgtttcgcatttttcactttcggtttttagcaacatggaaaagtagcaagttgtcccataaacggaatatctttgttgggccaataattcgccatttcaaagtttctattcttacgttttttgaaaatcgagatttcgaatcattcgagtaatgcttttaatacttttcaatgtgctataacgtcgtcgccaattctgtaaacctttaattcttgaatgcctggctaagtttagaacggataattatgcgcgttcatgctttctttttctgtctgatttatcaagcgagactttgcaaatttatatatttgttttcaaggagaacaaaaatggctaagtttagaatggataattatgtgttgatgctttacttatcctatagtagaattcctataggataggtgttttgtataaatatttgtagaacaaacatatatatcatttgataaattatggagtatgatttatcagttgagactttgcaaatatatttttttatttttaagaagaacaaaatatctaagtttagaatagataattatctgtattgatgctttctttttttttttcaatgatttataggttgagactctgcacatatatatttttaaggagagcaaaatgactaggtttagaatggatacttatgtgtattgattctttcttttattttgtcggatttatccattgagagatgcaaatatattttgtcagaataaaaaactcactaatcaaggggcatgattttcaaagctccaccatggactgtggaggcaagttagattatcttaaaaaaaatcttcatacaatcacaacactaatagacaagtgacagatcagtggcaggacttttcaattcaatgacacgccatgtttgaaaattataatgcaaacatgagactgaactagtgatttattttcttattggcagttgactttatcacatggccactttgcaatagagtcaatgctatgagctatctgatgcttatcaatgacacctcaggaggatagaaattttttttacctaccacgccaagctcacctaacgacagtaatacttttatatcaagtagagcacacttagagtgatgcatgattatctaataatgatttggggatacaaaactaggctgagattacaaagttttgattcttaagacaggacttgaaaactagagcagagaacaccaaatttcttcagactagtaacaacttgcttctaatatacccaatcttttaactttttattttaagataacacccgatcttttaactaacatcttgcagccttgttattggagtttgtgtccagccaatctgtttgggttaatcaatttgtcgtgctcaccatatgggtaattatactaatccagcttgacccctcgttaactgtaatttttatgttatcagaagtttgccagaaactgatgactattccaatgtactccatagaataaaatagtcttccaaaataatgctttcctatacctttttgggctatggaaattcctaaaaatgtctctctccatcatctggagttaatcctaaaaatattatatatatatatatatatatatatatatatatatataagaatccgcgtcccagatgggctacagtgtcatacagtatggccacggacagatcctagcatgggcagctgttatttataacaaaaaagaaaattcattgccagccaaacataacaatttcttggaaaattttccatgtgataggtgttttttttctgataggaattgctggtcttggaagctaaagcgaaatatagaactgtcagtgtactgtgcagtaacaaggatttctcaataggccaaacaagacagcgaccatgtgaaggagacacttttatttccagttagtacctttctatgtagtgcatttaatttctaaaaggctaaggaaaagaaatttctgcaagaaaaaatagtgcagttctgacttctgaccatggtaagaaattcagtgagaattctgactcttacagctgaacactgaagaacagagtggtagggatatagtacaaacagcctgtaaacaatatcttttcgaaaacagaggatttttaaaaacaattctgcagttaaggcaaagtactgaaaccacaccgatcctatgatatgataggtaaatatatatactgttcctcatatgtttgtgttcaatgaagaagaagaaaaaggtgagaaaaaggagtgagaacgagctgcaatcgatctccattttcacatgaagaagatgaactaggacaactagacaggtgctgccaagaggctgcaaggtggggtcctccgattggtgttgcgatgccggcaaaggagagaatcctccatgaaaaaggagtccaaaacaacactttttgaactctacctttctcgtgtgcaaaggtatctcaaaaatgttcccttttcatcaactgaatcaacgacggcatgaccaactctttgcttgtccatttcatgccctcccggcttctcgcagctcgacatgaaaactcctccaaatttaatttgatctttaattctttccgtttatttttgaaaaagcaaaacaacgctgccgatcatcttttcatagagaaacggtcctagaaagaaagaaaaaacccttttggttgttgttttttcttcttcttttatttggataaattaacaagactaccgacgaaagatcaagatgaagaacacaaacaacaagttcagaaacacacatcgatctccaatggagacagacagagagaaacagagatggatgctgatgaacaaacaaataccttggccggtgggtagttatctgccacctgagtccccatgatcacctgatctcctcctccttcgtctacctcttcttcttttgcagcaatggaggatcagaggaagaagaagaagaagaagaagaagaagaagggttgctgcaaggaggccggcagatcagagtcgccaagtctctacttatagaagaacaagaggaagaagattattaagcccagaccccagtgagttgtgaacgtgaagaagttaacggcaatggcgactgggttagttgaccgttgactccagcgcagcagctatttttgcgtcgtaatttcacggatattggggaggaattaatgctctcagtctcagatgggggttactattattaaatcgggtggtgtgtgccgtccgtcagatccaggatagacggtccagatgatgatggtgattttttttttatgtctcttggagggactcttgttttgctaactcacaaaaaaaagagaaaaagataatcagaattcataacgcatggcacatggaaccacaggagctctggagtttataaacagtagtagcgtgtgccgaaattctctcggttaggtccagcacttggcgtgtttaaattctgtttggagggttgactcgtaagaaatcgtgttcgaattcatagtatattcgtcaaaacatgtactactctataaaaaaaaatgcaatcttagctatgaacctagacacatgtatccaggttacttggtaggattagattttttatgggacggagagggtaagcattatgaatttaggtaaagcatttttgaatatgtatagggataagagcttatcttttatccagatacatatcttaaaatgcctttttttttgtctagatacattgtaatgtccatatacatagtaaaaaaaatattttcttcaatcttatccactgcatatttgccttctacataaacactcatcttccgactagtaacatgtttagacaaaccgtctgttttctttcttttttgagagggtcttgctttcttttattttagaaacattgtttgctgcagttgttactgctcaaacaactaatatcacaaattaaatgacatacaagctatccctccaattacaaatatgagtaataattatcgatgttttcgaaattgacaaggtctttgaacaattttttgactagaaatttatattgattcttttacaaaagtggcgtatccaacatattttaagaatacctttaagacaaatctacattatacatattcataatgccatcagggctgcaggaat

SEQ ID NO: 21914 - DNA, 666 bp, Oryza sativa
ctagcaataggtgaccttttcaaacaaatatctatacagaattaacaagacattattgccacgacagcatccgatggaacctcacagcaaatgggcagtactcggcaaaatcggcctatcgactacaattccttggggctgccaaatctaccttctatcagtcaatctggaaggcatgggtgccgccgaattgcaagttcttctcttggatggtcacgcaaaatagagtatggacaacaaacaggctggaaaaaagaggatggcaaaaccaaaagatttgcccactttgttataatgttgatgaatcggccctgcatctcctggccaaatgcagactcacaaagaggatatgggcagaaatacagagatggaccgggactgaccttcagatggacaactgggaaagctgtcactcagtcgagcaatggtggacactcgtaacggaatctccaaacaccccacgcaaacctctcaggaccctggtgattttaatctcgtgggaaatctggtgcgaaagaaacacaagaatcttccgcaacaatgcatctacgccatcctcaattctagcaaagatcaaggaggaagggagagcatggggtcaaagcaagggcttcaatcctgcaggagttcagaattttgggagatatcacttaatccctgtttttt

SEQ ID NO: 21915 - DNA, 6215 bp, Oryza sativa
agctgccgggggtgcagccgctggtgaaggcgctgccgcccgcggcgaggacggcggcggagctggcggtgtccgcggcgccggtggcggcggggtacggcatcgggctccgcgcgggtggggggtctagggccgtggcggtcgcgggcaccgcggtgctcggggcggccagcgtcgccggggccgccgcggtgaactccgtcgtgccggaggtcgccgccgtcgggctgcacaactacgtcgccggatgcgacgaccccaccaagctggagagcggcgaggtgaaggccctcgcgaccaagtgagtcgtctcgattgctcgactatattgtaggtgtgctgcattggccgtatggcccgtatgctcgattcgattatatatcagatgtcttgactcccaccctgcaatgtgatctgtattttccttccaatttatgcgccctcctagcatttactcattaattttgaagctcccatttgttttcggaatgctagtaaaattttggtgtagcttgtttcagcgaataaggacccaataataatttcgatgatacatctgatcggctaaaattacctttagggatgggacatatagttatatttttgcactaaaatgtttaaggaaaaggctatacgtactacatttttattattaaactctctttacactaatgtgtcatgttatgagttcatctacatttcctataactcctatctagttgaatcaaacagttgatatcattttgtgtaagaatttttaagtatgtgcatcagtgctcaatgtaacattgcccccacccacacacacagaagcaaaaagtcttacctgtttattttgtttcatatatggagttagtacacaggacgcagccttcaaagcagagctctgtgatttgtatgccaggtgatcctcttggcacctgttgtccagttgtttccaatgctttatttgaatgttggtaaagaatgtccatccggaaatggcctctaagcctaactgtatttatgacactaattctgttgtgttctatgtgttgaatttggctcaagtgcccttattatagctattgttttctcctagacacaagtatttgttcttggatgtttcccctctcttctcttaatattcacccgtcccaaagtatggtgttattttgcagtttttagttgtcgatatgcaatttgagcttcaaccattacatccagtaatttatattattatataccttgaaatatacaaagaacagctaaaatattacgtaaaataatatttactaatatcatttttattgccaatctatcaatgcggacatctcgatatatatatatatatatagtaaatttgtttggtgctccatggtgcccgggcaccattgttgaaattgagtatatacccaattcaaatgagtatgaaactttttcaattacttaggtattaacattaactactttactaactagttcaaagcatgtttgtactgaatttgaacttgtttttgttagattttgattctaggtatatagcatccatacatataattagttaggtatgtaatcatggattgtgaaataaagttaaatttgagttgttttgttgataggtatagatatgaatcgaattattataactaggtatatactcacaatttgaaaattttgaaaaatttgagtgattttgtacattagataccatggtgcccgggcaccatggtgccccatatgagtgtcctatatatagtatatatatatattttgttccaatcacatttcacataccacagttttgtatgtatgtgctcagacgtagttgcttcttttggcaagctcttgtacattactcagtagctaaactagattcttctaaaatcaatctttaaaaatctaccatttattggttgcatcttattgttttggtcatgcagtgtatataggaagtgtctttgctccatcttacctccattttatttccaggtttctttactcagtacttcctccaggagatgaagatctcaaaggtgatgaggttcagaccattataaaatttaaaaatgctcttgggctcgatgatgtagatgctgcaaatatgcacatggaggtattgcctcatgatccaagcccctttatatcttacttgcctgagacgttcttcctactttagtgccattttcacatttcctccattactccttatgccttcgactttgcttgtatagattggtaggcgcatatacagagaaaggctggaaacaagggaccgggatgccgacatggaacagcggcgggtacgtttttgtgctgtgatacataaatggatgtttaaaactttctactgcccctgatgataactattgtaaatattttgcaggcatttcaaaaactcatatatgtatcaaatcttgtctttggggatgcatcaacattcctgcttccatggaaacgtctttttggggtcactgattctcaggtattttattatgaaatagtcatcacccatttaaactgtgcatagcatgtcggcattttctgatttcaccccatggagaaagcagatggcaaccttagacaatattctaattatttgtgttgattttgaattttagatgcaccacttccctaacataacattattgcaactgtgactacgaaggatctctagtgtgctgtacaacctctttgcattgttttgtgcagttctagatgcaatggttgggctagttggcttgcctgtatttttacactagatgcaatggttgggctagttggtttgcctgtattcattataatggattgcaaatttcatgctctagttatagagtactgaaaaaaaaaggcaggttgtacatgtcatatcaaattgacattcctttttcccctagcatggtcaacatgcataatttttactagcatgggtatcatagagtctcagactggagtgttgttgaaattaaagaccttttctgttgatagggttgaggatgcggattgcctacaagctctagtgcattcacatatctcgtctatcttaggacatatttcagaaattgaactgcttgtttaagccttattacttgtgctcatagcttctttgttttcgttcctttttatttggtgatattgtttggtgacactaccatgttcttcttgcagattgatattgctatgcgggaaaatgccaaaatcttatatgcatcacaactcaagtctattgggagaggtatcactgaaatgcatatctttgtatttgtaggcaccccacatccgtatttgttatgcttacaagcttcagtgtaattatgtcagattagagacttagggcagtgcatatagtgatgctatcttattttttgatacactaattacttgatcggccttattgcatttgtacaacatttttaattttgacattctgttttctctaggtcttgacataggcacgcttatcgaagtaaggagagcacaacttgcatacaaactttctgatgaggtactgttttttctttctcgcaattcttctacttcatttggtcttacatcttaatataaatacctggggaaattacttagctaagcatgcatggctgctcagagtcgtgtactggagactagacaagttactgtattttgtttgtggacataaatctcagtatgccaggataagaaatgtggtatcaatctaagcattatatgttactaaatagcatattgtaatgtttaaattccttcagattgctgctgagatgttcaaggagcatgcaaagaagttggttcaagaaaacatttcgtcagctttggacatcgtaaagtcgcgtaccaaagcagcgtaaggaatctacacctctatggtgaattgtctaagcctacggattgattgccgttgacagttgacataagagcctgagctaacacctatttcctcttttcccaaatacattttgtttcaaactttgtttcatatacatgttgcagctttaaattgaactttttacccattttcccttaggttgattgataagtattatgtacttacaaatttacagtttattatttcatggcatgaatggatttttacctcactcctaaactatatgattacaggaatagcccaacacaggttattgaagatgtgaagagcatccttgcttttaatagcttgctcataacactaagcaaacaccctgatcaagatagatttattcgtggtcttggacctatttcgttaggtacggtgatatatctttttgaaatcatatgttaatcaggtaggactttctcttaaggctggtcgttgtgcttttcttgtataggtggagagagtgatcatgataggagggctgatgatctcaagctactatatagggcctatgcaacagaagtactatcagatggacatctggatgatgagaaggtgattccatgcatcctcttgttataatcccactttattgctaaacatcttgatgtaagtacaccggtgctgctttggaatgctgccaatcaatggtggcaaacctaactcatttaactctgcagtctagatcctgtaccttgtactgttattcctgatgccactggaactgctgtttacggcagtacttataaatggtgttttagttggaacataacatatcctgaatgcacgaaaaacagtctgccacctgttgttaaaaactaggagaagattaattgtgcatctatttagtgtatcaagatcttagcaaaagccagtattgttaacccttgaaaagcagagcaagaagctgatccgagacaatctggttcttgccataaccgaagtgtcatttggaaaaagcataataaaccattcttattgccagatgacagttgtgaattatgtaacattggttcagtgtcttcaatctacatggacactactctcctgtatcgtcaacttggttcagatcacttcttgaaaattgttggtctaagtactcaacaaaaattctcatggtgagactgattaactatacccagttggttgtgtaataacatgtgctacctctatcccaaaatacaaggagttttagggttggacatgggtattaagaaagttggtgaaattagttggagaagttgttatattttgggacaaattttgaaggctagaagttatattttgggttggaggtgttccattattgttctgtaaatggtactagcaagtactccctccatattttaatgtatgacaccgttgactttttaaccaacgtttgaccactcgtcttattcaaaaattttatgcaaatataaaaatacttatgtcatgcttaaagaacatttgatgataaatcaagtcacaatacaataaattataattacataatttttttaaataagacgaaaggtcaaatgtttgtcaaaaagtcaacggcgtcatacattaaaatatggagagagtatatccttgctgttcaaatttggttgttattagttcatcttatatttggtgcatggattatgacccctgaatctaagtttataaggtatcaagatagcatcttaatagaagccttttaatctgattacaataattcagctcgctcctttgaatcaactgaggaatatatttggactgggcaagcgtgaagcagaatcaatcatgtcagatgtcaaagctcaagtatacagaaagagacttgctaaatcatttaatagtgagttggctgcggcccctagcaaagcagcattcctccaaaatatctgtgaagagttacagtttgatccggaacttgctagtaagatgcatgaaggtaccttcttgacaccttctcttgttacactataattttcacagcatacctgtgcttagctcgactgcctagtcatttattgaacggagaactggttttcacctgatggctctgtgcagaaaatcactatacaccatcagctctatgttgacactgctgaattgttatcctagaccgtatgtaggaagtacatctgtagcaattcagttgtctgcattttggttcatctgggctgtattgcttctcatgattaggaatggatatccaatagaaaagaaataagacaaatgtggtgggactagaagtactatttgtctctatgttcatgttaaacagcattactatttgtaagataagatattcctcaccattccatcttaaggtacatcatcacatgctttaataaagcatcaaagtcccagaaatgctatcgacaagtgtgag

SEQ ID NO: 21916 - DNA, 13857 bp, Oryza sativa
gagggagctggcgggggtgcagccgctggtgaaggcgctgccgccggtggcgaggccggtggtgaagctgccggtggtggccgcggcggcggcggcggggtacgtggtcgggctccgcgcggggggcacgcggaccacggcggtggcgggcgcggcggcgctcggggcggtcagcgtcgcgggcgccgcggcggtgaactccgccgtgcccggggtcgccgcggcggggctgcacaactacgtcgccggctccgacgaccccaccaagctggagagcagcgaggtggaggccatcgcgagcaagtgagtgttggatttgcagattgctcgtctatacttgctgcatttggttgtgtgattttttatttttactcgtttacttctgaaactcccatttgctgttagaatgctagtaaaattttgttctagcttgtttatgcaaattgaacaacctataattatcaggaggaggaggatttttttttttttactaatgcgagctaaaaattctgtttataaaatgagatgcatattgccatacctataaaattaaaattagaattcatatattgaatgtatctctcttactccgtcaaatgatccttttactatcaattatttttagatacggcgttagcacagaggatgcaaccttcaaggccgagctctgtgatttgtatggcaggtatgtatgtttccttctagaaatcaatcttaaacatgtcctgtttttagttcagatccttttttttttggtcttgtagtatataagcatttgctcatcttgttctcatgtccattttattccaggtttgttttctcattaattcatccaggatatgaagaccttgaaggtactgaagttgagactattataaagtttaaaaaggcccttgggttgaatgatatagatgctgcaaatgtgcacatggaggtagtgccccaagatctaggcccttttatttctaactgtctgcctcagatatttcttctactttagtcttcattttcacatttccacagttttcccttcctcctcacttctttcattgcgcttgttgtaatagattgctaaacgcattgatcgcaatgctggtgtaggacaacagcaggtacgtggttgtgctgtgatatatacatgggtactttgaattttctattgatccgatgataaccattttaaatatttggcaggcatttgaaaagcttatatttgtaacaaatcttgtgtttcgggatgcatatgaatacctacttccatggaaacgtcttttcggggttcatgaatctcaggtacttaattaaaataatcatcattcgtttaaaccgtgcatatcatctctttgtttcatgatctcgtcatatggagaaagcaggggatcattagagagttttaatcatctatgctggtatttgaagtctagttgcacaaattctctgacattgttaccactgcaattcttaaaggcctctagcatgttgagtaatctctttgcataatgttgtactattgtgctgttctcagtgtaatggttgttgggttatggctttggccgaaagcctacactgtcaaggtcagcatcaggtcacatgtattggcaaataatattctccacttaatcccaaaaaatgcaacttagagcattgctcttgccactgtaacattattagcaattaaatgcaaattttataacaatatggaagtctgaattatgacaattactccaatattattttcttgtggttaatttcaatatctacaatttgtaaagttatcagctataactatgaaaaaaaaatacatggcccactgtggcatgctggatatggtgcatgtaatattatgtgatacaacttttatccccacccccccccccacccccaaaaaaaaaataataatgctcaacattttgcatgctggatagaaccaaaaaagaaaggatgtgcatgcgataaatttgaaagttatttataatttgtcctggcttggtcaaggtgcaaaattttgaattgcatgggcacaaaatgattttcgagttttatactggagatgtacttgaaaggggagacctctcttgggggaaaactttgttcttgccactagaaaagtatgctgttttttgccatcaaaattacaccatttcatttttgctttccaaaattttgcgcttatctaattttttccatcatcatcaaaccctgctagttgaccattactactgtagtactatggcgtttgactttcacatattttcttactaagaccaaaatgcctctatcaaattgtgtgcccaatttgtcagcctttacctctcttttgatgccctttctcaccatttctctcgaagggttggaactttcagtaaaaaaattcagagtgcaccaaaataaccaaaactacagacttctaaaagcttaggtgcttttatctacaaatttacaaataatttattttttatcaagattttagacgaattgaattattgaatgattttcatcaatttgaatgagtcagtattttttagtgtgacaatttcaacaaattaaaatttggtattgttttttgaaatattaaatgaataacaccaaatttggatgaaggggtgtgttcatgtgatggcaggaacttcatctgactataacgcctctttgtcaattatgtcggtgcgagatagaagtttgactaagactttggttagctgtattggcaaaacaatacacacaaagatggtgcagacgaaataaggaattaattttgtgtcaaatacaaaaaccggtgcttgcttattactggcattagttagtagcctatgcaaactttgtagtggcatgaacaaaatttccttatcagcaatgagtatgcagattgcctgcaagctgtacaaaatgcgcattcacatatttctcatgtgcttttgttcatattttagtgcatagcttcttttgggtttatatcttgtttgatgataagattttatttagttacattattgttgttttcggcagatagacgatgttatgagggaaagtgccaagagtttatatgcatcattgctcaagtctattgggagaggtactgagacacttatatttctctttttaaggcattagttccatccataactgtcattatgtatactagattcactgttacagagtatttatgtctgaacagagacttggagcagtgcagaactgcagatagcaatgttatctcctgcttgtataattatacttgatagactatttactgcatttctacagaaatctcaactcaacatattctgtttctctaggtcttgacataggcacattaattgaagtaaggagatcacaactagcatataaactttctgatgaggtaacacttttcctctgaaaattttactgcttatttgcttttccccattttttcgttcattttgataaatacttgggaaaataccacttatatctaagtgtgcacgcttgccaagatgtcagactctggcgtttggacaacaaaaaagttttctatatttgattattcacataaatcttaaatatgatatgtaagatgaatggaattcatataggcatactacgttgttaagcggcatattctattatttaaatttattgcagattgcttctgagatgttcagggagcatgcaaagaagttagttgaagaaaacatttcaacagccttgaacaacttgtaagtcgtgtaccaaagcaacgtatgaaatgcacttttggacaacttgtccatgtgaatatagattcactacatttcataacatgaatggatttggcttcataaaccatatctttacaggaataaccgaacacaggttgttgaagaagtgaaaagcatcctttcatttaatggtatgcttacagtactgagcaatttcccgggagaagaaagatttgtccgcgggcttgggcctattacattaggtagagtggtaaagtatttcgaaattcatgtgttaatgaggtggcccttttctaatgctggctcctgtgctttgctttgcacaggtggagacagtgatcatgaaaagagggtagaggatctaaagatgctctatagtgcctatgcaatggaggtactttcagatggacatcttaacgatgacaaggtgatttcatgtataataccatcttttcagtttactggtgctgcttatgagatgccaagctgaaatgaggctgccggatggcaaattcaattaaccatctgcgttgaaacataacattgcaatttcaccgacccttaaaacatagcagcagttgagacagtctggccttcgcaattgtgaattatgtcaagcattagttcagtggcttgaatctactagcacatggatactagtctggtcttaacttggttcagctcagatctacgttatttgttgaaaatcggtgatcagtatctagatggagattctcatgatagagcccagatcattttactggtccagctttgtgagaatgccaaagacagagttcaatacactttacccagttgattgtgaaataacaagtactgtaaacacttgtaaataatgcagtcaatccggaccaagattgcttgagcacataccatcaacattttgttttttctgttgatctgcttatacttaggtgcatgcatgctttatgacagctgcgtctaacaatttgttctaccttggtagcatgatatcatattaaccgaatcctttacatgattatggtaatgcagcttgcggctttgaatcaactgaggaatatatttggactggcgaagtacgaagcagaagcaatcatcacagatgtcaaggctcgagtatttcagacctactaaattctttaacaatgagttggctgcgaccccaaagaaggcagagttcctccaagatatctgcgaagagttgcaatttgatcctctcaacttgcaagtaagatgcatgaaggtgccatcctgacaccttcccttgttccaccactagtttcacaacgtagctgccctgaccgccttgaaatctgggcaaattgagaactgggtttctcttggtggctctatctatatatatggtacttagagaaaataacattataatattgcaggccctattccttttcaatatctgcttatactatgtgtaaatacactctaatataataatattataataattagaggcctctattcccctctggctggcttttgtatttagaggactgagagaactgggacagtactcactgattgttcatatttatgtattagttcatgtgttgtgtatactgtatacatagacatatttggttgtttttgggagtgtacatatctgaaattggtagcaatttttcatgcgatgtggtagaagatatactagttgagaatggcagctggaagaactggaatctgcatggaaattggttcagtttcaggctttcagcagcacaatacagacattcagtttgcacttgttcctgtttgggttatgtaatctgaagaaaggaagatggataattgatcatatagtactttgttccggtctgtatgagagtgtatgcatgtatgcttttgttgctgacagttcacttgtgcaagcctcagcatttcttgcttgtaacacatgataatcacaatggtatggaatgtgtgtgttcaaagaacttaatggttgaactgctgggatttgttggtggcaatgattaggaatgaatcagcaacagagagaggacaaatatggttggaccaaaagtactattgtcccttatggctctcatcgtctcacctatttcaaagaattcagttaggaataataatactccctctgttactaaacatttgacgccgttgatttttttaaacatgtttgaccgttcgtcttattcaaaaattttaagtaattattaattcttttccatcatttgattcattgttaaatatactactactactcaagttttttaataatattcacaaatgtttttgaataagacgaacggtcaaatatgtttaaaaaagttaacggtgtcaaatatttagggatggagggagtaactaataagaggtcacagtaactatggatttagttttttcctctttgaaaataaaattgccctgggatttgttggtagccttcgtctcttgagcttatgctatacatgttcgtacatccatgcgtgtattgtgttttccttgttatataaaaaggggaatacctatatgacattccctagaaaataaccccgaaatatttcaaattctggaccgttggatcactttgaaatttgtacaactattctcaaccctaatctaccttctctccctccctaatgttgagttattatctatactttcccaactcaccccctcgttttccctaatgccgaaaggcgccactggtgcaggtgagcccacccccaaccgacctcctcctccctcccctctttttcccaagatggcggtggcgagtgcccctaccctgcaatcttccctgtctcttacggctccccatcactactggccatcacttcctaatcacaagcttcgctttgcccctaccggcaacgctgacctaccttccttcccatttccgtggctttggtgtttttgttggtgcctcgttgttcatgtccaccgtctatcgtcggggcgccaactcccatagccatccctctaagtccggtgatcttccatctctttctccttccccatctccaacccatgccaaccctaacccaagaccttaaatcctaactagttggatcaccatcgatcgctgtaacaggaggagttagggttgttggaacacaaattgtgaaatactccctccatctacttttgatagtcatatttctaaatctgaaaaatttatttttgataggcatatttcaatccaacaatctatccttgaatttctcgaatttaatgcgtgactctccatttttccacacaagattggctacagggacaccgagaaatgtaaatactaatgaatcgcttgtatacgaaaaatgactagtagcatgtttgaatgtatgataagtagaattacttattcttggtctgtgtgtcaagatgaaatatgactatcaaaaatagatggagagagtaaatcttaaggtctgaattttgcaatattggagtcctaatttttcgtcggatgtgatctgccaattttcacggagaatactaccttaatataaaaatatagcaatctttgtatagttgattatggaagtcataaatatattgaaatactcaagacctcaggatctgagtattgtcaactgatgaagaacatggagagcatgaagtcacgacctgagtttagggtcgcagcttagacccacaccaccacccatcaataattccactcccctcctaaactccccacttcccccagcattcacgccgaccgagtcaccgacacaaacgcgcaataatatgtcctcacctcgacccaaaaatcgagaaaaatcaccccaaaacagaacactgtagcatcacattactactatcacacatcactagaaaacaatccaaaccacaattgcagcaacactattaccactaacagcgatcatacactactattaaactaaaaagagaaaaaaaaacactaacagcgatgcaaatgcaagagaagctgccatctccttcctgaaaagtcgtgcttaattagtgggacgggtgacgagcaaatcactccaaaccttgcttctcctcctcctcctcctcctcccccatctccggcgccgcgcgccgccgcccggaggagagcttctcgccggtgctgctactgctactaatccccacacccacctgctctcagctcagctcagctcagcttcccagctcggcgaagaagatgaagacgaggagctcggggaggggaggaggggagccgaggaggaggctgaggaatgcggctgtcatggcgctcatgctctcctccctcgtcgctctctccctcgtccgcgccaggttctcccccatcggtaatcgaatcgaatccccccatcctcctcctcttcgccgcttaattgttttttgttggatgctgctatggtggcgaggagaaggcgagagctgattcggagttcttctcccttccttcgcagctagtgatggaggcgaggccctcaagctcaaggccgacgaatccaagctcgtcgtcaccaccaatcacgccgtcgtcaacaccgaatccggcgactcctcctcctcctcgtcgtcggcggctggtaattacgagatgcgtttcttggatcttgagcggcgcagtgcagcgcattgcttggctgattcgttcttggcgatttcatttcgtatccgttttttcgattcgagtttagttcaaacgaggactagaggagaggaagaaaaagaggaaaaggaatcgaagaatccatgaattccactggctgtttaataactaagaagaaattgaatttgtttttttttttgcgagttgttgtcctagttcataatttatttcttgggctttttgcggagtttttgcgctaaagaatggcgtggattcggctgcgagattccgcgaccacagatctaattaaaaccgattctcctcgtgttgctgcagcggaggaggaggaggaggtcgccgctccggcgaagcccgccgccgccggcggcggcggggccaggccggtgtgctacgagacgagccgccgctccgacacctgcgaggccgccggcgacgtgcgcgtggtggggggcagccagaccgtctacgccgacacgcttgaccgcgagtggaagacgaagccctactgccgtaagcacgacgcgttcgcgctgtcccacgtcaaggagtggacgctcaggccgctcccctccggcgatggcggtggcggtggcgcggcggtggcgccgaggtgcacgacgaacagcacggccacggcgttcgtgctgtcgaccggcgggttcacggggaacccgttccacgactacaccgacgtgctcatcccggcgttcatcaccgcgcaccggttcggcggcgaggtgcagttcctggtgagcagctacaagtcgtggtggatgaacaagtacatccagatcttccagcagatgagccggcacgacgtggtggacgtcgacgctgacggcgacgaggtgaggtgctaccggagcgcggtggtcgggccggagttccacagggagctcggcgtcgacccaaccaagacgccgtcgggctactcggtgctcgacttccgcaagatgctccgcggcgcgttcgggctggaccgcgccacagcgacgccgagcggcgaccggtgggacatccgccgccgaccccgcctcctgatcatctcccgccgcgccgcccgtggccgcgcgttcatgaacgagcgcgccatggcggacatggcggcgagcctgggcttcgacgtgcgtgtcggggagcccgacgcgtccacggacacctccaagtttgctcgcctcgtcaactcctgcgatgtcatggtgggagtgcacggcgccgggctcaccaacatggtgttcctacccgccggcgccgtgctggtgcaggtggtgccatacggcaagctggagtggctggcccggaacaccttcgctgagccgtcgtccgccatggagatccactacctggagtacgccgtgcagcttgacgagacaacgctgagcgagcagtaccccgccgatcacccagtgctgcgagaccctatggccatccacaagcaaggctgggaagctctcaagaccacttacctcgacaagcagaatgtccggccgcatctcggccgcctcaagaacaccttcctccaggccctcaagctgctgccccatgacaaggaaaccatgaattagcttagctcatcagaactgttgatcgtcatggattgtcatcggcaccgtcatcgccatcgccatgccatcgtcatggtgacttgaatttgtggtataaatagatagataggtagctaattttttttcttttttcaaaattattagtattttgtattgatccctagcaagttgccaagatcaggtataatcagtagcttatctgaaataatccgttgcaacgcacgggtatttggcaatgtctatagaaacaatggtgatattgtttgtatgcaccatatttcttaacatatcaagtaagccaaattatcttatactagcagaaacccatattttcatggatttcttccaaaatgtcttctcctggcatatgtgtggttcatgatcattattttgcattggttagtcaaggttgatggcctgttctgtgttagtgatgtttttgcaattgtcaggacttctcaggttgtcatcaaggaagcaatttgcatgtgtttgatgaatagtatgacactaatagacaacatgttgatgtgaaggcagcacatggtctgaagaacctgaacagggaaggtgtcatggccatcatcttcagtaaactcaccaaattattgctgagaggcagcttatttcttattttcagtatactcctactaactttgaatcaagtttatttctgtattgccagatccaaagaaagctgtatcaggagaatgcaatggtctcccttaacactgttgttaagtgagcttttcgctgacattaaagaagaaccagcagctgctgacactgaaactgagactgagacatcaagtgcaacatcagaaattaatcaatgagatgatgatagatctgaatgggaacgactggagacattagacattaaggaaaacaaggcatatggtaaaagtgatgctggaaaaggttcaagccagaaaagagagaagacttgtgcatgagcatcaactactactcctatgtgagagtagtataaatggagacaagagagacagaggtgagctgtatgaacatcctgatgttctgcatcactgtagagacaactgaatccgaatgatgtttcgttttggatctgcaatccccacaaagaatgacagttcagagtcttcaatgcgagtaagcgaaagatgttgtcattgaaggcatttgtgcaagagtatgggaaacattggaaagagcaccgaaacccatccagcgagataatatatacattccagaattgcaatttagcgcacgtacgttgccagttcaatattttcagatgaaagtttcgtattttgaattgaagtttttgtaattcaaaaaaaataaagttttaaggtcacagtcgaaagttttgtatggtttgagttaaaagttgcactgtttgagttgaaaaattcttgtgaaagtacaggtgtatgttagaaacacatgttcggtaattagcaatccatttctctctgattatggattaattctttgtacttccgtcttgtagttatattgtttctatgctagttttgtcatccccacctatctaacaagtagtggccactatctaccttgtatgtgtccatcattgatgaccaacactgtactggaatgagaagctatgtttgtttcatgcacaccatacaacacaccgtttatcctaccatcattgatcagagcttgagagtgatgatttagttttaatcagtccatctaatataattatgctagtattaagaaaaagaaggcctcccctattgtttccagtaaaaaagtaataataaaaataaaaagcaaaacctatacattcatgcattcagctacccctagaggccttgtttgatactccgtttcatattataaatcatttgactttttttaagtcaaaactctttagatttaaccaagtttataaaaaaactagcaacatctataaggccatccccaacccagaaactatccagtagtttccatacttaccatgtcatatagatactatgtatagaaactatatatctaatggatagtatcttcaaattaaattctcatctaattatctcccttctctctccttttatccacctatccttttgtcttcattcttagttagatggtttttttcatgataaatggtttcttcgtacttttatctctctccttattaactctattgccacgtcagatttttacttatatgttaatgtatttaacaataaattagtttcattaaatttaacatttaatatattttgataatatatattttttattaaaattgttactatagtttttttacaaacttaccaaatttaaagaagtttgaaaaaaaaatcaaacgacatgtaatattaaatggatggagtaatgcctaaacctcggcccatttatgggatagatggaccgggcccaatgatcggtaggccgctgcagctgcaagtgcagcagcaagacaaccggacggcggcgatgcagccgtcggcgagttggctgggtaacccaaactcccaaagtgtagcgtgagagaatcagagagagtaacagacgttggctttatcttttttctttctttctttctttctttcttcattctttttctccttttcctttttcaataaatccaatctgttccttggtttggaggctcaagaaagcatcatgctttgcgaagactgctgctgcgtgtgtcttgagcctcaagacgtcctctcccaacaccattagctggctgccaaagtgccaagtgattgggtgatgtgtgtattaaccatattttcttcaatgaaatgtagcaatcactatgggcaacaatatgaggcatgcttttactcgcaaaccaaataatctccaacgatatgaattttatctttgttataacaaaagcactaaaaattgtgcttacatttgtgcatagtgttatatatttaagtatttaatgcaacacttgtaaagtgatagtaataaaatatatggagtataaaattacaaatcatctcttctaggtagtaggaaaaatagggtcacttcaggagtggagaaaagcttgacggatgaccacaaaatcacagaaatatcgcaatcacatgaaatgtgttatggacacttataatagacatcgaaaatgacttctgagaacaaaacaaattgtagaaaagcaatgctatgcacgacatctatatatatacatcccattcaacatcgtgtgtgagaggtcataattgcgagcctaatttttctattaaatttcacatcttttaaccaaatgtttcaaatactactgtaacatttgaatgttgagaatgacgtgtaataagtagccatcatatgaatgattgctcatgtacgacataggataaactcatctaacatacgtctaattgtgatcgaaataaaccccatatacaatacgtatttaccactatttatctctcctagaaatcaccatattattcacaggccaccatttatagatgtgcaagctaaactctctctcaccaccaccacctccgtcgttcccgcttgtccctccagatgcgttattgtttacatattatttttcatctcgtatgatgaatttactttcacactattatatttttctcacccttaatgactttattgtagagattgacagtatgtaaccttctgctcccctttgttttcaccgtagtctaacaagctagtgcccaatattgacaatcataattacctccttctaagaagaagaagataatcgcataaaacaaccatcaatacaattttagaagtataagtaaccgagtaatcctgactaggagtttggtttcgtggtcttattggtggaaaacatcacacacctcctctctctctctctctcgtatttcttttagtgtgtctcacgtgtcttttggggtgactcccatgtattcactctatttattccgtgtaagttcatttgatgtaatatatttatgtgagcaattcattcctcggtgatccgtctaaaaaatactccctccgtttcaggttataagactttctagcattgccc

SEQ ID NO: 21917 - DNA, 27437 bp, Oryza sativa
accccacaccaccaactctcaaaattctgacatgtgggatcactgtctatcccttctccaaaccaattgtatgatagaacagtgaaaatagcgaggtatgtcagtgacccagagaggaggggacggcgcgtggtgagctacaaggcatactcagtggagggcaagatcaaggcctcccgtccgtagtggactccgctgcatcaaggccaactgctccgaactgatcaatttatggtacggatcacttctcctttcctttctttttcaccttaagcactctcttgattcttcgctgctacctcccttaatttctttcaagatattgtggcacttgatcatggctgagacctaccttccagtgtgaaatggattttgtcaaagaacttattccattagcttattttccgattacatggaagacattcttttctggaataaatacagaactaaatcctatttcctgaataaaagttatgtggtgtgtggcatgctgcatttctgcgcttctaaattttataaaacctgttcattcaatttgaacctgcatccaatattttaggtgcagacaggtgcttgcgttcaggttaaagaagttggcaaaaatgcttctgaagaaaggttaattgttgtttcatctcaggaggtaatatgcagatgattattccaattgtcattgccttgccatttttatcacgagtctttacaattttatatcttcctacatattctttccagattccagatgatccagtgtctccaacaattgaggcgcttattttgctccatagtaaagtaagtacacttgctgagaaccaccagttgacaacacggcttgttgtaccatcaaacaaagttggttgtattcttggggaaggtggaaaggtaattactgaaatgagaagatggactgggggctgaaatcccagtctactcaaaagcagataaacctaagtacctgtcttttgatgaggagcttgtgcaggtaatttatttggccatacctacaccagagatccatatattacttttataactgcagcttttacttgttaacatttcattgtgcttttacatttgttccaagctttcaggttgctgggcttccagctattgcaagaggagccctgacagagattgcttcgaggctttgaactaggacactcagagatggaagttcttccaataatccgacaccttttgccccttttgatggtcctcctgttgacatcttgcctaacagggaattcatgctatatggacgatctgccaatagtcccccatatggagggcctgctaatgatccaccatatggaagacctgccattgatccaccatatggaagaccaatatccacaatatggaagaccttccaatgatccaccatatagaagacctgccaatgatacatcatacggacggttgaacaatgatgggcctcgtgatccttacaccgtgtatcctgtagagtacttctctaaaagagagtaccgtagtggaagtagcaaagtcaccatctgcttcatacgacagatatgcagcaactactcgcttgcctagtagagaactgccctcatctattagtcctggtgccgattatatgtcccgccgttcttatcttgaccaagtacctactgataggtactctagtagggtacactacaattaggcctctcgagagctgggaatagtaatgtgcaacaattaggaatcaccagagctggaaattccaatgcttatgattatactgaggtacatttccaatgcgttagcttgcctcttctttgcaaatggccctcgcctgatatgtttccattagaaacatgaaaccatatatatgactgttgcattatgtctattttcttccatgatggttcagacgtctgaaaaaaggacaaaaatattctagaatatgtcatggtggtccaaatatatccttctgtcttgtgcccactctaatatctatcattggtaacactattcaattgttaccatgttgttgcaaaccctagattcagttattcagctgttctctgctactgttgcttaccagttttcttagttgggtgttgatcttttctcattttttatttccttgtttcctggtacacctgatgcctctctgatgcatctgaatgtatgtttttgttctcttcagtgcttaatagatttaaatttcattcttttcaggctgcggagcagatccatggacgtgaggattaccgaagactgtcaggtctcactgggtatggcttacgcagactgaatttttacaggacacaaacatgaattttgtcctcataatcattgagtgatgatctctttgcaggtatccaggtggctctgtcgaattgcggattccaaatagttatctggagtctgtgactgtctgtcattggtgttggtggtgtcaatctagctgagatccgtctggtatagcgtatgcgaaacatcatgcactatccccagtcttaaccatgccccaatggccaccaatagttttcctcatgaaaatctccccttgatcccggatctgtggtgcgagagtgaagttgcacgaagcccatcctggttacaaattatttaataattaaacatgttacaaattaaagaagaaataaaaaaacatcaaaaattataaaatgtcaaaaaaatcaatgcacacgactagtgtgcttagcaatttttttatccacaattacttttacaatattataattaattttgttagaattattattataatatagaaaaaatagttgccaaagtttctcaacgaatatcgaataaagtaaaaaatatcatatatttaaatatgatggtaatatttgtttgcaaaactttgatcttcaatccttcaacagcatagatatacaacgtcgtaatcaccaacgagcccgagtgaccatacgggatagccgagcggcggatctgcactgtccttgggtgaaataaatctagaacattgtatatcttatcttaatctctactattagaaattaaagatgtttttgctcaagatttccgtacgttctctacttcgttacaatatcggttttgtacgcccgcacacgcgttgtgtgttctctggtagagatgcaagtggatagtcctgctacccgtataaaaacccgcttcctagttcattttccacatgatagtataaaatttagaagaaaaaataaactataaataaaataagcaggctgaaaaaccccgcttgtccactccgtttgcatccctattctccggttccaatacatgaagtgagtgtcttgcttctccctggtctggcaggccctttttccaccatccccacccgggccggcgggttacattgaccgatcatggcccacattatgtgatgaacactagctgagttgaaatttatcctttgatgattttcagtatgtttttttttctccacatcttctctttcaattttggaaaaatattttattcttgatttttgtgctcgtacatcactaataaatcagctgttacccttccacacattgtcaatttatcatgtctatttcagctcttaccttagtatagtcttgagtcatcgctactgactggctgtgttcgctaggagaagttcccatccagaacagtgattgtgaaaaacggaacggtttattagcgcgtgattaattaagtatttgctatttctttttcaaaaatagattaatttgattttttaaagcaacttttgtatagaaacttttttaaaaaaacacaccatttaaaaaagcgtacgcgcgcgaaaaacgagaaagaggggttgggaaaagctacgtgcctcctacaaatcaatagcctgccataacaatattttctacgacatgatccatattaatccatgcaatgcaagcacacacgctactgcacgaaaaaactacggtccataacttcaaaactaacatgttagaatgacgttaatttttcattgcaattatattcatcgaccgttaatttactaggcagcctgtttaaaaaaaatattcaccggccatacccacatgttccgtagttcattaggtgatggatcggtagttacagcagactatggtaagcaatagctatatatacacgtatatgcattgctaatccttcaattttgtccaattcttttagattgtattcacctattgtaacgcatgatcatttttctagtcttaacctgaactaatcttaatcttaataaccaattaaaagattcgtaatttttccatcgtcacctcggctaatttttcatcggtccaaaaaaaaatccctgttgttcctttccatcccgagaatcgagacagggaaaactgaagcatatacacacaaatatatccaaaaattcccatgcagctagatcgaagggaagggtgctgttgtcatcgccaaaccgccaccgccgtcgcagggacgccgtcggctcccctatcgctggatctggcggaggggagggcaccgcccctgtccgccgcctcccctcccaccggaagtgagggcgtatgtggaggagagaagaagaaaaagagaacataaaggagagaaggatgaacggtgattgagagaaagactgagaggaagagagagctcgggaataaaaatgtggagttaaggatcggtggaagaatcgaggtgcgcggcactctctccgctctctccgagcggttaaaaaaaggacaatggtaaatttacaatttttttgaatcgttaccgtaaaaatggcaatagaaacttgcaaaaataccactagaattatcattcgagtggcatccttgaaaaattgaaaaaaacggtggcaaatttacaaatgccctttaaaaaaaccacttataacttagtactttatttataaaaatggtatatcttatcttaactacttaaattagtaatttttcgtttgtcacctaattctttcgtccgtaaatccgtttttcggccgtatgcacatttgtgttggcgttcatccgtcgttcctttctcgcaatccaattcgagcgacacaaccagccaaggggctactaaaacgaagggaaaagcaaggatggattggatctggaccctgaatcggacaaataaccacgataaaatccgctggaagggaaccatgagattgcaatccaatgaaatcgatcaatcatctggtactttgcctcggcactgggcattgatcccctaccgaatttccgaccacgccgtgcatgctctcgcgcaccatgaggtggctgacctcatcggcgtgcggtggccgccacctgctccacgccgcctccggcccccatgtcctcgtcgtcgagacgcgccacgcacaacatcacgagaagccccctcgccatcagagcgcatgccttagtcgccgccgcctccaccacgccgcacacgtcgtccgtaccggcgtatctggctcccgtctcccccacaagcggggcgggtctcccacctccctctcttacaccgtggcatcagctaactccgcacggaagcttcgccgtcatcgctccaccaagccgccctcacatctctcgcttagaccagtgcgtcatacaacacgagctggccggcttcgcttcggtcgtggatctccactgtcaccgcctcaccggggctcaccgaagacatggacgacatgaatacgtcgctcatggctgtgttgtgatgtcatcgctgttgctctgggtggtcgccatcgtggactcatggttcgctcacttgaggcagaaaagtcacggctaatgggcatttttttttcattttttacaactttttttatttctaaagaatatatttttcttgaagggcttatatcatgaaaaactaaatcctaatcatctaatattttttataattttattttacacgttgcatctatttattaaaaatgtttaaataataaaaaaattctcaacctgtcccctctgctctttttttctttgtccctgtccgctctttttttttacttttttattttttttcctcactgtctaatctttttttattttttttcatgtctacttattaatatttgacctcaaatacaatttgtaaataaaaaataatacacgctctcacaaaaataataagattaatttttacgatttgttaaactacacacattttcttcaggtaacaatacacaggtatattcccacaattgcaaagtgagtatagtttaactggatgggtttcttgtggtggaaccagtcaacatggatttaaatctttgatgaataaagagcagcaccgacttcgaccaacaggagtagagctattacctatcatataagggggcacgaacctgtataaaaattcttgtctccatttcttttaccttaatctcgtatacaccctggtaccgacaatccccataccatgcaaatactatagttgtgacctcaaaggtcgacagtacaattgtagtgtaattacatgttagtctaactataactactacatccgtggctccgtaaaaaaaaaatctaagcatggacaatgacggagcgtgaggctcctcaccgggagactgcgcaggcccccctttgccggttcggccggggactcagggtgagattctaagctctctgtatgtggaaggttcgctagaccggaaacacacaagacacgggcgatgtatacaggttcgggccgctgagaagcgtaataccctactcctgtgttttgggtgatctgcgtatgaaggagctacaaggtatgagccagcctctcccttgttctgggttcccaatctggaaaagtccagtccccatctcagtgggcaaggtcctccttttatatcttaaggggataccacatgcaccatttctctctttttttgtggggacttaccccaccttttcataaatggacggagatttgtatagttgccgtccgagtcaccttctgatgagacgggccacaactacctccactttcgccgggagcaggtgcgacgtggaatcgtggctgtctgctgacgacatgaccggtgtcagaccagtcacgtcggtcattcttgtccaccacgtgtcagcttagcaatctacatgttcgcccttcttcacacaacatcttgcctgcaatggttaggatgaagcctggcatatatctgaccaggactaacgtgccatctctgggaggtaacacgctagctccagctggggacgagcgcctagaagccctcgtcctgacgggatggggcgaggcgtgtgtcagatcgcctgtcgccacctaacccgcgatctgaccggtctgtgactggtcactgaccggataaactagtgcactgcattgcgttacatgcggcgtgacacgctcagccaaaccgcaataaatgtggttaggtgagccccactgttctcacctaacccatatacgcagagcaaagacccacgaggggtcggggcgcctcggccctcggggccgaggcgggtgcggcccgaccccctcgggggggactaagaggagggcgaacacatcaccctcgggcccgacgtccctcggaggtgccaggccacgtgtgcgattgtgtctgcctcaaacctctagtcatgatactcctgatcccatgtcaccgacagacaacaaatctggacatgagcacgtttagattcgttgtcctatgtaatgttccatccatatcttttttttcttaaggggtacatgtacttactccatcccagaatataagacataaccacttttcttctatgtctcataatataaggcatgcatacatgcatatattaattatcatctcttggttctttaaatttggtttattttaattcatgtaccattaagtctcctaatcacattgctcgtatgtatggatgtgattcaatcaaggaggtgattaaattctttcttggtctttatgctagaagtggttgtgtcttatattttaggatggagtgagtaatatttatataagttatttttaatacttatatatgagttattataattatagtatagatatattgaaattatattaaagttgtactatagttagatttaaaagtttttgttgtggcagtttttttagatagtctaggggaaaaaaaacaatacaccggttgcgttttattgcaggaaaatgcggccaaaaaagatgcacatataaatgtcacggcgagggtgattctcaattttggccaggtctaatgaatgtcaaatatactgtcttacatatgggttcttggattgtgaatgatgggaatcaaataaggttctgggaagataaatggctaggaaacttggcgtttaaagataaatatccatctttatactctattgtccgaaggaaaagttctactattgctaatgttatgagttctgttccacttaatgtttccttcaggagatccttatttggtcagaatcttatatattggcatgatttgtgtgcttccattatacatattcaattaaaccaatcctctgattgttttagatggaattatcatcagaatgttagattttctgttaagtcaatgtatcttgctctaattaataatggttatattgagagaaataagattgtttggaagcttaagatgccacttaagattaagatctttatgtggtacttgcttaaaggggtggtgctaactaaggacaatttggcaagacagaattggaatggcagtttaagatgttgtttctgtatgaaaaatgagatcattcaacatctttttcttgactgtcattttgcaaaatttgtttggagagtagtacagttttcttttggtttaaacctccctggtaccatatctaatatgtttgatggttggctttttggggttcacaagaagatgagtaaactcatacttgttggagcatctaccatttgttgggctctgtggttgagtaggaatgatatagtttttgataaatcaccatctatctcatatatacaggtaatattcaaggcaacatattggctccggttttgggcaaagctgcaaaagtgtaaagatgatggagagtttatgaaggttgtatgccgtaaactggagacgacggttatgcaaatatttgcgaaccatggatggagattcacaaatagacttgaatgagattcacaaatagacttgaataaatgtgtgctccttttcttggcttggtttttttatcgttgggtgtgtttaattttatttgaactttactcgttgtttgtgtgattccttgtaataattggctgtagctctaatgagcaaaggcagggatatttattccattatcaaaaaaaaaatgtcacggcgaggacgcccggagagccctgctcgccggcggcgagctcgctcgctcgctcgctcgtctcagttggcccgggacgagatgaggggcttgagcaggagcatcctgcacgagtgcggcgccacgtcgagggtgatcttctccgtcaactcgccgccggcgccggccaccgtcgcgtgccgccacaggtccctggcctcgacggcggtgccggcggggaggccgacgtcgtcccagtgcgcggtgatcgccgccgcctccgccgcgtgccggttcagcagcagcaccgccgtcctgtaacccgacagcggcgccgcccacacctcgctgctgccctccatcctcaccttcttcccctggatgcccagagcatctgaattcccaaaaagatcaatccgacaagcgccatgaaaactctctgaattcctgaagctcgcggcagcaggaagagtagagtaccttggttgacggcgatgacctccttgttggccaggatgtcgtacgtctcctgcgacatgtgcctcacgtcgcacccgatgatcagaggagcctgaccaattcagagaaaatttcgatctgtcaaacccagcaagagcagaataatgcaaagcagagtagtatatcaccgttcttttctggtcacgatatagattttatctcagtttttgtaaacatgtttttaaaactgttaaactatttggtcttaaaaacctttctatataaaagttgttttgaagtattacataaatctatttttagagtttgtaataattaaaactcaattaatcatacgctaaccgatgataactttctttttttctttacactattttcatcgtcatctttagtagaaacgaataccatcattatccgacatccgtcacatttggtagtaccttggagatggcccagaggctgaaatggacgatgtactcgtcgttggtcatcccgccattgccaacctccagcatgtccgggtctgacaaaccacaaattatatgcctaagtttagacgaaactgtagcatttgaaattcagacatggattgaactgatgatacagtaatatgattcgtcagtgattcactgaccgttccagccgccaggtcgcgcgtagtccgcccacacctcgttctcatccgccctcgacaccatgctgaaacagaacgaacacaatcacatatgaaaactctgaactctgaacactgatcctctcgtttcttgcatgtcatttaaatagttgaagacggcggttcacctctcccaggtgtccgcgatgtcgttggtggttctccagctgttgccgtacgccgcgccccacttcgccgggtgcatgtcgcccctgatcaatccgacaaacacgacagctcgaatgatgaacacgaaactgatcacagatttttctaatatactgatgtgtaatctttttgcatgttcgccaaaaaaaaaatgatgaacacgaaactgatcacagattcagaggttcagagaaactaatacacatcgagttgtcctaacctaccattcgcacagcgagaagtagatcggccggccggccatcatcagagccttgctcatctccgggtacctaccattggactacttgtcagagaaattcacgagtcatttttcagacattcagtatcgacggcttcagaaagttcagacaggtagtagcaccaagagtgatcacctctccagtggcttcaggtcgccattgttgcagttatcatacttgaggtagtccactccctgcgataatggtgtaacagaaccaatggatcaagaaggaaatctttaacactaaaccggttcttgaaaaaagaagacactgaacacctagataaaaccccaaaaaatagacatgtttctgaacatttcagtgtgattcagtggctcattctcacccacgatgcgaatgtcttggcgtcctgctcctcgtggccgagagaccccggctgaaccttcgcacacgtcttgaatcttcagaaatttgcacgcaagaatcagttaaaaaaaacaaaaaatggagattggagcaacaaacagattgatattttgccacagattatttgctccatcttctatttctactgcattggttaaaccacctattgtaatctatttgcaaagtttatttttcaaaatattgatttttttatgttcttggctcttaccctgcatcggagtaaatgcctagcttgagccccttgctgtgaacataatcggcgagcgccttgatcccgtgggggaatgtctttttgttggccacaagattaccctgggacagtatcatcaatattaagtactgtggatgaaatttttttttgtctgcctttaatcacatcaactctgttcattacaactacagtccagaagaaatcgaaattatcagtgctgcattatcacacacaccttcgaatcacgttgtggctctgcccagcaatcatctgaaaagtttttttatatatataaaaaaacacgattttattatactcagtcaggtcaagccattgacgacaatatcatagaatatcaaaacaatcatatcatttttctattaacaatatgattttattatactccaattcaagccattgacaatattatcctataataacaataaaaataatcatcagaaaagttttttaaaaaaagaacacatgattttattatactcaatcaagttccagccatcgacgacaagtaatatcctagaataataagaaaagggaaaaaaagggttagtccaagaagcaatgacgtatgcatgacgcacgtaccgatgttgacgtatttgtagccagcagctgcaagcccggttgacacaagtgcatcagctgctcagaaaaaaaaagggaaaaataattaatcaagattcaacaaaggctaattcatcaattattctgtttcagactttcagtcaatcagctcacgctggtagtaggatactactagtacaaatgtacagctgtaaacggcactgccggacagaaaaaaaaaagaagtttattactccaaacaaatatattgcaaaaaaggatttaacaaaattaattttttgttatagaaatattattacattttctctatatgttttaccaaacttaaaaagaaatttgatttaggacaaaatcaaaacatcctacgtaaaataactgaaattaccagtctccctgatgacgtcttctccgttgccgtcgcaggcgaagtgattccagctgttccagctgcatgaaattcagaagcttaaattaaccaagatgcagactcacaagcagaaaggcgctattgctcacatgacaggatagcagcaaagattaaccattactattactagctaactacgcttaacaattagaattaacattggattaattagatacgctaaattactgcatgcttagtgacgatgtgagtgattattattccttaccccatgggaggagccgtggcgaggccattggcgagcatgctcctccggtgctcctcccccacgtgcaccacccttccgcactcgccgccggcgatcatcgccgccgcggcgcacgccaccggaagcagcaccgccgccgccgccgccatcgcctcggtgatcaagaacggcacagctcgccggcggctggctgctgctgatcagctcgagttaagaagagaacgagagtgaattaatggcgctctcagccagtgacgcggcgccacgtgtgcgatcccccgccactgacgcggcgccacgtgtgcacctccatcgaagccactggaagctagagtacgcgtgataggggacacgtgtgcgcgaaagggtaacgtggggcccgccagtgggacccacttgtcggcgaccggaagcttccgaccgcgtaggcgtaggcgtcgatcggtctgatgatctgatcgttatcctgatgaccgagtaggtggtaggtcgacgtacggatagaacggaatttatttctaccgttttcctggaccgcgatgacgctgtccgtaggaagcccgcagagctacgctgctgctgctatcggataaggaaaactgatgaaaaacctctaaatataagcagttcaaaataatttatgaataaactcttatacagtaatgtaaaaatcaatgataggtgtgtttggaaaaccagttgtggctgcagcagcatatttgctgcttgatgcactattgacttgtaaacataaaaggtctgttcgttgcaacttttgtgcagctgcgcagttgtagctgctacagtgactatattgcttctatgttgtagctgctgctgcagcaagctgcaccgaacaggatcaaaagtagacgacgagggcatttagaaggagaggaattgtatttgttcctggtatttaatttttaaatttgtggtcggaagtttcggaagaaaaaatgtgctcatgagtgattattggctctgaacaccaacctctcttttcgttgattccttctgaggtgttgggtgttgggacacgatgctgccgccgacacgacaccgggttccacaatacactaatctactcgcgacaccttcattgaactgcatataattatttagaaagtccattaacacatcttataaaaccttgttgaatcatataatcattctacaaagtctatttgaacatcttataaaaaaataagatctgacctagtcgttacactctcttacattttccattagcctaactaattccgtgcaggaaacgcccaaaaataatagtaccaatagtccactaatcccgtgccagaggccgccaatgattagtgattaacccaaaaaacataatcatcatcacacgccgctaatgaccagctctcgcttagctaatcccacaggcggcccccacacgccactcctgccatgtgggcccacctttcacaccccccaccaaccagaaaaaaaactcccccaaaaaaaaaacttttaatgcttatctcgcggcagtataaaaggcgaccccaccacccacacacaatcacagtcagcgacccaacccaacccgagccgaggagtcgagtcgtgtgaaaattacgaaattgcccttcgactccaccaccaccacccaccggcgaggcgaggagaggagaaaaattgggaggaaaaaaaaagggaaaaagaaaaagggtggaggagatttttgcgaagctaccgagcccgacatgacgccgcatctgcccgtgtcgccgtcgtcctcccaccacctgctcgacgcggcgccgacgccggcgtcgccggcgcacgcgcagcaccggcggcggcggaggaggaggatgtgcggcggggggagggggagggggggagggccccatcctgtgaggtgttgcgcgcccccggcgccgcagccgagggtggcgacgggggcggaactgcgcggagcggcggcgacgactagggtgttcgtggtgtccgacctgcacacggactaccgggagaacatggactgggtgctgcggctccccgtcggcggcgggggaggcgggggcgacggggtggggatcgacgcgctcgtcgtggcgggcgacgtggcggagacgcgggacaacttcgcgcgcaccatggccgcgctcagggagcggttcggggccgtcttctacgtccccgggaaccacgacctctggctccgccgcgagaacggccgctacgtgagttggatttctccccacccccttttccgtttcctttctttcccacccctttcttgtccgtctcggctttcgctgcaagcaaggtgtttgacgaaatgccttggcctagtgattgatatgtactaccgttatttattaaagctacatgagtagttatgttagtgaattcgatcgaatggcatgacatatgcctacttagtgcttccctttatgtagtactagtaagttgcataagctgatacaagaaatcttagatgtagtacccagtttattgatgtcattctgaatcttgtcacttctttctggcagtattgtccagctaagctgtatttcagttgtgaatttgatgacatgttgatagtactggttcttgcttcatgacaaagggtgacccgtttgtacataagtaatggacattattaacacattagttgcgacatggggaagctgtttgatagctattctagctgttatacatgccgcaaagcatgacgaacagcacaaactatgaaatgagaactctactgttggatcatagctagtataacagtgaatttatttatttattttccttttgactgcagcattaatctttcttttgtacattgcttgggctgtctcagttactcaagttatttcttccagatggattcgctggagaaactgactgcattgcttgatgcgtgtagtgagctgggtgtggatacaggcccaagaataataggtgacttggggatcataccattgttctcatggtatcacaaggttgctaattttccagccagactgtaatgcaccgtgtttaataggaatatcctgtttgctcattttgcttaattgtcttccagagctttgacaaggaaaaggatgttaacagtgttcgcgtcccttccttagagatggtaactttcttttcccccaatggcctgatatgctattcactgttatagtgcaaccactaggagtgtcaattagcattgattaagatttctggaattccatgctgtcaatatgatatcccttcaagtgttattcatatgtaacctgatccaaaaccatgctgtgacctgggtgacaaaacaatcattagattgataccttgctttcagtgtttagctaccatctgaatttcatttttgcaagcagcttggccaacgttttgttctgttttgttttgatttgtgaaattggatatgttaatacgggtcttctttccatgggcactaacttacattgatattatgttactggtttgaatgatcaggcttgtaaagatttccatgcttgtcaatggcctccagacctggcaaatgaagatgaagctcttgctctctactttgacaaattgaatgacagaaatcaagatgcaattgaagaagtaaaaaagagcagcaaacagatactaacattttcacactttgtaccaaggtgagtgcaagtgcctcctctagttctatctaggatcccacatcaccaaaagttctccttcgtaataatttgaggatattgtttctttgatggctaccatagtactacctccgtttcaggttataagactttctagcattgcccatattcatatagatgttaatgaatcttgacacacatatgtgtctagattcattaatatatatatgaatgtggacaatgctagaaagtcttataatatgaaacggaggaagtaccatacactgggtgtatgatgaaacttgatagtctcctcacaaattctcactgagctctgtgatgtctgggatatctgatcgcgctagcagcaagtcttgtaataccatagtaatgccttcttttcaactctgcagacaggaactatgtccagagaagcggatgctttattatccaaacctcccaaaggtcatcggatcagattttttggagaggaggctgagaactatacatgacaacactaaacatggagccgcttgccatgtttttgggcatacacatttctgttgggattctgtggttgatgaaatcaggtataacaatagatgcactctctgatacaatgtatgaaattagcaatccttattctgactggatacatcttctgaccttaggtatgttcaagcgcctttggcgtacccccgagaaaggaagcgaaggatgaacggaggagacggttggctgcccttctgcatataccgcgatggtttcaatcctgaaatatatccagctctatggtctgactactacaacaagaacagaagggaaccagagaatactcagctcgctccatgggttgccaaatatttttccaagtactactgaccccctacaccgatccaagtcccttgggttcgcgacagattggatagagttgagccgctcaggacagtgtcaaagcagctgctgcattttcctggaagaaaaggagattgacgttttacctgtacatgtcttttgccttcttttcttgtttccactcttactatatgacttttgggcagggcaactaagctcgccctcctgtgatgtatgttggaaaaataatgtgtaaagattctttaaagcccttgctgcaaagatagtgacatgctggaaacattagctagttctgttcatccatcctgtgtaactcatttggcctgtctctttatctgcaaaatcaatctgcgtaggcgtgtagcctcctcactcctaaactgaacgaattcagtgaagtgatgcattggccaaaatttagctaatgactgacgatacgatactaactttgtaactacactagcatcaagaacaaacttgaaataaagttacttctacttgtatatgtttttgtcatgaaattaaggcatatgaaatagcagaaactctcgtatgaaaattgaaaggaagaaaaaaaagcctttgcagttccttcagaaattgttatgcacctcttctaaagtgaagaacccatcacccacgcaatgaaaacgaagcagtctattaacacgtgattaattaaatattagttattttttaaaaaaattagatcaatataatttttaagcaacttttatatataaactttttattaaaaaaaatacgccgtttagtagtttaaaaagctcgaaaacacgccatttagtagttgtttgaaaagtgcgcgcggaaaataaaaggggagttgggaacaactgttatcaaacacagccttattccccctaagaaagcaaacaggccaaggtccatgatgcgtgcattctacatttgtattgggctggatttcactttataatggaaacttaattatttatcattacacactggtagctcactgttcatacggatcatcatccgagtaaccaaccaacaaatgtacatgagctgatctggaccgtccatcccagcactggggcaagcaaacacaccaccccttattaaccacttaatcacactcacaaacaaccacacacacatagctaatagatattgtagctggaggtcgccggcggcgggtctagtagtcctccggcgccagcggctggtgcgcgccgccgtgcggggcggcgtcggctgacgggatgacgaggtactcgtagagaagcccggcgaggccggcgccgacgaaggggccgagccagtacacccagtggtgcctccagcgccagccgacgagcgccgggccgaacaccctcgccgggttcatcccggcgccgtcgaacgggcccccggcgagcatgttggcgccgaggaggaagccgacggcgagcggcgcgatggtcccgacgtgcccgcgcttcgggtcgatcaccgtcgcgtagtacgcgtacatgagcccgaacgtcatcgtcgcctccagcagcaccgcgtgccagtcccccacccccgacgccagtgcgaaccccggcggccgctgcacgacgtcgccggcgacggcgacgagaaggtatcagagaggaagcttagctagagagagacatcaaggtatatgtacgtaccatgccgccggtggtgaggcggaggaggagggtggcgacgacggcgccgaggagctgggcgagccagtagaagagggcgcggatgagggagaggcggccgccgaggagcgcgccgaaggtgatggccgggttgacgtggccgccggagatgttgacggccaccgccaccgccaccgccagcgccagcgcgtgcgccagcgacaccgccaccagccctcccggcgtgctcatgtcctggtacagcttccctgcacacacacatcgccatgccacatgtcactcccgcgcgccgccgcggctgccatggatggaagaaattatcaagaaacgagtgtgtatgtagtgcgtaccgagggagaggatggagccctcggcggcgaagacgaagatggcggtggcgaggaactcggagatggcggcgcggatggtgtccgggtgcgtcgcgtcctcgctccgccccaccgtgaaccgccgccctggcctcgccgccgccgtgctcatctccacaccgatcactcactctcactactcaccaactctcgccgccgtccggtccgcccaccgccgccgccgccgaagccgcgccttatcctagctagcctcgtctcgatcaccaagtgcgcagtacagttgggggtgtgaagcagctggatctcgtcggccatggccgcgtcgcggtgagcttataacgtggcggagccgggcgcgcgcgcgcgacacgtgtgcatgcgcgcggggcgaagcggtggcacgtctcgccgccgcgacgatgcgtgcgtgagttcgtgttcatctctatcgcggggggagtggggcccacatgacaggtcaccgccacgtcacgcacccacgtacggacgcgccggggagtaggtatcgtctcggcgtctctccttcaagcgatgggcgcatctgatgcatggatgggaggatgcatgggcaacgctgtgctcgcggtcgatgagacaaaatcataaaagagctttgattgatttgatttggaagtgcttaggttcgtcttgtgattaaatgggaaggggttgaagtaatgatgtggatttttggctttaatttggttttattagccggtaaatggatgagttcttttttttttagggggggggggggttgtttgggtgatttgcaagtttagttttgctttaagttgttgattctttcttcttcttcttcttcttcttcttctggtttggagggattagtattgcttaaattggactaaatgacgtggatttagccatcccgtgttgcttaatttttgtctgcgatgttgtgaaatgtcttgtatgagccacatggattgaatctccattctccagcaaggatcacgcatggtttgtatggcttgcactttagtttgttaagattaaagaggatttttataagtggagtgtactcaagctaaagtagttgtacaccttccgtttgaacagacataggcacctctgggtagttgagtttttttcccccagaaaaagtttaacaagactaatgggccaatttaaaaaccgatcaaatcccaatctcaactttacattaagaaaagattaagcctcctttgtaaatgggccaaatcctccttcccaagatgaacttcaaatttgaactagaattctggcccatgccaaacgaggcctaaaatcgacacaaacacagctacaaatggatacaacacttctcccggcaaattctgtgcagagctcaccgcagcgcgagctctcgccccgccgtcgcctccccgtctccggcggcggcggcggagccggcggcgatgtcgtcgatcatcctgacgacgtcgtgcgccttgggccggcgctcggggtcgacggcggcgcagagcagggcgacctcggtgagcctcagcatgtcgccgtggcggccccggtcggcgacgatctccacgtcgaggatgtccgtcgaccactcgtggctcagcgccagccgcgcccactccgccaggtcgccgtcctcgtcgacggggaccttcccggtgaccacctcgagcagcacgaggccgaggcagaacacgtcggcgcgggaggagagccgccgcctcccgcgcgcgagctccgggcacttggccgccgcaaggcggtgcgcgtggtgcggcagcagcgggtggaacccgtggtcagtcagcttggccaccggcaccgcgtcgccgccgccgcctccgcggccgccgggccccgggaagacgacgagcacgttcgacgacttgaggtcgccgtgcggcggccggtggaagagcggcagcgtctggtgcaggtaggccagcccccgcgccacgcccttcgctatcgccaacctcgccggccatggcagcggcgtcctcccctctcctctgttctctgcagcaaaatcgaggatccgatattcctttatttttatatgtctcttaaaaagtcacagaaaattttaaaaaatttagtaagatagatctatacgtgatttatcactccacaacacatgcaaattcaaattcaacttatataaatagaaacaaaaataacaaatttaattatgaatctaacgcgtaattcacgttcaaatttattattattttttaaattgtacaagttaaattttgactcatatatttacgaaaagatatatcataatttttttaaaaaaaattgataattttttaagctgcatacacaaaacgagaggatatcgtcttgaggtaaaaaatcacacacttccaaaaatcgaaactcttcgtcagatcagtcgccatggcagccactactccgatcaagaatggccatggactgaccgtggaggaggtggaagaggctgcggccggggacgtggtcgtagacgacgagcttctcgtccttggagaagtagcaggcgacgacctcgacgacgttctcatggcggagcttgccgaggagctgcatggtgtgggcgaagtccttgcgtggcacgtgccccatgttgcgcagccgcttcacgacgacgacgaccgggccgccgccgccgccgccgccgccgccggcgtggagggcgacgcggtaggtgatccctagccggcccttgccgagcatctccgccgtcgaacggaacagctcgtcgaggctgaaggtcgccttctccggccggaagaactgtagctgatccgccgctcccttgccggactccgtcgtgctccggcttccgttgccgctgccactgctcaccttcttgccggcttgctccgccgccttgtccttgatgtcacctgccactggtcacgtcgccgtcaatgactcgtcgagaagaaagcggcggcgagcgaagtggagtgggttttgtggcgtgcttacctgcggtggcggcggcggcggcgcgaccgccgccgagacgaaccacccggctcttcttgctgtggtggaggaagatgagcaccgcggcgaacggcaccagcgcggcgatgagcgcgatcaccacgacgctccacctcgctatcctgaaccggatgggcttgcgccaccgcgccggcggcgcggcggcgtcgcgcgccccgaagacccgatcaccaccatcgctgccgctgccgccgccgccggccggcgcggcgtcgaatggcgagccctcgcggcggcactccgtcctcacaacctcgccgcagagcctgaggttgtgggcgaacgcggtggcggggaaccggcggagcgcgcgggtgtcgggcacctcgccctggaggaagttgtacgacacgttgaacacggcgagcccgtcctgctcgaacgccggcagcgtgccattgatcaggttgtcctggagctcgagccgcgtgagctcacccagcgccgccgcgtacccgcgcgggatgggccccgagaaccggttgctcgacaggtccacgacgcggagccgcgccagcgcgtcgagccgcgggagcgcgccgtggatggcgttgtcgcgcagggacagcgtctccagccgcgccacgccggcgagcgcccccgcggggagcgcgcccgtgagctgcgcgccgtcgagctgcacgccgaccacccgcccgtcgccgtcgcacgccacgccgtaccaccggctccgcccgccgtggcacggcggccccgtccagttcgagtgcaggtccctccccgaccgcagcgcgtcccgcagcgccaccagcccgccccgctcgtcgcgcaacgcctccagctccggctctggccaccccacaccctccaccaccgccgccatcgccgccgcaagaatcaccaccaccaccatcaccacccaaacccatgtcgtctcacaccttgtcccgatcatggcggcgttcttgaagccctaaaccacgtcaagaaacaccataataaacaaatggatcccaacaatggcgggacgatgcttgccgggaggagaagaagaagaatgcgacggcgaggggagaggcgggaggaggaagaaaccatgataagaatacatggagggaggaggagtgagatttggtggtatgaggctacggattaggtggtggattcgacgtgaacatctcgatggatcgatcggcggtttggtcgcggttgcattgacgacggctcaaccgatagccttggagaagaagggtgagactcggaagagttgcaaagaaactgaagtgctcagttgggtgaagcttccaactctttcacctatatttccacatgagatgtgtggtcatgcaaattgttttgagatatatagcacatgagaggtttggtgcttgctgatgattcatcagtttgttcaattctcgtttccttttactattatttttaatttatgatccaaaaatatatggttttgcactattaatttctagattcaaaacgtaggttgtgtgccgtatggcagaggatgtggatataaaacattaattttcaattatatttacaaaatgtattttgcaattttttaaagaacttttcgtgactatttggttttttattcttaattgagttaacaattgagaacctgttcgtttcttctaaggctagaggataaaattttgcatacttgtggcacgtttttcaaactgctaaacagtgtgtttcgtgcaaaaactttctatataaaagttgttctaaaatatcatattgatccattttcaagtttgtaataactaacactcaattaatcacatgttattactatctcgttttatgtaaaacacttaatatttatcttcagaagattcaaacaccacctaaagctgaattttggagtaatcatgatgttttaaactaaggatttaagaaaacattaaaggtttgatcgaattttatcctacaacattaaatatttctgaccagatggtgatttttaggtacaattcacaactattcggttggtgatccttggttgagttaacacttgaagctgaatctagactactactaatcaggatattcaacttgggtgcaactccccaactgatcctgcagctctgcaccaaccgtaggatggcagttgcaggacaatcggacggccgcgaccacgccacgtggcgaccgatggagtgacgatcacgttgggaggttacggtacgctttgctctccccacaagccatcaccgtaacatggaagccaactcatactttggtagcagtagtagttagcagtagctggctggataagcagagatatcagaagaggtccaaaagaattcagagacattcagacaacacacaggctttatctttcacatctttatcttttcttttctctttctcactatcttttcatccctttcgggttccggagaagcatcagggatcaggggaagggtgtgtgtgtgattagtgtggggtgttcagaggctaaacccagtgtgtgtgaagattattagggcgtagatcgctgtctgatcttgtgtattgcgattttgcggcgagtcttttgagatggcgagatcgtgcttgaaagcgctggaggtttgcctgcaggatgttgcacttgcattagttgcatcctcgtgtcaggtcccagaatgactactactagaagctttggtgctgaattatttggaggctaacatgtggattctgacttaagaatcctgaagccgctgccttcgcatctgtaggagtactggtccgttccaaaaaaaatctaatcctaacaataaatctggatacacatgtgtctaggttctaggattaggttaggattaggttttttagacggaggggatatttcagttgaaggatatgcagccatgcaggtgtttcatacttgcattataatgtcagaagttagaggtcagaattggctaatgcttactacctccgtcccaaactaatagtcgcttcgaccttttcttgtaacgtttgactattcgtcttatttaaaaaattagtgcaaatataaaaatatagaagtcatacttaaagtacttttgataataaagcaaatcacaaacaaaataaataataattctataatttttttaataagacgaaagatcaaaagttaaaaaaaaaaaacttaaagcgacgagtattctgggacggaggcagtaataagtatgggctacgatggttttagctatattactgatgagttgtgaaacaaatgaacaaatctaacttatgggtaaaactttcgtatctaagttgcgatggttcaaaaaccgaggcatctcatgtaaaaaatagaccaatatactccctccatttcaggttataagatatttgatttttaaaagtcaaactgtttcaagtttgactaagtttatagacaaatatagtaatatttatagtactaaattagttttatcaaataaataattaaatatattttcataataaatttgtgttgggttgaaaatgctattactttttttctacaaacttagtcaaatttaaagttgtttgactttgacgaaagtcaaaacgcgtcttataacctgaaacgagagaagtataaattactgcaatattaaattttaaaatccagatttaagggccagtttggattgctaaaattttggtagagtagcacatcaaacatctctattaaaatactgcttatgccacaaaattgactttgcccatatacttgtctcttataggcatattttgacttcaatacaaatgagtatttttaactctaccctaccaaaattttggtagtgccaaaacttacctaagatttagcactactaaaattttggtaggacattaatccaaacatgcactaaccttcaaaactaaaatttaagatttagattttggctacggctaataatctaataagcatacatatacttgcctgccaagatggtaaattgatgtctttgtgattgacacatgttgatggttatatttgatggatcgggcgttgtaagtgcttgcatttataatatgtttctaaaaaaacatattttattcatagtaattataatactggtggtagaacaccgtcattagatacggtcttaaaaccattggacgcatgtacagttatgcaacatcaaatctgatatataatttacgagggctgctataaaacagaatccgttacaatgggatagacatattaattattctctcacacgaatatcacaggtatcaggtcctagtaatcacaggtaccgaataacaggtatcagaggtatcgagtaccatgcaactgttaccatacacaggtatcaggtatcttatctaggttttctgatgatttataattccatcaaggactacatgattttgttttccatattattaccagtatcatatggtagcatggtcagtacattttgcaacactgatacacagtggcggatctcagacatattctgtggggtcgtctgatcccacagttttttagaaaacacttgattttcatgtataaatttaaaatgtttaaataaatgaccctaattaaatacaaactaattgacctcacgggattaaattcctaactccaccactggtgacagcctgacacaaacactacaatttgtcagttgaactgaattttttcccctttttagaagcatgaaaagagactgactggccaccataatatttcaacgacacagatagcacataatcacatgaaaaatggagagatactgcagatactctaaattctgaaaacgacttgaattttcagagtgtatatatcggagcaagaacaaagcagagaaaaatcacaaaaatcaaaacgctaccacagccacactctcacacacacatatatccgatcgatttggcgccaattgcgagacgcacacacgttagaacccaaatcctccctgggcctcgagttccaaatccccaaatccattttctgaaccagtaaaatttcaaaaccacccaatttgagacaaattcctcaaaaattcagaaatcacaaaaccacacactgacccatcaaaccgggaggaggctttagccgtttaagtcctctcgcgcgccgtcgccgccgcgctcgccacgccacgccacgccacgccgcgcgcgcgcacagcaatggagctctcgcttgcctccgcgaagccctcgcctagcgccgccgccgccgacgcggaggcggtggcggcatcgtcgtcgctgctgtcgctgcgggggaagaggaggagggtggg

SEQ ID NO: 21918 - DNA, 1422 bp, Oryza sativa
gtataataacacaaccttacctcacggccactccctcggaagaaaattacataggatggaagaccttcaaacatcagaaggaccgtgcttctccggttgacacgtgtataagcacaaatcttgaagcaatcatcccctacctctggcccaactcctctccactctccatccccgcacatctgcccttctgcacaccaagcctggcattggatggctgctcgccggcagcacctacagtcccagctgtggagattggtcgatacggcatacggtatcaagaaattgtgagttttcttaacttaattcagctgtatgtcctttatttacatgcccatgaataattttgacagacaaatcattaattgtttggcatataggttgaatcatagatcaaacttgggtactcgacgctcacaaagtgtgaatgaaatctggaaaccagtgattgagaatttgagataaaagtaatgcgagattcaccaagaaaacccacaacaaacatcactaattgaccatagtgtactcaacgagagaggggaactctggtcagggaaggccggaagactagggagaggagagaagggggagggggggaagttgggctagaggtagatggcgattgcttcaagattcgtgctcatacacgtgtcaactagaaaaagcacggtctttctgatgtttggaggacttcgtctcctacgcaattttcttcacactcacgccggcgcccctcatctccttccccaattccctctccggcgacaaggtcagggcggcgccgatcggcgagcttcgcactagggcgggcatggcgcgccgcgccgcttcccgcgcccttcgctcggagggctcgatccaagggcgagggggccgcgcggggggcggtggcggtggcgccgaggacgcacgccacgtgttcgacgaattgctccggcgtggaaggggcgcctcgatctacggcttgaaccgctccctcgccgacgtcgcgcgtggcagccccgcggccgccgtgtcccgctacaaccgcatggcccgagccggcgccgacgaggtaactcccgacttgtgcacctacggcattctcatcggttgctgctgccgcgcgggccgcttggacctcggtttcgcggccttgggcaatgtcattaagaagggatttagagtggaagccatcaccttcacacctctgctcaagggcctctgtgccgacaagaggacgagcgacgcaatggacatagtgctccgcagaatgaccgagctcggctgcatacctcctgagatgaaacaacaattaacctttcttcataagcatttttgccaacttctttaacctgaacgcaagcacctgtctgcaattaaaatattggatgcaggttcaaattgaatgaacaggttttataaaatttagaagcgcagaaatgc

SEQ ID NO: 21919 - DNA, 630 bp, Oryza sativa
ctggtgcttccgcctgcacggctggcctttaggccgccgttgttgggcgtctacgtcttcaccgaccggcttgccttcgccgctgccgactggtgcttccgcctgcacggctggcctttatgccgccgttgttgggcgtctacgtcttcaccgaccggcttgccttcgccgctgccgactggtgcttccgcctgcacggctggcctttatgccgccgttgttgggcgtctacgtcttcaccgaccggcttgccttcgccgctgccgactggtgcttccgcctgcacggctggcctttatgccgccgttgttgggcgtctacgtcttcaccgaccggccgccgcatccgccgctgactggtgtcaccgcctgcacggctggcctgttataacgccaactgatgctatcttcttcacggctggctacatcgctgtcactactaataggcatcagtatcttcaacacaagctgcctacgtttgccatggctgccgactggtgtttccgcctgcacgctggcctattatgccaccgttgatgggcgtttacgtcttcaccgaccggcttgccttcgccgccgccgactggtgtctccgtctgcacggctggccataatgccgtcgttgtggggc

SEQ ID NO: 21920 - DNA, 4111 bp, Oryza sativa
gaaaaaaaaacctatatatatatatatatatatatatatatatatatatatatatatatatatatatatataccttttttatatgtgccggtttgaaaaaaaaatcggcgcctataaagcatttttggccaaatcccaatcccactaagagaggagtattgatgccgattttaattaaaaaccggcactaaagaccctcctaccagctgtcaccaaaaaattagtttcggccactagataaaaaccagtaccttatagatgtcggttgtaaactccaaccgacacctatattatcatgacgtgataaggttaaaagtaaaaggtgccggttctcactaagattggcacccttgcttgttcatccacctgtctgccatgctctgcaagcttcatcagtaatagcaattaattggcctgtgacaggcaataatcatggcatgaacggcatgtaattaagatccatccaagtatccatatccaacaccctacatgcaggaaggaacgttcctagcaaggataatcaagtgtcatcatctctgatcagtctcacagaataataattaatgagatagatcattaggcaggcaggggcatggactaatgtcttcaaaatggttgttggatcactaacaagtaacaaccccgtcttgtttatggaacacattagctagctttagctagtgtagccatctaccccttaatcagtttgctaactggacacatggaacgagccactaaccaccttttaactcgcctaatattgatctctgctttgtttaaatcatatgtcatctcaaaggagagcaggaggcacactgagattattggggtggtggtcctctacgtacatatcaaatctttgatggcctaaaagatggagagatgctgtgcaaactgcaaagtgggattctgaatatctcccccgtgagtcacgacgtgtgcgttttgaaaaatgtcagaaatattgaagctagcagacaactcgatcgccattattcaggagcctcgtcggttgcccttatttgctaataagccaaaacggtttattagagaataaaaattaatttatagacaattttgttatatatttattcatagtgcctaaaaaaactattgttaaaaagaaattacgttaaaaatgtttgaaaatcaataaaaattcaaattttaatttttgcttcagctctacaaattttgtacaaccgattgggctctcaattcttcttcacatgcttcttcgcgtcatgcataaacacataatgcatttgattgattgatgatcacaagctaggcgacgacgtacgccgttcggtagggagagctgcatttgtcttttcttttttcagaagctagtagagtgacgtacagggtattcagcttaatcagtagcatggtacagtatagtaacatgcttgagctaatttcacacacatgcgattaatcagtgtatcgcatgttagcattggcgtattaattgcagcatatatcaagtggatcgacagcaactaatacacacagcatcagtggagagaactagtgagaactaactactctcaggatgatttttgcaacagttcatcgtctccagcggtgactgagttagaaagattttttttttacccgaacaaacttcattataaactatcatttgctataaaaatttcatcatcaatttattcaacaatgggagggacccgtgaacccccgcgtcgcccacgcgcaggcgacacggggggcgaaacctagctccgccgcccccctctttcccctttccccacctcgccgccgccggagctcaccgccggaaagttggccggcgagttaggagggcggcggcggggccttctcctgtggtggcgtcccctcttggcgcgggggaggcggcgaaaaccggcggcggggagtggcggcggcgagctctccgggcaagacgatgacggatctgcggttgctgtcaccggatctggcctggcccaggccggatccggcggaagcggccggcgttgtggcgcagcgcgaacgaaggaggtatggctggcagcggaggggcgcccctctctggcggcggagacggctcgcgaggccggcgcgcgcgccgacacacgcaagcggggcgcgaggcgtcgcccggtggagccgtcggcggcggggcacatcggcggctctgcaccggtggttggggcgacactgtcctagccgccgtggcgtccgcccccttcggcctgccccccctcccccttctccttgagttggcggcagggtcggccggtcgggcggatctgtgggcggtggcctaggctgattgctgaatggtcaatgtggcttgcgacgttccttgtgcaggttgcgtggatttgaatggggtatcgcgggtgaaagccctgctgtgccgttggccggcttgacgacggcggcgtctttcggcgtcgttcccctccttggaggcgttgttatagcgttgacccctttcttttccttaccgttctccgggtgaaaaccttgctccggcttccggatgaagcggtggcggcgaccacgtcgtgtccttcttggggcaccgctttggagaagctttctcgtacaaggatatcgttggtctttgcattggcttcgaagctttttagtcctaggtttcgacgaggcctttgctcttctagtttcactttttgtttcgcggcgggcgacctttgctccttgtttgattttgctaggtgaagtcggagctgcttcgttgtggtaatgaagctgggtaacgatgacacactacagtttctttctaggggtgttgttgctgaacatgaataggatgtggcgcttaggcagcttgggctgatgtccattgtgggatgttgaggccgcttgatcattatggcagcgtgttaggtatcgatgttgtattctaaagtcggagctgctgtgtcgcttggcggtaagctcggcaacgatgacagattgcaaagtcggaacctcctatattgctcttggtcaaatttggtatcgacaccctatgttgggctccgtcagtggtttttagttgtagtgtgttgtggcgagtgctgtgtgttcagccagtcggtggttgttttttcttttcttgtaacccgtctagggtttttactcctgcttattgaaaatataattggcagttctcctgccagtttagtttaaaaaaaatttattcaacaatatagcacgtgtgggcttcagtgcaaaggacagagagaagcccatctctgtatatgggccgtacatttggtccaaaagttccagattcagcgaactaattggcgcacgaacaaatgagtgaacacacccgatgcgttttattatcggaaaatgctgctacgaccaatctctctcaaaaaaaaaaaaacttgtacagttcttatatttcttttaatctaattcaggtggggtcttttccccccggtggatcaatgggcttgtttggttcagtaccctatcaaatcaaaatattgataggcctaaaatctaggtatgtttcagcactactaatattttagtacggcagagttgtaaataaatgtgtttggatttaaactaattgagagccaaattttaaattatagtgaagaatgttctataattgtaccaaatcgagcatgtgcattaccaaaaatttaacctcagaccaaaccatcacatttactattcaaaataaaaaaaatggtacaacacattttggtatcaaaccaaaacggcccaatattatcacgcgacagcagtcggcggaggtgttgtccgcagggagggcggtgcaacagacaataacagggatggagctacagtagaaccatcggggtcagccgaccctgatgacctccgatgaaatcgtaaattgtttaagcaattaagatgacatcaggaattaaacaagattagtatattctgaccccggtgacaccgatgaactaattcctccccgggcgacgagataattcagctgagcggactgataaaaaggttgactcgatcaacgatctgtgtttttgtggggttcggaattttattttccggcgccggtgaccccccaactccggtagggagcatacggattaggttttggagttggggtcagggtaggaggggg

SEQ ID NO: 21921 - DNA, 717 bp, Oryza sativa
attcctgcagcccctacttcatatggtcagacattagtcatatttatcctttgaaacgttaagctgattgtcaggtgagccactagtgattctcaaccatcagtccagtgtggtttagaaattaggcaaaactggctacaccaatgtaacactaaggatccatgtcattactcaaaacacaccttaaagtcatgtgcatatgctactatgctaatggattgcaatggccaccagcaaacaaaactatgggcaaacagacctgatcttttagtgtgtatcggcaacaaaagagtatctgccagcagatatagctaattttgttttgtgattgggagttaacatgacaaccaagtacagtgctctatagacaattttttcaaaggattatgttccaaagatgttgtagatctgcaatgacctgatgtgttggatctactgttgtcttacgaaagatacttcatacttttatcaattctgatataagagctttgtcttgtagaatatgaatgagcatcctgatgcttggccattcaaagagccagtggattcacgtgatgttcctgactattatgacattatcaaagatcctattggtatgctggaatgatttaggggattattttcccttcttttcccagcttggcgaagctatgttttgtgccatctaagctattcagtttctgaacactaagcttgtctgcagatttgaagacaatg

SEQ ID NO: 21922 - DNA, 658 bp, Oryza sativa
gacatcctgcttgacagtttgacacacatcagaaattaggttggttcatgagaaacaaagactcagagtttagctggattacatacctgagatccaacctttccaggaagtgactgcaaagcctcctctccaaaacccggtgtccctctttttttttcagatgatagtgagatgatgccataagcttaattgatcagaactgtagaaatgtttcagcaaacttaccgataatttacaataagtaggttaaatccaagtgatgcgaggaacgccgatgttttcgaatagcttgatacagatactgagtgtgggccaccatgaaggactagaatagttggtttgtgcgaactgtccttgcaggacacaaagatagcttcaaatggaagcttactgcctgcaggatataaaaaacatttgcttggtgaatgatgataagccacatatgatagtctaaaatatttgtgtccatgactataccatcagagaggtcatcagaggggttagtgactggaatttttagtatgctgaattggtgatgtgacaacaaagcctttacctgcagcagatggtaatgtgagaatgaaaaaaaaaagcctgatttagtaaattacattgttcaaagcatcaaagaacacctaagtatacttcaaattgtaca

SEQ ID NO: 21923 - DNA, 676 bp, Oryza sativa
attcctgcagcccccgacggcttggcccatggcacggggttttggcctgaccaaattaaagtatggcattgcccgatttttgggccgtgcttgggcctcaccctcggcacgatgggccgacccagcatggcccggtcaaatgatcagggagttaaatagacttattctaccatataggactatagatggccaaacgggcggcacggcccaggcctggccatgcctggaccgaggttaattgggccggcacggcccgacctacactccgggccatgccgtgccagcccacgggccgcacacatggcccaggcatggcccaacacgactcgggttgtgccgggccggcttgaaggcacgacttattgtgattttcacataataaatctgtttttggtccctcaactctgtgggctaggtctatatggctggaaaataagtctattatgtattcctcttctctttgggtcctgtctgatatggttcatcaagtatattttgcatcccacgactttttttatttggttgggtgccgggccggcccaccgtgccgagggtgcggccgaggcacggcccggctatcgggccaggccggcaccggcatgaccccgagtcgggctgtgccgtgcttgggcgggccaaaatggcgtgtcttaggccgggccatgggcctcaagcc

SEQ ID NO: 21924 - DNA, 8047 bp, Oryza sativa
agtcgacgttgtgctttcctggcgcagaaggtcacagtgtcgtctgctggtaccacctgggtgacgtgcgcagcagcagccgtacgagtgtggcaacgtcatcagctcatcagcttcataaaagggctcgccatgcatgaatcagcccaagcttttttataatggttttgctatttcactcgcgatagatttttgaatttctatgtttcaatttttagtctgtaggatttttcatcaagattcgtattcctgtgtattcaatttgcagttacattctgttaacatttacgcttagttatatagcacttacactaagttaaagtgcacaaaaattagatttttacaatagtttatttcctctagatttacaattttgacttttctttttatgttgtagtttcatttaatacgggatatattttacagtgctttaaaattgttttcgaccatccaattaatgttgatccaatgttcattggaggtaatgggattggatatgatctgtgatccatgcttgactttctttttccggtgcttgcatagaattatcttagtactatttcatttaagtctactctgcttttggacccaagaatttttttgaggtgaaagcttttggacccaagaattcagactccacacccgcgtattatgcaaatctattaatttcaacactggtttcaactgtacatgattcaaatgttacttatctgccaaatgaatttaatctttgtcacgtcagaaacctagctgtatgcctgtatctctgaagcataacttgataagtttcagccaaagttatgcaaacgaatcttagaaattaagcaaatggtgacttatctgttgacttttccactatcaactcgaaaaaaacccaagaaacacagcaaaatctgatgcaccgtaggggagtacttggtttggtgaaaatgcgatctaatgatgcactcaaagtttttatctgttactcttgcaaaatatcaatgcaatcaaaacaagacaaatcatttacagaaagcaggaaataaacatcgaaggcaattttctccattactgatgataagtacaaatgggcacgctctgctcatcttgtcaataggaatatcagcaaaggttctgcttttttttttcacccttgtaaaggtaaaggccagtaggccattataccctaaaaaaaagaagataacactaaatatgtaaataataacatgccttattctaggacagtataattagcatatcacattgtcccctattccttaattatagtcaaactgcacatctatatctcaagtttccaccattgtaattcttttgtaactgtccttacctcttgcaagctagctactgcaccatgtgagattcttttgtaagctgttgtttctgtcctcttctaaagtataaaatgaacaccatgtgtttatgtgcctcctaattattttttttcaaaaaagatgtgcctcctaattatgaccagtgagattttcttctgccttccttctctatctacaacaaaaatattgttgctttttgttgtctcctcctgtgtgtgtatacttatgttactcttggaccaaattaccatcaaatgcctaaaggggcacctgaattccgaacccaaggcccaaaagtctctttgtaatttttttcctcctatataattgtggatatgctgtttccagcaggcgctgatgcggcgaatggactctcaggcagcagttcaatctggttactgcagttagaaatcaaatgaagcaatccagtgaacaaagaggaactagctcaatgtcaggtagcaacatatatgcaagaaattggctgcaaatatgtttgtacctctcatggtcatcataaatgttgcctgcctgtgtaggaggagcttggctgtttgaaacgatctccagtggatcaggggatgcaagggatggattcataaggtcgagttgtttcgaatctgttcacaggaaaaaaacgccgcataaaaccatcaggatatttggccgtgcactattcagtattcactatactattaaaacatttctccacgcttcaaaaaatatgttttggtaagaaacaccgttcttctactgcacttattaacctaatcattaagttcattacttaaattatttaatttatcactataatcaagtagataatccttgagccactaaacaaacttcaaccagggagaaatggaacaactagaggtataattctggcaatgaccaatgaatgacacaacacacagaccatcctggagagaatggaggggactggcgtcctcaatgctgcaatcgaagtatgcaaactgtggcggcatggattcaagcctccgaactgtggcgcgccgcctctccatctccaagagcatctcgcgcttctctgccaactgcttcctcatcaacctcgaagcatcatactctgctgttgcacaaaattgaagcaagatgaaggttgagaattaatcggtgcccattgtgatgatgtgtgcatgcaaatgctattatacctgtgtagagctcttgatcaaactcaaagaagcgtggaggacagtagggaaccatcgatttgatgttgtccacgcacgtcctgcacgtgaaaattgcaatatttataaaaactttaattaatttaatttgctcgtcacaaacacaaaaaagtagtaacagctagaagtactaacaagtccatgggaaacaccatttttaataatttgaaaactctactgtgaattgaactatctgttggcaagaaccaagaagggtaatggttacctgtcgacgcatttggatttctccctgtagggcttgacgagaacccgcgatccgcagatgaaatgcgggttgcgccgcatcaggatggtgctcaccgtctccgggctctggaagctgacgaacccgaacatgcgccgctcttggcaggggatcctcacgtcgcgcaccggcccgtactgcctgtcaaacgcaatcaaacaagcgaaaatggccatgtcatttaagatttggaaagaagcaaacaagttgcggtttatacatgccgaattgcagacccgaagtagttggcgacgtcgtcctcggcgaaggtactctcggctgggaaggtgaggtatatctggtgcgagctcgccggaactgagcccgtgtcgccgccaccaccgccgccgccacctctgaaatccatgtacttggcagcgtcctccgcgagaaccaccgaatgctgcccgtgcggcctgttcgtcagacagtaaatcaatcaatcaatcaaattgagaagaaacaatcaacaagattgatagagaagaaatggaagattattttggcattacctttcgatgacccgtatcttgttgaggcgagagagcagcctggtgaggctgtatccggccttgccatggcgctggctctcggtgaggtagccgtcggcttggagtcccttgccgtacttctcgccgtagagcgtcggcagcgaggcgatggacaccggctgcccgcgccgcgagttgagcagctcggtgatctccatctccagcgtctcgagcgagcccggcgtcacgccgcctggctggtggttgtacacgtcgccgttgatggcggcgccggcgagcgcgtcctggtacacctggtggtgcgagtagtggcagttctggccgttcttgcagatgcctttggagaagtagtggcagggacgtcgagtggacagcccgttcgaacgccgcgccctcgccggcgaccccccgccgccacccccgccattggggaaggcgtcctcgccggccgggtagtagtacccgccgccaaagttgttgtcgtcgaggacgtgttggccgccgcgcagcgggtacgggccctccgcggaggcgtcgacgacgagcccgggaggcgcgaactcctgctgcgccgccttagtcggtggcgccggcggcgagtccggccagtactgcggcgactggacctggtatccaaaggcagccgcggcggcggcggcgggagagtagtgatggcgaacgccgccgcaagcaggtaccggggggcgggagaagagctgctgcggctgctggtgatagcctccgccgccgccgacgccgacgccgccgccaccgggaggtccgtgcgcggcggcggcggagcagcgggcatagatgacggtgagcgcggctttagtatcctcgatcttggcgaggagcgtggcctcgggaccatatgcgagctgcaccaactcgtcctcgtcgggctccctcagcagcattacgccgaatatcttgccgacatgctccggctccaccctctgcaccctcgcgaacgccagcttcactaactccggcacctccattgccacccaccaccaccactggtggacatgaaacctaaacctagcctacctcgatcgatcactagacgcccgcaatggaagaatggaattgaaacaggaggaacacgaagaacaaacctgggcctccttttataacaacaaaggaggaataaaattcgagatcgatcgagagcgcgcgattcgatcgggtggatagtatcgcgcgcgcatcgatcgcatcgcatcgcatgcggggggatcgagcggagggctcgctcgccgatcgaagcctagtcgtcgccttggcccagttcaaacggggcgcgcgactgcctgcgtgcgtgcgtgcgagcgagagagaagaaggcggagaggtttgatgagatggagtggagtacgtcggtcgattttttgtcatttgcatgatatatttgttgataggggaaaacggcgatctgatcgctcgctgatccatatccatattgccggttcctgattggcccgcttatcactattagaatttaagataactcttggaattataaatggtaaaaaaaatgagagagaaaacgagaaatgctgcaaataggacaaacctcgtcactgtcatatgcatgccaaactgtttcttctccttcttttttttctctctttaaatttttttctcctaaactacttatccgatctataatccgatcacactgttgtattttttgtaattaaatatttacaacaagatatcatataattatattatgtcaaaagaaaaacatatattttaaaccattaaaactcaatgtttcatacgtaatagttatatgtttcgatgtatgttttcagtgtgtttcaaaaaatcttaaaactacctgccaccactctctcttctctctccacctcatctatgcatgcatacatttgagagcttcaaaatgatttttctcctaaactaattattcaatctacgatctaattacaccattataattaaatctttacaacaagatattgcataattaaattttgatgaaagaaaaacgtgtgtcaatccgttaacattagttatttcatatgtaatagcgatatgtttcaacgtgtattttattatgtttcataaaaattttaaatgtctggaacatgtttcacacgtgatgggaagattcttccgaaagaaaaaactcccagcgctgcgctgctctacttcttcaattcccctctttcttgctacgcacacacattagtctttgacgtgcggaatgaaagcaggttcccggtccttccaatggaatcaaagaaataaaatctagagctttccaaagtactactcccgataagaaatcacaggataacattaaaaggaccaatgaaaagtattgcaaatctgaaagaaaaatagataagaaaaatataaacagatctgaaaaaaaataaagtacacgttcagttttaaaacttgtttgtttgtgtcctccaagtctctaaatttttaaaatatggctcccatcggatggcctattcagccaaaaaaaagccaaaatttaaattttcaaacttaattttgacattgattttgagatattttcaacgcagtttctttttcagcattgccttttaagtcaccgagaacacatatataaaagttttacctaccaattcatttttattctctaataagccaaaataaaaaaaccaaacgatgaggccctatacttttaggtcccttaatttgctaaagtgtatcattctgatcctaaattgccatgacctgagtgatcgttggactatttttccttttttcttttttctcgcctttctattctctttcttcctttccgctcgtgtgagaaaaaatacaaaagagaagaactaatccaagagaagaactaatcctccacatgtgcaaaacaaaggagaggggaagaaaaatattgggacaggaatgtccgtgtagcatgccacgtcagtgccacatcagtgtatgttaggaactaatcctccacatatgcaaaacagagcataatattagcgtttgataagtaagtattagcttaatagatttgaaaaatagattaatataatttttaaggtaactttttaatataaggtattttttttagaaaacgtattatttagcaatttgataagcgtgcgcgtgaaaaagagaaaatagaagttagaaaaggacataaaagaacacaccctaaccatgaaaaaaaaaagatgatgagagtgataactaagcagaaaaaggtatatatgcaacaaaggactaatggaaaaaaaatacaattctaaattcatgcaaaactgatcggtataaaagaaatgggatagaattaggaaagagaagatgggagaaaaaactagggggttaaatacaaatagatttgtgtcttgattttgttagatttttgttttcattttttctaacattcatctgactgaaactatgtattgctaatactcgatgttacaagggctaaatagcaagcgcaccaatgtgcgctctgattttctagtttactttaattggcgcggtgatggtggagaggacgatcccgtattgttcgtatgtgtgaacacacaaaaaataagtgcaaaaaaattgtttttttttgggggggaggggggaggatgagtgatccgctcgactccctacatgcaagcaagtgatttgtcctccttacattgttagtactgtttggtgtaactatttttttataacaaaatctcatatgaacatatgactctattatgattaaaggaataatatgtggtaatcgttaaaacttgatgtttggtacgtaaaaatattgaatggtttcactagaattcggctgtctttatatattctggtttattttatgtactagtcattgttacttaatgttcatatagttttattaacgatgttgcaactaatatttttgaaggaaaaattccaattaaccccctaaactttagatggaagtctgtttagcaccctaaactttgaaaccgggcattcaaccccataaattttacggtacctttatataacccctaagatgatttttcataatggttatatgaactagaaggagatggcagctgagttgggcttataacaactggcaagccaaggaaataatctgtcttctattcttcgtgttccttttttgaaaggagtgaagggattctttaactgtcaacgagtgcctatcttcaatcagctatacctatgtatacctatgtgcacagtacactataagaaatgtcaattgaatttctcgaaaacacgatcgacaatctttccaatggtatataacacgatcatcataaaattctatatacgaatttatattaaactgaaattgttggatgatcgaaatggaattttcagtttcagacgagattccggagaccctcttgtccacgaggttgacaattcgacgccccacgtatggcccacttgcaggccagccaaagctgggacccaccacctgacggcctgaccccaccattcttcttctccaagcaaccgtcgacgaaaccccttctctccctatccattcgacgagagattgatcgagcagagcaccatggctgccatggcgagctcgcgtgggtggggcgatctcccgccggatctcctcgcgctcatcgccgacggcctcaccatcaaggcctacacccgcgtccgcgccgtctgcaccgcctggcgcgccgccataccggcggcctcgccgtcgctcctcgt

SEQ ID NO: 21925 - DNA, 3076 bp, Oryza sativa
cgcctccccgccggccgccgccgccgccagcgaaggccggcgtcgttcgagccactgttcgacaaggcgagcgccgtgttctacccggcggccgcgttcgcgccaccgcacagcacgggcgacaagtacctggtggtctgcgatgacggccatctctaccagatctggatggacgaaaagatctcctatggcagtggcgccatagcatccgttctcaggtactaccctcgccgccggccgtgctggctgccggcgaaggatctcggcgggcgctcgttcttcgtcggggtgaacaacgcggtggcgctgcgcgtggatggtggcggcggcggcgcgtcggggctgagaggcaactgcgtgtactggagtgccaggtgtagtagccgggccaaggtgttcgacgtggagtccggcaagtcggcgacatgctttccggtggtcgacttggagacgggcaagtcggcgccgggctttcccggcggcgcggaagctcatagagccctctgctggttcttcttggctgatatgcgtagcagcagcagcaatacgagagtgggaacgtcggctcatcagcttcagaaaagggctcgtcatgcatgaattatcggaccgagttttataagactactctcgctccgcttcagattacaaacccttgttcattttgaaggattcctaaagtaaatctcaattcctttggaataagcactatttatacattccgtctgtagaaacactatgccaatcctccaaaatatgctaattccatagaaatgaaaacatccacgccatcctcttttctttagctcagtgtaggtctataggaaaaatttatgtgttccaatcttttttttcacgtgcatttctacattatttctacgtttttattattactgtgatttgatcaaagtcaaaccccactctaaatttgatcaagtttgtagataagtatagtaatatttacaataccaaattagtttcactaaatctataattgaatatatattcataatatatttgtgttgtgttgaaaatgttattagttttttctataaacttagtcaaatttgaagcagtttaacattataacttgaaatggatagagtaaatgatatcccgtacgttgctaagaaatgacgatatcccgtactttgctacgaaatgactatgtatatatagatagctcgacaacatatgcaagctagatagatagctcgacagcatatgcaagttatactaaaaataagaaggaatgaacaaaagaaaattaaagaacttagaacttttcgattagtttggttgtgaagatcaattgtgttctcaatagaaggaaacacacatgaataaagaaaaattcaaaaggtttttaacttcagtttgaaatgagctgaggctgagctgagatattcttctagctattcaatggtcaaaacttttatggtgatgtggctcaatgcatgttgaacttgtggttccaactataccgtatttgtagctaattagtagattagttctaatgcaacaaaagttcataattttaactttgatcctctttgacatagcttcaggtctaaaaatttcatatacctctaggtattactaacttcacaaatccatatatttatatatgcgattatgttaataacatttggataaataaattttattctcattttaaataaaatttatttttaaaaatcactataatttaatatacaaactccaaatctaacgtggatttgatatctagagctgcgcttgtatgatctaataacattagttttacttgtgcttagagaataaataaatttccttaaaccatgatacgtttttcatgagcgcgtaaaaaacgaatctttagatctagttgatggtatctagttggtgctttattaataattaacaaaggcacacatatgaccaggaatgtttcccgtcgcgcggccgattccatctgacgctttccatcatttcctctgcaattacaaatatatagctatcaatctacattgttataatacttaccacaccgataaagaaaatcttttctttctcggattaattaattgattactacctccatattttaatgtacgacgccattaactttttgtccaacgtttgactattcgtcttattaaaaaaaattatgtaattatcatttattttattgtgatttgattcatcatcgaatgttctttaagcatgacataaatatttttatatttgtataaaaattttaaataaaacgaatagtcaaacgttggtcgaaaagtcaacggcgccaaatacggagggagtaatttttaagattatacagaataatagtttacccttttgccctctcttatacttactacggtagttttgagataatccgatgaatatctttaactaacttaatcacccagatttttttcttctggatgatcccaatctcaatctcataatagttaattttatccgaatattttgacgagagagcaagcggcggtcgagtcgatcgagcttggccgccatggcgcgtgggtgggaggacctgccgccggacctcctcgtgcacatcgccggtggcttctccatccaagcctacacccgactccgcggcgtctgcgccgcctggcgcgacgccctccggccgccctcgccgtcgctcctcgtcctccgcgaccgccacgccgggcagcgcttcgccgcctggtgcgtgtccccgaggatggtctccaccgcgctccacgagacgctcgccgcgaggctctccccggcgagccgctgcgtcggctccggcgacggctgggtcgccgcccacgtgcccggcggcgccgtcctcgtgaaccctcacaccggcgacgagatcccgctccactctttccccggcggcggggggaataatgtggtggtgttcaaggtcgtcttcgcgccgaacccgacgccgagcgagttcaccgcggcggcgatcaccggcggcggccgcgttgtctacacgacgaacgggaacagcggatggaccgacttcaagtgcccccgcctcggcgctcacggcgacgggggcagcatcgccgacgtggtgtaccac

SEQ ID NO: 21926 - DNA, 1157 bp, Oryza sativa
aattaaatctctcatacctacgaacatggggctgtttggccaaggtaaatgtacctatagccaaaaagcggaaacttggaccaaaaactgttgattgtgtgtttcttggttatgctatccacagtgtgggttatagattcttaatagtaaactctggagtacccgacatgcatgttggtacaattcttgagtccagagatgctacattctttgagaatgaatttcctatgaaatatacacctagcacttctagtaaagaaactgtcatgccccatgagcactttgcaccgatagaacacaatgatcaaacgcctgaggaaaatcctgaggaggacaacattgtagatactcgcaagagtaagagacaaagggttgcaaaatcctttggagatgactacattgtatacctcgtggatgacaccccaagaaccatagaagaggcatattcatctcctgacgctgactactggaaggaagcagtatgcagtgaaatggactcgattatgtctaatggtacttgggaagtcgttgagcgtccatatgggtgcaagcccataggatgcaaatgggttttcaagaaaaagcttaggcctgatggtacaatcgaaaagtacaaggcaaggcttgtggccaagggttatacccaaaaggaaggcgaggacttcttcgacacatactcaccagttgctcgcttgaccacgattcgagtactacttgctctggcagcctctcatggtcttctcgtccatcagatggacgttaagacagctttcctaaacggagagctggaggaggagatctatatggatcaaccagacgggtatgtactagaaggtcaggagggaatggtgtgtaaactattgaaatccttgtatggcctcaagcaagcacctaagcaatggcatgagaagtttgacaccacgcttacatctgcaggctttgttgtgaacgaagctgacaaatgtgtatactatcgctatggtgggggagaaggggtgatcttgtgcttatatgtcgatgacatactgatctttgggaccagccttaatgtgattgaggaggtcaaagactatctgtccaagagttttgaaatgaaagaattgggagaggctgatgttattcttaacatcaaactacaaagaggagatgagggtggg

SEQ ID NO: 21927 - DNA, 554 bp, Oryza sativa
gaaagaatttcagctgcacgtttccaattatccacacaaaacatcattgaacaagataagcatgaagcaactgacatctgaggcctcccgctatcataaataagacaactttgaggggaatacttttctgaaaacacattgatatgatagctatgcaacccacgaagacatgtttttatcccacataaactaaactggcaatatgaatattaaatcatgtgtagtgtaaactgacaagacatacacagaaagccaaaatatctctcaacagcttaccttctgcagcttccttgcgggccatatttgccttcatcaaatcagccgatgcttcagcagcctcaattccagttaagccagtgcagtagctatttcggatagtctgcttgcagcatttgtagccccactgatgatctttccaccatgagccccatacggttgtatggttattaatgaaaacatcctcttcatatttgctcttgggaagggctacatcctgtatgaaatgaactttgagaatccatgaactaatacatgcaaaagacaatagataatgt

SEQ ID NO: 21928 - DNA, 908 bp, Oryza sativa
atgagagacggcgggagacggcggtgcaggagtgggaagaagcacggccgccagatccacgccgtcagtggggtgggggtgggagaggagggggcgggggagtcgctgctatgcacgtgggagctgagggagaggaagagagagagcggggaaggagaagaaaaagtggtgagaccagcttgaaaagaaaaggtgatgggcccactaaagctacgagtgcactgtagagaggggagtttcgactgcttttcttcctacgtggatatttgggctcctcaataagacaagccgcattgctattgccctatagcagcgatgcgatgctggttttactcagtgttatagacaacattctgttagagctagacgactcaaattatttttactttctaaggttacaatataaatatataaatatggtgtggtatgtgttgtgttcggttacaacatctccatccttcattttcttttagagcttcatctgtcaccaaagaatgataaaatttaagaaaaatttttatagtatctgagatgtaccaagaggtatcaattctcttagtataatttagtattccctctttattacttgatatatcaagaggtgtttaattttacaaaagaaaaattacgatacatcactgttagggaatatatataagcttattaatgggaaattatacggccgtgttacatggcgtctacgtcactacgtgtgtcgtcgtcgtcgtcaagcatcggcccaggtgatctgggcctcgccgtcgtccttgttgagccccagcgcgtcccacaccgccggcgacccgtcgacgatgttgttccggcacggcggctcgaacttgtggtcgctgtcgcagccgcgctgggagtcgcactcgtcgacgaccatgtctgtcacggacgcgccg

SEQ ID NO: 21929 - DNA, 652 bp, Oryza sativa
gtgctgccaggacggcgtccagtacatgacgtacgcctgctcgccgcccgtcgccgccggcggcaccggcaccgcggccctcctcacgctcaacagcttcgccgacggcggggacggcggcggcgcgccgtcctgcacggggaggttctacgacgacggccagctggtggtggcgctgtccacggggtggttcgacgggaggagccggtgcgagaaggacgtcgtcatccgggcgagcggcggcgcgtccgtgacggccatggtcgtcgacgagtgcgactcccagcgcggctgcgacagcgaccacaacttcgagccgccgtgccggaacaacatcgtcgacgggtcgccggcggtgtgggacgcgctggggctcaacaaggacgacggcgaggcccagatcacctggtccgatgcttgacgacgacgacgacacacgtagtgacgtagacgccatgtaacacggccgtataatttcccattaataagcttatatatattccctaacagtgatgtatcgtaatttttcttttgtaaaattaaacacctcttgatatatcaagtaataaagagggaatactaaattatactaagagaattgatacctcttggtacatctcagatactataaaaatttttcttaaattttatc

SEQ ID NO: 21930 - DNA, 741 bp, Oryza sativa
acggctttgaaatcgcttgcaccctgtcttgccttgctcgctttcccaaacgccggcttcaacttccacgaagagcggatcctccgaagctgcagcgtctacacgaccaacggaaaagaaaaggcttttactctaacaaactccatataaaaagcattaacaaagcacaaaaatgggttcttgacttcttaaggaaaaattagagacttgaacggtccaattctgagttcaaatggccaagttatagccatttgaagtttatatgctctttaaatgaatatttgcgaatttcttcatttaaattttaatttaaaatcggatttattgcgtcagccgaagggagaaggcgcgcggaccgggtccacgggagcggggcccacgcggcagcctcacggcccacggtggaccgggtgcacgcggctcacgccgaccggcgccgtgggccccaggcgtcagccgcaccccagggcgcgggcggctgacggccgaaccccacgtggcaaccgctcggtgcgccccggggggcggtcattgcggcgcggccggcgggaggccgcgcccgtgccccgatggtcaccgccggcgaccaccggcacggctgaacagcgaccgagagaggggagggaaagggggaaacgaaacgggggtccaccgctcaccccgagtcgaaagcgacgacgaaaactgcggccggagctgagaaagcggcggcccggcctcgggtcgaccgggtccacggcg

SEQ ID NO: 21931 - DNA, 6456 bp, Oryza sativa
  unsure (1)..(6456): unsure at all n locations
gacatatgtactttgcaaagaaatgtaaagtgcaaactctttatgtcaattttttagaattcaaaagttaaattcatggtttaactttagttacatagttttactattgaaattacagtttttcttctatgtaaatgtaacacaaatgtactataagggcctcttcagattacagtatttttaaaggatttttggaggaatactgttcacagggatttttttcctttcctatcattcggaaggcacaaacaggtcataggaaaatctaaggaaatattcctttgctgctgattacaaagaaaaaacacaggaaaaataacatccactccgaccacatttttgttttcctttgcgtaagaccgaggtaatcaagcagtaaacaagaacttttacgaatacaagcaaagcaactgagccagaactctgaaggataggaataagaagcaatccaattagaaaacaacaaggggaagaagcaactcgaggttgccagctgctcgagcttgtgatggccatggcggcagctcgttcctgcctctagaagattggggaaaaggatgatgcggtgaagaggataaggctttcctgtctagagagtactcgagaatagtgactagatagaaaatagtattctattgcttaattagattataatctacgcggttactcttgatcgtaaaattcccgtgttgtatatattcctgtattccgaatgctttctatcatcaaattccttagtttttcaatcctccgttttccatatgaaatcctatgctattcctattcctgcatttttcctatcctgtgttccgaataagccctaaatttacttttcatgtactggaatgtgtttgtgtagtaaacttcaatgagaatattcaattaaaaacaaatagttaaaatcaaaattgaataatcatgtacctttcaattttttccagattgaaattccttatcttcaaccatcggtagaatgtttaatattcctgtgtacaaaatattatcaaatcattcctactttgaaaaaagactgttgttgattccaattcaaatgtatttttttattaaagacattgttgtttgtgtcttctttacaaacagttattttctcatgaaaggcatttgttctttattttttctttttgtgaatagtttgttctactgtcctcaatttgtgttttgtttatgtaatcgtactgctgaattgctttatgatcgaaaagataggtatagagtcaattactgcaaagttatattggaaatacagaaaaaattttatgtaatttgattataaagttataaatagaactcacagagagaattatctaatcatttctacaactattaaattgataatcaattttgtgtacctaattgcttgtaatgctactgttcaagattaagacttaatttttggtttaagtgttcctgttcataactttttgattaatctgatttgtaacaacttatatacacaaattatactagaaatgtaatcagttgttgatatcactgttgttacaaatagaatctgattaatttattttgattgcatttttactgagtaatgttgagatcgccgcaatctgaatttgttttcattttaactgaataatgttgacctcgctgtggttatacgaattatactacatgttcagcaactatactgcctttgagtttgatcagatgttttatttattaactttgtgtttgatttttgaaatgttaactgaactgcagctgtaatctcaatactgaatgtgatttgttgaataagtaatctggactctctgactcaacatatctaattttgtagtgactacatggatctaaattgcaagattcagaagaagaaaacgatgaagaagaagaatcagaagatcaaatcagaagaaaacgattactacatggatctgagtttgcttgtgtgactttgctgtttccagaattgatatctgatcacgtgcttttgtcagccatcttcttggcaaacatgttttctgatgggtcacgtgaagaaatcaccaaattgggcttttcactttagaatcatttcggtttgggctttggtttggatttgggccacgataaataggccctgaaaaattgtccatactttattttgctgtttgtatagcccatttctttttttatatttttttgctgaaaaaaatgtgagctgttagattgaaatcgtatggtgacaaaatttgacagattctagatgctattttctgtcgacaggctatacacggtcccaaaaataaaacgaattcccataatagggggtttctaaaatatatgggtttttttttgcaatggaatatttcagtttaatgtaacattaaatctatacatagtgaaacattataagtacactaggtgaaacattttttgtaaaaaaaaaaaaaccaaattcccataataaaggggttccaaaatatgtgtgatttgttgcaatagtagataggagcatagatacggtaggacaaggcctgcatgcagcgtgggggaggggcgtcgcggtgcggtcccccgcgccggtcgtgcgggttagagcattcgcgatatttagggtcctagcactgcggattttctattttgccgacttaaacaaaccacaacggggaagaccagtactctcattgccgtggtccacgcgtcgcacgactgagtaccgtgccgtgacttccttctcctatcgaccagggacggacgcagcaagttataaacagtaaggctcaactatctaattctatgcattttgggcaaatctcatctgaaatttagtgttttttctttgaatttgtttatgccacgtgagctgcctaacacgtgtcacaccgcgccgaccgcagccagagagaaaacaagctcgcggacagccgcaacataaaaaggcaaaaaaaaaaaacaaaatctgttactacgccgaaaccctctaatcaccagttcacaatccccccataaaaggcggcccgcctcatatttcggcacgcccccaaatacacccgtccaatggccgccgccgccgtccacgagccgcttctcgcggcggcgccgccaacgcccggcaaggccgccgacggcgacggtccggaggaggggcgccggctcgcctccgcggaggcgaagcggctgctgcggctggccgggccgatcgtggccagctgcatcctgcagtgcgtggtgaacatggtgtccgtcatgttcgtcggccacctcggtgagctccccctcgccggcgcctccctcgccacctccctcgccaacgtcaccggctacagcctcctcgtacgcccgcacgcacgcacgcccgctagaaatttgaatcgtggatagattgtttgggattctccatcgaattgatctttcaaattctcctctcgcagacgggcatggcgacggcgatggacacgctgtgcgggcaggcgtacggggcgaggcagtaccacctgctgggcgtgtacaagcagcgcgccatggtggtgctcgcggcggcgtgcgtccccatcgcgctggtctgggcgtccgcggggcggatcctgctgctcctcggccaggacgcgggcatcgccgccgaggccggcgcgtacgcgcggtggatgctcccgtcgctcgccgcctacgtgccgctccagtgccacatccggttcctgcagacgcagaccgtcgtgctccccgtcacggcgagctccgccgccaccgcgctcctccacccgctcgtgtgctggctgctcgtgttcagggccggcatggggagcaagggagccgcgctcgccaacgccatctcctacgccgtcaacctcgccatactcgccgtctacgtcagggcgtccaacacctgcaagggcaggtggagcggcttctccggcgaggccttcaaggagctccgccagttcgccgcgctcgccatgccctccgccatgatgatctggtgagagatgggaccatcgatgtagagttgactctgaaaatacatatcttatttcaaatattcagtttgtgatcgaaaagagtgatcatatctgcagcttagaacatatcttatttcaaaaattcagtttctcatcgacaaaggtgtaggagtaattttttaagctatgcttcaaccaaaccgtttaattttctagacaattttcttttgcagcttggagtggtggtcatttgaaatccttgtgctgctctctggacttctgcctaatcctcagcttgagacatcagtgctgtcaatatggtaaccacacagttctacttttagtggttcagattttgttttaaaggcacattttgttcttaactccagctaacagttttcaatattcagcttgaacactggggctctgctgtacatggtaccattgggtctatgctcttctataaggtgcaagttgtcaacatgaaactccacagtttatagtgttcatgtaataatttccttgtcgatttcatgtttttttcttctctgtcttcctgcagcacgcgtgtttcgaacgaaattggagccgggcagcctcaagcagcgaagcgagcaacgcgagtggtgatgtatatggctttgtccgaaggattggtgataagctttaccatgttcttgcttcgcaatgtctgggggtacatgtacagcaacgagcaggaagttgtgacatacattgctaggatgctgccgattctcgacatatctttcttcatagatgggcttcacagttctctgtcaggtagaattaaaatgcattgcacatgacaaaaatctgaatcacaagttcacaaccacctaataagcaagttatcctgtacatcatttttaagagttaaaatgagttgttcttgcactttgcaggcgtgctcacgggttgtggcaagcagaaaattggtgcagccgtgaacctcggggcattctaccttgtaggcattccgggtggctgttctgcttgcattctacctccatctgaatggaatggtacttacctctgctgaatttttcccccatgtaaaaaatgacctgtagaatcaacatggatgcatctgaattcttaaactgatgtgctttcaacagggcctgtggcttggcatcgtctgcggcagcatcatcaaactactggtgcttataattgtctcgtgttgcatagactgggaaaagtaggtaagcacactaaacgaattctttcaggataatgattaggaccttctgctgttaaatctggacaacaatatgatgtcttttttgatgtatccaatttcaggcgatcttggcaaaggacagggtcttcagctcatctcttccagtagcatgaaaatgtagtgtgccacatctcacatgcagtgcaccaggcaattaataggatgcaaaattggtctatagcacatcagcatcaatcatcattataaaaagcatacgaattgatcatcgttcggaaaagcatacgaattgatctgcaagaggagaataggagccgtcttgtaacttctattgggatttagaagaagtgcaaggaaaaacgtagttgaggactgcatcaatcacaatatgattgaggccatgtcagcaattttggacttcgggtgttgtgtatgactattgtttttgctaacagtgtacaactgagctctagttaggataggtatagaaacagtgagagtatgtacgtagtatgaattttgatgaattttgatgtctctgtcagtgacattgtaatgagcagggcacaacatctcggaatgaacaaattataactttgaccctttttgtctctganatattgggcagtgacaagaaagcacaatcctcacctgttttgatcaaaggagtttacatggtaaatcataaatgacttcagatcaatccattaatcattattggtattattattatgtgcattatagtagactgtctagcaaaagccacattataaaattgatgatgatactccctttgggctgataatatttatcttttggacagaacacggtctcaaacaacaactttgaccactatttttcattataatataaatagaaatatcaataaatatatgattttactggaatactttttaaaaccaacctatgcatatgttctccataattttaagatagatattttagaaattattcatagtcaaagattttaaaatttaacatcaaccttatccaaaacgataagtattatcaacatgaagagaataatgagtttccaacacaaagaattatcatcactgaatccataaaagcatcacttatgttgccatccacgtggattgggcaatatactagctcaaaacatgctttccaatgaaaatgcaaccacaaaatttataattatgatctatcaattaataccacaaaatcaaatcgaccccatgtttcatccatagaaaatcgaaatcgaagtcttattaaaaatccattcacattattcacaatcgcctataccatccataaatctatgcaatggcg

SEQ ID NO: 21932 - DNA, 706 bp, Oryza sativa
ctgccgaatctgcatacgacctccgttttcggcccgtgagtacttgatggaaagctcttggagtcctctttccaatggatccagcctcattgcgaaattccatcttattgagccgcaattgaagcaacaaggtgctgcgtcacctataatgggcctatgggcttgtaacttcgtctgggaccccggcccaggtggggcccatgtggggtgcgccccagccaggtggagcacgaccctaggcacccctaggtcgtcctcccacccctatttatatagttaggtaccccttcagggtttcttgggttttgttagattaaagtttagccattgctatttgcttgcagcgcgcgtgtcggctagaccgtccgtctgcttgttcttcggaaccccaacttatcatttgtattaaattcctatttgcaatatcagattgcttttatcttgttcttgcttgtttcttcgatttgcttgcaggaatagggttgatctgcaccggcaagatcagcaacccgcggagaggtgtatcgatcgctaaggcgcaacacaacgtctcgtacggttgtagtcggatcgtcaacgtttctcccaaatcgtagttatcacaactcaccgaaagatcgggccaacaacagccttgagtgtcgagaggaactcagggttcatcaagatctagtgggaaatcgagggaatcgatgatggggcgaaa

SEQ ID NO: 21933 - DNA, 2133 bp, Oryza sativa
ttgtaccacatcctacccgattgttttaagccataaagtgacttctacaacttaacacaatacatgttatgatttaccttctaattcgggatgtcgattccatcaggaaccttcatgtaaatatcaaaatcaagtgacccataaagatatgttgtcactacgtccatcaactgcataaatagacgattttgtactgccaatgatattaaatatcggaaagttataccactcataactggagagtatgtttcattggaatcaacgccaggtttttgcgtaaaaccttgtgctacaagccttgcttcatatctcaccacctcgttattttcattccgtttccggacgaaaacccatttgtatcccacaggaaagataccacgaggagtaggcattacagccgagaatacatctcttttgtaaagcgaggctaattctgcatcaattgtgtccttccatttgtgccagccagagtgcttttggcactcttttatagacctaggtcttccgaattcctagtcccagcattgtgcaccaccgagctaggttgcagactatcacgatctgcttgatatatagtatcaatttggtgtgtaccaactaaaggttggtttgcgtttaccgtctttctttgcttattacaattgtttctcgctgagtggccatacttcttcctctttttttagtgagtggaagttgagtggttttatttagtacctccactcattctggcgcattctgagcgggaatgaaagatttagtcacacctttataattggtaaatgcatctagcatgctatttgcaagtctttgcaaatgtataattttctgaactcgaagttcagtttcagtagtacgtgggtctgaggctggaataccctaggcatcccaatcaatttcctggcattctttctggtacttgaagtctccccctaatgccaggaaatgttcctcatcaaagatagagtcagcgaaccgggcagtaaatagatcgcatgttaagggttctaaatactttatgatcgacggagatttgaatcccacatagatccccactttcctgtgtgggcccatagcggtacgctgtggtggtgagatcggtatgtatatagtacaaccgaacttacgcaaatgggacatacttggaggatttccacgtactaactacattggagaagtttcatgatatgcagttggtcgtagttggacaaggtcagcagcgtgtagaactgcatgaccccaacacgacgaaggtaatttgcaattcatcaatactggtcgagcaataagcttaattattttgattaatgattcagccaaaccattttgtgtgtggacatatggagtgctgaacctgaattcccaatgccatacaataatcatcaaaagcatggaatgtaaattcggcagcattgtccatacagattgattgaatcctatgttcagggtaatttgccttcagccttataatttgagacattagtttggcaaagggatggtttcgtatcgatagaagacacatatgagacaatctagtagatgcgtcaatcaaaaccataaagtacctgaacggtccagatctgggcacaatagggccacagatatctccttgaatgtgttcaaggaatttaaatgattcggctctgattttgagataagatggtctcaaaatcagtttccagtagcacatgcagtgcatacgaaatcagaggatttgggaaatttgtcaatgatcaaatgatgaccaatagagttgcgaataatttttctcatcatcccgataccggggtgcccaagtcgatcatgccaagtgtggaatgaatcaacattttgaaaaattactttgtacgcaacatgtgcaatgggcttaatgtatgtatagtacaatcccaatgtgagagatggaattttctcacaaatgcgtttgccatatccgttttgtttggttaagagaagaaattcttctcgattatgcatatgggtttcaatgtgaagcccattttgacggatatctctataacttagtagggtacgggttgaatcaggatacaataaagcatcctcgattgtaatttgtgtacccattgggagtgtaatagttgctcgtcctgaaccaactatcacagtatcgcgccc

SEQ ID NO: 21934 - DNA, 9782 bp, Oryza sativa
cacattgtagacagtgcctctctcgaaacttttgaattcctgttaaatgaacatcacagtatcagaacagaagagaaaattttaggaggataaacagaatcattacaattttaggaggataaacagaatctcttgggtagaacatcagcaaattcatgcaactcataaacacatctcattcaaaaattttacatgaataaggaaacttaaatcactgccacaagtaattctctccactgtcatgaaagcaagtcatctcaaactttcagaaaattaaaattcaccagcaataaacatgattgtaaaaaaatcagtgtgaactattcagtttgtaattaaaactattcagtgtgaacagaacactaaagcatgtcatgtcaaaatttcatgtcaaaatttcattacagaacactaaagcatttcatgtcaaactttcattgtttaaaaaattcattgcctactatttcattttgaaattaaaacaagtgaaattcaatgtagttcatgtccttttgtactaagaaacagaacaagtaaatacatcaaaaaattcagtccaccagaaattgttgtcaatctggcaacattttgtattcatgttgttaatgagctgatgtacttcaatgttcaaaaacaaatcaatccagattcaaacaattccattacaaaccaaagcttagacaaacaaaaactttgaaatataaaaactacagtgaatttgtaccataattacatagaaaaaaaactgtaatttcaatattgaaatcatgtaactgacattgtagatcatatagatcaggagaatcaaaatcattaaaaaaaagacataaatacaaaagtggccatcagataagtaaaaaaacaccccaattctctacacatcatatggacaagaattttaatcattattttaacttagcatgattaattttcttgcctgatgatgtgcagaaaattgatttgcttaatcaaaaaaatatttatcatcatctggccaaaaaaaattcattaagggtaatgcttctattttcaggaacaaaagagaagaaattgaaaatatcaaatgtcctaaagatggcggatgaaaagcaattcgaagcagggaaaacatcaagtggtaaatgcattactctgtattattcatgtttagttctgttttttttttgcactaatcttctataaaattactttttttgtattgaaacagattaggcaaaaaatcacagggtctgaagataatgaagcaattagcaggtatattatgctaaattttataatattatctatttatcaaattaacaatagacgagagaaaaattatgtatctgatcttaataataaacttttgcaggaaaaattgaagctggaactagtactaattctgttaattcaaaatcaggtttgcaaaagaagtccaaaactttatactaatattacttgaaccacaaaagattcatatagaaaattaaaaaaaagacataaaaacaaaagtggccatcagataagtaaaaaaacaccccaattctctacacatcatatggacaagaattttaatcattattttaacttagcatgattaattttcttgcctgatgacgtgcagaaaattgatttgcttaatcaaaaaaatatttatcatcatctggccaaaaaaaattcattaagggtaatgcttctattttcaggaacaaaagagaagaaattgaaaatatcaaatgtcctaaagatggcggatgaaaagcaattcgaagcagggaaaacatcaagtggtaaatgcattactctgtattattcatgtttagttctgttttttttttgcactaatcttctataaaattactttttttgtattgaaacagattaggcaaaaaatcacagggtctgaagataatgaagcaattagcaggtatattatgctaaattttataatattatctatttatcaaattaaacaataggacgagagaaaaattatgtatctgatcttaataataaacttttgcaggaaaaattgaagctggaactagtactaattctgttaattcaaaatcaggtttgcaaaagaagtccaaaactttatactaatattacttgaaccacaaaagattcatatagaaaaatgaaaaaatggcataaaaacaaatgtggccatcagataagtaaaaagaacacctcaattctctgcacatcatcaggacaagaattttaatcattcttttaacttagcatgattaattttcttgcctgatgacgtgcagaaaattgatttgcttaataaaaaaaatatttatcatcatctggcaaaaaaaaaattcatgaagaggaatgcttctatctacaggaacagaagagaagattttgaaaatatcaaatgatctaaagaaggctgatgaaaagcaattacaagaagtaaagacatcgagaggtaagtgtgttactgtgtaaatttcatattaagtacttttttttgcactaatcttgataaaaaaaataacaaattttggtttcgaaaggttttgaaacagataccgacaaaaaagcacagggatttaagacaatgaagcaattaccaggtaattataagaataattagaagaataactaaaagtaaaaaattatgcttctaatttgttttataatcttttgcaggaattttcaaagatggaacttgtactgctttggttcaatcaaattcaggtatacaaaaagaagtccattaaattcaaattatttttttagaaaaaaaattcatagaaagagtttaactggattctaacaaatgtgagtctttcattttaaacaggtctagcattcctagagaagaagtacaacacaactcaatcatataaaatgcaagaaaacagagacaacataaaatcagctaattaatgaatatgttacaagcactcaatgtcacgcccagaaattcactagtaatttccgaacttatttgtgcataaaatcctcgtccaggaatcagccgaggtacacaaactgacaatttaatatataaatccatcataataataacattacatacttacaaaagaaaagaaaatagcagcggaataacagtatagcgatagcttcagctccactcccacaggcagctcaactggggtataagccaaacgtcttctccttcgcaacttgtcttcaactgaggtttgattgattattgcaaggtgagcatatgacatactcagcaagccacacagcaaatatgcaagtacacaaggataccaaaggatggcataatatagggctcatttgcaaaagcagcatttagcaaacatttgagaattgtaaaacaatagagtaattaatcatcaatattaatcaatactgaacagcacacccatgctgcacaggcccaaccattctgaagcaaccatacccggctgcacagatctatctccaaaccaggaatataccattccaaaccaggagctaatcaaattattaccagttatagcatcatttattatggttaaagtgtgagactaatcacgaaagacattgttagacccgcccatgaccgggggcacggctattcgaatagttttattctggccagaggtgtaccactgtactcacaagacacaacccaccagcatgttaccgtgtccgcgcagacacgtcaccatgttgagtgattgtgacaagacccctcgcataactcaactcaaagcagtgcacctttcccggatcatagtcacccccttataaacaaggcatggactccccagcgacccccgtgggcttatctccgccacttctcagtctggtgctccgcaatgagccttgttatacaaagtgtccagtcgttgcccattctggcttgtggttggcacggttaatgtttcacaaccgaaaatcgtgaaccggtccttaattgtcatcagcacgaccatcaaaaccatgtgctcacaacccaccattatcaagttttagttggcacattaattaattaaccaatcacgattgaccatcgtgagctacaattaaatatccatcattaagtaatagtgaaacattagttatcccaatggtgtgctaatgtttctaagcatggctaagcaattatgtctaacatttagctgaaccaatatatataaagctcaactagtcaaattataatatcccaaggtatctaggaatagagtaatcaatgcaaacaggccataacaaaggaatagattcacaccacccagtgacattcgaaaataaatgcacagttgaaataaatagagaatttaaatataggatcaacatgctcaacggaacggtgtttgggatctgtgtgacttgccttgcaataaagggtcttcaattaatcttcttaacacttccggcgcactcgcgaactttcgaaacgacagaaacgacaagctaacacgcaaaacgagaaaaaagactaataaaaaccaaataaacaatacataaaaagtaaacaaacatgtagatcataattttagatgaattatgagacgtgaacggcctcattctgacttcaaatgaatttattacgaattttacaagattaaatctaattaaagcccatttaaaaaggattaaataaatttaattcaatttatggataattttaatatgtaggtctttattttatacaacttttgcaacttgaaccacattaaactgagttacaaagaattagttatgaatttttaaagattaaaccggattaaagcatttatatggattttaattgaattttgacgcaataatgaattatttttgaaaaggaaaagggaattattgcgtcatctgctagggttcgcggtggaccgggtgcacggcggcggttcacaagattggacggctgggattcatccatccaaaacggacggccaagatccatcggtccacgaccggaccacggcagacggcaacaatgacgtcggcgacgaggaaaagcggcggcgacgatcgggtcaacggcggcgacggtgctccggcggtcgacagcgacggcgaagaggcggacgaggacggcaacgagacggcgatcacgacggcggcctccccgagcagtgacgacgacccaagcgacggcggcgcacggctggagcggcggcggcgacgacggcgcgaggcagcacggcgctagagctctaccggcgacgagaggctaaggcgagggtggtggcgggtagaggggagctcgggggtcaatttataggggctagagagcggcggcgaaggcccacggcgaccggcgacgggaaggaaggtttagggttcggaggagagaaatcgatccgaatcgatctcaaatccggcgatttccaaagcgatttagacgatgtttccaaaagggaaaaggtagagaagatctcgggaaacatttctcctcaaacgatttcaccggagaaggaaaggcgcggccgaatttggaatggcggtggcggcgcagctcggctagggtttcggcgagaggaagacgacgactgacgggtgggacccacctgtcagcggcggtcgcacgcacgcacgggcggctcggcttgggccgacttgggccgagggagagagagagagcggtttgggccggctttcggcccaaaaccaaaagggacttttaaaaacctttttccatttaagttattcatgaaatgcaattccatttattaaaaatacttccttggctcaaatgaatcccagaaaaatctaggaactatagaaacaagagaagtatttaacaaaattttatctagcctacttttatattgagatttaacaaattaaaattagatcttctctctaggcttttaagatcatttctaataattcccttttagacaacaatttataaattaaggatttttaaacaagaaaagcacttaacataattatatgattaaataattactgaactgttctttgtatcatttaggaattgagctctgaaaaatccgagaaaatttcagagagtataattaatcatggagaatttaataaaaattaaatccatccatgctttaaatttaggaaattttatttcccacatttaacttcacttgtaaattaatgaacatttaatataaattctattaataatttattagataatttataaatcctaaaacgaaaatctggctgtgacactcaatcatattttcatcaaaattgtaaatgttatacaactatggattgacaacaattttcttttaaaaaaaacagggaacaggggcacttatcagatataggaagttagattgagaagaagaacacaaccaatcagacaggtaaatataaataaatgtataaaattgtttgacaactttcatactgcattaactattttgtgaaacaaatttaatagtttatatgattgaaaacaggtttagcattgcttgaggagaattacaatacacattacaaaaacaggtaagggaaaaattatgaagcaacttgcaggtatgagtaatagtaaaacaaaaaaaatcagatattttcctcatatttattttcaggtaacagtaaaaacttctcagaaacagaagctaaacttgacaagaccaaaaattcagaagcagacattggatgtagtgctttgaatgaatcagagaaaagtaaaaaatttgcagcaatatttatattatttttaagagaatttttttgattaattaaaaattacactaacctataatactggtatcaaatattgcaggtattatagaaaacaatgacaaaggaactataagttgtatgaatatgcaagaaattaattcaggtaaaaagttgaaaaaattcaatcatagttcttcagtaaaaataaacaagaaaaatcatcaatctagttgttcaactacgttaattttagaattgtagaatagcactatttctttcatataatttcttttatgattagaattttcaaaatttctgcagaaaatggagctaacaatgcaaaggttgattatgaaaacaatgttctatctctgttggaccaagactacattgcagtaagtttttggactttgacaaccttaagtttgatataatttcttttattttctttgacaatcaagactacattgatattttgttttttttttatcaaacaggattcatttatatcatacactagtctaatggaacatattatttcatcacaaccaaaacgttgcaatgaattgaaggtaaatttttttttgaaaacaaaagtattgatttgttgttcatttatgtattcatgtgttcaattaagtatagtttttttgaaaatctttcaaaaactgtttaattaaggttgaaggaacacaaaatgataaaataaagactggaattggacaagattatcaaaaggttgatgaaagtttgaattcacacgttgaatatcaatcagaacaaagatgctcgatggatattttaaatttgcaagaatctgtgcaggtatgtaattgctgtataatattttttaaaaaaagtactaaaacttctgtctattaaatttaaaaaatgagaaacctttaatttattttttttttgcattttgttttttcacaggataaaagtttagagcaaacaagtgaaattggttacagcaatgttgacaatcagtcacaacatgcatggtcactagatattttcaatttgcaagaatcagttcaggtatgaacttcttacaaatataagtttttctataaaatgaaaagtaaaacattattctaaataaatgtgaaaaaagttttatattttgtttaaatcttgtgacaggaaccaattttagaacaatcaagtgatattggtaacatcaatggtaatggtgttgatgatgctgttatgaatgatgaattgctaactgaggaagatattgaacaatttttagaagaagaacaacaagaagcattgaaagggaataacgcaaacatagatagaaagtacatacctgaattagatcagaagttcaaatcgattattgaggcacagaactatttcaacttctatacatacatggctggattttcaattgtcaatgttcatagtgctagaactacaagtaagaaaagaaatagagaagttattagagtgacattcaagtgctacaaatatgtcaaagcagattgcaatacaaagccagaaacagtagatgagactgctactggagagagaaaaacaaatgaagttattggaacagagtgcaaatgtgttatggtaatctcataaagaaatttggaatgggttataacaaggttagatttggatcataatcatgagctgagccctccagacgaagtcagatttctaaggtcacacaagtatttatcaacagaagagtgggtgcttattcgaactttgaaagaatgtcacattcccacaaggaacatgatagttattctgtcagttcttagaggtggtttaacttcattgccttacactaagaaggatatcagcaatgtcagaacagaaatcaacagagaaacaagcagcaatgatatgatccagtgtttgacatatctgaagaaaaaacaagaagaaaatccaaatttcttttatgaatttgatttggatgaaaataggaaagtgagaaatttcttttggacagatggtagatctagagattggtatcacaaatttggtgattgtataagttttgacactacttttttgaccaacagatataacctaccatttgcaccttttgtgggagtttctggtcatggaaatacaatattgtttggttgtgcatttttacatgatgagacaacagagacttttgaatggttgttcacaacatttctgaaatgtatgaatgggaagcaaccaaagacaataattacagaccaagatggtgctatgagagcagctatcaaaaatattttcagagaagctaagcatcgaaattgttttttccatataatttcaaaagctttgaaaagatctggatccttattcaaaaagaggcaaggtctttatgcaatatacagtgatatcatacataactgtttgagtgaagaggaatttgaggttctttggcaggatatgattcaagaattccatctgcaatagataaattttctagcacaatgtggcatatcagaaaaaggtttattccagtatatttcaaaatagatttatgtcctttcattcaatcaacagcattaagtgaaggaactaactcaagattcaagaaaaatgttggcccccaatatagcatcagaagtttcttgacagaatatgaaagggttatggatactattcaaaatttagaacagcatgaccatcatgaatcaagaacaaaaaggccgactagtttttggtcaaactactccattgagtaccaagcagtgaaattatataacaacaaaatattcaaaagatttcaggctcaactcaggaagacatttgaattacaagttgaagagattgaaaagttcaagtgttatgcagtgtttgaggcagaaaatgtgatcagcaagcaaatcagaaagagaaaataccttgtgatgatggacttggatacagaagaatacacatgtatttgtgcaatgttccagaaagatggcatactatgctctcatatattgaagattatgcttcaccttagcatcaaagaaataccggagaaatacatcatgcatagatggagaaagaatcataaatcaacagaaataattaaagggaaggaaatcatacctgtttcagaatcatcagttcttagatttaatatcctgtcaaggaaatttgctgaaattgcatcaaaaggtgcgaaaacagttaaagcatacaaattcttgatggaagaatcagaaaag

SEQ ID NO: 21935 - DNA, 549 bp, Oryza sativa
caggcggaaacaccagtcggcggcagcgaaggcaagccggtcggtgaagacgtagacgcccaacaacggcggcataataggccagccgtgcaggcggaaacaccagtcggcggcgggcgaggcggccggtcggtgaagacgtaaacgcccaacaacagcggcataataggccagccgtgcaggcggaaacaccagtcggcggcgggcgaggcggccggtcggtgaagacgtagacgcccaacaacggcggcataataggccagcgtgcaggtggaaacaccagtcggcggcagacgaggcggccggtcggtgaagacgtagacgcccaacaacggtggtataacaggccagccgtgcacgcggaaacaccagtcggcggcggacgaggcggccggtcggtgaagacgtagacgcccaacaacggcgacataataggccaaccgtgcaggcggaaacaccagtcggcggctgacgaggcggccggtcggtgaagacgtatacgcccaacaacggcggcataataggccagccgtgcatgcggaaacacca

SEQ ID NO: 21936 - DNA, 9425 bp, Oryza sativa
aaaaaaaaaactggaaatgtatttaccaagtgaatacaaaaaatgagaaagctgtaaaaataataattaaaattgaacataacaaaaaaaaagtaaccttcaaattgcagtcaacagatactttctttttattcaacttcagcttcaaagatcgcaatagctcctcttttgatatctcatcacaactagttttagagtcctaaaaaaaatagtgaaaattaatcatgtaattagaaaacacaataaaaaacacatataagtctcttgcttcattgtacaaaaaaaaaggaaaaaaaattaagccagaaatactcacttcactatcagaaataacatcatcattttcagaacttttagaatcagaacaagtagaatcaacaaaaatttcatcactatcctttgcgtgaaccatctattaaaaaaaagaaatgtgattacacaatgggaatagcaaacaaaagcaggagcaaatattttaaataatgctaaagtaatcaaattacatataacaagagactgcaaaagtacttggacaaaagtaacctatgtaacataattgttcaaacattaatccacagaaaaaaaaagtctgcatatagaataatgttttcagttactgaaaaagatgaaactatgttattaagtgcattgctggaggatagcaccaaatgcattacatgaaccttatatagctggataaactcacactcacacagccccccccccctcaaaataaacactgtaaggactcaacaaacacaggaaatgaaataggtatagtactattggatcaaatattacaaatgaaacctaaatagaatagaggaaatatagttagaacagattgaagtaatgaaaaaacttaaattaacttcaaaataaaactactacagattaaatcatttcatttaattatcatttgtctttgtcatttcctgaatcatggtacatgcatgaatgtgagcttatagtttatagttaactaataaaaagaggtgcaaccacatatcaacccatcatttcattaagcatgttcagcagagatataatgccagctccacttgagatgacaaaaggttccaatccaaaacaaaaacacattaaatcatcaatttaagtgacaactgatgtcacgaaggaaagtgaggatgaactttcatcagtgcacacacagacacttcatctaaggtgaattaaaaattcggtacagctatgtcttatggtgcttccaatgaacacaaatcatataaccacactcacttaggatcacacaaatcattcttagattcaaactatatatttgcaaaactacagatctgagcatccaaacaaaaaaccaaaacaaaagtaaatcagtctagggcattggtaaacagatctacatgagaaatcaaactctattaaatccagttaaaaacaacttcagatcacacatagtgttctacataatttagtacattcattttcagatctacaccacatcaagttcagacaaataactaaccttaactgaatccaccagatcgaagcttcaaacacctaagagaacacgaccctgcacaacatgagaaaattaaacaacatgatctaatcgcacatgaacaacatcacatcgttgatgaaagccaaataacacaatctccaaagtaaaaaacataagcacacacaaaatactactactcatccaaaaaaacgagatcccaaaaatcccctcctcataaacatgaacaaatcccttcctcatcaaaagcaaaaacaatccactcctcctcaacagcaaacaaccacccacctctccccccaattaacagcaaaaatcccccactcatcaacagaaaaaaatccactcaaaacctcaacagcagcaacaacccttcccaccgccccacccacctctcccccccaatcaacagcaaaaatcccacacacatcaaacagtaacaatgccccactcatcagtagaaaaaaatccactcaaaacctcaacagcaacaacaacccttcccaccccccacccacctctcccccccccaatcaacagagaaaatcccccacacatcaaacagcaacaatatcccactcatcaacagcaaaaaaatccactcaaaactcatcaacagcaaacccaaaccaaaacgaaaaaactcatcaacgcatgcagttgagcagattcaggtgatgctcgaaggggaatggaggaagaatggacgaatctaccaacgaatcgccctcacgtcgagctactcaccaacgaatcgccctcacgtcgctccgccagaatcgccgccgcggtgaaatggccttctgttgacgacgacgaaatcgtcgccgctctctgctctcctctcctaaaagcgttctctctctctctctctatgtcggaagaaatgagaaaattcagtaaatgtgggacccacagaagagacaagaaaaaagcaggcgcggatttcaaaattgaacagttgctgtgggacccacgaggaatcaataaaaaggccagcccaatagataaaaaagatcggtagcccaaacagagaagtccatcccacaacccaattattgcacgaatcttaaacatgatggacggcccaaaaaacgaaagatggagcccagcaaaatctgtcgacagaagagtagccaatccgttaaaaaataggtaagactttcgggactattttttgtccgtcgtcgttcgtaatccgcatcacgcttcatcctggtggccgctatctcatgcttaattagcacgtaccaccgtttatgaatttgaaaatcttattatgtttttcttctagcataacaagtcacgtcgcatacatttttattaggagatgtatcagatggttttgtgttccatgactttgtgtaatcgggggtgagcatgatacgacgcggtagcaagccttatgagcaaagatcataattcacaacatagagaatccattatatgcccctgactttactctagttcaatgatttgccatcttcctctataatatgccaccgactttgataattttttctacaatataccagaatggatacttttcaaaaatacctaaaatgcccttcaagacacacaaggattgccgattgattggctcattataagttttgaaaaaatatgaaagttttagtgtagccttcttatacgatataaagtttctgtacatatttcaagatttttttttcaaaaatatttttatgtggtatatgaaagatgaatcacatacacaaaacatagctacattagaaaaataattttgtgtagcatatgaaagatgatttacataaacgaactcaacgctagagtatttattagcatatgaaacataaactatattttcaaaaaaattaatacatgcaaattgaaaatcttaaaatccacacacacttcatattatgtgtggggactatgtaaaaagttttatatgtttgcaatacttctagtaggtaaattaattgtcaaccctctatggcttgaagcacactttaggcatttttaaaaaagtatccaccccagtgacatattgtaaaaaaattatcaaagtcggtggcctattatagagagataaagtcaatgacgccaaatcgtttaactggagtaaactcaggagtatagaatagattctcttgtaatatataatatataagatatcacggttccaaatgagtatcagtttcccataccaactcgcgggcatctttttctatataacaaaaggaagagattggagggccaaaacacagtacacacatcatcagagagtcctactgtacacacaagaccataaacgctacggatactaatacataaatccccacaacattattgtactacaggcaggatgacacacggccggtgtcgcgaccgagaaaaatacattttcccgaacgctagtgtattaatccccgtcccaggaaaagccggggtacaccacacaaacatgatataaaagacacatctttattatatcgataatatttacattattacaaaggcacttaaggcctgacaatcaaaaataaacagcagcggactagcgggcctacggctacatcttcacaggcgctcaactggggtataagccaggactccacctaggacttcttcttcaaagcttctcttactgaagggggggagattgagcaagaatgagtacaaccatagtactcagcaagtcccaccgggagatgcatgattaatgcgagggagtacaaggggtaataatataggggattaggttttgcagtaaacagcatttaaaagacacttagttgcccaaagccattttataaagacgatcctagagctacatagtgttattaatcaaggccgtgaaccctcacgaacctgccttaacccaaggcctacgatgattcagaccgaactggcaacccgaccctaggtcccagctcgtcccaagccaacccaggccaaccattccacattttagttgttaagcaggttttaagaattaaaaaactaacttggtacattgctaggcttgcccataaccgagggcgcggctattcgaatagattatactctgatcagaggtgtacatctttacccacaagacacatcttcctcatgtgtaaccacgtgccacataccaccacggcatacggatgaaagacgtgacatagttcctaacccatcctagccataaacaagagtaccgacccaaccccacctacggccggaaccttcgggacaggcaggcaggattgagcccctagcagcaggacaccagccctgtgccatgacatctccactaccgggccgcagctcgtgtagccttcatttgtcctagagatgtccatcgacccccaacttcgtccatctccatccgtgtacttttgtttataaccagactgagtcacaaactaagccttacccactagacatgtggaagtacggtagtgctttgcaacagaggcccgagcttaatccttatagtacccgaggtacgactaacaaaacccaaccatgcacctcgagcccagcctaaaaccattttgggggttttgaatagagggggaggtgtgtgtccaattccaacataagccaaccattccatagtgtccaaatgatatgagaattcccaaagtctaaagttataaaaccacctaatgttgcctaataaatcagcgaagcatctacctaaattcatactagtggaaccatgaatagagtacccactagttggggttttattttcctagggtgaacaaggtaataataacaataacaacaatgataaggtcataacaaagataaataggcatggctaaataaaatagtgataacggggaatttaaataaagcgataatgcattaatttaaatcaaaataattttataaactggaattcaatatgctcaaggatgatgtgacttgccttgctcagagacaacggccttccgaaccttcggcgacgaccacgaaccacgcttcgggaacctccggaacgacagaagctacgcgaagcacacaagcaaagctacaagcctataaagaagcaataacaatacataaaaagaaagcacgcggttctttaggttataacaaacattaggagacttgaacggatcggttcggagctcgtatgaccaagacatggtcatccgaagtttaatgctgttatatggagatttgcggattattataattaggttttacaactataaaacatgtgcaagcgctagcctggaaaagacaggaaggctgcgctgttgacatgcggaccccacatgtcaacctaagggaccacggcagaccgggtacacagagacggtccacgggtcgacggaagcggatcccgtgtgtcaaccgaggcgagtggccgacaaacggactccactagacaccacacggcctgcacacgtggaaaccatgcggctaccgagcgggcacactaacacggtcaccacacacacaagcgaacgactaccgacaccggtacacgggtaccggggtcgacaaccgcacaacgggcatgggcgacaccgaaaggacgaggacgggggcagcgagaggacggatccttaccaccatgcgacgaggcgtgggaacgacaacgacgaacgggcgcggcggaggcggccgggaacgacggaggcgaacggcgagggagcgacttcggcggcgatctttggacgaaggcgagacgcggccggcacaaggcttggcaacgcggaggcgaggacgaagacgacgacggggctgcggcacttgagggagtgaggacgacgaacgagaacggcttgacggagggacgaacgccacgacgaccgggaacgacgagaggacgacgaccggaaccggcgaggaggcaacaagggcagccggcagtgctgcacggagacgaggacggcgtggaatgcgccgctgcgatgacgacgagggtggtggcgcagcgagacgacgagccggcgaggaggaacgatgacgacgacgacgaacaccggcggggttcggtcgaaggggaggcgaggccgaggacgaccttgccgctgcgatgccgaaggaggagatggcgacgttggacggcgcacgggcacggcggaagggactgccggaggagacgtcgatgaggaggaaggagaggtcggcgcggcggcggcggtgttccggcgaatccgagggcaggccggggtggagggcgaatccgcgacgtcgacgaaggagacggcgacgtcggccgacgctctggcgcggcgactggggctactgaaggcggtacagtggcggcaacgccactattttgtcggtgaggacgcgtctccggtggtttccccgcgaaacggagggctgaccgggggagagaaggcggctgcgaggccgctggtggcgacggcgcgaccggacggcgctcgggcgaggagggagaggtggctggaggcggccggcgtgggggaaagagaagggcgacggcggggaggggttatacgaccacggggaggctcgggatgaggctaaaacgatagaacggaggatgaggattccattttataggggaggagagggagccgggcatgggagagggcggaacggcgacgggaaacacggccggcggccatggaaggcggccgggaatggcgcggccgttccgggcgattgggggcgccattccagggggaaaacgggggaaatcaaagaggaatcaatggggactaattccccctatttaattttggaatcccatgattaaatcgcacggatttaagggaggaaaggagctagggttcacgggagagggaggaggccgtgcgggaggaggaagacgaccggcgcgtgggccccacgcggtcagcgcgtgcagtcagcgcgcgtgcacgcggctggctcggctcggcctggggggcgcggcttgggccgggcggccggcccaggaggagaggagggagaggaggcccgggagagagaggggaggggagggagctgggccgaggggaaggagggagggcggcccaagagagagagggggaaggaaaaagagagggaggagggaaggactttggccgcgggccgagagagagagggaggcgacttggcccaaaggaggaaggaggatttatttttagttttctttttaataaactttgataaaggttgttgttgcttaataaatattttcggtgctctgaaaattcaagtaaaatttgagggctccttttagaccaaggagaatttaacaaaaattctccggaccacattcgaatttttcttgtatgtattttagtgtttgctaattttttttcgaattttaattaattctattattccttttagggaataatttttatttcggaatgaatttaccagtacgtgacagccagcgccgtgtgggtgaccagcgagatacagttcccatcgagcacacactgcacacctgtatcgtatatgcaataaattcagcgcaccatcgttttatatccagtcttgatctagccagttggctatggtgatgtttgaatattaagctgaaggtaagattaagtgttacatgtaaaacgaggtaataataacgtatgattaattgagttttaattattataaacttaaaaaattaattaatttgataatttagagcaactttcatatagaaagttttcgcacgaaacttaccctttagcagtttgaaaagcgttccacgagtatccaaaatttcatccaacaagagaaacgaacgcagatttagattactataaacggattattacagcatattatgtatgtaataaaaaaataaattaaattcatcgcaaaaaataaaaataaattaaatattctaataaataaatcttgaatattttaaaacaaacagtgtacgtataaagaaaggttttttgagagagcctgtttgctgaaaaatagagaaatttattaatttcagtaatataggattaataatatgaaaagacgtatttaattttcacttggtcgatctctatgacacgagtacacgactgcgctcatatgcctatatattaactgagagcacacccacaagagaacggtactttgtggtggtgataacatggcagcgtcgccgctgccgaggtgggctccgacgccgagcccgacgaggccactgagaacgccaggaaccccgagcgccggcgccggcgccgcctcgtcgtcatcgtcatcgtcatcgtcgtggcgcagctgtgtgccgttactcaccaccttcagttccgtcttcggatcatcagctgcgcggcgcggtggtggtctctccggcggggagccaccgccggcgctgccccacgccggtcgccatgacatcgtcggcggcattgcgcctctcgacggcgtggaagccgccgtcgaacggcgccggaaggacgagatgatgatgagcgccacgacggcgtgtagccgtggggtgttcctgacgtgggacgatctgtccgtgacggcgccggcagctgccgccggctgcggcggccacggccgccgcgccgtgatactcgacgggctcagcggctacgcgcgccccggcgaggtgctggctctcatggggccttccggctgtggcaagactaccctgcttgacgccttagctggtaattactgataacttacttctaaagcaacttttattcaacagtcatatataaacctaaataacttgtgtgttcattaaaaaaaagtaaacttgttttcttcacatgctgtgttaattgatgcgccgagtattatgcatgggccgatatactgttggatgtgtgtccatgtttgtgcatgcgctatgtcttgtatatattccgtggattattatagactagataatctatattcatgtaggagtgacaattaattggaatgggcaagtggacaaaaacaaatttaattaaagaaaaacaaaaacaatgcacaaatgtaccaagcaatgcatctgaccgttggatta

SEQ ID NO: 21937 - DNA, 3911 bp, Oryza sativa
aaaaacagacagagattaattaatttgaggtgaaagttggagttcaagaagaaactttgattggccaaaatttggatatatattaccatttttttaaaatgttcaatttggtgtgagtcaaacacaaatggtagttcaattttttatatatggagttatagatcaaaatggaagaaaatcctaatcaataattactgaaggcaccttgtaaatattttctgtagatcactcactgcatgcttaaataggtccactgctcacgatttgacctttctttgtgtgtttttagttcttcgaatctaatggcttcccatgtcccttgaggaggaatccttctgatcacttcctgagaatgattaacaaagactttgaggtataaaatgaatatagaagctttctctatcaataaaattgttatacagcattaatatatatgctatatcattagtatgtttcttgacactaactatgccccacttggagtggtgatgtatgaataggaatctgaagaaggatctaccattatttctccacgtgctgccgaagtgatccaaaaactaatgggttctttcaaatcttgtggtaccttaaggacagaaaaggaagcatgtgcaatgattaatcaggtgttttttctcaaaagagtacaagtcatgaaaaaagggatatttttttaaaagtaagttattgttctgaattttaattattttcaaacaattatttgtgcaggggcctctccaattcctcaaaggcaggcaacattcttgaccaaaacatatgtgctaaccaaaagatcaattgttaacatgcacagagatgcaggctactattggttgcgatttgttatctacattgccatttgcttaagcattggtacaattttttttaatgttggctcaaattttgcatcaatccaagtaagtgatctcaatatatatgaggtaaagttgcagaaagttggagtatgtgacatatatgggcttcttcatttcaggcaagagcttccatgctaatgtttacatcaaccctattaacaatgatggcaattggaggttttccatcttttgttgaagatatgaaggtaaatttcgaaattaagtctgcacgtgcaggagcttccattgatgtgtgattttcatggttcagatatttcgaaaagaacggatgagtgggcattatggtgcaacagaatttgtgatatccaacacactctcctcaattccatacctaggcctcatctccataattccaggggcaatagcctattacctgacagggcttcaaagaggaatagaccacttcatctactttgctgcagttttgtgggcctgcacaatgctggtagaaggattgatgatgattgttgcagcagttgtgccagattttctgctagggataatcactgcgtctggtgtacaaggtgtactgatgctcaacgctggtttcttcagactcccaagtgatctgccaaaaccagtttggaaatacccaacatacttcatctcctaccacaagtatgcaacgcagggactgtacaagaatgagctgttgggcttggtctttgaagatattggcggtggcgggctcacgattagtggcgaatacatcctaaagaattacttacaggtggaattaagctactctaagtgggtggatcttgcgatattagttgcaatgatcataatttacaggttgcttttcttagttattataaagatttccgagattgtgaagccaaggatgcttcactttctctgtgcttcaaaggtatagcattattctagttgttgttgagtacaatagtatccatggaacgtatgtagatccttcttatatatctatcaataatttatcgtgatgatcagaacaccatcatgtataattgtatattactgaatcaatgaaattatctctccttttatcccctgaaaaaaactatctcgtcatttgatcagaagttcactttactgagcttcccttctatttcaaggcagaaatgtttgtgaaacttgatctcacagggcacattttaatgcactatcaaaaaaaaaaaagaatgcatggtattattttactaacaaatagcacaaaatagatgccagtctatttgagctttttccctataaaattagcgagattttcctatctgtgtggcgggctacacgaaaccaacagcaggtagcagagttggatgggttgttactcttgctgcctacggtgttttggcttagtttagtttcctctgttttctgtactcttcaacattttcttgctcatcattctcgttcactatggagtctcgtttgttcgtccaagtctcccacgcggcacgatctggcgtatgggatggcacacgctgtgaaggatcatgggattgcggacgatggccacaacttgttcccgtttgaataaaagggagaagaaaccacacaaattctgttggaaggcatcctctcctgattttcggctgacacgatgaagcgatgaactctgggcaaggacccatgttgtgattgagatcaactaaaggaccgaataagaaaaaaaattatcagaaagaagaggtggatccagttgtagggcagctagggcttaagtcctaggtctgggttctataccccatgtaaatttcatgtaaatttataaaatttatatgcatttgtatatgaatagaaccaggtaatgggaataagccctaggggtaagggtgcaagcggctacccacaaaaacccacttatagattaaactaactcactaactcgtttattttgaactataagtgggtttacggatgacccacttgcacccctacctaggggtgggctctggctggctcggccaccgcttttcactaacgataagaagaaattgaaagagaaaggatagcttgcaaagttgcaatgcctcactgagagtacatgtgcattatcaagagttcaacggagatataagagatgttcaagtcgaacacgaattgttcatcagcaaattttcaaaaattagggggttcgatatattcttaggctgcaatccttccacccagctcccaacccctctccctccttttcagcgcgtacgtttttctaaacggtacgttttttataaaaagtttatatacgaaagttgcttagaaaatcatattaatctatttttgaaaaaaaatgacaaatacttaactaatcacttgctaatgaatcactccgttttccgtgcgtaggagttttgttcccatcctcccagcgaacacaaccttagtatattccttctcaagcctttgcgaaatgatatgccttttgatggtaaacttatcaaattgccgtaaacaattgtcaaatttttacggtaatttgacaagtttacaataactattcaaaacgatgataaatttgtatacccctttgttccacttcatttaataatcacattagtaaaccagtgccacgtacctgcactcctcacctgttatgtatatattgcaatatcctcatgcttttacaaacccatattaattaggtctgccagtgtcaatttcttcatgagtacaccgatcgtacgtcctctgttcggaaaggattacttgaggttattcgtactcaaaataaataccatcttgctgagaaatttaattatctgatggtgcatacaactaactgctggcctggaatatatgtggtccacaggtacaagagggcagacacaacactgtaacagttatcaatgttgacgataacacaaaaggcatatatgtatatatccaatggcgtttgcctctttgatctgcccctgcagccttctgtttggtttcgaaacaaatgttccccttctccaatatttcttttcatgatagcgaaaattcgttgatgtgtacgtccattagtgtaggctgtaaaaagcgatagggctgcaggaa

SEQ ID NO: 21938 - DNA, 1371 bp, Oryza sativa
cggcctgcccgttagcttatgcataatatggtgaagaatttaataatttgatacccatgctatcggcaaactgaacaaactcatcagacacgaaaattgaaccttgatcggttgtaatagtttgaggaataccaaatcggtagattatatgctcttgaacaaactgtatcgcatccccagaatcaacattcttcaaaggaatcgcctctacccatttggtgaaataatctgtcgccaccaatataaacttatgccctttactcgatggtggatttatcatgccgatcatatcaattcccaaacctctgaatggccatggcttaatgataggattcatagccgacgccgatgctcgctgaattgctccaaatttctgacaatcttgacaccttttgtaatacctgaaacaatcttccagcattgtcggccaaaaataccctgcacgccgaagtaaccacttcatcttatgagccgattgatgagtaccacaaattccttcatgaacttcgccgattgcaactttggcttgattggcactcaaacacttaaggaatactctatcaatcatccgataataaagctcatcatccaataaagtgtacttcaacgccttatatcttaatttcctagaagccgattgagatggattttgtaaatattgatgcacatcatacctccaatcatcggctgtcattgctgcaatttcaaccttaacatctttgatcatcggcttataccccgacgccccttgggccaaatcattagcttcaatattttattctcgggatacatgctttaaagtaaccagccgaaattccttcatcaactcttggcacttctcattgtaaaccattaatgtatcatttttacactcatattctcctgccaattgactgattaccagcaaagaatccctaatgattgcaatagcatcggcttcaacctccttgagtaattgcaaccctttgaacactgcctcatactcagcttgattattagttgcataaggtttaatagtataagcaaactcgaaacatgccccctaggggaaattataactaagccgataccacaaccatgagtacacaccgatctatcaaagaataaagtccatggcacaatttcgaccgagccgattgaatcatcacgatgttccacaataaaatcggctatagcttgtcctttaatcgctttcggcgactcataccgaagatcaaactcagttaaagagaatattcactttccaacccttcctttcaaaattggagccgataacatgtatttgacaacattggccttgaatatgacagtacactcgttggatagtagataatgcctcaaccttatacttgaaaaatataagcacaagca

SEQ ID NO: 21939 - DNA, 689 bp, Oryza sativa
tagattttgttggaatgaaggtatgaggctgccatctattgaggactgtcctgggtgcagtgatgttgcggagagctcaagccgatcatatagtaggggcaatcggctaaggcagacaagacttcctgttcatcaaagattgggtccagtgaactaagatcatagccaggaggacaatgaaaacaggaaaactcaatggtgtccttctggtatctttacgaagaatgaaaagagaagggttcaaagattgaggagcagggagcgctttcaggaagtcgaacaggaaatcaaccatcggctgaagaagacaaagccgaagcaggacaggcgtcttaagaatcaagttcctgtagccgatgaagccacagccgatgaagcaaaaaggttggctaaaggaaaaagtgttgtaactgcttcggtcaacatggtcttcacgttgcctgccgagtttgggatcaagcaagccgatattgacgaagttgaagaagaattggctaagttattttgtcaccagagcaggcagtttttgagaagtcagaggggacgaagaatcagcatcttaagccattgtatataaatgattatgtcaatgggaagccgatatccaagatgatggtcgatggtggggctacagtaaatttgatgccttacactacattcaggaagttgggtagaaacgctgaagatct

SEQ ID NO: 21940 - DNA, 4872 bp, Oryza sativa
tgtctatgttgcctcttgtggaatggtctctcaagaaatggtggcgaatatctatatgtttggttcgggaatgttggacgggattattggctatcttaatggcgctctcattgtcacataggagtgggattttggacacattgaggccatagtctctcaaggtttgcttcatccaaagaagttgagcacaacaactccccgccgaaacgtattccgcttcggcggtggatagggcgacggagtttttcttcttggaagaccaagaaacaagggacctaccaaagaattggcaagtacccgatatgcttttcctatccactttgcacccggcataatccgcatcggcataaccaatgagatcaaacctcgctcccttaggataccaaagaccaagattaggtgtgtgcactaaatatctaagaattctcttcacggccacaaggtgacactccttcggagcggcttgaaatcttgcacacatgcacacactaagcataatatcgggcctagatgcacaaaggtaaaggaatgagccaatgatggaacggtataccttttggtcgacgtctttaccttgctcgttgaggtcaaggtggccatttgatggcatgggagtgtggattggcttcgcattctccattccaaacttcttgagcatgtccttcaaatactttgtttggcaaatgaaagttccttccttgagttgcttgatttgaaggccgaggaagaacttcaattcagccatcatggacatctcaaaacgcttggtcatcatcctactaaactcttcactaaaagagttattagtagaaccaaatataatgtcatcgacatatatttggcacacaaaaatatcattttcatgtcttttagtaaaaagagttgaatcggctttcccgatctcaaaaccgtttttcacaagaaaattgcgaagacactcataccaagctctaggggcttgcttaagcccgtagagtgccttgtggagtttgtacacgtggttgggatattttggatcctcgaagcccggtggttgctccacgtataccaactcgttgataggcccgttgaggaaggcgcttttgacatccatttgatatagcttaaaattgaggttagtagcaaaagcaagcaatatgcgaattgactcaagtctagctaccggcgcaatagtttcaccgaaatctaatccttcgatttgggtgaacccttgagccactaacctctccttgttccttatcacaaccccggccttgtcttgcttgttgcgaaagatccactttgtgtcaatcacattttgctgaggtcgctccaccaaagtccacacttcattccgggtgaaattgttcaaccctcttgcatcgccatcacccaatccggatcattaagagcttcttccacccttagaggttcaagagaagacacaaacaagtaatgcttacaaaaatttgcaatacgagaacgagtggatactcccttgttgatgtctcctaagatgttgtcggtggggtgatctcgttggatactttggtggattcttgggtgagctagatttatcggagagggtggcacttgctcgccttcttcaccttgatccaagcttgaagtagagagatcgtcggcttgggtcgatgtaggtggctctacttgtgttgaggaagaggccccttgttgtggctccctaggacgtacgtctccaagagctgaccttttgattgcttcgctagggtcctcctcttcacctaacacatgtgagtcagccgttagtttcgtcaaatgtcacatcacgcgcgatctcaacaataccagaggttttgttgaaaacgcggtatgcgcactcatttgacccatacccaagcaagaacccctcatccactttaggagcaaactttgaggatctagccttcttattaagaatgtagcacttactaccgaaaacacgaacgtaagagacattaggtttgttaccggtaagaagctcatagggagtcttcttaagaaggcggtgaagatagagacggttgatggcgtgacatgcggtgttgacggcttcggcccaaaagcggtccgatgtcttgtattcgtccaacattgtcctcgccatctcgatgagagtccgattcttcctcttggctactccattttgttgaggtgagtatggagccgagaactcatgcttgatgccttcttcattaaggaaactctcgatgcacgtgttcttaaactccttgccgttgtcgcttcgaatgttcttgatctcgaggtcgaactcgttttgggctcttcttgcaaacttcttgaagatagcttgcgtctcactcttgtcatgcaagaaagaacacccacgtgaagcgtgaaaagtcatcaacaataacaagaccatatttgttacctccaatgcttagataagcaattggcccaaagaggtccatgtgaagaagctccaacggtcttgtagtagtcattacgttcttaaccgggtgatgtgctccaatttgtttcccggcttgacatgcactacacaccctatctttctcaaattgaacatttgttagtccaaggatgtgatcgtgctttagaagtttgtgaaaattcctcataccaacatgggctagcgtccgatgccaaagccatcccgtgttggacttagccactaagcatgtctcatgtttggctttagttgaggaaaaatccacaagataaagttttcccttgagaacacccttaaagactaccgaggaatcatcccttctaaatacggtcacatcaacatcggtaaaaagacaattgaatcccatggaacataattgagaaacggacaatagattgtaatttagagattttaccaagaggacgttggaatggaaaggtcatttgaaattgcaatcttacccaatccaattacctttccctttccatcgtccccgaagatgatgttctcttgagaagtggcatttggatcaagagatgaaaacattgattcttctccggtcatatgattagtgcaaccactatcaatcatccaacttcttccaccggagacatattcctacaagagatcaatttctagttttaggtacccatacttgcttgggtcctctcatgttagtaacaagtgccttaggcacccaaagcactctcttgatagaaatatttttgtcccttgggccaacatacttagcaacaacacgaccactagcattcttcctaagaacataagatgcatcaaaagaacaatgagaagcataatcattaggaatgatacatttggccttaacaaagttgctaagaccttggggcttcttgatcatcacactcttgtccacctttcctttaggtggaggaacatacccaagactttcatggttgaagttgtccctttgatagcctaggtactcctttaaggccttactacccatatggcacttaagtagaccattatgaaggagtcccataagcttctcattttgcttttgcaaagcactcaaagaagtagagttagtagcacaagtttcaatataaatatctttgcacctcacacatggttcattgcttgggacaattttggagcacgatgcctcgctagggagagagagactgttctttaaggtttcgaacttctcttcaagagagaggtaagctttgtccaagccatccactctcttcttgaagttgagcgttcgccacctcaagattagcatgagattctttggtttgcttgtaaagccgtaccaaagcctcatttttctctctctccttagcaagttcactcttgagttcatgagaccgctctttctcatgaatgagcaattcctcttgcctctcaagggttgcatattgattctcaattctcccaagcaactcactcaagtgtggtatggattccttggctatggatttgaacaactcgtcatccataacctcatcctcaacatcttcctcctcatcactaacaagatcaacattaaatgacttgaggggagagggtaccttaggctcctttgccatgaggcaaatgggagcatcctcatcacttgagtagttgaagagtctcggtggtgatgaaggcttgacggcgaacgtggcaactccttcttcatcacttgagcttgactcggagtcggagccgaagatcatcccaagatgagcttggccatagcaatcatgtttgctatgcttgtgcttctccttcttctcaagcttcttcttgtcttccttgaagtgggagcaatccttgatgtgggggcaatccgcaatgaagtgcccgggctctttgcacacatagcatacccttgcggagtgtcttccacttgacttgttggaggaatgcttggacgaacttcccttgaagaagccgctttgcttcatgaacttgccgaacttcccttgagagccatctcttcatcatcgatcttcgccttgctcttgctcttgtgactctcttcttcttcttccttcgccttcaatgccaagtcttccttcttgatgcttgtggttgaggtttggttgatatattggatgacctccttggactcttgctcgagcatgtcatgggcaaggatacgcccgagcaagtcatgaggtgtgagagtcttgtagtccggacgctcacgaatgatggtcaccaaggtagagttccttggagtgattgcccgaaccatcttcttgaccacaacctcatcggtcatgtccttggagccaagtcctttgatctcattaacgatcttgctcaatcgatcatacatgtcccttgggctctcaccatccaacatcacaaaccgctcaaattgccctttgagaatctccaccttggactcgcgaacactaaccatgccttcatgcaaattccgaagcgtgtcccaaatcactgcg

SEQ ID NO: 21941 - DNA, 1433 bp, Oryza sativa
ggcctcttagagtcatcaaatttgattttgcctccttcaatagccgcttggatctgctgcctgaagaccttgcaatcattagtcgtatgagacccagaattatgccacttgcaataccttttcttgcccaactcttcagccgatggaattgtgtgaccgacaggaagttgaatctgcttctctcggagtagcaagtcaaaaattttgtcagccttagtgatatcaaagtcatacctttcctctttccctgtgttctttacccattggcatggtataacctttttacttcttacccattcggctgcaactatctcagaatcatcatcttcatcgtctgacccatatatataaggacagacatgattaaccttcctggaattcttcctagcctctgcaaacctttgttcatgcaaggttaccttctgtgtaagatgggacaagctttcaaaatcctcagatgagaatttctccttaattggagcaatcataccctgaaaagccaaatcggctaactgggcatcagtcaagcttaagctgtagcacttattcctcatctctctgaatctctgaatatactcatgcataggctcatcatgtctttgcttgatcgatgtcagatcggacaatttcatctcatgaaccccactataaaaatagctgtgaaactgcttttctaaatcgacccaactgttaattgatccatatggcaaagaagaaaaccaagtgaaggccgatccagacaaagataaccggaacaacctaacctttaaggcatctacagccgatgcttcaccacactaggcaaaaaatcggctactgtgctcataagtcgatgtactatcttgccctgaaaattttgaaaagtcaggcaccttaaaccgattgggtagaggaaccctctcaaaccattcaggatagggttgtcggtacaaatttccagcatctttcggcctaagcccaaactgctccttcatgacatctgcaatcaaatcggcccatggtcgttgttgaggtgttccttgaggttgctgtggcataggctcgaattggttgtattgaggaacaaattggggttgagccgatcctgcctactggtactgaacttagggtgatggcggctgatactgatagtttaaattgcccccccctggtaattttgaagatccggctgaatattgcgcaccaaatgttcaggaataacttgagggatcactatgccatctggttgtacgtgatgaaccaagtgctctggaacaacttgatttgcagcatgctgcacaggctgaccaccaggtgttgcaaacccaaccgatgtattcattgaaccttgctactgaatcggctgaacaacctgctgccttaatggcgtttgctgaatcggctgcaagacctgtcgtcctggtggcgtctgctgaactggttgcacaaactgt

SEQ ID NO: 21942 - DNA, 731 bp, Oryza sativa
gcataataggcccagccgtgcaggcggaaacaccagtcggcggcgggcgaggcggccggtcggtgaagacgtaaacgcccaacaacagcggcataataggccagccgtgcaggcggaaacaccagtcggcggcgggcgaggcggccggtcggtgaagacgtagacgcccaacaacggcggcataataggccagcgtgcaggtggaaacaccagtcggcggcagacgaggcggccggtcggtgaagacgtagacgcccaacaacggtggtataacaggccagccgtgcacgcggaaacaccagtcggcggcggacgaggcggccggtcggtgaagacgtagacgcccaacaacggcgacataataggccaaccgtgcaggcggaaacaccagtcggcggctgacgaggcggccggtcggtgaagacgtagacgcccaacaacggcggcataataggccagccgtgcaggcggaaacaccagtccgtggcagcgaaggcaagccggtcggtgaagacgtagacgcccaacaacggcggcataataggccagccgtgcaggcggaaacaccagtcggcggctgacgaggcggccggtcggtgaagacgtagacgcccaacaacggcggcataataggccagcgtgcaggtggaaacaccagtcggcggcagacgaggcggccggtcggtgaagacgtagacgcccaacaacggtggtataacaggccagccgtg

SEQ ID NO: 21943 - DNA, 2377 bp, Oryza sativa
  unsure (1)..(2377): unsure at all n locations
cacaagttgttttggtgccgtaaagctcttgtgtgtttgcttctgtgtttgtgtttcttcctctctgcctcctgcctcgttcagaaagtgtagcctgtattcgcgtgagttgcttaatttgattcccaacaggccttctgcttccacgcgaggtggcctgtggctagcagagaacactgtgtcaccgtgaagcacgactccacgaccacaagcaggcgagcagcgatcttcttgtgcttctcttctctaggaggccagaagcgaatccacgatcaggagcaattaacaggcccgtcgggcttcgcagaagtgtgctctgttatgaaacgccacgagatttaacgtggaaaaccctcttaaaacaggagagaaaaaaaccacgggcgccagcctgaggtgaggttaaatcgccgcacgcgggcttacaagagatatatatatggtgggaaccctaaaagggataacgatccataccaaactggcatttattaagtgcaaataaatttggatcacaactcaacaaactccaccttaagacaaattccttcttgtagtatgaatcaatccttcaccctgaacccaccaaagccaaaaccactttcggcgccaaatagcctcttgggctaacccactataccaactaagcttgagcaaaactcaaacttagcaacaggaacaggctttgtcatcatatcagcaggattatcatgaatacttatcttgcatacctttagcttaccttgcgcgactacatcacgaacataatggtacttgatatcaatgtgctttgtcctctcataaaacatctgatctttagtaaggcagatagcactttgactgtcacaaaacaagttaatgcaagaatcaactccacaaagctcaacaaaaaatcctttcaaccaaactgattctttacatgcttcagcaatagccatgtattctgtttcagtggtagactgggcaacaacaggctgcaatgttgccttccaactcatagcacaactaccaatggtaaacacataacctgtgagtgaccttctcttatccaaatctgcagcaaaatcagaatccacatatccaacaagccccttatcagtcctgccaaacttcaagcaagcatcagctgtgcctctgaggtacctgaaaatacactgaacagctttccagtgttctttaccaggattcgtcatgtatctactaaccaaactcatagcatgagataaatctggacgggaacaaaccatggcatacatcaaagaaccaacagcactagaatatggaactcttgtaaagctgataatttaaaatgaggtgcaataggagtacaaacaggctttgcatcatgcatgttaaaacgctgaagaaccttcttaatgtagctttgctgactaagaaataacaaaccagaatttctatctctagtgatttccatacctagaattttcttagcagcaccaagatccttcatatcaaactcactactcaactgtttcttcaatgtagtgatttgttccttgctcttggcagcaatcaacatatcatcacagcaagtatataggtgatccattaacaaatttaatatacacacagctatcaaattcagacctcttaaagccatgtgacaacataaatgaatcaaactttttataccattgacgaggagactgtttcaaaccatacaaagatcttttcaacttgcaaacataatcctccttaccaggtacaatgaacccttctggctggtccatatatatctcctcctcaagctctctatgtaaaaatgttgtcttcacatctaactgctcaagctcaagatcatgcatagcaacaatactgaagaatgtgcgaatggaactatgctttacaattggagagaacacatcattataatcaacaccagcaatttgactgaaaccttttgctactaaccttgccttaaacctcagaggctcactaggagataagccctcctttctcttgaagatccatttacaacgaacagacttcttctgttttggcaagtgcacaagctcctatgtgccattcttctcaagagactgcatctcctcctgcatagttgagatccacttctcacggtctccagaaacaacatgtagcgcccgatccgtcgtggcgcctagcgggaaaattatctcctaaaaaccctaattgcgaaatttgtttcttcgcttgttgtctagtgtccgtgccatctcaagatctcaatccccgatctatcgtcgagttcaattccgaatccaaatccttccaaatcaaattcctccgcaaaagtccattttgcctcccccggggtcgatgggccgattntctctcggcccatcttcccctctcccccggccctttcccctctctcccc

SEQ ID NO: 21944 - DNA, 1974 bp, Oryza sativa
acatgtgctagagcttcagatcatgtatccatgaacagtaccaatgaattgcacagagcttctctatccaaaatttctacgctataaggaatttcttgtttccttagtgcaagtccaaatcttaacctagacaacttcataattaaacaccacgctgtatggataactcttgttataatggatagatagaatgaaagaatgtgaactacacaagttcacgataccctctcaataataatttatcaactgacctgatctggcttcttagcagcaagtagtgcattggtcagaccacgtaaaacttcaaaatcgatattctctgacgcctgcttcatgaagtgttagcattagaaaaccagtatgataaactagaatatatacaacatagaagtgcatttcaattttcttacagataaagattttctgtatgatgaagaactcccatcataatccttgagttcaaactttacttcacccaacaaacggtatgcttcaactttgtcagggatcacctatatcaaaataaattgtgtttcaaccatataataagtgcataagcaagacaaactctaaatgacaaatacaatgggcaccaagaatagcatgcagcttaccttaacaagcttctctaggaattctgaagccttctgatattcaccaagttcaaccaatgatactgccgcaccctgtgatgccatatgaaaattacattggtatttaaaagcgcagtagtagtcaaagtcaagcaatcagtaattagtgttgaagtattcagttacattttgtgattcccaaaaagattgattgcttttggcttggaatggaagtggatgatgtatcattgttggattcatttaagaaggtgataatcaaggtaccagtttaagtggtaaactcaatgtgcacttttccctcttttttggtctgttcaaatcttctcacattaaatcaaagaataatcttgctatatgcatgactaggtctagattgtgagccacttttaccatatacatgacttagattgtaatcatctctacatttgttctactttgtggaaactagattaaatcattcatgtgacttcattgatgaaaaagaatggtaatgcctgacaatacttttagaactggcccaaacaaatcaatctacagcaaccagataatacagctaacatctccaagtagataggatcatatctcaaaatatgcctagataagatatgctactaaaagataagatatcatcggcatctaatgttctaatcaggtgttacagtgcctacttactgtttgtgaacatgaacagtaaaccctgcatgtgacaacataaaagaatattcttatcgtgcaagtttacatcaggttgatatacagggcaatttggttacatatgccagactttgccatagttttgtcaaaaaaagtgtgtcgcatgccatttgtggcaatatttggaaagaaactatctccatcttgtggccttatgaggtatggttttaagaaagtgttccatgccacaagttcagcaaagaactaaacattagattaacaatgtcaaacatttttaactcatgtagactagcttgtagcacgaacaaaagcccctaatcatgatagaatgatacccatttatgaaatttgtacattattacaagctcatttcaacatcagcctatgcaccagataatgtaaactacagcattattataatatcatatgtcaacaaaatgcagattgagaaaagaaatttattggggaaaaaacagtattaagacaaccagaagtacgttggaaataataactcacctcaagagcagtaggatcattaggtgatgtccgcagtgttgcttcaaaaccttctagtgctgtctaatcaaaagaattggcaatctcttaatataacaacaaactgtcaaacaagaataaaaaattatatgtcaaacatatgaaactaatctcccacagatatactaga

SEQ ID NO: 21945 - DNA, 12183 bp, Oryza sativa
  unsure (1)..(12183): unsure at all n locations
gagcagaaaaaatgaattaatggaacgctggagtttagtgtcacaattgctctagttgactcgacacggtaataggtatcctcgcacaaggtgttctcaagtggttgacaagaaattgatcccaatctcagagattcctcccgcattatttgcccacttgcgagaaacttctctgcattagtttgagcttccacatcccccctgatgcagaaacgtgtataatgcacagtaataaaatgcaaaataggtcaagtaacgatgacaacaaaaggaggttatcgtgtcatctaaaatcagaaagatgacggataaatccacagcaagtgcctacaatagtcataggatctgaccaggtccaccatccaagagaattttggcagttccatactaaaaattcaaacaattatttcagttgaaacttattaccaggatgatacaccagttacctctggttctggaaaataccatcaggaaccataagtcaattttataataaaaaaaagctttataaactgctattactccctagtataatccagcttggatttaagagtcaacgttaatatttagtgccactatggatgatttgattcactacaaaaaccaactgatgaaatgggaaaagcaatcactaatataggtaaccactaacaatttcctggcactaaccagggattcttttttttatccagtgcatgcaactcttttgatgaaatgtgaaaacagtgaacagagtccatggaagacacaaacaattcactaaagatggaacagttaacaaatttgcacagagaacaaacaaagcaacaaaattgaaaacgtgccttccgacaagtaaaagatagtcagagttttccatcctagctcgaccacgggactgtataaagctgcatactgttgctgatggatcaaagcgaattaccaagttacaacttggcacatctaaaccctcctccaaaatttgtgtggcaataattatatgtacctgcataaccatcattctctcatcagagaactatcatactatgacttaacagaatgcctatagcatacttaacagaatgcctatagcataaaatacaagtaccaatatcgaacctttccttttcgaaaagattcaacaatttctgtatgatttttcctgctctgagatagcaaaccaggacggcttcctgccatgtgcttaacattccacccagacatttgatgaatagatgaaagtaggtgctctaatactatgcttgtgataactctctcaacaaacacaatgcatcttaagtcttgcatatgcctgagagagagagagagagagagagagagagagagaaagagaggtgttacttattgaatgatcaaaagaacaaaaagttttagtacaagaaagtagaagcataagcatctcttacaatcaccaagttacttattgaatgtcgttttgcccgcgcggtttggtctttaatccagtttgcttcgaatattagtttacctaatagtacaactcatatgtttgggcattggataagaagacaaccacacaatttgagatctttggtcttattaggggcaactaccactatttggtctatttggctttgcagaaatgatgtggtttttgaaaggaaaaacatatcttcccctttgcaggttatcttttttattacacattggctctgctcatgggctatccttcagaaggtcaatttgcggggtactatcattgcggcttgtcaacacttggagctagtggccatggagttttctaccccggcgcatgggtggcgttctaggctacggttagagggctcctgaagttctttttgtccctgctattttggatgatgagtttatcttttgtttctttcttgttggctgtgtgcactctttgggtgcagaagccagaggtgctctcagaataattgtatcacttgatagaatttactgagattaataaagcttccattatctaaaaaaaaaactttagaacacatttttcacactggctggtatgtgattatctattccatggaacttacttacacttcaatatccatctaagaactaacctataaaagccagtaatagggaatggaagtagaaggtgaaattcaagaaaaaactgtatgcagcaggaaaataatagtggtactggaatgtatcatttctgtactacttatatgagttggtggtgatgggttgtgctctacacccccaatccttcaatcaacctttggtgaaacaatcagcatagacgtgtgtcattttactcatttgtacttctattgaaccaatatatagatgatttaattatgttcatatgtatgtggttgtcagttgatccaagttaaatattttaaatgtggggatttttttttggcatttgagtaagccaacttatgcgtgtttatctgagatttgttacaagagatgggcaaatatgctagttctcccagaaaaaataaacttttttttcttgggaactcttctttatttttttattcagattttcaaatgtaatccatggggcatgtacaaaaggcacatgcatattgtagaagctaatggctctttctctgtactggtcatccatgatttttcctattttctgattatgtaaaaccatgcatatcacttgatattaactcacagcagacaaaattcaaaagttgattaaaaaagaatgaaagaatacaccactatcgtccaccctatacagaacctttggtaccatttagtcgatgcagtctcaaagggagagaatgagaaatattaccaatactactataagaatagccaaatgaatgcaatctcaaaggatgtggctgtgaaatattatcaaaagaaaatatcagaagagtattttagcacctgtactgcagaagagttcgaataaggcaatgaactttgggtgtcaatatcccatcttgagaatcagctggaaatttttcaccaatatgacctgaaaaaaaaaagcaaagaatgaaataaacatggtatgacctataaattggaatttcggcaagtggatgccatctatggtttaatattcagttagtatcgcatgtatcataagtgaaattatgttaaaaatatcatagtattcataagtgaaattataaacatttttctagtatccagatagcaattcatgcagacaacagactagacaacattttatttggtaattgagaattccagaaagcaaatgctgtcatgcaggtaaccaagaaaagaacataaaaagcgcaacatgctagagaaggtatgtttgtaaaagccagagctgagtagtatgtaccattcttcaagaaacatgaaagttctctatgtacttcttcgctgtagtttctaatgaagccctcaacatttttatccaatgtttcaccccagaaggataggctgttttcctcgtatgattgtacctcacagcctgaaaatacaatgttaaagataaattgggattccagaaagtactataaatgtgcagtgaaatctttattcatacctttgctgccagccatactcctagattatataaacaatatacaaatgtatgatgcaattttgatatcctttgcttagcgttttccagagatgaaccatgtagttttctgtccagagcttctatatgctaagagaatgaaacaaaattgcattggtatctggtaacatatatacacaggatttgttaaaagaagttacttaaagcattacaaaaagaatgtcaatgcatctcaataaaaaaaaacctcctgcttaaaatattgaatgtcatattcagcccaagcacaagaagccatgaataacaggtccatggcatgcaatactaaaggtctggcacatgctctaactaaaaaaagaagtctaacaacaggcttaacagtctctgagactgataaatcatcactaaaaactgtctttttgacctaaaccgcattttagaattcacatacttctgtagaacactggctgtgctactgtaataaaccctaactttttattcttcatttatattctgaaagatgccattgataggtcccacgttttggcatgcaggggatatcatttggctatctgggcctgtttggcagagcttcagagcatcctggctataaaattgttagaggtcaagctagcggtagactggggtgttggtgcgccatcctgtttacatttcagcatagaccaatttattttagcctaagaactccatatttacaaaaatacaagagttggagctcaatccagctcagcatattatgcttcaaaattcttgaagctggaacctaaaagtaggtagacaggagtgtttaggtgagtcatcttctttacattttggactaaaagtaggtacttaaaccactttgttttagcctacaaaactatattctgcaacaacataggagttgggagctctccagaatagacccttactaggcttcctctcatttcacatttattctaagtttctaacacttctccccaactcaatctctgttcccttctgtaggcatgccgaaagtgccaacctctcccttgtatcttaccccaaattggccgccatgcctagtcttaccactcaacttcatgcagtacagtaagcaacttgtcggcaagcaacatgtaactgaacaatagaaagcactgtttaccaaaagggcaaacaaaatgtagaagaatgatagtacctttttattcaatctattcaaacaactgagaatattggcatgcagctcagatgaaatgttggaatcgtcaaagtccactatttttgtagaagcaaatggtatgtactccgacaaagctgattcactatcaacagtgtacaccttgaacaacaaatgcatcaatgcttatttcccaaagacacatacaggtaactaaattaggaagaatgattatcgtaactgcagggatcacgtaattaactgaaaattacatggcctgaccttggaattcatgagattctcaatctcagaaatttgctttgaataattgtgcggattcaaatctatagaaggaacagtgtgacagattagatgatcagagagcctgtgcataaaacataagggatgatcgtttcgcccttaccttttgaataaatgagcgaagcagacatcccaaatatccttggcagagggtctgacgcactagaattcaactgggggtgataaaattcctgcaagcgtcgaatgatttgtctaaattggtgatacagatcagcaggggaagggagacatcaaagattctgactgaaatagtaaatgtggcaaaaccaacgctgcatgttccaattatattggcactagtatgtaagttagagcataggtgttcctatgttgatgagacgaaaatggaaaatgagagctactccactactaaccccacccgatcaataaatgtgaagggaaaatacgaaagggcgcaatacggcggcgggtgtaaacttttgtaccttgaaaatgcaggcgtacggcgtattgcccctggcgtggtgacactcgtcgaagatgagcagcgcgatgtcctggaggcggaagaagctgtggcggaggttgtcgagcaggatctgcggcgtcatgacgagcacctcgccgtcctccagttgggatcgccaggtggcggcgtcccagaagtcgacccccatctcgccgcagaactgcttgacgacgaggtcggtgtgctgctagacgacgcgcgcctgctggcccacgaggacgacggtggggaccaggaagacggcgaagcggggcgagttcgggctccgcacgcggtgcgcgtacgcccggagcagcatcaccgcgatgagcgccttcccgctcccggtctccaggaacgccagggtgttcccccgcaccggccgctcctgcgccttcagctggtacctgcacgccacgcgcaatcacaaacccccaccaccaccattagcatccaaaggggaggggaggacggcgaatcgcgatccgtcaggcgcgcactggacaccccccgggcctcaccatctggccattgtcttcgggtcgggcggcggcggaggccggagcggttccaccgccttggcgcccccatctcctcgacctccggcggcggtgagggggccacccatggcgacngcggcggcggcggaggaggaggaggggtttgggggaggaatcgggggaggcggcgggatgggggtgggagaattnggtggnnccnncncttggggcggcttcgtcttcggcttctttggtgcccgcaccgttcccaaccgaattcttacaatcgcgcgcgcgtgtgttgggctcgaacaatgacgagagataaatgatcttatgggggggaagcgggaggaggagggatgggaccaattggtagtgggaggcttcggggcgaaggattcgcccccgccggttcgttcgagtgcgccttttgagttgacgaggacccgaggagaggcgaccgggaccgcgggggaatgggcgcggccgtttggcgtcagatggaggggagggaatcacaggtggggtactgggggtatgtggaaggtcggggggcggtgacgtccttttgggttttggcttttgcaatggattaaatattttttagatgtcatgtcacatgtcacatcggatatttgatacgaattaaaataattaaacgtagactattgataaaacacattttataactctggattaattcgcgagatgaatcttttgaatctaattaatcattgattagcctatgtgatgctatagtaacaatgtgctaattgtggattaattaggcttaaaaaattgtcacgtgaattagctctcatttatgtaattagttctgtacgtagtctgtgtttaatactctaaattagtgtccaaacatctaatgtgacagggactaaagtttaaagtctagtccctggattcaaacaccccctcattgcaggtaataaaatctcgacaattccatgtgcattgctctttcaataaaaaagttcaatgctggtttgttttctaggatttgggttccttaggccatcaccaatgcgtactctcaagtgtgtccctgctcacagccgtcgccagtccatcagtttgccgtccctagcagaggggcgcgtcttcctccgctcctcagtcgcttttcgtcgagccacggagctaggggacacgttgggcgacgtcgtggcttgaggacacggctcccgcacctgatttttctccttccacccttggcctcttcgctgagaggcccatgtgttgataaaaaaacacacactggcctgggaggtctgcttaactccagtgcaggtcctaaatcttgctttcgggtttcgctgggaggagacagagttggcgacgacgaccggcgatgaccctgtgacggagacggctcggcgaccccgcgcgctgctgccctccgccaccgcgcccgtccccgcgccgcttgtcgtccgccaccgcggctggtgagagagaaggagaaaggtgacgatgagtggcgcaagagagagaggagagaggcgacggcgacgaccagatccgaccaccgtgcgctgcggcagccggcgaggacggagggcttcctcgtgcagcggtggcgaccagatctggcgcaggctgtcggcgcagtggctggggatggcgaggagggaggcgacgtcggtggcttgggaggtgacggcggtggctggggaaggcgaggagggaggcggcagtgagcggcgtgggagaaaatggcgagcgggcaagagagaggggagattggcgatgcgcgcgagagagaggagaagcgtcggtggggaaaaaaagtcatcggtgggctatggagagaggagggtagtataggaaaatacccaccgtgggctttttggttgggacacccattgtgagcttgagtgccttcacccagttatcttatattttgaggagcccatccaggggtatctctcattgtgagctgagtttctctacgagtgtcctcaattagtgaggacactctaggaatagctcacattgtagatacccttacagtaatatgttgtgtccaactcatacgacttctcattatctgtgttcgttccggtgacattgagggagaaaacccatcgttttccacgcgcacgcttctaaatatccaaaaattatgtcacatcaaatatttggacatatgcatggagcattaaatgtggaaaaaaaatccaatttcacagtttgcatgtaaaatgcgagacaaatcttttgagcctaattataccatgatttggtaacgtggtgctacagtaaacatttgctaatgacggattaattaggctattcatctcgcagtttactggcggaatttgtaatttgatttgttattagactacgtttaatacttcaaatgtgtatccgtatacgtcaaagtttttaaacctaaacaattaaacacggccaaagtgtcaaactttactagaagcagctgtgcagtggctatggtagaaattatatgttgctactgtagctactaactgccatctagtcataccgaacacgaatcacgtgtacactttttaaccgttaaaagataaatatattttatagaaatatactaagactagttgggtgcccgtgcgttgcaacgggaaaatatgtatcatttgaaacatacaatctatgccatatagaaatatgcacaaatcaatgaggaatcatttccttgatctgaacaaaacgaaattgtaatgaatctgattcatttgccaagttattatgctatatattaagaagtaaaacttgtagatcttcgaattcagcaaagaggaatatggacatgtgcacccacgtcaattctatgctttttttatataaacatggtttaatcacattccgtagcacacaaagaaaaatagtatgcatgcatatcaaaaggatcgtgtgaaaaatgagaaaaggagaggctacagaacatgggtactaacaattaactgatgaagcatgaatttgtgatattttcaaaccatgccaaaatgttaccatgcatttcttcaatcaccaaatccgcatacagagctagaatgagcatctctgaacaaatataattttcatcaaggaaattcgagttcaacaatcagataattctaattacaaactaagagagataacaaagaatgatttctatatcagtctatctttctggtcaatggtagcccgacacattagtgtctcaaacacgataaaatgcccaaacatagataaaataatgaaaacaaatccatttagttgttctcatgcccaaggtgcatgcaaagttttatatgggcatggtatcttaaataaagtttttaaggggttattgaccaaatggaaggactactgaacaaaaggacaatattaggtacctcaaatgatgtgtaccgtcagaacatttaaaacaaacttgcatggattcaaaaccttaagctgcttttcatctggcaaaataactggaatattcataaatgaacagcaacaaactgaatttcacgatcttagaggacacaaataattgaaggtgtaaagtattcagttaaaaatatattgtgctgaaaggttgaagccttcttttttcagagcaatacatgcttaaaacatgacaattcaagagcaaatgacatccgatgactttggttctaatttaagcagttactgattctgtttgaataagctgaacaatctactacagactctggtgcataaatcatgtaaatgtgcacgtgaaacccacgtcaataataagataaaacagagaataagcacataatattttcacgtctctaataagatgaaacagaaaataagctcctatacaacaatttaataattccacgtctctaataagataaaacagataataagctcccatacaataatttaatgaccatacaatactttgtatagataatctttccgatagaaagagcactgctacagaccaaaggatgaactgccccaaacgggcatagcatgagtacagcagacccattacatataacgttaaataaaaaatacataaatgaccgtcttcctattttactgccaaatgatgccttagaaggctcatagatggaggaagggttatataggcctcagtcctcagaagtacctttccatgaacccgagttaaatacaatagaggtgaccaacatcagttaaaagaaacacatgtagtagagagaataaactttatgcaatgtaaattatgaactaatgctcacggaatcagtgtcagctaaaaaaatgtgtggttatgtattaatgtgatctaaattagagttcgtaagtactgcagcctattctctgcaacgttaaatggatacggaaattgatggggcaaggcaaaccggcaaagtgttctctcgtactgcattccagataatcaaatgtgcagtaaacaatagtttacagcgatatgcaataatattaacaaccttccttttctatactcattaagcttaattgaaggaaatgattctgccaagatgcattgatagcagtaagatgactgcattggtaaggaagataatatacaggtaaagaaactaaccgtgtgagcatagatgatgcaatttactccatgactgaatcagggattagtgtattttctgctcgcatattgactaaatttcattgagtggaggtcttctctcacatttatagaattaaggtgtggtttatcatcatgaattcaggtgtggtttatcaccatgaattcccatcagcaattgcgctgatcatcagaacttaacatgagacacttaccatgaggaagtatatatataatcacatccaaaattttatgtctaatgtgagcacctagccagtaaaacaactaccaggatcatgaccaaacagtatgttaataccataggagaagtcgttatagtgatgagtgtgcaccacatgtaaatgcggcatcacagataaataaattgacagacacaacatagatcaacgatatttccattgcatgttaaaaaattgatatcgcagaaattaatcaagtaaaaacaggacaaacagaagaaactggtcttactttcacagtagggaagagtacccgggtgatgaaggaacctgacgtcctgaagaagagtgagcttgtgtccagtggtaagatttcacttcagatctacgccgtttgtgagataataatttaaataccatgggtaggtacaggatcaatactcttttttcgctggtagtactctcgcatcttttgaagcctagcttccttgtcgccagcactaagagcagcataccgctccctagcacgcttccgcgtaaattaaatcggagttaaattagtgatgccgccaagtgtacctgcagaaacttgtacagaaatcatttcacaacatagcaacagtacgaagcagcgagacgaaaagggagaaaacagataatgtccacaaatcagatacacattgtagatataccttcaacaggaaactgtttcttttacttaaaacgaaattgtctaacaggaaactgtttcttttacttaaaacgaaattgtctaagtgatactttcacatacattttgattacagctcgaacaaagcagtacagtgctaaaatcactttgaaaagtgaattggtttctggacatttgctcaacatatttatgaactttagttgatttgtaacttttctagatgggggatgtctagcaatcgaatgccatataagaaattttgtttaccttttgtagatgggaatgtccctcagtgatggaggggagacgggcgagtactgcatccacctgccgacagcatccagcgacgaccggaggactggcggccagcttccggtgcggcgcgaaagggaccgtggtggagatcgacggagaggagcggatccagtcgcgagatgtggcgtaggcgacggacttttggcgtggacgtgggctgcgcacggggaagcggagtcgacgacgaaggccgccgcgggatgggggtggtggtctagtgggaggccgggatgtggggggttgatgcagccggcctgcggaggtgaggtcgatgatgaatccggcttgtagacctgggaggtcgtgggcttgtggggcgtggattccacggtgatttggggacgtgggatcggcgatgggagaggagcgaggcggcgcggtggttgggcggggtggggaagtggcgtggtgaggacttccggcggcagggatcggtcg

SEQ ID NO: 21946 - DNA, 575 bp, Oryza sativa
tgaatggaccgctgaggagaagcggaaagatcgtaaggctctatcgctgatccaacttcatctatctaatgatattttgcaagaagtgttgcaggaaaagattgctgcagaactttggctcaaactggaatcgatctgcatgtctaaagatctaaccagtaagatgcatatcaagatgaagttgttctcgcacaagttgtaggagagtggttctgtgttgaaccacatatcggtcttcaaggagatcgttgccgacctagtgtcgatagaggtacagtttgatgatgaagatttaggtcttttactgttatactcactgcctagttcatatgcaaattttcgtgacaccatacttttaagccgtgatgaactaaccctagcggaagtttatgaggcgctccaaaacagggaaaagatgaaagatatggttcagtctgatgcgtcgtcctctaagggcgaagcattgcaggtcagaggcagatttgagcagaaaacctacaacgacagcaatgatcgtgacaagagccagagtagaggccgttccaagtccagaggtaaaaagttctgtaagtatt

SEQ ID NO: 21947 - DNA, 748 bp, Oryza sativa
gccggttccaagcaagtacttgcttcaaccttgctgggatctacttcgacaccattggaggaaatcacgtgtccaagaaatgctactcggtctaaccagaattcgcatttcgagaattttgcgaatagttgatgatccctaagattttccattatcaacctcaggtgttcagcatgttcttcctcgttcttggagtatatcaggatgtcatcgatgaataccacaacaaactggtccaggtattccatgaagattttgttcattaagttcatgaagaatgctggagcattggtgagtccgaaggacattactgtgaactcatatagaccataacgcgttgagaaagcggtctttgggatatcttcagatctgattttcagttggtggtaacctgacctcaagtcaatttttgagaaaactcttgctcctttaagttgatcgaataaatcgtcgatccgtggcaacgggtacttgttctttatagttacttcattcagggctctatagtcgattaccattctctcagagccttcctttttcttaaccagaagcactggggctccccaaggggatgagctaggtcgtacataacctttactttccagctcttcgatttgtcttttaacttctgctaactcattagctgccattcggtagggtctttttgcaattggtgcggtgcctggtgccagttctatggcgaactcaatctctcggtctagtggcattcttgttaattcttccggaa

SEQ ID NO: 21948 - DNA, 1968 bp, Oryza sativa
ggggggagagatatgggagagagagggggaggaataaacttttttttttggtgaatgacatatgagtcccacattttttttgtttttattctaatgccacgtaagcgccacgtaggacatacttggtcaagactgtcagtccgtcacgtcagccaaaaccaccgagatattgtttataccggttttgatagttggaggagtcgaaaaccggttggaggacatgaatcatactcgggcaatagttgagggactcaaattatacttttttccatccaaaaatgggcggggcctagacgggcttttctgggccctgtggctccatgttggtctacccaacccaaccacccactgacccacagtcccacaccgccggagaagaagactagcgacgcgaggcgaggctctcggaggagtactatcaccacccaccgccggcggggaggaagcagatcatggaggatttctacgtcaccatcccgtatggcgccgcggtcctcgtcgggggcgtcgccggctacctcaagcgcgggagcaaggcatcgctggccgcgggcggcgggttcggcggcgcgctcctcctcgccggcgcgctgagcgccagggccttcgcgcgcggccaccccagcggctccctcttcgccgccgtcctccagactggtccgtttctgctagttttgctacagtgctactcccccccatcctccatccatcccatggcaaacctctcggctgcccaaagctgaagcaacatagggcagccagcgatgatcgctcccgcgtcagtcttcgtgcacgcctcacagagggcacggtacgtggctgctagcacggcagaaccccagctccactgcggcacgtcctgtggtgagcatccgcgatggaccgtgcgtagtggaccagccggaagtccacagcgtgcccgtgggtgctagtgaacatcacccacccgaacaaccacaacaggtacgcctcaagggagcgtcggaccgagtaatcatcagcgtcagggtgcagaaggtccgcctacaattaagaatgaaatgttagtacaaaacactcatctggtcgcaaataagcacgtatgataataacaacttatttacttacagtgaactggagcaaccaagccttgctaggcccgactgtagagtacggaggaagggtgttggtcggtcctaggtgtggaaggcgtatcacctgctcgaagcgcgcagtgatatcctccttccacccaaaaaaaccgtccacgggaccaactggtgctcccgtcagcggtagcccgagcaggtacgacacgtcctgcagtgtcggagccatctccccacagggaaggtggaacgtgtgcgtctcaggtctccagcggtctacaagagcagcaaggagtgaccggtctgcatcccaccgcttcgctgggtcacggtcgtccgccgccgcctcaacaagcctacaaagtggtagaaggcctgccgcacgcaacctgtatagagcaaatttcaaacataagtacaacacaaagcaaagttgagttgaaatgtgaacatacgcgtaccaaggaacgtgacgggggtcgacacgcaaccactcgcgcgacgtgcgtggacggaaggtgccgagctgtgcaccctcgactgctgacaggaacgagcggtggttcctgtcaatcccacggttcaacagcgccggtgtgtcgtacgccatacctgcatcaaataggttgatcagaaacatataaataattagttcaacataagtaataaatgttcataagcgaattactaacacatattaaacaagagtacaaacaaacaaaagtgtttagtccgaacactcatcacgataacattatgatacaacaccgaatagttcgcaatactactagtacaacaatagtcggaggtactcattacaacaacattgaattgaaattacacgatagaagtatttagtccgaacactcattacatcaca

SEQ ID NO: 21949 - DNA, 3133 bp, Oryza sativa
aaaaacttgggcactcagcgttgtgtaagatcctgagatcccgaacccatatatctcctcactccatgtatgaaagattgcttctttcctgaaataatttgagacgtacacattgggagatatgccacaatcaccggcagcagcaagaacgtgtgagcaaggaaggtgatgcagcttcggattcataccagtgcaggtacatccaccatccgctttcaagacacattcttgcacggcttgcttgcgatagataccacgcgtgctcctatcaacacacattatttcataccgatgcacttgtgtgccttgagcaacaactctatgtctccgtacctttttgattttatcttccatgtactttgtcactacgttgccaaacactatgttgttatcggccatggacggaccaattttcttgtatcgatccctaaagtacgcttgcgtgccgtgaaggatgaattcaacaatagcaaccaatggaagtacccgaactcctcgcattacccagttgtacacctctgccaaattggttgtcattatgccataccgagatccatcggtgtcgaacaatagagaccacttctccttaggctcattctcaatccactgagtgaaatttctgatggacgtccctaacctccttctcattgttggtgggtcatcatgtaatgcaccaagaggtatgggaggctcgtcaccttcaactagtggtctgcgagattgctcatctgtttgcttcgttgtcaactcatccaacttgtcccacaactcattaaatttcttctcttggttctgtgcacagagcctcttaaagagctccataagatgcttgttcttgaattgcttgtagaaatttgcacccatgtgacgcatgcacaccgactccgaacatcaggccacttagctggaagtcccttctcatcccaaccgttctgcaagtagtcaatagcccgcaacatacccgcatgacgatcatgtataaggcaaacgttgggcctcatacgcaccactgcaatgtgcactctctctaggaaccagtaccagctttcagtgttctcactctctacaaatgcaaaagccataggtagaacctggttgttcccatcacacccaattgctgtcaatatctgacctcggtatttacctgtcataaaagttccatctatgcatagaacaggtcgacaatgcacaaaagcattgatgcaagcacccaatgagaaataggctctttgcagcacactctttgttcgatcatcaaccgatgtaaatgtatgtaggtcatagtacgtattattattcctctgggcaatggtggctaacaaacgaggcaaattatcataagaagcttcaaatgtgccatacctcatctcaatgatcttttgtttcgctctccaggcctttgcatagcttatggtgtacttgaatttgttctcgatgtgcctaataattgattttggttcaaagccaatgttaccaacaacactgctgtacatctcacttgccacaaaagctgaagtgatgtttcggtgatacttctccaccccgtgtaagtagcacttgtgctcggtcacaatgctaactttccaataatcattccatttacccttatatgcatggacacgccacggcaatcttccttcatgcacctcacttcatacacataatttgttgacttgaccaccctaaactctctctgcaaggaaactgcccaatgcttcaccgcctccttcatctcatccttatgagcataccttgcaccctcaattacctcgttctccttatactcccagggtacatgatcaccctctgatataacaagtccagagaagtcctcatttgcccaatcagtggccattacatcaccttcctcatcggatgatgcgtcgtcgtccacttcctcattatccgaatcttccctccatttcatcaacaattataccgactctctccccctcatccgccatgcccatagcctgctcctcccttggttgattttcctcattttgcatcgatggtccaacaacatcccctgcattgataggaccctctacatcttcggtttgcattgaaacatttatatctttctcttgtaccgacacaaatataacgaggggccatgaccgttcaaaagccatttccacataccgtctccaagcatcagtgctgtccatcggcattagttcctaaaaataaccttctgttgcacgactcactacaactgacactgacattgtgtagacttcttggtctattctaaatcctctcaataaccaactataaattgactgaaatgttctctccgcaggcctatcgatgcccttagatgtcattacaaaatctgacagatcaacaccatctggaccaaatctaatatttccttcaccatgaactatctgaaatgtgaccttacttgacattgtgcctgatgaaaacaataactgcgttaacctcgcatttctgtactacgccctaagttacattctctacaatattgttctctaaatttctaaaattacgttacattctccagatcaaactaaactacatcttacaattaacactactgtctatgtctcaattcatactattatattctatgctctggatctacacatatgtgctgtgtgctacagatgtgctaaaatatatggaactaaaactaaaacgcaacatatatactcaaacataacatattagtacaaatgcaaaagatgtatgggagcatacctgtgatgaattgagcgaaccagcagggcttcgccgctcctcttctgctgccctcccccctctctctctctcgttttttttggatttttagtgaatataatgaaatttcacagaggagggactgggctttatagggggaggcaaaaatcgccctcccccagggcggcaagggggccgcctgcaaaattccatgccccctcgccgcccatttgcaggcggccccccccacagtagaaaatcgccctagcggagggcggcaagggggccgcctgcaaaattccatgcccccctcgccggccattgcaggcggccccccgcacagtataaaatcggcctaacggagggcggcaagggggccgcctgcaaatttcgttgacgggcggtgcccgaaagcgaacgggcgtct

SEQ ID NO: 21950 - DNA, 19299 bp, Oryza sativa
  unsure (1)..(19299): unsure at all n locations
atagaattttaaattagtagagattatttgaaaaatcgtattaatatttttaaaatttttaagatataatacttaattaatgatgaactaattcaccatgttgctatatttgccgggagtgaagatttctgaacctataccttcaaaagcacccaagcagtgttgtgtaccggcggtgtagtcggctgtaaatacgacacaatagcaaaatcgttctgttaatgtgacaagggctactattattattcattagtatttatgaacgtcaaaattccatttttaacgattaatcggccactttttttaataatccgggtaatcatttgcatattgcacttgacgatcttttagagtaacaaatttatttttttacgatcttgttttgtttagtgttgtttagtactacctccatttttaatggtaaattttgctacaggacatcgcgacttcgtggaattagctccaggacacctcacgaagtgagttttggggaagacacattctcaaaacatggctatttgtcataggacaccgcgcccatttgtttggtatattcgtgctgactaggcttgagcaggcccacatttttacgtgaccaggccaaattgccctaccacatattctttaggcccacacagattactataaaaaaaagaatattgggttgtactccagctccacacagttagtgggaagcaaccaagtcagctccatggctgccgccgcccacctggatgggcttcctcggcctcctcagcttccgctgcagcgccaccgccgtcgcctcctttggccacgcgcaggacgacgagctgcatgtcctccacaccctccaagcccacgtcgccaaccgccttgccgcggttgttaacaaccaaatttggtaacatcagcgtcggagagaagattagatcgaatcaaagtcggaagcggagatcgagtttgaaaacagggcaggaatcggctgaagtccagatcggctatgacaagatcggctgggtctgagtcaggttaggtaagccgatgtggccgattccgacaatacgacttgtacacggcatcaggttcaagttaatgtacttcaagatgattgccacgcatggatagagtcctgggaaggcaattgtatatattaattaggatattttatgtaaattccttatagataaatgtgggcaaaagtctgccgcaaagacttatgatatcttagagtttgttagagataatggtcatgtctggtatgggcatatcttataatcctcgagtataagtagaccccgagccctatgtaatttttaacgacagacgttcaacacaatttcggcgcatcgccaccctttttacttcagttttgtttagacgagttcttgttttcgggttgagctgcatcgatttcgatcttcaacaagaggtaaaattcattatgatggattgcgttcttaggattagtgcttccatctttatgatactctaatcccgtttatcccgtttatgtaattcatcgagttatcatatgtcttacataatctctagcaatatcatcatctaacctgccatcggttagtatctgttaatagagggtagccgattaggttaaatattaatattgatctagattatatgagacatctaccattctatgaaacttctagcgacttgattatctagatatcgttcttcttttcatacttaatgctgcatcagttgagtttgatctattaagtcgtgcttagaatattgatctttagcctgccctctagttgccgattagaatagcatcggagtttcagccgatcgtatctgatttaacttcatttgttatatatgccttattgatatgttaaatctgccctttatgttaagatattgttgtatctaagtatgttaggcttttgctcaatatattattcttgctttaatatcttgatatagagtagtatcggagtattagccgatacatgctagatctatctgatcggctatgttataaacatatatagtcttgttattgacatatatttcgatctaagtgatttatactgtctcggcatgatgaccgatctatcccaatcacttgatttaagtatacatcgatatgaggagtatatattgttaatatctacagccaatcgagtagatttagtccttctttacttattcatgactgccgatcgatgcacagatgacatcggctcaaagataaatgatatgtcatcggcatctagccgatcggctatcatttatggatttaaccacggtttctttgcttctatttcttgttgattacaggatcaaatcaactggcacgctaatacatccgaaggcgagctttggacctacactggagttaagtagatctcccaggccacgtgttttctgtcaacagcggtctcccatcagccaccgctcctctccctcgccttcctctccaagctgctcgacgtggtgctctcctcatccgacgccttccgcgacatcctcggcatcggccccgtcgccgcgcgctctgcaggccgcctgcctcactggtgacctcctcgaccacaccgttaagacactcgacatacttaaagccgtctccctaatgctcgcttcgctccggggctcgcaccgcaccgtgctcaccgccatgtcgtgcctcctcgccccgtcgctacaccacgcccactttggccgcgcatgccaggccatctccaggcaattccccgatgccgccaagctcgctgccgcgccaggctgtccttcagcgtctctaggaacaggtcctccggccgccacgtccacgccatggcggcgcacttcgcaccgccgccacagtagtcgcccacgtttgcctcccccggcgcaggttgcgggctggggctggcgctctacaccatgagctcggtgctcgtccgctgaagcatctaggcctccggtgttaattttggtaattgttggcgatatggcatgaggcccttcgaccaaacatgctgaaagcatgcacccgatgaggattcaagcccgagacatcaaggttagtcaaggcgaaccctccccatgtcgaagactatggagcaaggacgacgagaggcagggaatcgcagccgagctggaggcctcctggccgaagggcgcaaggcgaagagcgtacgccgaagggggacgacttcgccgtagcaggttcggccccgggaaggccgaagaagctatcctggcccatcaagcccaggggttaattgggtcgactataaccagtcggcccgctaagggcccatgaacctcaattacgctatgtacccatgtaaatatccctttcataagggcaaccatgtaaattcccctgcataaccaaagccctagtagtaagacctgtaatgggggctataaatagccccatagggccatgtaatagggggatccaagaaaaattctctaatcaatacactttactttttttctcaaccactgttgagtaaccacgtctttcgacgtatgcagttgtcgtttcgacaacagctggtgccgaccgtggggacctccgagcgaaaccactgagagtgaatgccaccgaagaaggtcgtaaaggaaaaggttacaaggcgaaaggaaagcgacgccggggcggatatggccaccgaagagggagcagagccttcggcgcctgtcgctgaagatggaggagcgccatctgcttccgcacctgcgccatcactaccgccttcagcccttgctacctctgtgcaggtgccgaacgcagctgacatggcgaaggcagctgcggcggcgagggcactccagaccagggcggagatcctttcgacaagccaactgctggtgccccaagccactccgtcacagccagcagcggccccaactacgctcgctgctgtgcaagtccaagtcaaccctgaccccgagacacaaaccgaagccgacatggaaggcatacgacagaacatgacacgactccaagacatgcttcgccaaatgcaaggacagcaacaagcgtacgaggcggcaaggcggtccaaggtcgcctcggcaccaatcctctagtattcggcaggctatgtcccaccccaagtctatccacaagtgccgacccagccccttccaccacaagtcgcgcgagcgccaatgtacttcgccgggcagccatcgaccgcagcagcgcatccggcccctcacgtgcaactgcaagctcaaccggtcgctgcccaagtacatcctcaaccgcctagccaagtgccacaaacaatggcagaaggggcttcagctctgcaggcgcagctccaagctttccttcagcagctcagccaaccccacaacatttcaagtacagccccttcggccctcccggaggggaatacaagtcaagatgcgcctagttggttgccttcaaatcaaccaggtctgggggcttcgccgtggagtcaaggaccgcaattcgactccatcaatgctgctcaggcgccaaccgttcggccgcaagcaccaacgctaggcttcagagcaaaccaagcaccaaaccagatcaccatgacatggtcacagccaactttcgacccattcatggcggctcagcaagcatcaccaatcggggctgtgtagccgagtgccatggcccaatctcacgcgcaagccgtgatttcacccttcgccacgccgtacccgcagcaaggtgctgtgaacagggcagggggcgaaaaggggcaaccgctgagtgggggaatcaagacccgcacaatcccaccccagtgcaagttcccacccgtcccacgctactcaggcgaaactgacccaaaggaattcctctaaattgacgagtccgcgatcgaagcggctcatggcaacgaaaataccaaggcaaaggtaatacatctcgctctagacggcatcgcccgttcgtggtatttcaatttgctagccaatagcatttactcatgggagcaattgcgcgatgtctttgtccttaactttcgatgtacatatgaggagccgaagatgcagcaacatctgctcggcattcgccagaggctgggggagtcgataagggagtacatgcgtcgcttctcgcaagctcgatgccaagttcaagacataaccgaggcgtctgtcataaacgccgcttcggctagtctgctcgagagcgaactcacaagaaaaatcgccaacaaggagctacagacacttgaacacctacttcacatcattgacgggttcgtaaggggcgaggaggattccaagcgacggcaagctatgcaagctgagtatgataaggcttccgtcgccgctgctcaagcccaagcgcaagttcaaattgccgaaccacctcctctcactgttcgccagccccagccggcgatacaaggacaaccgtcaaggcaaggtcaagcccctatgacctggaggaagttcagaaccgaccgtgcgggcaaggctgtgatgactgtcgaagaagtgcaagccctccgcaaggagttcgacgctcaggaagcaagcaaccatcagcagcctgcccgcaagaaggcccgaaaagacctctactgcgccttccacagacgctcttcgcacaccacggagcaatgccgaaacattcggcaacgtggtaacgagcaagattcaaggccacagcagggagcagcagtcgaagcacctcgcgaagtagctcaagaacaagcacccccggccgaacaacgccaagatgcacaacgcagagtaatccaagtgattacaagggccgacccgccaatccaactgtcgaagcgacaaaagaagatgcagctgcgaacgatccacaatataacttcagcaggcgaagggtctccgcaatatctgaaccagcaaatctcttttgggccagaagacgccgaaggagtaatgttcccgcaccaagatcctctggtgatctcagccgagatagctagtttcgaagtccggcgaatcctggtggacgaagggagttcggccgatgtcattttcgccgaagcataggccaagatggggttgactacccaagcccttaccccagcaccagcattgctcacaggcttcggcggagaagcagttcaagttaatgatagccttcggctcgggggaaaatagacgcgaagagcaagtattgttcgacgttgtcgacatcccgtacagctataacgccatcttcggccgtgcaaccttgaacaagttcgaagccatttcccatcacaattatctcaagctcaagatgcccggcccgaaaggagtgatcgtggtcaaggggcttcagctttcgcctgcttcaaaatgcgttttggccataatcaagagagcagtacgcaatgttgaggccgaaccgcatgaccgggcgaaacatgcgtcaaagcccgcacctcacggcaagatagtcaagatgcagattgatgatgccgaccccacaaaactcgtatcactagggggcgacatgggcgaagaagaagctaagaacatcctagaggtacttaaaaagaacattgatatcttcgcctggggccccgatgaagtaggaggtgtttcggcagatctcatcatgcatcacctggcagtcaagccggacgccaagccaaggaaacagaagctatgcaagatgtccgctgatcgctaggaggcagcaaaagccgaagtccaaaaattgcttaaggcaggggtcattcaagagatcgatcatcctgagtggctggcgaatccagtgctggtgcggaaatcaaatggcaaatgacgcatgtgtgttgatttcacagacttaaacaaagcatgtccgaaggacaatttccccttgccacgaatcgaccagctcgtggatttgatagccggttgcaactcatgagcttcctagatgcatattccggctattaccagattcgcatgaacccggccgacatccccaagacagccatcatcacaccgttcggcaccttttgtcacctcaggatgcctttcggtctgagaaatgccggagcgaccttcgctaggctggtgtacaaggtacttttcaagcagttggggcgaaatgtggaagcttatgtcgacgacatcgtcgtaaaaagccgcaaggctttcgaccatgcgtccgacctacaggaaacctttgacaacttgcgtgcagcgggcatgaaactgaatcctgagaagtgtattttcggcgtccgcacaggcaagctattgggtttccttgtttctgaaagaggcatcgaggcgaatcccgagaaaattgatgccattcagcaaatgaagcctccgtcgagtgtacgcgaagtacaaaagctcgcaggccgaattgtggcactcagtcgattcctctcaaaggcagccaaaagaggtttgcccttcttcaaaaccctccagggcgcgggaaaattcaattggacacccgaatgccaaacagcattcgacgagctaaagaaatacctgcaaagcccgccagctttgatcagcccggcaccagaagcgaactgctactatacctagcagcttcgccagtggcagtcagtgctgccctcgtccaagaaacagattcaggccagaaaccggtctatttcgtctccgaagcattgtaaggagcgaagacaagatacattgaaatggaaaagctcgcttacgccctggtgatggcttcgcgcaaactcaggcattacttccaggcccacaaagtcatagtgccatcgcaataccctttgggcgaaatactccgaggcaaggaagttactggctggctcagcaagtaggcggcagagctatccccttttgacttgcattttgttgcccgcactgctgtcaagtctcaagtgctagttgacttcatagccgaatggacaccagcattcacccccgagcccgagctggtcgaacagccctgggtgatgtactccgacagttcgtggtcacacaggggggcgggcatcgcggtagtactcacatcgccgaatggtgtgccgattcggtatgctgcaaggctgtagttcgacacaaccaataacgcagcagaatacgaagccattcttctgttcctaagaaaggcaaaagcactgagggttcggcgcatgctaatccgaaccgactccaagctggtggaaggccatgttgacaaatccttcgaagcaaaagaagaaggaatgaagaggtatctggaggccgttcgatctttggaaaaatgcttcactggcataacggtcgaacatttacctagaggccagaacgaggaagcagacgccttggcgaaatctgctgcttatggtggcccacattcgcccggcatcttttttgaagccctatatgcaccgagtgtgcccatggacagcttggaggtcatggcaatcgaccaagtgaaactgggcgaagacccatacgtctggtgaaccccgtttgtgaaacaccttgaaaccggctggcttccaaaagacgaagcagaagcaaaacgcctgcaactcagagccacaaagtacaaaatggtctcgggacagctctatcgttccagggtacttcaacccttgcttcgttgcatctctttcgccgaaggcgaggaaatggcgaaggagatacaccaagggctatgtggcacgcaccaagctgcaagaacagttgcctctaaggtgtttagacaaggagtttactggcccactgtgttgaaagtctgtgttgagcaaatcaagaagtgtgaaagttgccagcgtcatggccgaagccagaccgcgccccagtatgagttgcagcccattgcgccaatctggcccttcgctagatggggactggacatcattaggccgttcccggtggcgcgaaacgggtacaagttcgtaattgtggccgttgaatacttctctcgatggatcgaggccgaacccccttggaacgatcacttcggcagcagtacagaagttcgtatggaaaaacattgtttgccctttcggagtgccaaaagagttcatcactgacaacggcaagcagttcgactctgataagttcagagaaatgtgcgaagggcttaacctggacatcaggttcgcgtcggtcgcacacccacaatcaaatggggcggccgaacgcacaaatggtaaaatcctagaagcactaaagaaaaggcttgaggggggcaacgaagggcaaatggccagaataaatgctatctgttctctgggcccttcgaatgacccccacaagaccaaccaagttcagcccgttcatgcttctctatggcgatgaggcaatgaccccaacaaagataggggctaactcaccaagggtgacgttctctggggcgaagaggggcgcgagttgtcgctcgaacttttggagggggtaagagtcgaagcgctcgagcacatgcaaaagtttgccacagacacttcggcaacttacaacaaaaaagtatgaccgacggagctgttgcctggtcatctcgtcctaaggaaaaaaggcgaacccgatagccattggcaagcttgattcgaagtgggaaggaccgtacctcatcaagcacaaatccaagacgggatcctttcaactggcgacaccggaaggcgaagagttcgaccattcctggaatgctacctctcaagcgtttctatgtctagaacgggtgacacccaaatcgccaacttgtaaaaatgtatatattgttatgtaagcccttcggcaactatgtaagcctttcggcaagaaaaaaaagaagaaaaaaaagaggaaaatgaaaaaagacaaaaaactggatgtagggctattatccaccacggacgcccgaaccagtataaaatctttgtgtcctctgccttctttttatttgtttgtgcgattgataatttgcggaaaaaaccccaaggcaaacgcctgatcagcgaaaaagaccagagggcgaaacgaatcggccgaagcatcgctcgccgaacgttgaaaccgcaacagcttgttttcggggaacaactaaccgaacaccgttacactcgatcaagaggaaagcgcaaagtgctccttacaacgcagaacgaaactgatcgaaaacggaagccaaaagctgaaaagtcaaaacctatttcgctaatatatgcaaaggggccgacatgttccgacccaacgaaaagcacgcgaagtgacaatgcgaaaatagcgaaaaggaaataaaatgcaccttcattgatttcaagtaaaatacaaacccatcacgatgctacaagtgagaagagaagaacaatggcgttacagcccagcttacagataaataacatcttcgcccccataatcactctctctctctagggaatgatcgtacacgaccctgagaggggaaggaggcgaaatacagactagactgtaacgacgctgaaagattaactcctgccattcagtcttcttatggtttcgccaaaaacgagccatatcctccaatcgtcttgtatgaacaaggtcgtagtcttctaagatccgcccggggtgcgcccgcatccagccggcgaccttaaacaccttatagatgtggccatttatcaccatttcgcgaaaaacaggccgaaatgggcactgtaacttcggcaaacccttcaacgccacaaacttctcgttgctgtttcgccaatttttaacgggaggtcaaacgcaaaccttttgaccgcacccctgccggcaaagcgccaaagaaaagggggggagaagtacaaaaaagagaagagaatacagacgaagatcagccccgatttcaaatagaaacaattaaataggcgaaagggtaatactttgccagtggaatagagattatattaagtacaaggtgaatgcggcttaaagccgaaatgaccaaaagtctatatacaaaagacttaggctaaaagaaggtccgaaaggaccaaaggaaaaaataaaatataataaaaagacacgagggcgaagggcctcacacctcagggtggtcttggcctccgtcgccttcgccctcgtgccccggtgaccgtcccgacggtccgggacccttttcggagttggcggcagcggctttctcgttcctcgcgatccattcaaggttctcgcggagccgaatctttgcacaatcccggccgccatcctcccaaaaccccttccgaaaggcccttaatgcagcccccgagcactgcgtgttgctaggccattcttacttcacgaaatcgggaaatccccgatgtggtcgcagccgtgcgcgtgcaagaggctgagaacgaatcccgccgaaacacgagttcaacagtccnccgtaggcgcctgctacttcgacaatcgagccggccgcctcctgcgtctattcggagaagtcaagtgcagtcccgccttcgcccggagcaccttccgcccgcgccccaaggtcattaagggccagccgaagagtgtaacaggcctccttggcggactctatggctggcaccagggttgcggccgtagcttcggccgacgcaagacaggcttcgagggatttaatcttctcctcggccgaagcaagttgtcagtctcgttcggcgtcccgctggcgtgatgcttctaggttagagcggagagacctgttttcgacattcgccttcttcaacgccaccacatgcctttcgtcttccttgtggtgaaaatcttcttcggacttgcgaaggcgaaggcgatacccatctagttgctctaaggcggacttcttggcactcagatgcgcggcaaggccttgataaaaaaaacaacatacattacgtcagagagctagtgaaagagcaaaattcagcacgcaaagatgggccatacccgcacaaataggctctccacagccgcgcagctttcgccgaactcgttcagttcggtgaaaagcccaaggcctttggtcggcgcaatgacctggcacaccccgtccatgaacggagtgatctccggccgcgtggcgatgtcggtagggacgaaatgcagggcggtaagcgtcacgtccgaaacgctcgcttcaaccgccggggccttcccctcgcgttgaagaataggtgaaggaaccgcatcgacccgttcgtcttcagcaacgttcgacccagcggttggggttgaggcactcccgcccgtcgccgcttcggcattgctagcgggtggcggagcatgcgcctaccacggaaagttgcgcgtcgcaacaccgacgaagtaggggtcccgtcggacccttcactgtccgaaaacccatggccgacctgcacgacctttcctttcttatttttccttctgacagccatcaccagtttcgcggctgtactagagatcgccaagagggtgttcgctacgacgatgtcttgaggtcatgtaggcgaaacatgggagcctgccctggatttcgcaggggtagggctgggggtataaccacgagagccatcctcctcagaaccggcatcagcatcctccttatcctcctcctccctatcgctttcgacggcggtcttcacgctacggcgagttcggacttggctgcctttcgagaccgcacgcttgcgctttttcgaagtgccagcctcgtcatcgccggcccgagaggggttcgatcggctcggcaattcgccagtatagacacgattcactcggccatcagcttggcgttggtgcaagcgggcaaacttggctgtggttagagccttgatcatcttcgacgcctcaatttcagcgtcttccaatgtccgcactgcgaaaatagaggaacacaaccgtttagcctgaaaagcgctttcatgaaggaagcacgcggcctaagtcaaaaacaaagaaccttaatttcggccccggtggggagaactaggcggggaagcccaagaacctctttgccctcgttcacggaaacatcccacacacgggcgagaggagaaatccgaaggaggcaaaactcctcgcaaaggtcccgagtgctcagccgccgggcaaccttgcgaaggagaatgagccgggacttgagagtcccgtcgatttgcatgttcggcttcacgttgatggagacggcagaacgctcaaaaagcagccagctcgcttgagcatcttcggcggagtaggggttgtttatgtagaaccatttctgcatccagttcctgtcccatttcaccatcgacgcgggcactggtcaagcatctgaacgctccggccgcagcatgaagttcacgcagccgaaaacggtcttcctcgggcccgccggcatctgcacgtctttggtcgaggcgcatgcagtaaacagaacggcgaaaagctcggcggtaggggcgaacccacaggtccgacacattcaagcgaaaaccgccagcttcgggaacgccgacgggctaagctggggaagcctaacctcatatgtcgaaagcaccgaaggcaagaagtcatcgcacgggaggcgaagaccaagcagcaaagtatgcggcaaagacaaccgttcacccatccccaggcgagggaacaacggcctcgcccccgcacgatccttggccctctatgagagaaccggatgataccagttcgcccaagtcggcctctttgacaagcgatttgccaaggaagcacgaccatccttcgccaaggcttacaggatcttcgccaattgacccgtccttggtaggcttgcggggggccattaggctcatagcacagaaaagagaggcgaaaagccgaaaggctaggaggacgacgatggcgaaaaggctgaagaaacagaagagtgaagagagcccggagtgagtcaagtggtaaaaaagggggagagcacgcgtagagtgaaaaatggcaggccggtttgggggtatatataacaccgtagcgagaccgttcgcctgccaaccaatcgagctctgacacgtgtcaatgggcagacgaaacggtaaattcccatcgggacgatgccaaacagtaaaaagcccgaatacgggaaaggaaaagtccgcagggcccattactattcatagtaataaaagagactaaataaccccccttcgacgctttgcagcgaatgcgaagaggagttcttctaaaagaaattttctctaagcgaagaaataaacaactttacttgcaagaacgatgtaggtttcggcaggagcaccagtcgaaagggggcgccacataccatatcacatggtttgcacggcctcggccgaagctcctatctcacccttgcccgtgaggggcttgttggcgatatggcatgaggcccttcgaccaaacttgcagaaatcatgcgcccgatgaggattcaagcccaagacgtcaaggttagtcaaggcgaaccctccccatgtcgaagactatggagcaaggacgacgagaggcacggaatcgcagccgagctggaggcctcctggacaaagggcgcaaggcgaagagcgtacgccgaagggggacgacttcgccgtagcaggttcggctccgggaaggccgaagaagctatcctggcccatcaagcccaggggttaattgggttgacaataaccagttggcccgctaagggcccatgaacctcaattacgctatatacccatgtaaatgtccctttcataagggcaaccatgtaaattcccctgcataaccaaaggcctagtagtaagacctgtaatgggggctattaatagccccatagggccatgtaataggggggctaattgtggactaaccgttgctatttatatatgttttaagttaggcctacgtcatgtgtgcgcacggatgattatcgatggattaaaatttgatgacgcgaagcgaagaaaagaagacggtaaaactagtgctttagttttaaaattgatcgaggtgaagggcgatcaaatttgctagtttatttttagtttcgccgtactatcaagggggtaatgacctagcaatgagatgattttaattgccacattaggtcattgcatttttcacttgtgctcacatttcatcacacacacacaatctctttgcatctcactgtctggcctgaccaggggcggtcagaccgaccacatagtggcggtatgaccgatggccttggccggtctgaccggcaagagagtggcggtctgaccggccaggcagtggcggtctgaccggcgggtataggccggtctgaccggccggccatatggtcgggatggcatgctctgggatggccgatcccgagccgccggagccgtattcggtcagaccgagctggtggcggtctgaccgagccgaggccggtctgaccggccacggcagtggggcccaatgatagccctacaatcgctagaaaactagccattgtagagtagcacggtctgaccggccatatacctccggtcagaccgacagagcacagagttgggggatttcgcccccaacggctagttttggttggtgggagtataaatactccccctccagcagcaaggggactctcttagcacccaattcaattgcatacaccccttgcacctctctcgcacccacttgagctttgtgttcatctatctagtgtgttagagggttaattagccaagagtcaagtgcattgcttccatttgtagagctagtgtggcacttgattgatcatctccacgccgggtcattgcttgttactcttggaggttgccacctcctagacagcttgtggaggagttgctcggtgacctctccaagaagattgtagaggagtcccggcgtcggtttgtgagtggtttggagttcaccaccttcggagtgaaggaaaaactaccccgagtgatcgaggcttgggtagtcctctccatggcctggctcccgccttgcccaccccttgacgaagggggcgtgcggtggcttcgtggttgagcggtggagttaggctcgcctcaacggggagtaggaaaccggcgagtttccgaacctcggtgaaaaatctcttgtttccttgtctcatttgattgtcgcatttacatttgtgcaatttatatttctagagacatacttgagatcatatcatcctaggattgttaaacattgatataggagtgtgatttactttcctagagatataattgagccactatcaccctaggtttgcaaaacataacttagttgcttagttagagttgaccctcaccaagcctagcaatttatgttagttttgattaggtttcatttagttttaaatcgcctattcacccccctctagtcgacatctcgatcctacatccgcagccaccaacccccagtggcaaacggattaccagtaatccttttctttagtgagggtgaacagattcaactgggcctaaggaatatgcgcaggggcaatttggtccggtcgcgtcaatatgtgggcctgctcaagcctagtcagcacgaatataataaacaaatgggtgcggtgtcctctggcaaatagccatgttttgagagtgtcttgccccaaaactcactttgtgcggtgttctggagctaattccacgaagtcgcgatgtcctgtagcaaaatttgcctttttaatagatgacgttgttgacttttgaaataacgtttgactattcatcttatttaaaaacttagtgtaaaaatgctaaaatataccccctccgtcccaaaaaaaaactcaacttgacccctcctaggacagtgaagtcgcgatgtcctttatcaagattcgttgtgctaggaggggtcacatccccttctaagttgagtttttattgggacggagggagtaagtcatacttaaagtttatttaatggtaaaacatgccacaacaaaataggtaacatttataaaatattttgagtaagacgaatagtcaaatataaacaatgttatctatttaaaaaaataggagtactaaacaacaccgcacaagatcgtaaaagataattttgttgcacaatataattttgaagctcatgggtcacttacgagacgccgctggccatctccgcgtgccccagcctagcccaccacccctgccgcggccgcggccgccgacgaaacccaagagcctacctgcggagatggactccgagcctgagctcaaggcgccaccttcgcctccacttcttgccctgccacagccacaagcggatggtgcagcgaggccgtgaaacctgcgacagcggacgcggcggcgcccagccgcctacgtgtcgtgggctatagcggtgcccgtgccatcctcatcccgacgccagaagcgcgcggcgttcttggtgtttctcaccccggaggagatcgaggaggacatctatgcgccgccgtccccctcactcccatcagcgccgccgtccttctccccgagttgccaccgttcccctctctctcgtccgcgccgctgtcctccttcccatcgcgtgctcacctccagcatggcggctcggcgagtggagcggaggctaatggagaaggagatggaggcgcggctatggagctcgcggtgcagcggccgccggagagaaaaaaaagagaagaagggagaaaaaaaaaggaggaggaggaagagaaaaagaaggaagaagggagaaaaataaaaaatttctatgtcattatccacgtggcgtgccacgtaagaccacagccaaacaagactttggatcgggttgatacaataaaccaagtttagagatctcaatgtgcgttttataaatttatggacctaactgaaacctcacggcaagtttaagaaccgctggttttactctttcaaattcattttagctaccactaataaatcatgtactaaccatcgctctgtaccctcacaatcgaactcagcctacgaattgctttctcgacttccacgacgatctgtgacgggaagagggtgccagggatcctgtgctgttgtcgacgaagatgaggtcgaaggcgtcgtccatcaagaggagttggaaggagccgatggcatggtcggttcccttgaaccggtcaaagaagaagatgtagcagaggagcagtggtgttcttttctccaaaaacatgaagatgaagattaagttttttacgtaaaacgaggtggtattaaagtataattgattgagttttaattattataaactttaaaaatagattaatatgatattttagagcaattttcatatagaaagttttcacacaaaacacatcgtttagcagtttgaaaaagaatgtgctatgaaaatccaaaatttcatccaactcttattggagaaatgaacggaggagagagggagagaaagaggaagggggggggggggctggtagtgatgaaatataggtccttcccgctataatttttgtaaggcacccgctaccatataggcctcctcaattttttttattttgtgtgttttattccgtgccaaaaaaacgccatatcaatgtcatataggacgaagaccatgtcaaacgtaccacatagacactacgttagataaaaccgccttctaaaccgtctaggatttgatttacattgattttgatagttggtggatattatatatctgatgtcgcggttggggcactaaaataaaactcaactcataattgagagacctaatactttttctaaaaaaatttctgactaggaatgccacgtcagcgaaaccagatatttatactgctacgggacctaaattacatggttttgtatagtttatgggtgaagatttatggtattaaggataagggatgccaaataatctcggtgtaaagttttattttcgggggaaaactcggtgtaaagttgagggacgacggatgaacttattccttttcctcctgttatccaggctcgtgcgagctcatcaggcattcaggcctggtttgccggccatatattataacccaatccaaaaaggaaaaagtatactttgagtccctcaactatcgtccgaatatgattcatgtcatccaaccataaaaccggatatatcgattcttcaaactattaaaaccggtgcaatcaatgtcccttggtggttttaaaggtggttttggcttacgtcacctacatgatggtcttaaccgagtctttgtccaatgtggcgcttacgtggcattagaaaaaaaaacaaaaattaaaaaaaagtgtgacccatatgtcattcgcaaaaaaaggtatcgtgggacccacattgtatcctccctctccttcccttctttttctctccctaatctctctctcagctatcggaacatgaggagacggcggcggcgtcggccgaaagtggcggcaatggctttggggacaacagtagggagtggtgacggcgtctggtggtggtgcacgcacccgtccaaacccaggcgacgtctgcgcggtggggatgaggaggagaaggcggaagaggttgtttgcggggaggatgcggtggaggtggacggcgtagttcagggaggag

SEQ ID NO: 21951 - DNA, 554 bp, Oryza sativa
atactccggttcaggtggagttgtaaaggtatcgaaaggttctctcgtttatatgattggtgatatgaattctgtaaacttatatgtccttagaggaagtacattacatggttctgttaccgctgctgctgtttctaaagatgaacctagtaagactaacctgtggcatatgcgtcttggacatatgagtgaacgtggtatagcagaattgatgaagaggaacctgttggatggctgcactcagggtaacatgaagttctgtgagcactgtgtttttggtaagcacaagagggtaaaattcaatacctcagttcatcgcactaaaggtatacttgattatgtacatgctgatttgtgggggccttctcgtaagccctctcttggtggtgctcgttatatgcttaccattattgatgattactctagaaaagtgtggccttatttcctgaaacataaagatgatacatttgctgcttttaaagagtggaaagtcatgatagaaaggcaaactgaaaggaggtaaaagtacttcgcactgacaatggtggtgaatt

SEQ ID NO: 21952 - DNA, 6477 bp, Oryza sativa
agctctcttaggcgtcgtggtctttgtggtctacagccatcgatgaaaatagttgaagatgatcagatagggatgagagattagctctgagagactgactatgggccatacgcccaaagtgaaaggttttggtataaaatctggcctaagtgaaaacattatattaagggtagcccaaagtgaaaccatagtaaaaaaatatagtccaacatcacttttacaggcaacccagattacttagcagataagcctcctctttctcctgatcccggttcgaatcacccactctaccacgtggccccgctctcctccctccaggacccccgtgtgccgctgcccttcatcagtggtcatgccctctcccttccttacttcggctcctattagatggcctaatcagctaaaaaaaccaaattttaaattttcaagcttaattttgagatattttcaacgtagtttcttttttaaaattggcttttaaattaccaagaacacgtttataaaaattttatttacaaatttatttttattttctaataaaccgttttggcttattagcgatggagaccttcttcgggtctgttgtcgtccatttccatcaacttcaagagccttgcatcgatcctcgcttctcaaccacatggctgatggctctcctcctcccatctcaacaccaaccctcccatcatcctcctctatccatacggcactaccggtcttatgctcttagcctgtattcggtaaccttttttaacctatctccctcgtttttcacgcgcacatttatcaaactgctaaacagtgtgtttcttttgtaaaaagtttctatacgaaagttgcttaaaaaatcaaattaattcatttttgaaaaaaaaagctaatacttaattaattacgtgctaatggaccgctccgtttttcgtgcgtgctgtttccggttgggaacaaggaattgcgaacacagcttacaacagcgttgttatccctctaaagctaccctaatcgtccccttaccccctcccactgactccaacgccggatcgtttattcgtgagttcacagttggagtctagggtcgtcggtcagccgccagcctaccaccattgaggactcatggagaagttgctgccaatgtcgctgactcactggcgaaagtccctctcccccccccaccacccatggcatgctctctctatcgctctcttatgtctccctggactagagatagacgaaaccatctggctaccggatcaacagccgacgactttgaacaacccactgagatttaggaaaacttgagtctgatagtaaagatggtatagatatttaaggcccccttcgattcatatgattaacaaatgagtttttatagaatttaaattcctctggattcataagaaaggaatacaacttctcataggattgtattactatgctttacatttcatagaaaaatagcaagaggtacgtactctttgtaatatttcctttgtttttcctatgacactatcaaagggtttgttggtatttcttaacgacaatactagaaatataattcccagcaataacgtagaaatacttctggtatattatggttacagagttcatccgcaagcgcatggatataccattgtagcatttcactcaagagtattctaagggtatcgtttttattttatctcgtaggaagatcatgtagagagaactcaagtaataatttatatattacttgtggtaatcatattctaagtaggggttaagataattcatgggtagagtgacacacaagcattactactcatcctcataataaataatctaagctaggtggaaagaaaagagaaagagaatctattcctatatttctaatatacatagtatatatacattctagttaattgatatactagctaatactctctatccgatgccctcctggtacttcgagaagccacccctaactgccgagttccttatgacagcccgtcatgaccatccaaccggggctaaatacggaggaataccctccccaggaaattaacttaggattatatataggcgtggaggaatacccgtactgagctgtcaccatcagcggtccacctctcatccgcaatatataccccaaataatgatatcccgtaatctagacaccacatctaaactactagatactactctaatatcattgtcataacatagagtaattgcataagcaaacattatacccgcaccaaagcatctcccagataaactagcagtatattcagtataacaagaacataatgtaaaatgtaaagttagtactcatatactcagaaagtatttcaataccagaaatgtatatagaagagtattctaataaaagtacaaagcttacaaaagaggaaagaaaagctactagagccagacccgaactcttccgaagacttccggactcctgattcctattctaattctattctaccagctagatactactaaactaaacttaagagaaatgagaaagctcttacttgaggtgtgtgttgaagtgaagagagtgagctccttatatagaggtaggtatgacggttgtggaaggggaattgtccgaagtgccctccaaccgtcattgggatgcaatcctggacatccgcgccaaaacctggatccaacggcgccaggattggttcgactgaaccaccaggttcggccgaacctggggctggcccaatccagcccaatttcggctggtggcctcctctattgctcctctccgcggacttgtgaattttggcctaattcatcgtgtcaattcttagttcttggcccattcatacataagtctggtcctctacatcgtctgattgatttatcgttggtgtttgatgtcgattctccttcactttattgtcattctctgtaaaaggttagtagacataatactagtggaatattattgttctaatatatttatgcattgcaagcatcactagttctctgctgttttagtaatattgacggtcgaaactgatcgataacgaccgtcaacagagttcctatcttttttcatgtgtgttttaaattctagtaaaattaaagaatcataccgcttcaattcctacgtttttcttatcactaaagaggcctagaaaacggttcatctcctgtgggagttcaaattcctcactggcctggctgcaagcctgatcaagttaccaaggcccatcacactatatgaggaattttttttatttataattttttttattaaaagttttacaaaaataattttccattttgaaaattgacggaagtagtcgcctaccgccctctgggagggcgataaaatcgccctctcagagggcggcgaaaatgacgtggcagacggccgtttgctctcgggcgacggccgtcaacgaaatttgcaggcggcccccttgccgccctccgctagggcgattttatactgtgcggggggccgcctgcaaatgggcggcgagggggggggggcatggaattttgcaggcggcccccttgccgccctccgctagggcgattttctactgtgggggggccgcctgcaaatgggcgggagggggcatggaattttgcaggcggcccccttgccgccctgggggagggcgattttatactgtgctctatatttttgtataaatatcaatagttatcaaatctttttatattgaaaactatacaagattaaaatctccaagactggtaaaatacaattttattattttttagggcatatttggattgttaccgtacaaatattttgttagtgccaaaatataagcaagttttggcactaccaaatatttggtaaggtaaaattgcatttgatcatatttggtttgctgccaaaatataaaattgtagtgaagaatgttctacataatctcaaatctagattacgtattaccaatgaataggtttccattttcgtgtgtggtgtgctagtgggaaagaagatatgaagaggttgccttcagattgtcaattatatagcgtcgttttcactgcaatatatgtgaactcaatgagatacattattcattagatgtgacaagacgatcacgcgtgggcgtgattcactttatgtcaacaggcagcgccgaaagttgatagtgataactcgagctgccgcttttcatgtgtgctgttgtggactgtgcgcgctactggatctgacactaccgtgaagcgccgaaagtgtgttgtcgtgagcataagttgttctagcaccatatgaatgaaaagaactatgtagacgagacaaacacaagtagtactgcagtagtaatagcaaaagtagtactgctttacaagtttgtaagccaaaagaaacggtcacataaggactgaagaggtagaacactactgacgaggcctcttacccctgtccctcctaccctgcgccctaatgtgcccctgggagtacgtgagtcagtccgggggtacggcacggccaacccgtcctgcctgtataggtgtgacctctggctgctcctgagtgtgcgcctctggagctcctccaagctgagaggagcctagtacgtcgtggtggtgtgcaccgtgcaagtcgtcgtcgtagaactggctagtaggaccagtcctaccggcgtgagacgaaagaggccccagtaccgaagatcccggctgcaaatcttgctggacaaggaccatcagtttcgtacaagtatttaacagtagtaataaaaagtaaagtaccgtgtgggcgagggatcgacgctccgtgagaggaagagctggcgaacgcgcccgaagaggtggcgaacgcccctgcggagctcgcggaagcgccggtcgtgcgtgcgaacgcgctcgaaggcagacgaggtcctgcgatgaggaaacgtgcagttaaaacatggtgacatattcgtgcaaaagctgaaacaaaaatgaactaatatctgggctgaactgtaccgtgcgaaaccggtgctgtaggtcgcactgctccgaagctaggggcgctcgaaggcaaatgaggtcctgcgaggatggaacatcaagttacgacggggtgatgttttcgtagaaaaatagaaacaaaacttaagaaacctctgggctgagcagtaccgtgcgaaacaggtgccgtaggtcgaggtcctgctccgacggtaggcgcgcgaggccgtggttgtaccggaccagctggaggtacgacgtccacggcgctgcgacaggagaagacgcgcatgaccgcacgcatcttctcctgcatccggtcgaaggtcaccctctgctcaacgtcagtcaagtgcaaacctctgttcaacctcacttggactgcggtgatatcggcactgatatcccgtgcggcatcagcctatgcaagatggaaataaaaaattcagtagttgtcctatattatgcaagataaatgaaataattgtaagaagtaatacaaattggacgtaccgccacgaagtagtctcggtcacggtgcatgggatacgcgtccgtgacagcggcaacgtgcggctctggggcgtctggagtgaaggtcacacgcgcacgagtgcgaggaaggtaccagcgaaggtactcacggtagttctcctcagtgtgtgggaagagctcgttgatcacctcctctgtagctaacacccagtcgtcaacgtactgctgtacacgtggagcccaaagtgcgcctgctagctgtccccgtcgagtcaacctgtgaagagaggtaaattatatggctcgatgaagtaattatcataaaaatttagaaatgaacaatccgaactcacgagtggtcggcagggaggacggtcggctgcacattgcccggaaacacctgcctaagtccgaactatctcatcacacgctgcgggcagtgaggctcaacgaaaatgtcgaacaccatcggcaggatggtgagccagtaagcctggtcgcgtgtgcacaaggacgaaagtcctagcggtgctctcgcagcgacggcctcttctgtgtacggctcccagatgacgtcgctcggctggagacggtcaaactcgaacatgaagtccgggtaaccacgtctcacctggacgtgagcgtaacgacgctgcaataaacatgatcggaattagacatgttatgtgaagaaaaaaaaagacgactgataaacttataacgcagcgaagttgcactaaccccacgtcgacaccagtaagtccccatcgtgggaccgtcctctggccactgcgcgctgcgaccaaccccgtagggtgcgctgtccaccactggtcgacctatggcaaacctctcggctgcccaaagctgaagcaacatagggcagccagcgatgatcgctcccgcgtcagtcttcgtgcacgcctcacagagggcacggtacgtggctgctagcacggcagaaccccagctccactgcggcacgtcctgtggctgagcatccgcgatggaccgtgcgtagtggaccagccggaagtc

SEQ ID NO: 21953 - DNA, 6277 bp, Oryza sativa
taggctggggttgaaactaaaaccacagctcatcatttgttttaagataagcccagcttttcagaaagcaacagttaatccatgaccagacgctctgcactctcttctgttctctgttgccttgcctagctatgccattgcttgcagatttgcaacagaaattatagtgagcatgacaaatgattattaattcagtaagtactactagtaccaagtttgctactgtcgtgatcatgcaacccaatcatctcatctcgttattgtgaagtaaattctctgaagatttgttaagctgcattgcctttttctgctaccacttggttgtcgtcgatcgctgcctcttgtcttgccctccgccgcgtcctctcacggaggaactccacgaggccccggagcgcggcgtcggcgtcctcgctgcgcagcagcatctccgacacctcggccggcgtcacctccacgccggcgagcagctgccgtatctccgggaacagcgggtggtcgccgacgaggaagtagttgtgcgcgagcgtcttgaacgcctcccagccgcagtagcccatgtagacgtgcatgtccatccgccccggccggagcagcgccggatcgaggcgctccttgtagtttgtggtgaagacgatgacgcgctcctcgccgctcgtggaccacagcccgtcgatgaagttgagcagcccggacagcgtcagcttctgctgctggagatctcccgcgcggcgcgctctgggcggcgcgccgacggcgtcgtcggagtccgacgaggagaagtcgaagtcctcggcctggtcgagcgccgccgtggtgatcttgtgggcttctcttgggttggcgtcgaagcagcagtcgatgtcctcgatgacgaggatggatttgttgggcatgctgatgagcaggcgctgcagcgcggcgttgacgcgcacctcggagaggtcgaggtcgtagaggttgaagcggaggtagttggccatggcggcgacgaggctggacttgccggtgccgggcgggccgtggaggaggtacccgcgtttccacgccttgccgatgcggcggtagtactccttccgcttcaggaagcggtcgaggtcgtcgacgatggacttcttgaggtcgggttccatggcgatcgtgtcgaacgtcgccgggtggttggtggttgaagccgtcccacgagcgcaccttgttcatgaagatcctgagcacgcgctcccgccgctggagctgctccgccgtggccatgacgaagggactgtagcgctcgagcgccgtgtcggtgtgctcggcgtcgaagctgagctcgaggcactcgcgcggggcccggtgaccgcggtcaccaccacccttgccgcccctcttgcagtagtcgccgcctccggtctccatggacgtccacctgaactcgacgccgtcgaacacatcggtggtggagtccccgggctccaagcacagcagtgtggtccagctgctgctcccgtcggcctccttgcagcgtgagcgcgcgaggctgagccgccgcagggcgcgcgggtcgatcttggtggcgaggtacgcgcgcgccgcctcgaacagctggttctcgctgtacccgccgtcgagctgccgccggatcaccaccgtgtgccgctccttctccgacgcgccgagccgcgcacgaacgaacgccgcgccccaccgcgccgcggcgcggagctcgtcggggagcagctcccgcgccatagaccgcgccagcacggcgtacgccgccaccgacgccgccgtcgccagcgccttcttgtatgcgtcaagcaccctcccgtgctgcgcccctgcagccggcgacggcgccgacgccgccgccgccgcggcggccagtggcaagtgatccatggctggcagctggctacctcacccacaaacacaagacgcccaaggcaaatgtcacgtccattttatggcacaaacaagtgtggtttcgtggaaattcccaaaaacagggtgattttggcgtttgtttttgtttgtttgcttgacctcatcaagtctcgtcggatcgaattgacttaggccattcacagtgcaaacaccggaccaagtagcttagtccaaaagaaagccccaaagacactcattcccatagtgcatgtatcctattttgcgtgacctaactggatggagatactgtgcaagggaataaaccccacaacgcgcgtgacccggttttaaagacacgggcgagtgaaggaaatctattccttcacctacccttgttcccgtcgtcctcctcgcctcccacgccgctcctcgcctcctagcctcccacgccgttcccctccaagtccgccgctgcgccggttcgccgctgcgcctcctcctggtccgccgccgtgcctctcccgacggtgggagcagtgggggcggcggaggaggaggggaaaggctgctgctccggcgtcctcctcgcctcccgtcgtcctcgtcgcctccctcgtcgcgcctccttctccgactgctgcggcggcgagacgcctccaccgcggcgacctcaccgagggagatcccgagcagccgccaccgccgccgcgaggaggaggagcgggttcgccggtcgtcgtggcgacagcggtggcggtggatctatccgccgcacctcccctctccctctcccactcccttacttcaccgcgtcgcagctgcagcggcttggcatcggcggagccgcaagcgcccatggaggagccacgcggcaccggcggcgcggggagtgcggcagccgccgccgccgccgccagttcttggcggcacgcggacgccggtttttggcagcacgcggacgccggttcttggcggcacgcagacgccggccgccggtacttggctcgcccggatccgagttgtggtggcggtcgtcaacgcggggccccggattcgccaccggatttgcgggtcgtggcggcggatgtggtggccgcggcggaagcggacggcgcgacgccgacgggaagccgcggtgaggaggaagctggcgcgtggtggcgagattattgattgttgtttttttttgcatgtgagatgtgttgtttcttggtgattcctcttctgtttcttgggacggatcgtgtaattttttctgcgttcttgcttggggtgtttcggtggcgggaagaatcgtgggcaaattggggttttcttcacttgatgcggcgcaaggggacggcgcggccaagaaccacaccccacagtgcgcgcacctcgcttcttcctctccttctcgtgccctcgttttggcttggtttcgcgtggctctgctcgggggcgaggagctctgctagggggcgattccttctgccacgtatgcttcaatccgagctggcaccgtgtagcaccgctccagctaggagcactgtgagaggcctcagcaaagagtcgagtcgtgcagctgatgctgccatggacctcgattggattgatttcactcgagaaagaagttggcatgtgaaaaaggagagggggtgtttacatctatggaagttttgacatgtcatatcgggtattatataggttgttgtatagggcgtttggacactaataaaaagtaattacataatccatcagtaaaccactagacgaatttataaagcccaattaatctgtcattagcaaatgtttactgtagcaccatattatcaaatcatggagcaattaggtttaaaagattcgtctcgtaaattagtcacaatatgtgtaattagttattttttaacctatatttaatactttatgcaacatttcaaacgtttaatgtgatcggatgtaaagtttttctgtggtaaataaacatggcctctttgatgcggatgcggcacaaatgacagtggatgatcgatcgaatcacggcattaggggaccgacaaatgactattattattggatgaaactatacggcaaaggccgtggtaccgatcacttaatccactgtgattaaaaaaacccagcaaactatatacccgtggcttgtttctattaggcggccctgtttgtgaacactgtgtgcactgtgcagtgggaaggtaaagtgcacctttttctcgcatgttgtttctcgcatgttgtttacgggtgaaaacgggatgaggattttcctaccgcctatctaacccaaagcttacgggaaaagcatgagaggaaaaatgggatacccgatattatccgagtttaaacttgaatctataaaataatatgggttaagatacgagaagaattgtatccgctcgtataaaatctattataaattcacctataaacataataaaagattaattaatcactatttttgtgtgctcacacgtaatattatataatttatttttttaagtaatgttttattttattatctaaaacaaaatatctataagttagatatataaataaataaccgtttccgaatctgattcgaagaaaataatatggaataggatacgggatgagtaataagttatccggcactacatctactcggttctgaatttaacaggagatatatgagaatgatgtgatccgaccgacccgatccattttcgcctctattttcggcttgctttcttttttttttttctgtgagatgctaaccaacaggtgtctgcgtaactgcgttcacatgaatgttttgtaacgtagtacattctcgaatttgggctgtttttagataagaggtgtaaagttttaacgtgtcacgttagatatacggacacacatttgaagtattaaacgtagtctaataacaaaaacaaattacagaatccacctgtaaactgtgagacgaatttattaaacctaattaatccatcattagcaaatatttaccgtaacaccacattgttaaatcatggcgcaattaggcttaaaagattcgtctcgtaatttacacgtaatatgtgtaattagttatttttttgtctatatttaataatccatgtatgtgtcaaatattcgatgtgatagggtgtaaaattttacaatatctaaacagtgccatgatcgttttaaatcagtctgcagcccgtctaaaaatgtagaaatacatgggcttgcgattcattactcacttaatttttttagagtaaattgtatattggtccatgttttttaactatggtttcacattggaccaccattaactgaatgctttcactttacaccagattttattaccaaaatgtatcactttggaccagtggcccacttgccagtgtggctgagggaaaaaaaaggaaacttctcggttgggaaggaaccagcgagtccgctggctcatctcctaccacaccgtcgatctctttccaacttcacccaaccatctcatggcggtgtgggcagagatcacgctaaagccttgggggcaacatggggagcttgggactggaaagactcatgtggaggtcgatgttaggcgacgtgagcaaaggggagctcgtgtatgtccaggtacagcagaagtcgagtcacggaggcgacggcggtggagaggagcttgagctccgggatagcgcgcgggcatcggagtagccatggagatcgaggttgagccgggacagcagagaggagcttgagcccaagtacgacgcgctagtgctactgaatatcgaggtcaagcgaggtgcgacgacggcggagaggagctctagctcggggacgacgtgcgagcgtaggtgaagaacgaagtcaagctagcgagggccgacggcggcggagaagagctcgagcttgaggacggcacgctagggcgacggagccgcgtaggtcaagctggggtggtggataggagctcgagctcaaggacagcgtgtgggtgctgctgcctgctggtgcctggaggtcgacgtcgagcggggggagacacggcagaggtcaaggccgggggtggcgcgccggcatgggactatgggagagttcgaggtcaagacggggcatgacgaaagcggagattgaaattgagactgggaaatgcgtgcgtgcgggaacaggcggaagtcgaggtcgagccagcggacgacatcggcggagattgaaatcaagccaggaaatggcgtgcgagtgtgggcggaagtcgagatcaagccaccggacatcgagcttgagcctgagaccggccggcacgacgggaacaaagtcgagctagcgtgatgccgtgttggcggaggttgaccccgtgctggctggactacgagcttgagatgcgcgggcgtcagctctgttatatatgctcgagctctcttaggcgtcgtggtct

SEQ ID NO: 21954 - DNA, 8322 bp, Oryza sativa
cctgcaccccaaaaaagagagcggaaaaaattacatccaaaaaaattgacaatctttaaaatatgacaataccttaccttctgttcgccggaaagaaaagaagaaaccatacgaatgtacataaaaaagatagcaacaaaattacatccataaaaatcgacgatctttaaaatatgattttctaaaatatattacatcacaaatataaatatatatagttaaactaagatctataataataatattaaatatccaatcaatgttctttgaaccatcttttaaataatttttaaattatatatctaatttgtgattccatggtattcctttaattaaattataaaagttgtgttgcgatcctaaatatatcacaacacatgaggccgtcatataatagttagttgtttaatattttttaaaaaagttcagatcatattttggggtgtgaaatatcacttcacaaatatacaacaccattttaaatctacatatataaaaaattaaaaaaaagacaatttagttgtgttttttcaagtagatctgatttaattgtaatttgtttgagattaagattctcaaacttttttttgacattttcagaattattttattggtatttgagaagtgagcagcatacatagtacatagatatgaaaagaaatatcaaaaatagttccactcaatgatctttgctatgattcaaccccttaaatcatcatgtgatttatggtcatattttttctttgccaaatagttttgacacaaatgaacaatgaagtaacatgcacaataaactactcatgatatattttcttgtacttaaggaatttcaatatattagacataattgatggatatttatcataaactccactgacatgactgtaagtgtactccaataaattatttattgtaaataagtttagaaaaataaatatagtcttcaaattagtaaaagtgcctcgtgattatgaacaataggtgttgaaacaaactacgcgctaaactatagatatttgtcaaaatattaaaaataatattgtgctgcggaaattatcgtggtagtatgtctctttagcaataattcttttaaataatgttgaatgattaacctctctcattttcaaaagcgagttttctgtctttatcataaaattttgagtagtattgatcaacgccataaacaaactatgtctaaaaaaactattttgatcacttccatcttctctttgttcttccctaaagggcaacaaactgaaaactccaaaaatatgatattctaaatatttaaaacaaaacacacatagtataaatggaagatttttcactgcaacaaactccatagttatgacacaatattttgcacgattccaattttcagtttagaaattatgtgttgcaataattggaagaaaatcataaccaactttcgaagcaatcctaaacaagtttagaatatcgctacagaaaattgggaaagtcactcacacacaaagtttcataatagaaattcaaccattgttaaataatggtttgtttgggagatttatggagtatcaaccgaattattcgtaacacgcttcaaaattataatttgtgtaaaatactttcttaatcggtattgcttaagtaaccttttttaagctatttgttagtcgtatgctatactatgtaatgcacttcataatcaattatctatgttccacttcatcatctaaaagaaaagtagacatactttgttttgaaaatagataattgtaaattaaaagtaggttctttcgctttttaatggaatggccagggtctctagatctccttttcaaataatctcaaaactatattattgataatttatgttttacatcaagttagagcgctctctaattggttcggattgacataacttcaaacatacttgcatgtgaaattaaaaatacataggagcgacaaatatatatcgaccctactttatatgatgtgttggacccatattatttttttaagaaaaaaacatagacaacatcaagtttaatatgacgaatttttaaccaattatgtattgctacattagtgacttacatatataagacgtggattaaaacatatgccacttcatataatatagggaaaccattagcatctaagcacttaaaaatgatgcaatgtttatgataattggtgttccaattttggtgaaaaggaagaaccaaatttttatgagactactataagattttctttctaattggttcactttgctccccattggcattttctattttatattatacgttataaaagtgttacactgatagtgtaaaacaatgatagagtgttacaccaatgctccatgtgcgtgtgataatgaattaggcattaaaattatgctcctagctggtcttgaggggcaaggctatatcgctgcgggacccatgtttcaagacaatagagaaggaaattattggtgcctactatcggcttcacccattagactagcattcgtgttaactttaatggtgttatcctattaatggatagaagtggtggtatttttgtagtatttatacgtggatttagaaataagtgagacgaaaccaaagtacactacaagaaaagaaggaattctcaagagccaatccctgttgggactgatgctgttctcgttgggaatgttattttcaaggggatactcttgtaattggtgccttgggattaatggcctagctaatactatcatttgctaggaccccgttgagaatagcttctgcaagagctaaattcaagagctttccttggaaataatccgtcttggttgttgcatagaacactgacaatctcaagggttgctcgttgcaaataccttttcaattcagtttattaaaaaatctaattatttttatattattagttaattctcctatacaaagaaatacccttgggattgttttgatttatcatttttttattaattctaattaaccaggaatgatatttttaattattgttctttttatgcagtacgtagcaaataacatctgcattggatactgcatcacatgatgcaacaattatatttgctctgacagaaaagcgtcaaaggatttttaatgatcaatataaacagtagacaatatatttgcatttaatctaagacaggtctgtagacaataacacataaataaaatagtctcagaaggtaagttgatcaaactgattaatctagcaactataataggtctgataacatgatcctagattcctaatctctaatgcttgcaattcgacattagcacatcctagaaacgccagaggtcatcattctcacaagttcttccacaatgaccagcttgtggcgcttcttcagtagtgttcatcccattctgaaataaaattacaaaataagctacaaagttactgaaaaactataagggtaggtctaagtttgaacttatgaatgatacatagcagtccatttctaaattgaactcactaactggtatcgcaactaaagccataccattggcagaacatttttaaattgatctattgttgtccaagaaccaaatttttcataatgtttgttcaagagaataaataataaggatgtacagtagtaaaaagattgaagtcagtatataccatgagaagtgcatgaaggaactcagggacaacagaagaagatggtccatttgcatcctgtgatttgaaaaataataccagttagtatgttctttctaggtaacaaaaatagctttaatttatacttacatgggaatgagtttctgccttatccttatccactgtctgctctagcctttctatccttgatgctagttcttgatgagcattgttcacagcattagtgactgcctgctgaacaatgtcttgcacttgctgctgtgtgtatagtggctgtgtctccatgctaccagatggtgcacttgctgaattaccaacatggtttctatctataattcctgaaagaccataataccttccacgttttctacctttagtgagctgcacccaaacatgttgtttgttgacttgattgttttctccttccttgacacgatcattatacaccacctaattaagatatgtagtggcaccattgcatggttttagatgatttcactttttttgattgccaaacttgaaactagaaactagaataagcagaacacataccgctaactattcagctttcttgttggcatactgtcccttgccctttgcatgtcgatgtgtgcgttcaaagacatcaatatcatcaacatccgtccctgcattctcaattatctatccaaaagtacatatcatagtgagaagtcaaagtagtataaatcataataggaaaatcatttaactttggtaccatggcttgtttatgcatagcaacacttcgtgaaccacaagtatgatgaacaccacctccttccatccgatttttgctgttttgagctgacaccttctttacattttcatcagaccacaagtcacacaacatatcccaccacttttgctcaatccaataaggagggaatgccttccaaagttgaggttcatcaacatcaaaatcatcatgagaaggggcatctccatcctgttgtaactcagtcgcacgcatattttcgatatgcttctccaaagaacgttttgcttcagatttctcatgtgacaaagcttggctaaaacgttcaacagctttgcgataaaataatctagcacaatcctcttctctaccatcagcaaacttaaaacacagctgtaaaaggataaggtaggacgtcaatccattaaaagaacctaaatattctatgtgaatgctaacactgtaactcaccaaaaattccttcagaatagttatccttgtatgagcagaaaagttgtgataatgagcaatgacaactgcttcatcctcaggcacctgtttgccatgtttatccaaaggtctatatgtgccagggtagtgagcttttataagacatgtgatggtagatgaaacattcttcttcataggattcgtaatccaagcactagaaacaacatgccatttaccaagttaggtaatattagtgtaaaacaatgaaagtgataaaaaaatatgttcagccatcataatattggatttataggaactatgcatctgtatttcttaaaatttaacatggagtttacaacaagattttcaattattaacaacaatgatatacatattatatggagtgtgtgtttgtgtgtgtgatagacagtgtgtgttttaatataagcagaaatttagagtgtcaacttactctttattgagtggagttatcactgccctatctttctctggaactggtgccatcaaaacatttggaccacgaccacccttactttcttttgttgaagtaaccaaagaatttgaaggttcatcttgtgttgaatcctcaaaatggtcttcaacttcaggatccggataatgtcgatggcgtcttgacatagtacttaactagtaaaaacaagggttattttgcaagcaaatgtagtcattgaagaatagataacatagtaaatttgtaataatgccactgctcatgagaaaatgaaataataatatcacacacacacacacacacacatatatatatcaattgtttagtcactagaatcactatcattgtctgagtcattatctgattctattggcccttcatcttcactgctgcaatcactgtccatggcaacataactctctatgttctcatggctatttggtctatttaaaaaatccatatcttctggatcaacttgctcaacaatatttgattcatgaagcaagctttcatcaccaagctcctgtgaaatgtcagctccaagctgctctccctcttgataatattcagaaactacaggaggaagcgaatcatcaacttcatcgtccactgcaggaacgggtaaagtaccaattggatttgttttgaatgcaacccaccaatcttttctttcacgtggtggcgatggatatggtgtataatatacttggtccacttggtatgcaagcacaaaaggctcatattgttccaatcttgatgtatggttaacttcaactaggcctagtgctttgtcatacttcactcctttcttaggatcaaaccagacacacttaaatagagccacctttagatcactatcactgacatattccaactctattatctcctgaatagtgccatagtagtcaggcccttggttatcaaaccaatttgctgacacacaaactccactatttgtcattgtcctcgatgatttcttttgttcatatggttgtgtacgaaaacgaaacccctgaacatcacatcccttataacacttaaccatgtatcggggcccaatggaaagagcccttacttgttcttcaactgtttcatcttttccagcctgtagaatcaattttcatgaatcatgcattaaaataaataataatccatcagatattacatcatgtattcttaccaactcacgaacccaggttggaaaatctttctcatgcatctcttgtaattgagttgtagtgatgttcctgttttgttgtttcatccccctatcaaatttcctgacatttattgcaataacataaatgtaatatgtcatattcacaaaaatagagcccaagtaataaaataggaaaacagaataatatatacttacaagacatatttgtcaacttctgcacaattgagtaatgcatataccctagcagcctgccattcttctcttgataagttacatgatgtgctctttccaagagtgcgatatgggatagagaatatagacagccagtcagtaggtgctctgaaaccaccatcatcatgtctagggacgcgagtgtgctttgttcgcacatgatcagcaaagtacatagaaataaaattagagacctcctgtactctatacccctctacaattgaaccttcgacacgtgctttgtttcgaaccttcttgcgagcctcatgtaactccctatgaattgagcagaaaacataattatgaaattaatatacaaattcacactttagtacttaaccaaagaaacatacctttcaaatacatacatccagcggtaagctacaggccctccaattaaagcttcataagctagatgcaccaccaagtgttccatacaatcaaaaaatccaggaggaaaaatctgttcaagtttacacacaatgactggcacttccttttgtaggtgcttcatttgttctatatccacctcttttgcacatagttgcctaaagaagtagctcagttctgctaaacacttccagatgtgcttggggaggaaatcacgaaatgccacaggtagcaacctttccatgaagacatggcaatcatgactcttcattcctatgatcttgcctcgattaatatcaacaccctgtgctaaatttgatgcataaccatcagggaatttaagattcttaacccattgcagtaccaatttcttctgtgccttatctagactataacaagcttttggtttcacccatcgacctatagatttttgttgcatatgaagttctttgcgattgcatatattggctaaatcaaattgagccttgacattatctttagtcttctttgggatatccatcaaagtattccatatattgtcaaacacattcttttcaatgtgcatcacatcaaggttgtgccgtactaacaactcacgccagtaaggcaactcccaaaagatagatctttttacccaattatgctcctttccaaaaccctcaatctcttgatttcctgccttggtaccaaatgtaatttgagggagagatttaacacaatcatacacttctgaagatgatcgatgaataggtgggccatctttctcctccttattctggatgaacttgtcttttgcatgtctaaaagggtgtccctttggtaggaaacgcctatgacaatcaaaccaacatggcttgcctccaacttttagccaaaatgactttgtgtcttccatgcaaattggacaagctaattaaccgtgtgtgctccagccgcacaacatcccatatgcaggaaagtcacttactgtccccataagggcagctcgcatgacaaagttctggttttttgagcgatcatatgtcacaactccttctctccaaagttgcaaaagttcatcaattagtggatggaagaatacatctatgttctttccagggtgcgtaggccctggtataaccatggtaaggaaaatattatgtgccttcatgcataatgctgggggcaagttatatgggacaacaaaaacaggccaacaggagt

SEQ ID NO: 21955 - DNA, 7743 bp, Oryza sativa
ctttctagggtttagtgttacaggggattttacatggttgcccttatgaaagggacatttacatgggtatgcagtgtcatttgcacatataggcctttaatgggctgataggctgggcctggtctatggcaaacgggcttaaaaggccaggggcggcctgttgggcctccttgatgccgaactcgtcatggcgaagtctttgtagttcgccgaagatgccttcacccgagatgcctttactttcagaataccgacgcggctttccagccttcgccatcttcgcttatggctttcgccatagggcttcgcctgaatggccttgacatctttggcttgaatccttgctggtactatagtttcggcaggtccggtcgaagggcttcatggcatgcctccaacactaaacaacctagaatcacaattaatttgggatagaggtagtatgtgttaaattgttctaggctctcgcgtcacccacgcctaggcgactcagggacaaaaccctagcccccactgccgcaccttccccatccccccacctcgctgccgccggagcgtgtcgtcggagaaccgggcgatgagccaggatggcggtggaggggccttatcgtagaggcgccctgtctcgagcgtgggagaggcagcgtgacgagttgtgaaccggagacctggaggtggcagcggcacatcctccccggcgagggaggtggcagatccggcacttccgcgaccaaatctgatgctcctacggctggatctagtgcctccgcgtcggatctagctggggtcgagcagcggggggcgaaggcaatgagaggcacgatggtagctgctgggagggagaggctgggcacggatggcggtagcgggcgggcagtagcggtgcgggccatgcgtatagccaccaggagggagaggccggcgggaggacggagcagctagctgcagtggacggcagtgtgcgtgaggccgcgcgcgtgggtatcagtgggaggccgggggtgacggtgagctggaccctatggtggcggcacaaaattggcaacgacgatgggtctcccctctttgcctggcatgccccttcttcccctagtgctccccctcctttagccgttctgtctccagatacggtcgtggagagctctagcgtagagatggtggtggtgcctagcactggaggtgttctactcgcctccctcgttgcttcatgttgtagaattgggacggtcggcgtgcggaggagccgatgagggtcgtcggtgcagtggtgctcccggtgcgacgatggccagtcgacggaggggcatcagtgtggtagagagcacatgctagcagaggtctgacggtggcaggacgtcggtgtcataacaggaggaggagatcggctataggcgaaagccttgcttgacaccttgtctgggcaaacaacgacaatgtcttcaacgtttcaatccctcctaagggcgttgttgagaggcctacctctccctctagcaggacctcgggtgaaaaccaagtcctcttctggatgggcggctctgttgcctatccaacattcgatctttcagtcttcgacaacattcttggatgttgccatccggtttgctcgtgggaggagtggatcttcttctctctcgccctctcctttggcaacccttctacgtggcgatggctcagagcctatggggggatcttttggttggagttggcttaggaaggtcgtttgtgaccccttcgtggggctagcggcatccaatcatgcatagcggaggccggcttgatgctagatcctttccggggagtgtgtgcaggtgcagttggcatgtgttggtattgctttggtgttttttcccttttcctgattattgcctcccaaattggtaatcttgttaatataaaacttgcatcgtccggtgcaattcgttcaaaaaaaatatattaaattgttcttagacagctaaactagttctaatagttttttcttatactacttattcaacatctccggtgcaattaatcaaacaacatcctaaacatatgagtgagtttatagtctatgagaaggtaccgaaaaatatcatattttctactgtaaaatttggacctctcggtattaggaggtactaaatttacactaaatttttttatacctttcacggctataaaatttctttaaacatatacagacttaccatagctaaacaaccaaacaagtcacaattgtattctcacatctggttgatgctagcctgggcatttcttcttttgacccggtcttaccactatcaagcgaccaaacactcccaaaagaagggtaaataatttaggcatgcaagtatggattaaatctgctagaaatgcaggcaatcgatcgctattagatatgacttaatttaaattacctacaggtgaacaatgtcggcttcttcttcctaaaaccagcggtgaacgtgacaccggaggagctctccagtgtgatggcgggcaacctggagtcatgcttccacctaagccagctggtgcaccctctcctcaaggcctccggcaagggcaacatcgtcaatatctctggcatatcgactgttaccggattcccaactctccccatctgtgtcttctcaactgcaaaaggtaattaaagaataaaagatcactgagtatattcactctgcgtaccaacacaaatttagggttgaaacttttatacgtaggtgcttgatagtgtgcaattattattattattattttgttactttttgtaaagttggtggccacggcgattagcatttgaaatttgtctgaataggataggttgccattcataaatgcctttaagtgtaattccaaaataagtaggaaggtagcccgcgcaatgcgcgggcatgtatagcatgttgtgttttggaaacctatataagtggaatataaccagatgatacctgccatgcttcaaaagtacaatttcttcaaaaaatttcttcattagcatcgctcggtaatttttttccaaactatttggtaacttgaaattatttagtatttaattcatgcctataagaaatcatttgtaatctttctttctagctaggaaaaaggttggcatcttattttttattgatgaaaagaataataaaataaatcaacttgccatattcattgtagagtattatatattatcttataataaaaaaacatctataccgtctcaaaaatactagatcataagagtgtctcctaaatttaaaataaaaatcacttttctattgtcacctcttctcatgacaattgtattgttttagtggatacttattatcattatcattgattttgaaagttgagagtatatttaatagatcaaactacatcataccattacaataagattaatacattattagttaactaaaaaatcatctatgttatttagatgagtgtccatgtctcacttctttccaaatctatgtataaatattctaacaatacctcttctatcaattaataggataacaacgttaaattagataagaatattcgtgtagtgggtgaagttgaccgcgggcgccaaggctttcttccctgctgccgtgagatatgggtttctcatagccgtgcctctctagaccagcgtggagcataattttaatgcctaattaattataggtgccctcatagagaattgtctcctgggtaggaagttgagctctattgccaaaggtatcctctcattgagactatctcagcccactatatgtatgtcccagctatacttatgattgcatagcatgctctattatcatgcatgatgcccttcaaaaaaggacaaagagaagatgaaggtgatgaaaataaattgttttttatattctgagttgttttagggtatagtgtagacatagtttgtttatattgttaattaatattactcaaattttaatagtatagatacaatattctttttcgaaaatgagcgaggttaataattggatattgctggaaaatatagctaaagagaaataccgcactaataatctccaagattaacccctggtttgtttttaacacttattgttcaagacaaatttactaatttcaaaaatttgtttattttcccaaacgtatttgctgtaacttattcattggagtgcacttacagccacgttaatggggtgtataacatccatccatcaacaatgccctacatatgggaatttctcaactattagaaaatatattatgagtactttaatgtcaatgttacttgattgttcatttgttgccaacactattttggcaaatgaaacaaatttacatatacgaccataattattgtgatgttctaaggggtagtattatagtagctagaaacatttttgatattatttttcgtatctacaagaatgtatgcttctggattgtgaccatgtatgcttccgacttcatatctacaccagtcaaatagttttgaaaaattaaaaagctttcaaaattaaattagatctacttctaaaaagatgactaaattctattgtttttattttacatatgtagattcatattagtgtgtatacttgttaggtgatattttacaccataaaatatgatgtgaaattatttaaaagttattatgacaataattattatatgtcgacaccatgtgttatgatgtatttagcactacaaataactgttataatccgttaatagttcatttgatgataaaaaacttgacgatatataatttcaagtaacgacattaatttaatggccattaatttgatattttatctttgatgtagtttaactagtataattaatctttgatgtagtttagctgtgtttgattacggactaatgttatcttcaaatcatagaaaatcccagttttaaataccatttacttttccaaataatgctaagtgtgcacgtatcgtttttcgcatcgaatgtatatttgtttagtttatttctgtctaactctccatatatacatggggagttggatatttaatggcctaaaataccgtgtttaccactttaatgtttgtgaagtactcgttctggtttttaatggtttttaatgtatgacgtcattaaattttgatatgacatttcacaatttgcattaaaagaaacatataaatgatatttgttttatcatgacttgttttatcataaaaaaatctataatctcaatttataattttacatatttatatatttttaataagaagaatggtcaaatgttatagaaaaaaaaagaggaagtgatatattttagctttctctgagatgaaaaaaatactgttgaattttattttccaatcatactacgaaaaatatgtagcaacatggacaaatctaatgcgtttatttttggatccaatggtagttttaaggtttccactatgtatgtggtttatgtggtttgtaatatatatttttccatcatactataggtacgtaggtgggtttttttgctttggcctgtatagttttttctcccggtgaactctacctacgtggcgaactttatgtacatatgtattttctcacgtacatttttttctcgtgaactttacgaacgtaagcattttctgtcgtacttagacgaggataattaggatggaaagattacatttttaaaatggtgaactttacgaacttacgcattttctctcgtacgtggacggggattatgatggaaagattacatttttattttttcaaagtaagatctaatataatggtctaaaataatgggcccatcaatttaagtaaaaataaagactacattcattttttctgtgaatatctatgattttctctaattcgttagagtgtcacgtggtgcgtcacgtggtgacatagaagagtttgtagagtagcacgtgttgccttaggagtgttggtaggaagtttaatatagtttagtatgtaatactccctatgagttgataatacttgtcgttttgaacaagggcacggtctttaaaaaacaactttgaccattattttttattataatatgtataaaattgttagcaaatatatgatcttattaaagtactttttaagaataatctatacatgtagtcaccatatttgaaagacaaatattttaaaaatgattcataatcaaagattctaaagtttgacttcacccttatccaaaacgacaagtattatcagctcggagggagtagaaatctatggtttataatgtttgattttattttctatttcattgtctaaaagaaatttaatcttaaattttgagggggtggacggatagacggacgtaagtacgtacatacatacgtatatacgtggtggggagaggaggcccaggaggtggtggggtagggtggggtgggacttatggatgggtttttagattttgtttaaatatagatctgatggtgaaaaataatgggtctaccgtattaaatgagaataagggtgggatgttttgcttttttttcacaatttctttgatttctctaatttattagagcgccaagtgacgatctagtagcgtttgtaggaattttaatggacttttattatataatagatagattattatataatagatagatagattttatctatgtagtttttttgcttagttagaaatgtcttgtctagttagttagaaatattaatcgccagataatgctcttactaatctcaggagcaatgaatcaaattaccaagagcctagctgttgaatgggcaagcgacaagatccgtgtgaactgcatcgcgccgggcatcatcgatacaccccttggtgatgatgtacgtttaattctccacacatatgtacaccaatttattgcgaaggctggtgcttttgttaaattacatatatttgttccccggttttagattttattttcacatcaaagttctgagttattaattgaccctctacttttattatggatatatatttatttgtttcactcaagaacaattgttgatgctctcaaccacaggtcaagagcggcaataatcctcaccttcagggtgttagcgggacggacttcatacaagacgacatcgcacgaacgccgatgcggcgtgtaggcaagccggaggaggtctcatcgctggtggcgttcctctgcatgccagcggcggcatacatcaccggccaaatcatttgcgtcgacggtggccgcaccctatcttagcagagtatgtttaattgccctaaagccctaaaccatataaagaattagttcctacctcacgcgttgctacggaacaatcgtgttaattgaaggatataatttcagagctagcattgtgtatactctggctaaaacaaaattaaagagcatcatatatattgacgtgtcctttacaatttacgttattattatatactaaaagtctattaaattaagcttcctataaacgctcacgtggcactcctagaaacactcctaggccatcacaaggcattatctaatcttaccatcaattttcacttaaattagtggactcgttattttacatcattggattaaatctattattaaaaaataataactttctccttttatacgatacaagcgctattactgttgttatgtacgtacaagtttatacggtacaaactatgtccttctcccgtacgtatttacgtacatgaaaacaaaacaatagctttacataaaacgccggaataaaaagaaaaaaccatacgcatatacataaaaaagagagcaaaaa

SEQ ID NO: 21956 - DNA, 4608 bp, Oryza sativa
ttaactttttctttctgctttcattgttgcacctctctgattcaagcccatccttgtggtatgtcatgtgtgttgcagtgcctcgtgacatgtagagcctctgtaggcgtggaatgattgggaggtagcgagcaccttctgtggagtgcccttcttattctcagggagttctaacccttcaatataacgaggctcattacatgttatacatttccttttgttagcatgctccttatagtataacatgcaatcattcttacaaacatcaatcttttggacaggcatacctaaagcttcgacgactttcttgcatttgtaaaaactacctggcaaatttgcatctggaggcaacatttctttcataaccttgaccagctcatcaaagcaagctacagacatattatggtctgattttattgtcaacaaccgagagactgcagataattgagagtgttttccacacttctcccacaatggcttgtctgctgcatctaacatatcaaaaaatgaagctgcttcagcatttggaggctcttcaatattttgacaaaaattaggccctgcggcatccaacaccatctcatctatatgatctgactctccataggcattacctcctttattcatctcattgtcaatactgccttctggtgtctcactggtatcagctccactttcaccatgtctactccacacatggtaattttcagtaaatcctttattgcaaaggtgcatttgaactattcttttgtcatgcagctgcccattcttgcacttcgtacaagggcatctaacccttttctctgcctgaccttgtaactttgatacagcgtgtgacataaacctcttaactcctttcaaatactcatctgaaatgtatccattcactacccttttatacatccaactacggtcctcagccattaatctcacactaaacaagctattctgacatgcaaataatggctagccctacacttgaaattatatggtaaggatgcatattttgaaagattatgtaaaggaagtttatcaaaataagaagaggaaagattagatgtagactaatagcaaatcttcttttaaatacaaaaaataattgctcccagataaatcattattagtgataacttgaacatattaagtagtacatatttctctataatttgtttactctgtctacacttcaatacaccaaaagaataaacaacatgtgtcttagcttgtttaatttactgaatttttgcacacatgccaatggtttgctatcagattgcacaattattaacactcaaattccatcgtactttcagaagacctgaattttctaaccacttaaagcaatcctgagattgcacaattattaacattcaaattccaccgtactttcaggagacctgaattttctaaccacttaaaacaatcctgagatcagtaccaatcataaattaaactatgttaataattcctacctgtatattctaatccgaagaactgatgatagaatatatatctactagagatactcgtaatttttgggcaataaaaatatctagtagcgagcaactaaagaattagaaacacaagcatcgtcaggaacttgagtcatacatgtgcaagttagagagcaaattttagtgtgtattacttaaaccataaacaaattaatccaatatccaacatcctggagcaaggagagtagaagaaaccaaaaggatgatgaacattctttcaaaatcattagttgagatgctcatgggatacaatcacaaaagatgaaaatcacaggacatgacaaaattcttacaggggaattccatcgagcagctggtaggcacacattaatcaagatgttacctgaggaggaaggatcggggcacggcagagcggcacactccgacgaggtaggagtgctgggcctgggtgtcaggcaccgggctacaggaggtgccgcacctgatggctcggagtgcgacgggggtgccaacctgcgtcgaggcaagcgcgcggcaggggattgttagcgatcatgcgaggaagaaaacaaatgaagaaaattgggtgctacaaactcacggaggggcaaataaatctctccaatcagatgaggaaatcacaattagaccggcaaacatggggagtgggagagatgggataatgggggtcgatgattttggggggaatgccagaaaatcgcgggaaggaaaaagatggattgggacttgggggtttttttcatgagagctagagagcccttctttttctttttttttttgagttgacggggtttttctagagggctggcaggttttttttttaagtacgggaaaacatcctttttttcagggagtgggatgtggctgggtcaaaacaaactccagatattccctcattaaaaaactaactcaggataaaatattgcatcaaaaatttatacatggtaatattatttataaaatatatgaaatctcgtgttttctattatacaaaaattatgtaattattttcaaagttacatgagcataagagtaaaatataccgtctttaaatatagattttgcatcctttatttctagataatcaatctagaatttttttaattttttcaatttttataacgatcgttgctacgggagtagagccaccagtaataacataagtgtggtaggcgtgtacaataataccttcgattaagtggcggtcatggagcttgacgacgaagatagaacagtggcaacgctactcaacctgtcaaccatggagacagtgtatataagacctcggcaacgacaacagtggttataataatgtattaattagagggttggcgtgatggcgacaacaagtagtagctactagagtgttaggtagtagtgacaagcatgctagcatgggaaaatatccctttagagtagaggtgccaatgtactgataaatttttatacggcagatacaacggtgggcgccttctctcgtttgcatgacacttgttacatatggctaaaaaaatatatcatggcgttacaccattttattaatgtaatatttaaataaaacctatactaaaatataaccttagatgtgactcggtatctctactattaaaatattcgtgttattaaaagatcatgataattaatttatgtttttctattaatggaagacaaacagttatgcatgtcacacgcacatgccctgtttttatcatttgcaggcccttccgaatagttcatttatatttttttttatagtactggtaatgaggtcgcgtggtcgacattttatattaacacgtttcatacaatttttatcggttagctatactttaattagcaaactaaaacttagtaaatgtaaaagaagtttttgacagtacaggcacaatttcatttgcaattctttaattttgttttttatttagctatttatagagtttttttcacagaaatcaattaaatatatttttatttttagataatgtttaatctatttataaataaaaacaagctcacaagatccatgcatggctagcgtaatactagcaattaactaactgtataatttatattatgtaatttatattacaaagagatgctttatttcatacaatcccaaggaccatcgcatatgccttggggatgacgacattctacaagggtacgttcatgacccttgcaaataaacattattagcaaggaactagagtgatggtagcagataaggatcttctgcaaggctatactattgcaaggggaaatagtcttgacaataattacatttcttatagtggtagtggatatttttagtgtatcaatgatgtattaggcttattttattggtacatatgcaattcactcaacttttaaaacgtaataagtaatagtgagaatagtataatttatatgttactcgttcaaagtgttttttttaattttagagatattcttatcatttaatatcatttgaatagaaatggtgagatacgacttttttatcattgtttttataaaacaatcaataagacgcccgtgcatctgcgcaggctttgttcctagttgatatcaataattcaatattttatgacaacaaagaaaaagaagaaaattacacatcaaattattggtcgaataaaaggggatccacttgggtaatctggtccaacacgcaggacactatttacatgattaaaagggctataagatgtgattgttctaaatgtgatatcttttaacaacaaagataaaatgtggatacatagctgctaattgtatatgctgataacaatgaccatagtcttaaaaagtaactgtgaaaacatgaagcaggtaactattattcagaaaacgtgttcacattaatcacattatgtgtgaaatggaagaattatacagacaacattctgtgatctgcagtctaaataccatggagattttggcatgcacctttttgagaagctggtgatggtcaaatccgagagtaactgatccctcaatcctgttgatagtttgatatggtacgcaaacagagcaacagtagaagctgttacatttatatgctttggcatttatatgaaacttggtcataaacaaactcaaatcaaactatgat

SEQ ID NO: 21957 - DNA, 617 bp, Oryza sativa
aggatcggccccgccgaaaggtgcagcggcccgtctacttcgttagtgaggccctccgggacgccaagacccgataccctcaggcccagaagatgctttacgctattctgatggcttcgaggaagttgcgccattatttccaggcgcatcgggtcacagtggttacgtcttaccccctcggtcaaatcttgcataaccgagagggtactggacgggtggtgaaatgggcaatcgaactttctgagttcgatttgcactttgaaccacgccacgcgatcaagagccaggccctcgccgattttgtggcagagtggaccccagctcccgagcccgtctcgatccccgagccagcacggacccctcgcagctgcctcacaccgcctactgggtgatgcagttcgacggctccctgtctcttcagggtgccggtgcgggggtcacgttgacctctccgagcggagacgtcctcagatacttggtccgcctcgactttcgagcgaccaataatatggcagaatacgagggactccttgccggactaagagtggcagctggactggggatccaccgcctcctggtgttaggcgactcccagctggtcgttaaccaagtctgta

SEQ ID NO: 21958 - DNA, 619 bp, Oryza sativa
tatagggcgaattcgagctcggtacccgtcatagattggctggatctacggttcagtcacagaggatatcctgactgggtttaagatgcactgccgtggctggcgatccatctactgcatgccgataagacccgcgttcaagggatcagcgccaatcaacctttctgatcgtctccaccaggttctccggtgggctctcggttccgttgagatcttcctcagccggcactgcccactctggtacggctacggtggtggtcgtctgaaatggctccagagattgtcctacatcaacaccatcgtctacccgttcacctctcttcctcttattgcatactgttgcctgcccgccatttgcctgctcacaggcaaattcatcattcccacggtaagatgcctgtctctatacatgtttttggtttgagttctgatgttgaacattgcttagtgacattattcatttgtcgttcttaatttcagctctccaacgctgcaaccatatggtttcttggcctcttcatctccatcatcgtgacgagcgtcctggagctgcggtggagtggcatcggcatcgaggactggtggcgcaacgagcagttctgggtcatcggtggcgtct

SEQ ID NO: 21959 - DNA, 1418 bp, Oryza sativa
cagccagagagatctaagaatcgaagtgcatggagactgcataagtagtcagcatcctcactgactccggggcagtatgataagttgagatattctagtctcttgagatccccaagtgttctgggcaagttccgaagtttctcacatctctgaaggttcaaatatgttagcttctgataagatccaatgaatgatggcagctcctcaaggtgtgattctgagaaatccaaagcctcaaggttttgtaagctactcatctggtttggtaatttacgaattcttaagccaaaaccagcaagatacctgagaagcttcaaatagccaatggatgctggcaattctagatcataacaacaggtaagatccaagatccgcagatgattcaatcttaagaatgcatctgcaagaagacagtttttgaatgatattgccctggccccggtgagaacatctttctgaagggttgagtgtcctgtgtgatttatcagcacagcgtaagtggaagagaccttttcagctgaagggccccttgatagctctctaccatcagaaattacaatgtcactaccagcaacatattttgcaaaagcatgcaccaagctattcacctggagtaatgtacgacgattggtaggactgattccagtggcctaaaaaacaaacatatcaatctcacaatttgctccaaaacaacatggttcaatttggactaaatgttgaaatgcttagcagtaagcactgacagagacaggcttctgcacaggaagctgcgtgtttgaatatcttccgcatttagctagcacatcaaaggtaattagtttaaacacccaaaaaaaatgtttctttctatgaaaaaaattagcaatatttgtttctcagcacattgagacaagtactaccaatttgcaatcacattaaaatatagtaacaaaatcatgatctgctatcatgtttaccatgtgaactgctatagtcatcaatcatcattagcaaactacagaagtatatataaaaacattcacatcattcatagtaaagactattactaaatgagcagagttagatagagtgatttactcgtagctacatgtttcagttacagaaggcccatagatgatgctgtaacgtcttatttttaaaggaaattagcacataatttacatgcagtgccttactttctgaccacacaccatgagcaaacataaaatgggaaaaacataaatgacaggataactaggataccatactgcatcagcaacatcgcaaagtttaactatgttaatgcttactaaatgtcaatttattggaaatataaatctccccttttttgtacagaataggtaatgtatttcacgaggggtctctgcctctgtaaatttactccaatgtaattagtattctgcctgacagaaggggtt

SEQ ID NO: 21960 - DNA, 722 bp, Oryza sativa
tcctgcagcccaggaagtctgagaggatggtggttcagatacagagtgaatgagccaaacatgtacaagatgatggctttttgcaggagcaacaaatgttgatctctgaaccattgtatattgctgatgtaaccatttggtctgggagtcctggtgtggcagctcacatttatttttatagctcaagtgaatcatgacatagtttcatctttttctttttttattgtcaaatttcactactatgactgtatttagttgtctctgtattgtcaagtgacctcaagctttgttgggtgatgcctccttgccttaaaccggatacaggccttgatgatactgcaatatttttgttttaatgattaatcaatgtgattttcgcgtaattgatgaggttactgcaatatttttttactgaagtgaatttcatcatgttgcacttttcacttatacaaaaatatcggtttgcaatatttttttgctattctaagctgccaacctgaaaatcaattttgctattctaaactcaatggacagcgtgcaacgttgaagcaggaaagcaccagtactccttctgttgttgctgttgcctattgctgccttgacacgggatttaagcaggcgcacaaagccaaaaccgaacaaacgttttgaagacagggattaggaaaatcaagggaattcatcccacagggattaagtgacatgggagggatccactcaat

SEQ ID NO: 21961 - DNA, 649 bp, Oryza sativa
atggatggatcagcaggcagggaggccaggccgagcaggcccaagacaagacgacggcccacggcattggcaccatgcgcgggcaagcgcgggagatcgcgcgaggcacgcgcgcgcagtggacacgcggcggcaaggaattcggcgcgtgcgggcgtggggtccacgctgtttcaagtggctcggaggcgggagttgtactgggacccacgcgcgatttcgcgagcatgcgcgggagcagctcggcgggacgcgtggaggctttggactggatgcgcgcaggtgagcgtgggatccacgcggtggagcgcgcgctctcgcatgctgaggcgtgacgtggcggctcgtcactggtttggagagggagcacgcggatcagtgcggcgtggagagtttggatcaacgacgtggcaagcatccaggaggcttccttcggttctaaggaagaatgggtggaccagatccattctgagttagggtttcgccctaggggtatttgagacaatgtcttatgggtcttagcctataaatagagagatggatgcaagggtggaggttgcttctttggaatccttttgagatgctcggtgagagagtttcagtttgagtttggagtgtgtttgcccgagaggctttcggggctgcagga

SEQ ID NO: 21962 - DNA, 547 bp, Oryza sativa
cacgacgcaggcgcgctcttgcagcgccatggcgcgcgcctcaagggcctcttcacgctggcgggacgccgattcggtctccgacgcccgctgttctcgggcagcagcagcatcaagcaccccctgggcggcggcgagcttcttacttagctccgcctcccagctcccatattgaaggcggagggtgtcctgcgcctcgttcatcacggaggtggcaatgagggcagccccccgctcctccttcactttcttggagatctccgccagcaccttcttacgggtttcaagctccgagacgtgccggcggtgagccttacagcccacctgcaccatggactgcaccgagcgtcgaccctcttcgacacgcgcccacacggtgtcgagctacggccgctctgactgcaagacctccacctgggcgcttaacccatccaacaccgtggtgtttgcggcagccaaggcctgcagaaggggctctgcgttcaatggggcgatagaaggcgtggggcaaagccgccttggaaaggatgccacgcgggtcgggccg

SEQ ID NO: 21963 - DNA, 700 bp, Oryza sativa
gtgctcatttctcaattcattgatagatttgataccaaggtgatgaacttgcttgttaatataatggacaaatcagacactttagatggctccaatactgctatagctgctattgattctggctctgtagtgaatgatgatcctcctgctcctgctactcatgctgctggtccttacaatgttgttgctcctggtgctgtcggtgcttataatgttgatgctcctagtgttgttgctcatggtggtattgattgggatgaactaaacatccagccattgacagttgaaggtggatcctgtcatgttacatttgatgaggatgagatgtttgacatgctgggactaggtggttctgatattggagcagatgaggcaacaactagtcagtttccaccagttgacctagagcaaggaatgacagaagcagctattcctgtgaatgatgatgtgggtgttgagccaaacagggactgggacagagatgacccaatcatgaatgtagacactatttacccaaaatggctgtcaggcaatatgccatcaatgaagaatttgagcttggcactgagaagtctgaccctaccaggtttaggggattctgtacagcagatggttgtcaatggaggattgttggcagaactcaacatgataagactgttagggtataatccctgttgttaatttttgggtaactacttgt

SEQ ID NO: 21964 - DNA, 720 bp, Oryza sativa
agggcgaattcgagctcggtacccaacacaggagatgagtctgctgttcgagctgctattgaagagttctcaactgatgttcaacctgatgaagatagtattttaaacaagttaagaactgatgtccttttccaaatgtaacttgctgcgcatgcatttattattctattattgaaataaattgacactggaatgacaatcttacttcgataggctcccaactatcaacaaatgtttctctgctgagactatcgaggacatcataaaagcttttgtaaggattctttcaattacttgcttgaaaagtgttgagttcctcagactatagaatattcatcttggtttcatgctacaaaataatctaaacaacaataagtggacagtattcatcttatgcccaaaatatatcatcgtcaaccaatagcttctggaaaaactagacacagttacacgcaacaatggtacatcatccggcagcaagtacttaccgtgcaggtggaactcgagcgtcttgttggggacgtactcgtagacgagaaggcgctgctcgccgtagatgcagtagccgacgagggagacgaggttcttgtggtgcacgcggctgatgatctccacctcggcctggaactcgcgctcgccctgcccgctgccggaccgcagcttcttgatggccacctcttgcccgcgcaccgtccccttgtacacctgcccgaacccgcc

SEQ ID NO: 21965 - DNA, 515 bp, Oryza sativa
ggacggtgcgcgggcaagagttggccatcaagaagctgcggtccgccaggggcaagggcgagcgcgagttccaggccgaggtggagatcatcagccgcgtgcaccacaagaacctcgtctccctcgtcggctactgcatctacggcgagcagcgccttctcgtctacgagtacgtccccaacaagacgctcgagttccacctgcacggtaagtacttgctgccggatgatgtaccattgttgcgtgtaatgctggggcttgcttgggctgacacgagtggttggtttctgcaggtagcggccggccggcgctggactggccgcggcggtggaagatcgcggtcggctcggccaagggcctcgcgtatctgcacgaggactgtgagttccaccttgtgtttcctccgaaatctaaggtggtgtttgggaatctctaacaaaaatataagtccctatgagagagacttgtgcttttgttaaaaggattaaagtttagtcctttcttcctaaacacca

SEQ ID NO: 21966 - DNA, 13260 bp, Oryza sativa
ttggcatcttcaggctttgcacaataaagacaatatttttagcatgtccccctactgatcagattatcatggcacactttagctcattgaaagaatatgctgaccattaggccattaatcttgcccgcgaattaacctgataactaacttaacaacctctgcgcgcccccactactgtaatggccacgccaccatcgccacagatcaatctggcatcgacacaggtcaggaagcatctgacattagtgcaccatcaccgtgtctgtgtcttcaacacggcaacacctgacaactgacgagaccaaaggtaatattacctccgtcccaaaataagtacagccgtagatatccatgtccaacatttaaccgtccgtcttatttgaaaaatttgtgaaaaatttaaaaatatttagtcacacaaaaagtactattcatgttttatcatctactagcaataaaaatactaatcataaaaaaatttcaaataagacgaacagtcaaacgttgaatatgaatagtgtaaaactacacttattttaggatggagggattactaagcagtatcatcatcttctctaaagccgttcctgttccatgtataagtatgaatccacttttagttcagagcaacagtacgaggtctcctccgttataaatacgcggcgacgccgcggcgactctgcagaattcagcaacctgacctctcccgttctcctgcagctagcctccggccagtctccagcgcgtcgccctggaccgaaatattatgccacgttcttctcgtatgaatctgtggccgcattgcttcccgtgtttcgacgatggcgacagatcaggcaacaggttcagtactgtatgcaacttccccgatgatctcctcccgtcgctcggtgctaccgctcaccagcctcccaagctcaggaaatacctcgtctcgccttatgacccgcgttacaagtacgcgtgcctctgcttccgtatatgcctccaagactgttgttgttcatggatatcgatcgatcaagaactgaaatgtacgttttgatgctccttgttaatttttacagggtctgggaaacatttctgatcatcctggtggtgtactcggcgtggatctgcccgctggagttcgcattcctgaggtacctgcccagcgcgccttttgtcgtggacgatgtcgtcaacgggtttttcgccgtcgacatcatgctcactttcttcgtcccgttcgtggacaagaagtcctacctcctcgttaacgatccgaagaaaatagcagtcaggtacgtactagctagttagttcagaacttgaacagctagttaatttccggagatcaggcagacagacaacatggcacagcttaattttcttgtgctcactgcattcaggtacctgtcgtcttggttcgtcttcgatgtatgctcgactgttccattccactccatcagcctgctgttcaacgagcacgggcatgaccttggcttcaagtttctcaatgttctcaggctctggcggttgcgtcgagtcagttcgatgtttgcgaggtaaacgccacacgtgccctaccaatccactgtaaaatggttatacgctagccagtagtcagcatgtgacatatatatactatactttgatacaccatatataggcttgagaaggacatccggttcaactacgcggtgatacgctgcacgaagctcatctcggtacgtccatgatacgatatcttttcctctgatcagtacgttctattcctctgatcagtacgttctactccaccaacgagcaaaacgaaacttctatctgcatggcaacaccaggtcaccctcttcgcgatacactgcgccgggtgcatcaactaccttatcgccgacaggtacccggacccgaggaggacatggatcggcgccgtgatgcccaacttcagggaggacgggctgtggatccggtacgtgacggccatgtactggtccatcacgacgctgaccaccacgggctacggcgacctgcacgccgagaacgccagggagatgctgttcggcatctgctacatgctcttcaacctctggctcaccgcctacctcatcggcaacatgaccaacctcgtcgtccacagcaccagccgcacccgagactttgtacgtactgtccgatcctaccaaagcttctgtgcttttgttctctgtattgtggtttgacgatcgaaatggcttgtgcgttatttgcagagggatgtggttcaggccgcctcagaattcgcggcgaggaaccagctgccgcagcaaatagaggagcagatgctgaaccacatatgcctccggtacaagaccgatggcctcaagcagcaggagacgctagacgtcctcccgaaggcgatgcgatccagcatttctcactacctcttcttccgggttgttcaaggagcctacctgttcaagggagtctcctcaaggttcatccagcagttggtgagaaacgaggctgaattttgcataaaaaattgcgtaatggaagaccctcattaacaatttggttgtatatatgcaggtaacagagatgcaagcagagtacttcgccccaaaggaagacatcatactgcagaatgacagcccatcggacttgtatcttcttgtatccggagcagtagtacgtaaaatctagtactttaatactacctatatatgtatgatcagtgcacaaatcgtaacggaaaatgaatttctacttacaggacattctggtattcctagatggaacagaacaggtaatggtatctcctgagttgctgtttctgaaaagacagataacgggtttccggacaaagatcagacgcacttgaaaaaatgacacctggggccgtttcatgtttcaggtttacaggagagcagctgagggagaactgctaggggagataggtgtactgtgcaacaagccacagtcgttcactttccggacgacaaaactatctcagattctgaggatcagtaggaccaagctgttgggtatcatccaggagaacagagaagacggcgacatcatcagaagcaaccttcagcaagtgaacgtataagtgggctagcttcgctgggcgtgctcaacgcaagacagatgcctctgttggaaaatagcatttaagttttgagcggatagcatctaatagtttctgtacaaaaaactaaaaatggaggaaagatcatgcggtggaactggtgaaaactgaaaagattatctgtactagaacatcatgcagtgtaactggtgaaaaaacgatctgtgttcggacagatcttggacgttgagacaatatcacctgcctgtcaaagaaaactactactacctttaccaatcatttagggttcacgcagtaaataatgtgacttcaaatctgtgtaagcttgtaacaaacgagatagctgtaatgtcccggtaaagaatggctcgaagaaattgagtatatatttggttccttctttcggaccgggaagattttatagaatgggcctttttagcacaacaaagttgtattggtttttgcaataagttcacctacagtccctcaactttacctcaagtctgtatgacatccctattccccaataccagaaatgttttacccctcatgtttaaaaccatgcaaaataggtcctatagcagtatatataggtggtttcgctgacgcggcatcctagtcaacaatatggatccacatgtaagtgagatgaataaaaacgtgggggtcagcatcccttctttcttctcttttctcttctctttcttctccttgccgcagagcgtggtgcggcagcgggcggcgacaagcggctggagtaggtaggcgcagcggtggcgccgggcggagcggagcagcggcggcggcgggcgagcgccaggaggtcgctggcagcagagggggagcgacagcgagcgagcgcggtagcgggcgacttaaagcaagcagtcggagagaggagccagccgagcagagtgggggcggcggtgggcgagctctcgcatgaggctgtcaaggttgatgtcgaagtcgtccgatgccacagccgcggtgccgccgcttctgcttgcaccgggacagggcgtaggaggtagatgaagatggcccgaggaggtgatgaggtggttccggcagagagcaccaggctattgggcaaccgtcaactggtccggaggtcagtgaggaaggcgggaccggccatgcaggccatggagcgggcctgcgacggagtgggcggtggatcggaggggacccggcggcagtccggcgtggtggggagctcatccgccgcgagcggcatagagcaccataccgggctccagcggtagtgcgcgcgacatccttgacggggaggtgggagacgaccttgctgaggagctcgtcagggagggtgctgatgcggtcgacgacgtcgtgcggggtaagtgcgcagaggcgtgtggtagcggagacgggcgggctggggagggtgtagtggatgtaggagagcacgcgtgccacggtcccatacacatcatctgggtcgtccccgcgccgccggaactcggccgccattgcgcggcccatgggtacaagtagcacacgggtgtccatgggccgtcgctccgcttgctgccctctttctgcttcgctcgccccctgctgccgcactagcccgtagtggcttcaccctctgccaccggtggcctcgctcgctgaagaagataatagaagagaagagtagagagaaaagaggagaagagatggtagacctcacttacatgtgggccctatatatatatatatatatattgctgactaggacgcttcatcagcttaatgagagatccatactgctataggacctaacttgcacggttttatatagtttaggggtgaagaattcttgtattggggattatggatgtcatacaagctggacgtaaagtggagggatggccggtgaacttatttcttgatttttattatcatgtgggcctaaatacaagggctgccggatttatcttgggccaagctctttacgcacaccaccggggcctaactagtctaagatcctagtatgggctttttctcaaaagaaaaggggagtaggcccagagataaattaaacgactcagactactctttctccccgtttttccgccttcgctccgctccactgtcccaaaagggctaaaacccttctaaaaaaaataaaaagcccaaaaccgatcgagtacgtccacaaacacaattcggatggaatatcccgaaaatttggcgaagaaataccattggtggtctacgagaaactcagttctaccacaccaagccctcttcactaagggctgtgtttagttcagcgtaaagtttagattttggttgaaattggagttgatgtgactgaaaaattgtgtgtatataacatgttaatgtgatagaaaaggactgaagcttggatccgaactttggatctaaacacagcctaacacgtgtactacgagaaacacactgcgaaccgtcgcatcgctggaggacgtttgaaaatcgaaaccgaagcccggccacggcactggaccacggaaactggaagccactcgagcgcacccaccactccgtccgcacgccaccacttcgtccgcacgccccctcctcctcggctgcgcggcaacgagtccaacgagtcccccattggattccctccgccggcacgcatgacgcctccagcacaaccaacggctacctgctgactgactgactgactcctgaccgcctttaacttttaacggctactccactcaaagcggcccgccaacgggccccgctgggccccgcccgcccggtcaccggggattcgaacgtttcgccctccctgcgaccaccaacggctacatcccacctataaattccccctcaccacgccgcccatttcccgcactgcaattcccacacttgcacgcacacacgaacaccacagagagagtccagcggcgcccggcgagaagcttcagccaagtcacagcggcctcggcttcttgcagctcgctgctcttccctctcttgatcgtgtctcgtgccacacatcctcgtttcgtcatctccatggcggcgtcgaccaaggccttggctctcctcttcgcggtgctcgtcgcgctcgtggcggcgacggcggccgtgagagtgctggaggaggaggccgtcgagctgggcggcctcgcgcctgctcccgcgccggccaacgcggcgggcgccgtcgcgccgggggcgtgggccgtggccgcggtcgtctcgctcctggccttcctcgcgcattgagatgagattcgacccctgagagggcgcagcgggtagtttgcggaatctgttgggacgggaatcctgtggtttggatttccgttgcagcggtagcatttggtgtttatctgaggagattattgctgtacgtttctatagttattttaggcgtgtttgttctagtccgttatggaggtgttgtgtactgccgatctctcttttgcctgtataagagaggaatatggttttgaataatacaattcatttactattcttttataagctctgtcctgtgcactctcagaaaaactgctcataaagggccaaaaatactcggaacacgttggtactacactcggaaaaaggaataagttcatttagtgaccctcaaaagtgattgaaatctaatccgtaaccttaaactacaaaaccggatatctcgactcccaaactcttaaaacccaccaatttgactcccttggtggttttggaggacggttttgctgacgtagcgcctacgtggcggtattgaccgggtctcttttacacgtggcgttgacgtgacgtttaggtggcatttagaattaaaaatatgtgtgggacccatttgtcattgacatgcaaaagaatttgtgggacccacgtgtcccttctctctctcccctccctcctgttccttttcctcctcgccgctccctctctctctctcgagtggcagaggcgtgggcgtggcgcgacggcctgcgagcggcggaggcgcgggagtggcggcggcaggcactggagcggcgacggtggaggcatcagtgcgccagctaggcggtggcaagcaacagccgtcatcggtgacccgaccaagccgcaccaagcaggatccgcggcaagcaggaagcggtgagcagcggaagccgacggctgttgcttggtgccccttcctcgacgtcggcgagcaggaggcggcaagcaagcccagcggcgtcgcccttgctggaccgcagaaatggtttcttctcaattctaagcttgctctgctacttcattggatccggcggccatctacacgcagcggtaggccaatagctgtcatcttgccagatatttctgtcccacaaatacactgaatcttgctttgctgcaaatgggaggttttggtagatgcatagcatttggggatctctttcctttgttatctttaatttccttttctcttttttatgcatgcgaatgatttgtccatgtaaaggtgaggagtagattttggttttggatgaggggtgatgcaactatgctaagattagttattttttctgtaaatgcgcagagttagcagtaactatttgatgttgatacggatggtgatgaagcggaggaggtggagaaggaggtcgcgtgacggcggacggcggcggtgacggtggaggacatcgtcgtcatcgaccccgccgcatgtgcctccccccgtcctcctgctactcgcaggccgccgcgccatgcccgcgcctccgccgctcaccgccgtctctgcccgccgccgctccggccctcgccgccgtcgccgcgagagagagaagggacacgtgggtcccacaaattcttttgcgtgtcaatgacaaatgagtcccacgcatatttttaattctaaatgccacctaaatgccatgtcaacgccacgtgtaaaggagaaccggtcaataccgcaacgtaggcgccacgtcagcaaaaccgctctccaaaaccactaagggagtcaaattacaccggttttaagagtttgggggtcgagatatccgattttgtggtttagggccacggattagatttcgatcacttttgagggtcactaagtgaacttattccctcggaaaaaacattgctcactacatgaggacgatcaggatctgtcaatttgatccgttttctcttgttcttttagaggaggcccattaagctctccaacggacccaactggcccgtggcacatacggcccactttctgttcggtttcattcagaagaaagcccacagactggcccgtttaattatgaaaacacatgcctcggcccgagtgtagcgtgtatggctgtacgcatcatatctacagggagagatgatcgccaatttgcgatcgcccatcagatcaaatgcaccttttgttgaacgcgcttttgttctggatctctttaggataagatggtggtgtcccgtccccctcccccaggccccagctattccagcttccgatcaagccgcccgccttacctctcctggccgtcccaccccaccatccaaagctagatagcaaccacacgtgcccgcgtcgatgcggcgcaacacctgtgcatgcacgcattggcgcgcgcgatcgaaatcgtgatgcgcctcaagctagcagtaaaccacctcccccgtgcatctcctgactcctgttcatatatccggccgctgttttcccccagtactgttgccggtcgctgacgagacaccccatgtgtacgacgatctcgccctgtgctcccccactgctgcttagttcggtcgttcggtttcggtcgacacggtctagttatttcgtctatctgtgacgaatcgcgcgcatacgtacgtactggagggccgatcggatcgaggactgccactttgccaagttgcgatgtttttggtttggcaacgggcgggcagctgcaactttcaggagatgcacaccagctgttccaacgaatcgggccctgttgatttctccactcgtccacatgtttttttacacgtgagcgaactctatctcatattcctggacacctatattatattagcatatccatacgcatttgacgcatggacgcgtagtgataatcaccagaaagttcagatcaggttactgtgttatactgtactatgctatatatgtatgctttgctagctactagtctcattcagattcagctgctagctgcttgctagctagtgtactcgttcagattcatgcattggtaatcaattaccacaatcgcatgcatatatgccttgatgaagtgtcgtgcgctcactcccgggctcccggcccggccgctcatgcagatacactttaattgcttggctcgtgttcttccttcctggcgcaccaataatttgcagcaagccttttcagccgcatgcaatgcactactcaacgggatcacgggattattgtaacgaaagttttggcacgcatacactgtttgtcaggctagctaaatgttataacagttggcctatatatgtcaccactagctagctagcacgcagagatcacaaatggatttaatcatcgcacccaacaagacggcaacaggtaggcagcaaaacgcggatagccatcgctaacatctccggggattctttagacctcggccactaacttatttactgatgcttccagcagcagtgaagcctaacagtgtcctgataacgggagcacgatcgatcgcaatggcgaattattgatgctagcaggggcggatcaagatcgatgatgatatattataggagtagtatatactatactccctaacagatatgatgggatcgccgaatgactttggttatcatgcctcgagcctatctctgacggtactggtcgccgtaaacatcactggcgattcgagggaggaaaggagtttagctggtgaccacagggttgacggccacttctccttcagagttcagacaagactcccgtgcgatgttaaccggaggaagttgcattgcccggcccgtaccgtgtctgaaccaatgaagcgtagcgtagcgctcgcactccatcagaatgagtaacgactaatcttatcaagaatcagaaacactgatgagcagttgcacgcgcactgatcagagcttcagacaacaggtcgacacaatgtctacaaatatgcatgccacagcgatcaagaacacatcctagatgtcttgaggttacgtctcatgagagatcagagtagagcgtaattaatcgttgaaatctcggtcgttttcagatgtcacacctgagaagctcatgtatctaacgggaatctgaaccactgttcaggtgtcttctccgaggagctcgggacgtgcatgcgaggaggaaaaaacggcactaatcttaaaagctggatggagcaggtagattagatctcgcttaatgattatctctctatcttctggatgatctactgaataatcagcagctcctcacaccacacaattatgaaaactatcaccgtcagctatagcttgtcatgtcagaataaacatcactaccgtgccttttgcaatcagcttgtggtctagtgcttggagaaatatccagttccctgtataccatcaagtcatcaaaccatcagaatcaggactcctatgtcacccagtgcgtcagtcatagtgattagaccaaagtagtccacttgtacgttctggtagtcgtagtacaaaaaggaatacacgatatatacattaattattaaaaggtagcccgcgcaaatacacgggcatgcgtcgtacgctaagtttgagacactaaaagcgatatattaaccggagaacatctaccccaatttctccataaattgtttttgttagcattagttacttttataatttttaacctattagctttatattatatcatatttaaataatattagttatttataatcttcttcatcatttgaaaagaaggtagacttattttcttttgaaaatatttcaatgaaagtaaaagtaagtgtaaagcaaaagaagtgtgtttttatttttttattacacatatattatcatggtttattagaggatgaatttggtgggacataaagctccactaaattttatatagcctaatataatcgatatagtttgagagacaacccatctataaacatttcatgtagagtgggtaagaggttctacgcaatctaacgtgaatacaattgcacaataatatttttgaaatgtgatgtaccatgaatacgcgcttgtttttcttatataagatagatctaatgattaaaaataatggtttcactggtttaaaaggcataggagtattctaaaagtatagcttaaaaatcatggttgttttaatatccaacattattttgaattgaacatagcttaactggttaggttccttgtggtggaaattgcccactcgtgttcaagtcccagacttctttcagtggtagacaacgtacccatcgacagtgaggcactcatggtgactttgtcaatctcaaaatatgtcggcccaatctctcagaggtactcatagggggtaaagtgtgcatgtgtgcgttcgtaggggtgagtgtgcgtgtgttgtgagcgcactttgtctctcaagaaataatccaacattattgataagtttattagttattgataagtttattagggacgggtggacgatgcgtagtatgtacatgctcgggagatttttttttctcaatccggtggatagtagtacgtattgtacatgtgagaatgagatgtattttaaataaatctaatctaatgatttaaaaatagtgggtctgccgaattaactgaaaatcgagggttggatttttttttcttttttatcaaaatttgtaaggttctatctaatttattatagtgccacgtggcagcttaagggcattggtaggagtctcacgtggtggcttgagagttttctagaaagtttaatggatttttcatatataatatataggtacacaggacaaatacacatgcagcttttgcttgcttgttccgaagttgaacattaccgttatattatcatgttatacagaaagaaaattagctttatctttacttccatataatttctatttccttatcaagtagaatttggtacataataggtcatttctatcttaagctctgaatgatatataggtggacaaacagctaggatctgactgattattttttaagtaaatcttatttagttatgaatgttttgtgatgcatcaaattatggtataatctatattttgtttttctcataattcagaatttttagaactttttgaagttcataaatctgttttagttatgcatgccggtgaagtgatatatgatgaaatagtatataatgtcactttcttttaataattgttcatatatgtttgaataacatgtaaagggtctcaacaaaacttaaatgaatataattttacaagttaaaatatagtcaacatgtgtcttaaattctaattgtgattttaatcataaataacacaattgtacaaatagataaaaaattgaacgtataattttaaagttaaaaagttagtattatttaaaatttatttttgcaaataatatgtatttagaagtatgcttatttaaaatttattgttgcaaaagctttcatagagagagaatggaaggaaaaaaacgtagaggatttcctaaaagaaaacggagggaaggatggacgtcttttttttttaaggatgagaaaaattaaatctaatctaatggcttgaagtgttatgtccactaattttaataaaaaaattaaggttagatgtttattttttaggtatataatttaggtgttacgaatgttaaaatttttttaatcgaattccccctgttagctaatacaaggaaaaaggaattatacatagaggggagggagagagaggggcatacgtggggagagggcgaacgtaacgactgaggagagaggtggggaaggtacgtggtctttctttccatttctttatttatatgagattaaatctgatggttaaaataattagcctatcaatttaagtgaaagtggatgttagatcttcttttctcgggatttatagttttttttaatttattagagtgccacgtgatgacttaggagcgtttgaagatgtcacatgacagtttaggagcgtttgtagaaagtataatagacttttatatttaattactaatattaatttcggttttat

SEQ ID NO: 21967 - DNA, 12109 bp, Oryza sativa
  unsure (1)..(12109): unsure at all n locations
ccttctccttagccatgcttggcttgaactgtcagcaaattaaagttagcacatctatatatcattatcagtaccataaccaattattttaggagccaaacaaattctacatgtaggtgttatccaacttgcccagacagactattgaaatgaccaattttattttcaaaagaaaaactgaacaaagtaacttggagcaatgattgaccaatgaccagcagaaatagtgcaagacaagtggatacagaaacttcaaacaattggtcagcaatgagattatcggtttaatcattgcacaaaagcacgaataatactgaagtgccataacataaagttaattatgttagttgtgattgagaacatacgagcatatgatttatcatggcaacagaaggatcaagggtaaattagcatagtgagctttcagtgcttcctcattgatatacatgtacgtaagtacataaaatgccacatggagaactaactcaattcacgaatgtacactctggtcaccagttggcatcaccgctaccataaattatttacactggagaatccaatatttttggaagtatgttctttggtgttcaggttaagaaaatgcattaaagcaacaatcattgtgcattagaacaaaaacaaataaatagcttggcatatcaactagacaattaccttatcctccttgaaatgcaagtctaaccagttgcctttggaagctttgtaaagcgtcacaataatctttgtaggcttgactaaaaccttgcatttctcaggaacaatttctttgtgcagcttaggtatggcacatcggtagttcttgcccttcacatcatggaattttgtatctactgacataggcttaaaagtagtctccaccttatcttgctcaacaccctccaggaaaacataaatctgaagatggacaaagctagattattatctcaatgctcataaagtctccacatgcaaatgccacaggatttgattaataaacagcataaactttacatatgcacttatcatattttcgtcatcttcactagccctaaatgaagctaatgatccacaagatactgactgacatctcattaagtaaagcaggatacatcacattattgtgcttccaagtttaacaacagagaatttcctcctcatcaatcactattaatacatgaaaaccatgaaacacaatatggtcaagaattattatgcctacaaaatatcatattattgtacttgccagaaatatatttgatatacgacataaattgaatttaagctcaattgaacggagcataggaaaatagtttttgctaacatgaaattcttaaagtttttttaaaaaaatatataattgcaccttagcgttagcatgggcatattactagacactattaatatatgagagccatgaactaatgtctacgtaacacaaaatgaccaaaacaatcctaaggtcttgttcggttaatccctctttcaagaggattgaaggggatttgatggggaataattccagacctattgagatgtggaattaacctcgttcaaatccttccaatccctttctcctaggattaacgaaacaagccctaaaaatagaagaattacggaagtttgtatcactgagttttctcgtagttgataacatggcaagcatatgctcacctatatagtttaacaatcttattcaaggtacatataaacaaaacactaagaagttttacgttttttatttcacttcataaaatcaaatcatcattaaacatccaagatcgtcgatctcttctgtatttgcaattctgcatacagaatacttatatcgtttcactatcctctactcccttcgtcccaaaaaaaggcagaccctaagtttccgtaccaacgtttgactatccgtcttatatgaattttttttataattaatattttcattgttgttagatgataaaatatgattaatactttatgcgtgacttatattttttatgcgtgacttatatttttaattttgttcataattttttcgaaaaagacggacagccaagcgttggacacggaaaccaaggtttgtcttttttttgggacggagagagtactagtcaatgcaatcattctgctaattgattccacatatacaacaggaatccctaatcaaacattgcaacttctaacatatcaaatgtcccgcaaatttacaagagcttaaattccaacattaactagatcatactagcaatcacaaccatcgatccatcattgttaagcatatgccaaccatcgaacgagcaaaatgtttcattctccaaagcaacatacctttatcttctcagcatcctgatcccagctgaacgaccccaacgtcacgtagctcaccccagcagcagcagcaggtgccggtgccgccgccgccgccactacaggtggcgatcccgccgcgacggcctgcggtgcctgcggctcggtcgctttcgccagctatccgcacacaaagacaaacgtcaggaattccgaatccatacgcaccacccaagccccgaaacgaatcggcgaagaagatcgcgagagtgaaaaaaaaaagaaagaaaaaaggaaatgaaacaaccttggcatcgacggcgcggatctcgttggcgagggcggagaggacgcggggccgcttggcgaggccctccagccgccgcagctcctccaggtccagccgcagctcgtccgccgacatctctggaagcttagctttcctctctcctctctctctctctccgtcgcctctcgtgtctttccggtggtgggatatgaagggtttaggtcggaagtggaagggaggagaacgttctagaggaatggagatgcagcgacgattccgtggaggcgtcgagaacgaggggcgggccggcggcccgaaccgttgggcctcacccgagtcatgcccaggagagaagatattgagccttgaaaatccggcccatcaaattgaaactgttttgggggttatttttctcgcttttccaaattttcatggtccgttcaaaattcaaattcctgatctactactacttcaggaattttcagaggccgttcgctgtatggatggatggcatcttcacttgcttttaacggtgaccaattgcaaccactacaccaatagtcttccagtacgagtgtgtaggacgcgcaatgcacactcgcccctacatgtcgcgaacacgtaccggctcgctagctagcgacctagcgtgcaaattaatgttgggctccagcaagaagaagcaaaggaagatgcaaatgccatccatctgtacgtgccgtcgtggcgacgcagccgacccccaacaccgcgcgatccacagttcagcacttgaatgttgcggccttgcatgatatgcggagcaacagactaaagggtgtgtttggttcacggttaaggctggatgggatatgacgatccatattttgttggatatggcgatccagtttttttggttgagagaatatagtgatctagttttttgtttggttgtagggataaagatggatttggtaatccaattttttgtttgattggagggagtaggatgaatttgtaggtgtggtcacttctcacttgagatggtgagtataacccccatcaaattaatacacaatacaaatcataaaatttccacaaattttcacttctatctccattataaatacacatagaaaaaaaaagagggaaaaaagccggctagatctgggcctctcgggggctcgccgccgccgccgcctcctcctcagctttcttggccgcctccgcggcttcaccaacctgcttcttgagctcggcattgtcggccgtgagtatggcgacctccatgtccttcgccatcagcttggcctttagttccgcgacctccgggttctccttctcgccggagtcaatggccgttgcgtcaatgctctcctcttcgatcatcttctttgtctcttcctcctccagttccttctcagccaaagcggcctttatgccacagctcacctcctcgccgtcctcggcgccggccgcgctctggttctccttatcccccgattcggtccggacgacctcgaacacatccgtcgcgggggagtttatgctgctctcctcctcggccggcggctccgtcaccttcagctgctgctcagtcttcttgggggtttcgaccgcaaccggagatggggagcgcggagacgccgcggcggcggaagcggggctccccttggtgccaacgcgcttcttagcctcctcgagcgcgacctgcgcgtccttcttggcggcctcggcggtggcgagctgctcccgcagcttcttgagctcgtcctgcaccttgcccagcttcgtctccagctcagccacccgcgtccccgcgcgcttcttctgtaaacccaccaataaccgccaaaagcgattgagccgctgctccttggcctcaccgggaaaactgaaaacggaaggagaagcttcgcagcttattacttacctcatgcagcgggctgcgcggcgagtggcggtcggcgagcttggggctgctccggtcgacgactgtacggtggtgcgcgccattcgcatccgagcaggccgtcgtcttgaggtgcagcggcgcccgcggcgacgctcgctgcggcagctcggaccccctgcaatcatcaaccgcgtcagaaatgggaacacctcgacggggaaaccacctcgctatcgcaggtcacgcacctggatctcggcatgctccgccgcgagctagctaagccggcagccggcgctggttgctctgtccgtccgcccggccgcccctggtctctatcctctcgccgcgtccgtcggtcgcggcctacgatgagagcaaacgcggggaagactggctcatggaaaatgcaggcgaatgtggcgctgcgcaggtagcggcgaaaagaaaaggagccctcgtgcaagggaaaacggaattgtttgcgtattaataaatcgtggcaccgcctcccacgaggccaccgcaccggtgatttcaaatttgaacgcagctggaacgccttgggaacgccacgccacgcaccgcacacccagccgaacgttacgtgggtctctctggttttctggttggtggcgcaccggctgcacgggcgttaatgcgcggggtgacgcgcagagccggacctggaagagccgtgggacgacgcggggcgagcggtagcctgtgcgcggagccggcgccgtcgccggggttgtgagccacacccacatgggtcatggcgggtggccaacttgcaggcactgaccgtctcggcagagggcaggatgacgagccagccggcgttgatcggctcagggatcgctgccgctgctgctcgaaaagcgcatcgcttgtacgggtacgtgacagggagatgctttggctttgcgtgaccgtttggctgcttgccaagggggggggggggggngggggggacagtgcaagccaacanctcntggacaaacggggctgtaccccaaaaggacaagcgggggctggaggtcaaggacaaacaattgaaatcgtagtacagtctacaagagggggggggggggtttcattttcatcgtgacggggttaatacacgtagtagtagtaacagctacgacaagtgaggcgtactccacttttgaagcaatcaggcggcaatcacagggctctgatntgctttgcctttgcatgcaccattagtaagctcacatgcttcaggccctctccactacactcgctttcgaggtggtttgtactgaacttttgagctctactaactacagtagtttactgtgtgtgcttctgatgattgttgaatgtcccctatcaactttatctcacatgtagcttttctgcaatcctttctttttacaattctccaacgaatactactccctccggttccatattaattgatgttttggacaagattgagatcaaatttttataactttgaccatcaataactttaaaaatatttagtttaaagaaactagaacaacatatatagatttgtcttttatagcactataataaaagtaaacatgcatttatttatctattatataattaaagaaaaaaaaaaggagcatccacgttcgctgtcatggcctagaaattctcacattaatcggagaaaaagaaaaaaacaaagtccatatagaaatacaatttagaaatagctgaaattcggaattaaaaaataagaaatattagaagaggtgactagagtccatatagaaatacactttagaaatagctgaaattcggaattaaaaaataaggaatattagaagaggagactagagtccatatagaaatacaatttagaaatagctgaaattcggaattaaaaaacaaggaatattataagaggagactagagtccatatagaaatacaatttagaaatagctgaaacttggaattaaaaataaagaatattagaagtagagtatagagtccatatataaatacaattaggaaataaccgaaattcggaattaaaaataagaaatattagaagtagagtatagagtccatatagaaatacaattaagaaaaaatagaaatttggaattaaaaaataaggaatattagaagtatagtatagagttcatattggaatttaataccaactaaaattcgaaataaaaaggagcctccacgttcgctctcatggcctagaaattcttacattaatcagagaaaaagaaaaaacagagtccatacagaaatacaatttataaatagctaaaattcagaattaaaaaataaggaatattagaatatgagagtagagtagttattacacatagtagttttgaaaagttattgcaaaatttaaaattatgttgtcattgtaatatattttataataatataatgagaaaacatatatgctattatatgagagaaaatataattatgctagccgcgcaatctgcgcgagccaccatgctagttatatatattatagtagaaaaataaagtcaaacatatatcttgtaggccatatcattgtccaaaacgtcaattaaaatggaaccggagggagtacagttctagggaaaccgacaagaaagagaaaagggcaatgctagaattgccgcaggacaactagtaatggacacaaatgaaggaatttggatggctcaagccgcacaagcgaatgggcagcaattgggaaatcaatgtactaggccggaccgccattgctcgcaaggaaggttgtcgacgcgcaatcggcaataggtatggtatttatagactaataatctataaactggagtagtttttaagtaggctgcgagggaagttgaattgctagtgtagaaatatcgggcacgcacaaaaagtcgtcaagagaaatcagatgcccgaattgatcgatcgatgcggcagaagatagatctcgtggcaaagtcagatggagcagctgaacgaatgctacttcatacctagctaactgatgtgcgcgatgttaccagcatatctatagcttattagggcatgttaaatgcgtgaccctagagagagtatccctagcgatggccgtttgcttttccgtccacgtcgtccccccacgatggaacgcggctctctctgcgcctcgccaacttttttgtggggagtcgcagccaggcgccgcgttgagcgcatgtggagctcgtgggcatggcgtcgttcccccaagtttccccttgcaccctcgcctcactctcgctctctcctcagtcttgtcgcaccgcgcctccttctccgcttcgtgcgtccgccggcgctggggtcagaacgaggagctgcggggcggaggggttggcgccacgcccgacaccgttggcatcgccaccatttccatcccgatctagccgcgggagggccaaatccgctagcgttggcaccggatttgccgcccccggccggcgacggcgcgaggcggaggaggccggggaggatgacaacgatagagagaggcagagagagcggtggagctagtccgccgtcagtcaaccgccgttcgttgtcggccaccccgcgtgccgcttgccgtccgccaccgcacccggcaccggcgaggtggacggcaacgagctgcggggaagagagggggagatcgacgacgaacggtggcaggagagagagagagagggcgtggaagaggcagacggatctggtgaagcgggatctggtgaagcgcggttaggtggacggcgacgagcggcggtgggccaacgacagcgtggaggagagagggagaaatcggcggagtggaggagaggagacgagaagagacgaggagaggggaggaagaaaagaggagcgcgttggtgggcagggaggggtactttcggaattttgtacttggggctaccttggactagacacccattgtgggctgaagtatcttcgtcaaatggcctcagattttaaagaacccattaggagtatccttcattgggaggtgagtttcctatagagtgtcctcggttagtgaggacactttaatggtggttttgattgtacatgcccttatgcttactctgagctggtgttggaatacgtctcctatgcaaacgagcatatcttgtacatgataacacgaaggtcttccgagttttagaaactcagagggtgtttgagccatctctccaaaaaaaataagtccctagcctccctcccaaacactctcagatagcagtatctcgaaaggcaaacatgactatttttactgtaaaaggttccttttttctcaacagccaagactaaattccaacaggctgcaaaatatggatgctctagtaggagtaaataaaagatggacaacgtcatacacgtacatgatgtactgaagtcaagagatcgatccatatcttgtggccggctgcgacatcacctgctcacctacatgcgcatagatccaagcggaaataccataaatgatcacgacaggtcacacacctactccaacttggaacacatataacacgaagtatgggcgacgagatcgatcacacaaaggaaacaagacgcgcactgcacacatgaatgatcaggtcatcaggacatccgctcccccacacaactacgactgtgttttcagcgcaaagtttaaattttggttaaaattggagatgatgtgactgaaaaattgtgtgtgtatgacaggttgatgtgatgaaaaaggactatagtttagattcaaaatctaaacacagcctacacaagcgagtactaccatataccctggaccggaagtagagtaccaagaaaaaacaacgcgtatgtatgtgcaaggacgcataaactgtggggcttgaggacaaacgagaaagagggggggaagggtgaggaggagataaaggtgccaaaaaaagctctcttgttggaatgcacgtcaagccatggaacatggcgaggcacggcgagatcagtgagataatgagatgtccatggaaggtcgtgtgcgtggcgtggatgcttgcgctcatgtgcggtttggttcctttgctgtcactacagcggtcttctcgttcctagtttctgctgctgcttctttcgtctcgaggaaactaaactattccattggaattggcttgttccatttgcaggtgatcgaaaacgcatggaagggctgcagctgcactgcctcgcggaaggcaaggcgcatggtgtaggcaggggtcgcctgcgcgagctttgtggaaggctgtgactgagtgagagcaatttggttataatccctccagttaacaatatttgagttgggagtatcaagtttagccacgtcaattattatcgaatagagagagcgacagagaggagggccttaataagatttattttccggatcttcatggtttgaaagttgaaatatcaatggcatcatgatctaaggttgtattccttggtgccagttaggagtcttggaaaataaattaatataaatttttaagcaactttcttaaagaaacttttgaaaaaaaaacacacaatttagtagtttgaaaaatgtgcacacgaaaaacgaggattgggaacaaggggtgccgaatatagcctaagtcggttgaaaacgttctgcatcgtatatatcttgttgggccaattgatatttataaattttcagactatccatctacccattgataaattaatagatacaccctctaaaaataatacgacttttcanacatccaaacatctgatagctgcaagattcatggacacccataaaccctagttccacccccctctcnttcctngttcccttctcactccaagcaccgtcatgcgcgataccagacaccatcgcgacgcttgagcgctcggtcccgaaaccaccgtcgcctgcctagcctccctagttggtaaaaagacaccaatatcctcccgactcgcctcttcccgatctcctcttgagtcgacggtagtgaggtgccccgcctcactgtcttccccgtctcttattgctccccactaccagatccaccaccaccagccgcctcatcctaactagtcactctgttttgcccccaccatcctcctccatcgcgatagctccatcgatgcatcgcctcactactcgccctagtccaacgtccactgccagtcctccgttgcccacggctatccctctaagccacaaggaaacccctatcttcccccttcctctgccctttcctatttaaccctccaatcccaaaaccccaagtgactgaggttactgccgtcccgtggaagctaccatgacttgtcggagttgaggagaaggagaccaacatgaattatatttttgcgtaaatttaatggtccaaattcgatagaaatactcccctcctaaaaaaagaaaaaaaatcttttgcaaaaaggttaacaattcggcaaaatttaatatggccaaacaaatgtattcagtttcatccattttcatggctaaaattgcaaggaaccagtttcctacgttagagggacgtttaactcacgatctccatcgcttgtgcaccggacaactccagtccgtcctttgtccttcggcccagaaatgcaaagtccagcatgctcgttccgcctatgctccactggggctcgtggcacaaggaagctccagccctcggagctgccactcgacccgtcgtcgtctagccggggtatgcggtgctgccgccggcgagggcggattcctcttgacctcgattttgctgccaaccctaatgttttgatagggcggcactttgaaaattttagtaaggcctggtttagtttctaactttttcttcaaacttctaactttttcatcacatcaaaatttttctacacatacaaatttttaattttttcgtcacatcgtttcaatttcaatcaaacttctaattttaatgtgaactaaacacattctaaggtaggaaaataaaacaagcctttaatttgtttagtctgatgtgcagctaagcaaacattggccctgtttagttccaaagtttttttttccaaacttctaattttctatcacatcaaatctttcatatatacaacttttctatcacatcgtaccaattttaactaaacttccaaactttagtgttaactaacacaaccaaagtaaagtaatgcttgcaaatctgcaatgctgcgcctgccaggccttgctcaacgtaaattggtcagcacgaaactgtcgaagtcctcactcctcagcacctaaatgcaaattgaggagtaatctaataattggaatgcgttagttcagaataataattggagtcagtagtaccaatcaaacgctaggatattacactgtcagtgcaaacatttccacgtggttctcgtactatgacacagaattgcgaaaaacaaatgcactggctgctctgcactttacagaataaaggtaaagctggcgatggcattggaacaggaactaaacagtgggtaaattatgtatcggtagcaaggcacagtggcgccacacagcctcaccgagggctacatggaaacgggttgcctcaagctgtaaaggcctctgacagacggggtcccgtctcccgacccatcccgttcgtttttgcacgctgcagcaagcggccaagcaga

SEQ ID NO: 21968 - DNA, 4224 bp, Oryza sativa
ctgtttcctcattcttatttcacaggatttcaaggggttctgggagtccagattcgggggcaagaaggagcaggagccggagcagaacgggcacgccaatggggtggcgaacgggagcgtcaggaagaggacgtccgatttggcggtctacgagcagttcgagcagcaggtatttccgtgcgttagcgatcctcttttggtatggaatggtttgcgtgcatgcaggtgttcttggacaggcgtctcgtctcttgtgtagtccttgatcctcgatcggtgttgctgtttcaggccaggcagacggaggtgcgcgccgcggcgattcgcgatgggaatgctgatgcgatgtgaggactcttttcagttcattgttttctcttttttcctgatggaatctcgaagcaatgcatgtgtgatagagcatctggctggggattgcttattagattagatctgaacttttaggtttgaattagcctcgtttttgtaagaaagggattttgattcgctgaaaattcagagagatctaaccatcgtactactttggactggaatatgtaaccattggcacttcatacagacaagatgttaagttccttgaatcatggatgtgtgatcctgttcttcaaaggagtagcatcagaggaaccttagagctagaaaaaggttgtgtaaggaaaaatccctgctgatgaacattggtgaaattatcctggaaagataccaagctgataatttggtttggacttgtggcttaagcattatatctcaccctgctgatgaaggctagattaaattgaattagggcgtgcaggctttcttctgccttgtcaaaagcctatacaagattgacatgcagtttatttgttaaaggaaatagcatcaatcatctttaaatatgcttaaagtagcacacaacaaagtggcaaactaacatatgaaaaatcatagatactaacactctaaagtctcggtgattcattactggcatttcaagacacttattcctgaaataatgcttttctcatggccaactttgatttattaagacattaactcaataaaattatgctctcaaacattacgattttggagttttcttttgcagccagaagcccctcctaccttcgtttgagtcagctgaaatgcgtaatcttgcagagacattgttgcggtaattcaagattcacaaactttcgaaaaataggaaagcacaaatttggccattgactatatattcttgccttcatctttcagggacattattcgcggcagtccagatgtgaaatgggaaagcatcaaaggactggagaatgccaaacgccttctaaaagaggcagttgtcatgcccataaagtatcccaagtaagttagctgtttcatgtttattggaatagaaggacatggtctcatactgtaatttacagctgtacaataattcagcctttcactagcggtagactggtggtatccagtatttagaggccagttatctagctctatattgcaaatgtacaaaatatgttttgtgtgacatacagataatcaatcaatctatcagttattcataatcatattttggactatttcagatacttcactggtctcttgtcaccatggaaaggcattttactttttggtcccccaggaactgggaaggtttgtatatgcgcttgattgatatgttacttctgctaattggtcgagtacatctatggagtatagcaatactttcttaccttttcctatatttgaatgcaacctcttaagtaggtgtccctaactacttatctagtttataaagtacaataacatataaccttaactccttaagatgtttaacctaatagcgtatgacctaaggatttgtgaaccgacaaactcatttaatgattggcaagctacctctaacaactgacattcaccactggcgatggggtaatttttttttttatgaacatacatcgttattttgtcatgctatatttgcattgtgagtactttgaaattttctgattttgcaatatctctgtctattactatatacttcggtagtcagtttcaagcaattcctatttgcagacaatgctggcaaaggctgttgctactgagtgtaaaactacattcttcaacatttcagcatcatcaattgttagcaaatggcgtggtatgtttctttgaacacctggtcctgaccccatctttcttttattgcacagaaaacaagttgtttttagctattcttttttgtagagttgtcctagttgttctctctttgaccatttagtttctatgttcgctgatagtgataagagggcaagaggcagtagttaattagtgagttcttgttgtcatcctctttttcatcaaagacacagacatcctggtcgttgttgaaagttttttcctcctgtgctcccacacaattattttgatcaatctaattcaatcatggaacttaaaacttttgatcaatagaagtatttaaatatttaattttaatgttggtatttttctgtgtgcgcgctaatgcaggggattcagagaagctagttaaagttctgtttgagcttgctagacatcatgcaccatcgacaatatttcttgatgaaattgatgctattatcagccaacgtggtgaagctcgcagtgagcatgaagctagtcgacgcttgaagactgagctactcattcaggtttctgcttgtttgaacatatcaaaattaagcttgctagtgtagcactccaagtcacggtttcctacttcataatctttcagcttgaaactgtcccaactcccaacaaacaatacgtcagatttcaaagtttctatatttctgtcaatgtttactgcagatggatggcttgacaaagacgaacgacttggtatttgtacttgcagcaacaaatttaccttgggaactggacgcagctatgctccgccggcttgagaaacgggtacattttttttacattccggtactatagtccaataagtaggggcgggattaaatttgtaaatcttctttgtaatagtcatttgagctttgccttggatggattttcttttcttggtgcatactttagcctaaagaaacttattttaggacatttgataatgctcactaaacatttgaaaattttgttgtaaccttggtgcctttggtcgtcagattctcgtacctcttcctgaggctgaagcaaggcatgctatgtttgaggaacttttgccatcaactacctcaaagctagaggttccatatgatactttagttgagaagactgaagggtactctggttcagatatccgtcttgtgtgcaaagaagctgccatgcaaccactaagacgtcttatgtcagttcttgaagccagagatgagctggtgcctgaggaaggttagttttggttcttttctcagtgatgctatttttttttctgatgaaattataccactgaactgaaaaaaaattcatgctattgttacacatttttatgtgataccttttctcttgggttgcagaattgcccgaggttggtcctctcaaacctgaagacatcgaagttgctttgaggaacacaaggccgtctgcgcatctccatgcacatcgctatgagaagtttaaccaggattacggaagccagatccttagtcaggagcaagcctgaacttctcaaagttcagacataccattttcaggacgcaacattttttctgcagcagtttaagttgtgaggcgaacgttacaaacggatgttgctgctgcagcagttatgaaataaatagcatcatgaatatcgaacgcaattgcctccttttatatgtgctccgcatcgtcgaagcagaaggctggatcctatgctgccagttttcctttgcaccggctaataccactagtatggtacgaccaacgtccacatgatccatcccatttataacggacgaccagcgatggagcgcgcaaacaacatgacatcgcaaaagcggccattggcacataatcattccattaaaggctgatcacacgcagaagtgataatatcacacgagaagatgttttcttcacaaatgaacaggcccggcgtgaccgatttccagttcgttacatgcaaaataagataaccaagtgcattcaatcacaacgaactggctcagcagagccaacgcttcgggcaaactcaaggtaatcccctcactgaatcggcggtcttcccagaccttgcat

SEQ ID NO: 21969 - DNA, 21887 bp, Oryza sativa
  unsure (1)..(21887): unsure at all n locations
aaactcaccgtagccggcttgctcctggaagaactcatcgtcagcgggatccgcttcatcttcttcagcaacttgggggggattatttatatagagcaagggtgagtacgggagtactcagcaagccatgggaaataagtgtttaatgcagacttcaaagaaaggccgttgtttttgcgattgattttatttaaactcttttctgaaacaactaagggagtgcttctcaaacgacacggatgagacagtgcgtctcgtccggtcggagtatatgcaatgtatcagtcttttgaattgatcaagattggcacccggccaacagctttcaaacggccacccgggcctggctgatcccatcagccgcagattttccaaacatcaaacccattccacaacagcaaatttcacaaggcagtagtcaaacaaaactacgctagaaatcacctcacatccgcccatgaccgtgggcacggttgttcgaacagttttaataacctctgcagagggggtacactttacccacacgacattactaacccggatcatccagctcgtggggatcagccacgtcgggagacctccaagctttcatgacaaggcatttccaaagccgacacatgtttaccatatgctgacgagaggggtcccagaccaacaacaggttaggtcccagaccatactgtgccaggaagcccaggggtcctccccgacaccaccccggcgaatccacttgtctctcagcatcaaggctcccctgattagctaattactcagccaggggtgtcccattccacccatgtggtcgtacttgtcttatgttcggatgaaattccaaggaaacggtccttaagtgcaagagcgggaaactgtacacccggtacgttccccggtcctcagttttggaaattcatttagttcgcaagcaccgacccaagtgtcgggttttccaagtcttttgtaaaacccaagttttacccaagatgtttctcagattttaagtttgaaggcgaccgttgatacccgtgcagagagcacgattaccgaggcacaactaggtgggtacaagggaacatggtataacaattacaatggaagggtcaaatgcaacaaattaggtaggtccgccaatctgccttgcaaacgggacaagcagattaagtgcgatcctatcaatgcataatatttttcaagcaacataattaagtttaaatataggctcaagttgttcaaaggtggcttgcctcgctcgagatcttgagcttgatcctcgaaatcctcgcactgcgggtcttcgggctccgaaactacacgcgaaacgggacaactcagcaaacggcgaaaataaagccctattatcgacctctaagcgtgccattagatagatctcgagatttgaggaattttggaagttgaacggagtcaaacggacttacggttgggaagatattgaatttctaagattattggatttttggtctaaaggaaaaggatttatttaaatcctttttgaaaaagaaaagaaaagaaaagaaggagggagggaaattagacttccctcgggcggctagggcgcggcccgagaaaaaaggggcggctcggccgagcttaatgggccggccagcccaagaaggcggcccaaggcgcgcgcgcgagcggggaggggagagagagccggtgggccgggtccatcccgcgtggtcccgggtgggacccgcttgtcggcgactcggctcaccgtgagcgaggtgcacgcggggcgtgctagggtttgggaagggaggcgcggcgcatgcgcgcggttcgcggaggacgcggtgcggcgggcccacgcgcagcctcacggctcgcggtggtccgcgcgcgcgagggggcggagggaagcggcggaccggggtttgcttgacccggtcgcggccgaggtggcgcctacgtggctgccacgcgggccggcgggaggtagatgacgacgccagccggaacggacggcggacgacagcggcgagcggcggagcgaaccatggcgatacaggcgaaggcgagcacactgggatgttgcacaggacgaggggagacgagccaatggctcggattcgccgggggatgctcgacggcggcggattgcggcggcggcaaccgacggcgggagaagggggaaacggcgatgaggtcacgaggggccgattcccggcggtgagagcatctacgcggctacgggaatccgttgctagcgtcggattgggcggagcgacgccgagcgaggccggcgacgagcgggcgctacggagcacgggcggcgacggcggcgagcacacagcgagcggcggcaacggtcggggcggcgccagctagctacgggaaggctacacatgctactaccgaaaactaaggggaggagatggatcgaggagggagaacgggggaatgcactaccgagatgaggcggggcgctgtgacgagaggccgacggcacgggagtgatctctccggcctcgggccggggaagaggaagtaggcgagcgcccggagtccccttccgtgtcctcgctcgtgccggctcctccgacacgtgcgacggcgaacggcgacagcgaacagagcacgggaggcggcgacaatggagtggaggcgaatgggagagcaaaggaaaggggggaagcttgggtttatattggcgacaatgtcggtttggtagaggggaaccaactttgaacggtcaagccagcgagctggcgctccggctagcagccaaatcggcgacagggaggaggggaatgacgccggcggaggaagaaaaaggaaaaggaaggaagaaagggggcttgccccttgccactttgggaaaaggaggagctctgcctccgtcccttggaggctagcgcgcggaggtggcggggccgggtcgatgacgacggcgatgacggcggaccggtttggagtggagcggcgacacgggcggcagacgcggggcaggcgcggcaggcgctgacggcggcggcgactggccggtcggccaccacggtgcgcacgcgcgcgggcggcgcggcgatttgggcggcatcggcgggaacggcagcgagagcggagagggaggagggctcggcgcggctcacgggcagagcggggggagagagagagagagagccggggagggagggggagatgggccgagagggattcggcccatcgaacccgagggaggcaaaatagacttttgcggagggatttgatttgggaaggatttgtattcgtgattgaactcgacgatagatcggggatttgagatctgagatggcacggacactagacaacaagcaaagaaacagatttcgcaactagggttattaagagatagttttctcgctaggcgccacgacggaacgggcgctacaccaagcaacgcagatggatgcattagtggcagcgggctgaggggaatatcggcggcaatgaggacgagaaaagaggacgaggggaacgaaccgctcacgcgataaattatcggagcggcaattctgtttcttttttccttttttctttcttttctctaaccactcacgctcacgcggataaggacggaggcagcgagctgacgggaatcaccccagcgaagaaacgacgctcttttttttttcttttttcttttctcttttttttattttttttcttttctcttactgcttacagtataattgtgacatatgaacattagattaattcgtggattagtacttttcagaaaaatcttttgttacggcatgtttgcgtgtataagaatacttctaattgactaattcaaatgttaatatgatattttatatgatagtatagagataactcacctaactaaataaaaggtgcttatacacaccgtttctcttatgaaagtaactaaataaaatggtatattagctagactaaataaatacaagcaaccaaataaaggaggcatgcgtatcctcttggccatatcaaactcaggctaataaatacaagcaaccaaacaaaggaggcatgcgtatcctcttagccatgttaaactcgggttgtataagggagataagccaggctaaggagatatgagctaccaaacacacgggaaggacggggtagcttttgttgatgatgctgatggttcttcattcaaggatgttctggtcgagtactgcttgaagaacttctattccaccatactttaaaaaacatattttttcaactgtcacgttttattttgtttgtcggctacgtggaccacgttgaatcgcgcgattgagtcatccaacgcattaaatcgcttcggtaaggaccccgaaagttagaaggaattaacccgccttgctatccacttaccaattcgatccaatcgttcaccatgcacacacctgctccacccttatcccttattcgtttctcccatctctcagtcgatgatgggtaggtactggcacctgctggtcccctccctcgatcacctatccgtcgtttacgcgtgacacgatcggtctgcacgtgatttcgcgtacagttttagaaatgctacacaatacttgagaaagggcgagtattatgagaatatgagtatatcaatatgcaatagtagtttttatccgattgatattctgatcaatacttagcctaataaataatttatttgtcttttatccatagctctgtagcgaagcacgagcattttgctagtatatataaaaaaacagagtaaagaaatcgtaagcatatcattgacataaattaaatatataattttgggggccctaattatatttttaaggatcttgtacggtggcacatcttaaacgtagggacagtcctctgtacgaaaacaaggctaaattaaatacgcgcgcgaaccgggactcctctctcaaatcccgctaaaactactatcaaattgttgcagatcgaggatggtttgaactatggacttccttacagagatggaaaaaatttgtgtgctccgcatatatacactaatacacacatcgatcaacatcaagtggcgcacgtacgtagctagccttccaaagaccatgcaaacttctccactcaggctccacccctccactcgggcatgggtcgcatgcagttgccgtcacgaggctagctgcacgcgccttcgacgacacaacgtacgggtatttctttttccgtgtagtgtctcctcgagaaacgtagaggcagccgtccacgcgtttaattagaacggagtcaaacactagttagacctgtactccatgcggtacactgcatgcacgctgtccgattacgtgttccacggatcggatccgttgttctcttgaaccgcggataaaacaatggtgcgagcaccgcatttctgcagtgaagaaacccccttttcctctgcatgcagtcaagagatgatccgggctactagcttttttctcagatattgttacatgcacgttacatgccttcaaccacagcctcgtagtacaatgttgcttcactcttgtttacgatagtacaccgctaaggatcagggtgtctggaaaaacaaagaaaatatcttacagcgtttctttacgatgaaagcaagaatgaaatgatgaatagtgaatgatttctgataattattcgaaagtaatttatactatatatgaagttctttctttagaaaaacaccatttagaaactggggaggcatttgccactataccattctcatataatgaataggcactactaaaatacctacttaggtgcctgttggaaaccccacatggataccggattccccgaccggcaccgatgaggtgcatggtttgaaaaaaaaaaactggattagcttgatttgaacaaatgcttcgagcccaaatatttcccaaatttttcttcatcaaacacattattattatcaacatcacaaatcacaaaatgaatcataaatttttggcataatgcaataatactcaaattagaatacatctgctacccaatacctaactatccattgcagcatcaaagggaaaaacaacatccccaaatccttaacagataagagaaccgaataaactaaagatccccaaatcctcaagatcagccgtcgcttgttgttggttgttgcctccatcatcgtggtcccatccgctatagtccggatctagccttaattaagcttgcatcagcgctcgactgggagaaggagacggggagcttgtggcagcagatttccctgccctcgagcttgtggcgacggatcagctggcatgaggaagtgaggaggaggaggcgatgctgactgcggatgcgagaagtggttgtagtggtggatgcgaggagtggtttgaggcggcagtggatgcgatgaggagggaggacgcgtccgggacgacgctatgtgaggtagagagacgaggcggattatgtgatcgagtcacgcgtggatgcaatcgagtctcgtgttaaaaaagtagggcagctggctgtctggtgggctcgactccctctaagagatcgattttttaataaatcgacaccaatgtcctacatatgagtgagcttttttgtcacgcctcgaactagtctcgaccggaactagcccgtgacgctccaaattaacctgttaatcgataccagtcccaggaaacagtgctggtatcacagagagacagagtatcacagcaacagaggtctctttattatagagtagaagtacagtcatgttgggctgcggacagatcccgagctcacaactgcattacaaaaggaaagcggaagccaggacttggaccaatcatcacaggcgcgacttgggaactaggccgaaaccctaaaactcatcgtagccgacttgctcctggaagaactcctcgtcagcaggatccacttcatcttcttcagcaactgggggggattatttatatagagcaagggtgagtacgggagtactcagcaagccaggggaaataagtgtttaatgcaggcttcaaggaaaggctgttgttttcgcaatttattttatttgaactctttttctaaaacaactaggtgagtgcttctcaaacgacacggatgagacagtgcgtctcgtccggtcggagtatgtgcaatgtatcagtctttagaattgaaacaaggttggcacccggccaacagcttttcaaacggccacccgggccaacaacttttcaaacggccatccgggcctagctgatcccgtcagctgctgatttttcaaacatcgaaccaattttcacaacagcaatttcacaagcagtagtcaaacaaaactacgctaggaatcacctcacatccacccatgaccgtgggcacggctgttcgaacagtttgttaacctctgcagagggggtacactttacccacacgacattactaacccggatcacccagcccgtggggatcagccacgtcgggagacctccaagctttcatgacaaggcatttcgaaagccgacacaggtttaccatatgccgacaagaggggtcctagaccaacaacaggttaggtcccagaccttactgtgccaggaagcccaggggtcctccccgataccaccccggtgaatccacatgtctctcggcatcaaggctcccctgataagctagttactcagccaggggtgtcccattccacccatgtggtcgtacttgtcttatgttcggatgaaattctaaggaaacggtccttaagtgcaagagcggggaaaactgtacacccggtacgttccccggtccgcggttttggaaattcatttagttcgcaagcaccgacccaggtgtcgggttttccaagtcttttgtaaaactccagttttacccaagtggttactcagattttaagtttgaaggcgaccgtcgatactcgcacagagtgcacgaatatcgaggcgcaactgggtggttacaaggggacatggtatagcaattaacaatggaaggatcaaatgcaacaagtcaggtaggtccgccaatctgccttgcagatgggacaaaagattaagtgcgatcctatcaatgcataatattttgcaagcaatataattaaatttcaaatataggctcaagatgttcaaaggtggcttgccttgctcgagatctggagcttgatcctcgaaatcctcgcactgcgggtcttcgggctctgaaactatacgcgaaacggaacaactcaacaaacgacgaaaataaagccctattaatgacctctaagcgcgccattagatagatctcgagatttggggaattttggaagttgaacggagtcaaacggatttacggttgggaagatattgaatttctacgatcattgaatttttgatctaaaggaaaaggatttaattaaattctttttggaaaagaaaaagaaaagaagggagggagggaatatagacttttctcggacggctaaggcgcggcccaagagaaatggagcggtccggccgagctaaatgggccggccggcccaaggcggcccaaactcgcgcgcgcgcggaagggaggagagagagagccggtggaccgggctcaccacgcgcggtcccgggtgggacccgcttgtcagcggctcggctcaccgtgcggagggagtacgtggcttatgcgcgcgggcgggggagggacgcggtgcacgcgcgcggctcgcggtggacgcggatgcggcgggcccacgcgcagcctcccggctcgcggtggaacgcgcgcacggggagggactgaccggggtcggctcgacccggtctaggctgagctggcgccgacgtggcgcctacgtggcggccacgtgggctggcgggaggtagacgacgacccagccgcgaatggacgacgggcggcggcggcgagcggcggagcgaaccacggtgatacgggcaaaagcgagcacaccgggtggttgcacgtgatgagggaagacgagccaacggctcggattcgccggagggagcttgacggcggcgaatcgcggcggcgacaaccggcggggagggaagagggaaacggcggcgaggccacgaggggtcgattcccggcggtgagagcatctacgcggcttcgggaactcgacgctagcgtcggattgggcggaactacgccgagcgaggccggcgacaagcgggtgctacggagctcgggcggcgacggcggcgagcacacggcgagcgacggcaacggtcggggcggcgtcggctaactacggggagtctactcaagctactaccgaaagctagggggaggagatggagcgaggaggaagaacggagggaggcactaccgtgatgaggaggggcgctgtgacgagaggccggcggcgcgggagtaatctctccggcctcgggccggggaagaggaaggagagggcgcggccgaagtccccttccgcgtcctcgaacgcaccggctctcccggcgcttggcgaaggacggcggaggcgagacagagcacgggggcggcggcaacggtgaggaggcgaatgggagaggaagggaaagggggaggcttgggtttataggatggcaatgtcggtttgggaaccgacttagggcggtcaagggcgcgagctggcgctcggcggtcgcggccaaagcggcgacagggaggatgacgccggcgaggaggaaaaaggggaaaaggagggggagaaagggggcttgcccctttgccgattcgggaaaaagggggaggggagcgggggcgacgcggcagagagaggaggggcgcggcctccttcccttggcggcttgcgcgcggagtggcgggggccgggcggtgacgacggcgatgacggcgggcggtttggagcggagcggcgacactggcgacaggcgcggcagacgctgacgacggcggcgaccgggcggtcggccactcggcgcgcgcgcgcgggaaacaacgggcggcgtccgcgcgggcgcgcgcacgcgaacacggcgcgcgggaagcgtctttgcgagcggggagctcgcgcgaggggaggggcgctcggcgcgggcgactcccgcgcacgcgcgcgcggtgcgcgggcggggcgggagggggagcggggagagaggcgctcggggcggctctcgcacgcgcgagcagcgtgcgggcggggaagagagagagagagagaaagagagcgggagagcgcccggggggagagggagagaggggccggggaagaggggaagatgggccgaacctcgggggaggcaaaatagacttttgcggaggaatgtgattttggattcggaaatgaactcgacgatagatcggggattgagatcttgagatggcacggacactagacaacaagcaaagaaacaaatttcgcaattagggtttttaagagaaaattttcccgctaggcgccacgacnnnnnnnnnnnnnnnnnnnntttatagaaaaggcacaaatatcgttggtgccgatttttttttaaaaaaaaggtacttacaaggggggttataggtgtcggttctctcaaataaccactcgcaggcacgcgttcaggtgtcggttatagacttttcggcacctatagtatcgtctcttttttagtcaatatagtactgatgacgagtggctccgctattgacatatgtatatctattattgaacggattgtttcagtagattatctacttattaaagaaataaatattttgagaattaacagacatgttagaataagagtggtttaagcaatacaatactataaaattatttaagcaaacatgtttttaacccatgaatatcacaataatactaattcggtaaagtagttaaaataaactcgaggtgtacccgaatcacgagggcagttaaacgaaggtgtccagctgattgttgagtctcatgaacacatgagatcgcacaaggcccaagaactccacgtcaggagaagttagtgatgcaatatactgtacacaccgtggtttcctggccaactgatctctgtcccccctgtggtcagatctagtcattcgaaatggaatatggtcaacgacagttccccggcctgtaccactggaatctcgaacgaaggcagtttggggattactttgcatggaatgtctggttgtactacatgtgtgcgtgctagacatgcatttctggcaggtgtgcaatggaggagtacaataatggaggctataatgtaattatgtaatgtgtgaacgtatcaacttcaaggaacataccgtagccaactttataatccaaaaggcagtactagcagatgtgttttataatccaaaaggctgtcccatagagcgtgagaaaaaggcctagttgcttcagcggcattgactaggggcgaccttttttttttatgagatcgaagtgtccaactggcctgccggcaggcaggccgccaccgttgatcgccgcgaaaaaggcaggattagattaacaaaggttacgtgtggcacggatgtcagccgcgagcccgcggcgccgctcatgatcgatctgtgcggctttgcttttctatgtgccgaatcagcgggattatgcagaaatcgttcacgagcctctctgcatctgcatggacgtgaacgcccccgtgactgatgaaccgatccgatcgtttattattgaagtccaccgttccctcagcaaagtcagcattgcttccctcttcccgatgccattgccaccctagcataggtgaccctcgcggccctcatgctgagaccgcgagacggtgagcacaacaatggtacggtcgtctcggtctgtcaatatataatcagcagtcaattaatttacttacttcgaaagaaagctttgcctgctcctctttatctcttccataggtttcacccccatcgtttatccacggggagaaccggagaagagagcaatggcggcaatgcttaattatctgctggagtaagagattaaagcaggctctagcacgagggaaaaccctttaaaaagacagacaaggcagacgacgcatatgcatgcatggtgacctaactaagcaagcacggacggtaatggtatggtggagtgtgaagtgcggactaataaagcacgtatgatgtgaggtttggagtagaaaatgaagtggatcgatcggacctgagcacaaatcggcggggttctctctctcatacgttcgccgatctcatcaaaactacttttgccaaattagatcgaccggaaattttggctagaccacagcggtaccatgcatgctttaatcgtgcgtgtgagctactgccgctaataatctatctatctgtatcaatcggatacttcaagagagttctcacgttaacgtaaaagaatgtagttattgactggatggatccagaagcagaatttcattggttttagaacccttttagttttaaaagcatactctcatgaaacttacttgtaacttaaatgagagttgttgtattacttacctccttgcacaaatgtaagacgttggttagtttaatttttagctaaccaacgtcaaacaaaaaaatggagggagtataaaacaaactaactaattttgaatgctgaaattcaccatacgttatacaagttgtttctaaaatttaaattttaaacttgattactattttctccatcgaaatattttttttagcatttgacatttaaatcactaaaggcatgtgtttcatccattctattgctaattactcatgcagcttataattagcattagccaatggcaggggcggatccagcatgggggcggcggggtctcgagcccccactactggcgtgaagactatgagagaccccacaaagaccccactaaaaatttttaccatatatagatgggagggggactgtaactctatctagtttgctcagaccccactgctatttttttctggatccgccaatagccaatggagtcttaatagttttgaagatcaaaattaaaaaaatataaagttgttctcccaagttgctgtattttaaaatatccaaaatatttagcataaccacaatattgacaacaaatatcccgtaccatactcgaccaaagatatttcttttgcgtgttcgcgtacactgtggctagtgggtttttcacgtgaggaagatgtgcgtgcctggatnnnnnnnnnnnnnnnnnnnnatgcacctatgcagccatgggccggccgtttccccggtggatcgtgttcggacacgtcgcggcccctccacgacggccttggctccattgccaccaccagataaagtaggcgtgcatgcgccccacccccaggcgagtcagagcagcgcgcgcgcgcgcgcgagcgagcgacgccgtgagaaaccagagcaccaaaccgaaccgccgtttctcgcgtctcgccctctccgtgactctgcccgcggggacccgcgctgcagggggagaggcccacccaaccggcaggtgccctcccccgctctatatatacgcccgacctctcccacttctcccccacatgcacttgcagtcagtggtacaacaccacagcaacgcaccaccggccatcaacctcctctcccctgcttctcgctcgctctcctgccctgtttcttggagaagtgagcttaagtgagagcctctgtccctcgcacacgctattggccatggtggttctcgctggcccgcccgccgtcgatcacatcccgctgctgaggtcgccggaccccggcgacgtcttctccggcgtgccggtcgtcgacctcggcagccccggcgcggcgagggccgtggtggacgcctgcgagcggtacgggttcttcaaggtcgtcaaccacggcgtggccacggacacgatggacaaggccgagtcggaggccgtcaggttcttctcccagacgcagcccgacaaggaccgctccggcccggcctacccgttcgggtacggcagcaagcggatcgggttcaatggcgacatggggtggctcgagtacctcctcctcgccctcgacgacgcgtcgctcgccgacgcctgcaccgtcccgtcctgcgcggtcttccggtgagccctcaaaaccgacggcgatatataatatcagccccgtccgtttctctcggttttttacctagtgtttgacatggtgcgcgcgcgtcatgcatgcagggccgctctgaacgagtacatctcgggggtgcggaaggtggcggtgcgggtgatggaggcgatgtcggaggggctgggcattgcgcaggcggacgcgctgagcgcgctggtgacggcggaagggagcgaccaggtgttccgcgtgaaccactacccgccgtgccgcgcgctgcaggggctcggctgcagcgtcaccggcttcggcgagcacaccgacccgcagctcgtctccgtgctccgctcaaacggcacgtccggcctgcagatcgcgctccgcgacggccagtgggtgtccgtgccctccgaccgcgactccttcttcgtcaacgtcggcgactcgttgcaggtacgtacgcggtacagccccgacccttggcgctgccacgtgacaccaattccatcaacgcgctaccttcctctttctttaccatactttttcctttttccagaataattcccattaaactagatggtgtagattaaattactaaattaaatgacgtggacacggctgaaatggctgcgcctagtgagcgggtcaaccgggacatcgttccagttcacatcggtattaaaaagaaagaatcatcatctggacgaatatactaacccaattaagacgagacaagcaagaaaaggaaaggggttcacctgcatgatagcatatggtacgatggccacagcccacacggcagggactgggtttcgtagataactacgacactcgagacccaataactgccgccactaacgagcagattcagtacatgaacatatatatgtgtgtgtgttaggcatgaacacttctgttatgcctgcgtggcatctcattgcgtcatcatgcacacactcttaaacactttgtgcacttcccatatacagatggacaatatttctttatccgttagcacaagaagcacagatacgtttgattaatttttcgtgctgactattaccgtattacgcatgctgattataaccgtattacacatatgctgatagatatacatgtggtttcttggtcctgtacaggttctgaccaatgggaggttcaagagcgtgaagcacagggtggtggccaacagcctaaagtctagggtttccttcatctactttggagggccaccgttagcacagaggattgcaccattgccacagctgctgggggagggagagcagagcctgtacaaggagttcacatgggatgagtacaagaaggctgcctacaaatcaaggcttggagacaacaggctggcccagtttgagaagaagtagctagctagatgcctagcaacagaactggccggtcaagcaacaacgactttactgcatggcagctagctaccttagctatgtctcacgcacacgtacggtacaccatgaccacgagaagatgaagctgcttaagagagaaaaagaaaagaaaataaaaacaggaagaagataataacttcaagatgcacaatgtacagccaggttggatggatagctagatttttctcgtgtggctaatcaccgtgtgtggtgaggtgggctcctttcctgtttcggaatactgatcgatggatgaacagcctccaatagttaatgttaaccaaatatagcacaacaaaggggttcttttcttcctttggttgtttcttttttcctcttgcctttgattttctcgtcatgctttctgagcattaattatgtgtgcgtgtatttcggtatacgtaacgtacttttacctatgtgtgtatagtacgtggcttgtgttaacaagtaaatattatagtctctctctttcgttatgcaactgacttctgcgcggtccaaatgcattgatggagatatatctattggtgtacaatgtcaccttcaagattaatgaattttcatcactcaggatatccctttattattacatgtcatctaaatagttatcaaaaaattactaaaatagattaatatgaaatatatcactccactaacatgcaagaccaaatttgatttgtacaagttacaataaaaagaacaagttaaactgaaaatagttaccgtacattcacatatatatttgttatttttgttgtaacttgtgagagaaaacctagattggatgaacgccgtgcgtgcaactgaacaataacaaacttaccagccatcttaatccgtttgcatatgtgataagttcaaagtagtttagctaatctaacactgcccctcaatctaaacatcttatattaagataacaacttgtagaagttaaattttaacttacatatttgtatagtgatatatttcatattaatctatcttgtcttttttttaatttttttaagactatttaggtgacatgcacgaaacgagttaatatcccctccatggatgaaatcatttcccagatttcaagggcttcattcttatcaaattttgttttgctttttttcccctatcctgcttggtgcaagtgcatcgatcagctaatttctaggattctccatcggagcctagtagcttttatcttctctaactgtcgtgcgtgcaactgaacatgaggtgcataggagtcgtcttgagcaatttatggttatcttgtggtattctcttgttcaccaccacaatagacgttgtccgggtcccccatgcatgcgtccttttaagttgaatcaaatttttgcatcctccctcccttaatctccaaccatgagctatataacacccacactttggaattaaaaaatgattttcaacttacatctcgtgcattttatggttgtcttatgggaaaacaatcaattttgcatgcacctaagtagtagatatctacccaccttccacactgttggatgtggcctatatataaatgtctttacgtacacacataggagcataagtatgatatatcacaggttcatactaagagcaagtttaatgcatagtatagccaactactagctccaaaatcatctatagccaatgtaatagtcaatttatacaatagttgcttactacaaaattaatacagatctgtagccgttgttcttctctctcttcttttatctctttaaaatatatttatagctggcttatagtctgttattgtacatgctctaatactacacccctcatcactcgctaagtaccagcttaagagggccggtcaagatcgaaaaggccagcatgggaacaaaaactgaatttaaccgccattgtttcattttctagcacatgagtgactgatgatatgtattacagcatgtttctagttgactagttgactacttcctccgtttcatattataagactttagaaagtcttataatatgaaacggaggaagtagacaacaaacagaagcggatttgtggtaattacctcgtgtttgaccacaatatataaaaacaaaataaaaaactactttatccatccctaaaagactataatttcagcataagtatttgtctcacaaaaactgtatttttagagtaggcctactagctagatatttttaatatatttttttctcgttttagctatcgaagtagtagtacttcctccttaattagcgttttctctccatattatcgaaggatataagttttttaacctcctagtacttaatttgtagttgactaactatagtcttcaggatggaggaagttattaatgagtacctttacggtgatcttattatcaataaaaataatgttaatttatgagttctactataagtataaaatatcaggaattgaggtgatagatatatatgatctatcaaattagaaaatatagatggcccagattgattctagtgtcacgatccattactggagaactgatctttcgtgggtcggccaaaaatcacattagcctctaaacttttttttgtcccagttaaaaagcacaacaccactttataatctttaccaaccgggactaaaaatcatttttagttccggttcaaaaagcgtctggcccctactatctttagtcccgattggtattaaaaatcaacgtgtcatatgtaatgccttgcacttatcctctcatcctcgatcgcaaactcctcctcatctttaacttcctctcatcccttcctcctctctcttctctctcttatgctctccttttcttgcagtagcagcagcgaggagcgagcgaaggcgatggcggtggcggcccgtgcggccgtgttgccgacgctggcacaggtggcgaagcgggaggggaggtacttggcacgggtgatatgtttgtctgtaaatttattgatttgtgatgtctttagatctgtaaatttgtgatgtctatttgagtatattcattcaatctgtgaatttgtggatgactttgtgatgtttctatgaacgtggataatttaattgttgagtttggttcaaaaccaatatgcaaacatcaaaaacaaatgacaagaaaaagaaaaaaaatagacacggttggtaacatcatccgggactaaatatcgatatctttagtcccagattcgtggtcccaatttacaaccgagattaaaggggttacaaaccgaaactattatgggtttctccagcagtgaccattataaaacctctctagtgataatgcctttttggatgggccctactccctccacccaaggcatgatagttgcatctttcactaatgctcgtcctttcaaaccaccctccgttgctatactcttcatttgtgcagcagcagaaacgatatatggctgaggaagaaaggccattgaagacaaccgtaccaccagcacgagcaggagccatccagctaggttaccattcgcgtagtaaaggcggcgccagcggactgtacgacccgcaatccagcctccgcggaccacggggaataaaagaagagagggcaaaagctgtgtcaaacagggtggactgcgtgcctgcggtgcggtgggcagcgacgctcgaattgagccggtctctcgcgtggctgaccgcttgatgccctgagcgcagcgcaacgcatgcagggctgtggtggtggccactagctgggcactgcggctggaccgctggatgtgccgcctagatgccgatactgctgctgctaccgcgcgctagccagccagctagtacactggtatgtttttgttgtcaaaggctctgtgagattagtggcggatccagaaaatcgattcgttagtgtcagaacatgtctatccgtgttatagtatgctaattattcttagatcatggtgttatagcatgtggataaacagtttcgctataggttttgttaaaagttgtcggtgtcgcttgacaccggcccttctactgtagatccgcctctggtgaggacgccaggagcccaacgaggatgcaatcaatccgcgagcagcccaccgtatttgcaacgcacgcattataacgctgtatacatgcaccgtcgtggtcgtggtggcagtaatacggtcggggcctgcacgcatgcacgaggtagttcgagcattagccaaacatcagatcgatcgagagtggcgtgcattggatgcatgcgtgtacggacgacagcctctggccatcgcccgtactgctggcagtctgttgctagctgttttgaacggatgaatgctgttgctagccgatcgacctgtgtatgttttccgttccctctcgcgtggagttctggatttggcggggccaccggccggcggccggggaccaattgtgccacgccgcgcccgctaatagctactgacgcgtgtgctaccggtggctcggttgggggccggagtagatcgatggatccgtgattgatgaggccctgttccgaactcctttccagcaaagaggggggctttggataatctcctcacacggccgctagtatctggcattactgatgacaattgtaacattaactgcctctctgtactgtattgcaccggtcagttacattgatcgatattattgcgaacctcactatcgcgctgacgggcgaacgatcgagatcagatcgtgctgtactgttgataatctcactagatgacctaacggctggaagcctggaactatatagctatagctagcatcgctctagctaggtcagctggtcctatgcccgccccaaacgggcacatgcatgcaaggttaggactttggttaggaggaattaaatcatgcatcagagcaacgtacgtcctgcatatatcatatcgagtgcccaggctttacgagttctgtagcctggagtcttgtggaccctatatactgtagctagctaagctaacctatcatagtaatcaatggatatatgcgattttgcgaactgcatatatcctatggcgagtcgcgcgctagcttgctctagcacgcgacggtgcggcgccaccagttttaattttctcccaaccacgcgcgtaacgtacgtcgtcgttctagttttgaccctagtgcgaattctctctttcacgtcaggacaccagctagccaccatgaccatgccatgtttgtgtcactgtgtgtctacgtcaaagagtcatgcagcggctactgtgctcgtacctggccgagagagcatgcacgtacgcacgtcggatatccacacgtatatatatccaacgtgcgagagcgtgtgaccgatgtagccgggacgtcgatcgattggcaagttaacaacgacgacgacgcagagatatcgatctatcgacggcgatattgtctcgccggccggagacgatcgccggcgagcgctagctacgtacgttacagctagcgtaggtggccgcacacgtgtttttgggcagtgccgcagttgatgtgccgcctgcaggctacaggctgcgttaatttccgatggcacgttgcacggacgcgtgtacggtggataacgcagtgcatgcatgcgacgcgagcgaagtgctcgtgcaccagcatgtcagagcggccctgggcccgggcgaggccacgaacaggttggctaattgggccctgcatgctgaagtggctcaggctttgggcctatcaacgcatccaaaggccggtccagcgttaacgttgcaccagaaaatcgatcgagctgctggatccagcaaagcagagagaccggaccagctttcctcgatgattgtgtttattatgaacctggcacactggcaaagccagagagatcttgttctttccccctggacgggatcgccaaagctggaacggaaagtgagaacagaacggctccccttctccatcattcccgtcctgtcccgtgttaaggttcatgcaccagtgatcaccaccagtcggagacgctaaaccagtaaccacgacacaaccggcagtgcagtttcggctgcttgtgttgccttgtcagctggggtccctgctgcataggtgcactgcattgtggaattgcctttctatctgctactataccccaataattctcgagaacgaactcgtcagaaatgagtagtaccttttgtttcaccagatacattctctgaacatattaaaaaaaaatcgacacgttcttgcaagaaggctgcgtcgccaaaagctcgagagcttgcggtgtggcaacttgctgctggggacagcgagcagaattgcgaccagttaatccagatctggggcaagcagagaatattttgttttaattattacggaggacccctaaaaacctcactgaactgacaggacagctagcggaggaacgtgcggcataaaatatgtgtattttgcttatgagattgagatcccggccaggtcacatgtgaatcagaattcagaatgcatgtggtagaagaacaatggtgtcatactgggattagctcggtgacgcagcgtggtttgggtg

SEQ ID NO: 21970 - DNA, 27315 bp, Oryza sativa
ctcatagagagttttttcaaaaacgcccatccaaagggcgttaaggggtctaaatgtataatttccagtataacttattaactctatgaatttgcaattttaaagtgtatcatataaagttgtctgaaatcaaactttatatcataattttatagctcaaggaaatctacaacttcgtagttaacaaccttttcatttaagattgttagttgcccaaatgttcattacaaaatataaaacctattttaacaaaatctcaaatctacaatacaaacgacatcagacggagatgaactttatataaaagttatagatatcgatgagatctacaactttataatttattaccttttcatttaaaatcatttgtaatgtcgaataagcattattagttttttaagcaattaaaaccaacggaaatggtttgaacacaaataaaaactttacattcaggtcccttaatgccctctggaagagccattttaaaaaaccgtcaaggtgtgaggcatctatatttgtaaattttgcaacacgaatttttttaaaaaaatattttaataaaaaatgtaaaaattaaaaaaattcctggtgctgaacatcgtgcaaaactgcaaagccacataccaggcttgtcgcggcccatgtcttcatcccaacctcagtactctcaggctctcagcctcgtcaagagagtggcaagagcccaagacgtactcaaataagaagcttggatcttgggccttctctgaattaggcacatatatgggccatgaacaaataggaatttatgaactcgaccgtgtccatgtggattttttctcttgcaatccagcaagtccctcgcgtggaaacgacgaagtgcatgcgcgagcaggccgagatttcgcaatcgtatgaaatcttcccagcgaggcagcggcccagcgtcgcgccgctcaaagcataggactacttcaccaatcacagccacctgggagctgggaagctttaggcattcccaagaggccccgggatatgtttgagtaggttaagattttaaaatgcagctgctgagaatctgaagaagctaaaaacccgcttctagcttttagttcatttttcagattctacaattacagattctcagaatctggataaaaagctgagctgtttgggtgagcttctagcaactggatattcttggataagctgcagctgctagaagctcccccaaatagaccagcaaagcgctatttgagtagtgcgtaattcgaaatcgattttactactctaaaaatataacaacttttaattataattttgaagctctggacaataagtactgctatacgtatgatccgattatataactagagacatgtactcataaatcaatcaaaagatatcatgttataaccgttaatcaaatttagtcagacagatatatcgtatgcataacaatcttcatgaacaatacatttaggatgatggtaacactacatttttttgtcgccatgtttcttggtcagttacagttaatttgtaggccatttaggatgcaggtgcagctcagcaaattagacaacacgtccactctagttcaagcaattagaagcaacgttcgtgacaacaagttggctagttaatggttgtgtttttccctccttgtagcacatgctcacttcttctcgagcacaagagtaagaataaggggatgttaaaattttagccaaaataaagcttatcaaaatttttggtaggatttcttaagtgcttattaaagtttagcaaaaaactaaatgtaggaacaactttagcaactttactaaataatgttatggttggaaatgatattaattccctaaaatttagagtgtaaatttgagaatttacgatgcaagttttgaaaactgattatgtacttaaaaatataacgacgccataaatatagtgatctcgttggaaaattagaatgagccatattttcgaccgtttctttgtaaaactatggtgccgtgccgtgccgtgccataataatgtatgtctgtactcccagtatctttgtgttagacaaaaagacgcgccggtaaaagatagtagtacacccctctgaaaggaaagagatgactagtacagtactttgatatgctttctcatcgcacgtgaactcgtgactcaaccagattcaagaggtagcgaggccaaagcagcagtactcgtaatcgaagaaggctgctagtgctagcgcaggtccacccgggacgtcgcatacgcagcgaagagccaaacgtattcggtcgacgaccagcacggcagcaacgggccgggcccgtcgtcgcgaaagcagaacggctctaatgtcttgtcacccgacgtgccatgccaccccgtgtaccgcccccattccatcacccatcccatccacatcccacaacggggaggggaggaggaactcgcctgaaaaaggcggatctgggcccgcgcgcccgtctccctgcttggctgcttccctctcgttccaaaagacgagcaaagggaagagggcagaggagtactactactcctgcagtcctgcggtgcgtgagctgtgcgtgggccacggccacggacacagcagcggagcgggggacgttcccccgggatagcagccgagcgcgccgcctcgtctcatcactcggccggcccgcgcgagattggctgacgaacagtggctcgcggccgtgcaccgcatgcatgcagtggcgctctgggctggcggcatcggctgccgcgccgtcacccatcgctaggtaggcaggcaggcacgcgtagggggaaacgggtggactctggtaaagccgcacgttgcctcacgggctcacggcaagtagggtacgttaccgagtaggaggagtaccagcaaggcagggatcggcgcggcggtatcattgttggtttcgttgctcctgcatgctgtgcgagtagcctgcgactcgcgaactcgcgatttcgcgagtggtcgcccggaggggcccggtcggatactcaacgattattgaatgcacggtgagtattaaaaatctctgaaaagagtatactgttagtaaaaaaaagagagagggcatcgtgacagagctggtcagacccgtcgactgcgtcgcattgaacggcatcgtgcaaacgttgtatatgctcgcagcctgggcattaataacgtgcagaagtacaacactggtcgtgacggccaagagcatcaattcatcacacttgggtaggctgtcccgtaaaacagagagcgtcaaatgagacgcaatcaacacaagatgcttccactgtatgcttgtttcatcagtttcgcagatgaagcacacccaggtaccaacgcatgtactaagcttcactttaccaccatgtgttgatgaaaagggtcggaatcgcaccgttctgaatccatccaaagcggaactgtgctaagaacagatgacggcactgtgcttccttttctttccacgaggcgctggcggtggcattggcatcctggtgggggaacagtgacccccaaagttgcagctgccagcactacggccgccccacagtagccagtaaacgcgctgcagctgcagcacgcccccgcaccgcgccaagggctaaaaccgaagtgaaaaaggaaaccgcgaccaacccgtcgcctcttcacccgcaccgcaccgttgcagcccgcccactcgctgactcgctccagccagcagcagcagcagcagccactgctcgcgacggaacagacgacaccaccacgacgcccgcgtcataaaggcatgggcattgtcgcaggctagccacagcgacggggtagcagcagcatcagcagcagcagcggcaacagcgaccggcattgatagcggcagctgaggaaggaagagggcgcgcggtcgccgcaggagcggagcagggggggcatgggctgggcgggctgagcgctgagcaggagatggctggagagcgacgccctcggaggcattaatggcgtcgtccgcatcctcctcctcctccccatcctcgcggccgccgctgatggctctcccctctttttaccggcccccttggccgtccgagaggggcggcgagcagcgagccaccgactgttgggccggatccccagcggcgggaggcggccgggcgcgtgccaccgccatgggcatcgacctcaacaacaccgcgagcggcggcgaggaggacgcgccggcgccggggccggtgtgccgggatctgtggcacgcgtgcgctgggccggtggtgtcgctgccgcggcggggcagcgcggtcgtgtacctgccgcaggggcacctctccgcggccggcgccggcggcgggatccgcggggaggtggcggttgccctccctccccacgtggcgtgccgcgtcgtggacgtcgagctatgcgtgagtgaaccgctgtcgctcgtggtagggttttcgctgtgaggccgcgcgtggtgggctgcatttacatgctggactttgtgcaggcggatgcagcgacggacgaggtgtacgcgcgactggcgctgcgggcggagggcgaggtgcaacgctgcttcaattatcttattgattcatgtgcttccgggattggggattggatgagattcttgggggcgtcaaatgttggttgcctgcatcctcttttcagctttgggcgtggcataagctgcaatgtgatgggtgttgaatgagctttgatttttattggatgtctaaaaatagacattgttggttcattctaattttagtgagccacataatttgggacttactagatctacttggccagcttgatatagtatgagtgccgttttctctgcacaatgtagcttcatttagcacatctatcatgcctctaatttgtatattgtaccgatacgatgaattgttttggcataacaaattctattaacagatttgatttatcaatggtacatttggttggttcaggtatttgagaggaacttgcatggtggtggaatcgaaagggaggatgacatggaggatggtgatgaggaaaggaagtccaggatgctgcacatgttctgcaaaacactaacggcctctgatacaagcacacatggagggttctctgttcctcgtcgggctgctgaggattgctttccacctctggtgatgagattagaagtttgatttgtttcctattgactcttcaagtgactgcttgtcttgtgatgtaactctaacgaagtttgttttctttcgtgccttaataggaccacaaacagctaaggccttctcaagagcttgttgccaaggatttgcatggagcaaagtggaggttccgccatatttatagaggtgacatccgagtacttgataagggatatgcaatgcccttgttacacaatctatttatttaattgctagtaaatgtttgatttgatacctttgtatcggaaacttgtacgtcatactcatgtttgatgatcgggcatatacagagcattgctaaattatgtgtgactgttttagctttgaaagaggtcaggaagtattttagtcaatgctacaaaatatatggcaggtgtagcttttcaactctttgaatgtttgacattctaagtggtcagtagttttgcctgtctgaactgcgcgttcagtcgtctttgccattccctaggatgcaaattatttccttcctagttcatcttctgatacaatttatgttattcttttgtgacttccatcactttgttatatatggtgtgttatctctgcagtgaaaattacttctgttaataaaactgtacaattttgctcagatagtagtgtccttgaaacagtggatagaggatgctctccaatcttattgttgtccaagccaatatctccattttgattacaagggaaatgcacaagttatcttgtagttatagcatgtgatggagcaaagtatgacattatgaatttttaacattcttttcattccaggtcaacctcgcaggcatcttttaacaactggatggagctcctttgtcaataaaaagaaactggtctcaggggacgcggtgttatttctccggtaatcacttgatccaggtgttaaccataaagctaatgctttcttgtctatattttctaacgaagcattttaagcgtttgcaggggtgatgatggtgagctaagattgggtgttcgaagagctactcagcttaaaaatgaagcgattttcaaagcttttagtagcgaaagttcaaagatgcgcacactgtcggctgtggctgattccttgaaacatggaagtgtttttcacatttgttacaacccaaggtctgctgaataaaacatatagtgtttcattttgtgtggtccaactcaatacaatgtcattttctctggggcagttggactatatatccattcacatattgtaatcattggactttgtagggctactgcttctgagtacgttgttccatattggaagttcgtgaaaagcttcaaccatccagtttgtattggaatgaggttcaagtttcattttgagagtgaagatgttaatgagaggtttgcatttttcagttgaactatctttttttgtttttgcataatactttcttgggtcttactatctgtgttgtaggcgttctggaatgattgccggtgttagtgaagtagaccccatcagatggcctggttcaaagtggagaagccttctggtatgcatttgagctgcttttttattaagcttgttgactacggaacattaacttttggctacctgccaagtctttgaaacatatattagggcaccacatatagtcaatttcagttactgttttgtctatcggattaaatgtgaggttatttcacacattaaaataaattcatcaagttagctgaagtgctgaactcttgaatatgggtgcaacatccttcttgtcaaactcaaattttgaatccaagcctgatcttgtggagtagagaaattacttaggatgttctatgatcttttgtttgtgagtaaatatgtgcaaacattaataaatgctcaagtgagaactgagaagttgtcgaaataaattcaatacgtaataaaaatggtgtgctataaaaatgattagatgatttgtatcactttgattcctacattttgcagtctcttgcttagcccacattagtggttgggacaaatcatattagtcaattgggatgatatatcaagaataaaatgccaacccatctaaagggaatcagaacaaatggtcttgtaagtccttgaggcaccttaagacaaatggtcctcgcatgcatttctttttcacacttctgatcccaagattcccatgtaggtttaccattagcagatgtcagatagagaattgtttctgctggagtaaaatttcttaagtatctaggcttttgtagtttgagaactttgtagttcctgcatttctattaatagaaatggggagtttggccccttgataaaaaataagatagagaattgtttcacgcatatttggattgaaaaggacaataatgatgtaggatgtgtacaatctgtttatccgttttgctgtttataacatctggttggcagctaaaaaaaactctcttgatgaggaatttcgttggtcttctgccagttgccaatgtttgtcgccctatgccgcccaatgaagctcattgagcacacaggagaaacaaaacagtgaagagaatactagaggcatgttattattgcttgctaatatgggctggaacttgtttgctttcataatgtaagctgtaaggatcatcaaagttgtgcaaaaccaattatttagaggatttactaactgtaaccatatacattttaatgctatcaacaccttttatgatggcatccatgtctgtttaggtggggctaaatattttttattggattggaccaagaccacattatcaaggccccataggaagcctaacagcttagaatttttatagattttgatttgtccattataaatcgtttatggtgaatctattgtcaatattacccaaattcgctaatgttagcaatttgatttgctgtcttttcatacaggttcgatgggaggatgctactgactgcaacagccaaaatagagtatctccatgggagattgagatagttggtggttcaatctctgttgctcattctctgtcggcatccagttctaaaagaaccaaattatgccctcagggcaatttggacgtgccagctctgtgtgagttccaagagcacgaggtcaatacttggatctataaattctttaaccctatatgcttattggtttttgtgttaatcctgtagatggaaatggtcgtccagactcggtggaaactgaaaagttccccagggtcttgcaaggtcaagaattgatgggttctaggacccatcgtgctacttgttctcctcagtcaatcgacattacaaaaagtaagtcttttgatgcttggagattccttactgatacacgaagctgcatgttgggcagttcaacaagcagacttccagtgcagtactctggctatacccaccaatctgtaagcttcggtgaatctattggattcccagaggtcttgcaaggtcaagaaatttctcagacagttcctccgtttcaaggaatgttgcctgatgcatgttcagcgaaaagcagatatgaattaaagaattatgtgtgcaccccagctaccatgaatggactatcatctgcaaatgaaggatattgtctctccctgtcaactgtgccaccttctccaccttccagtcttatgttataccaaacaggggtaccacagcttgaattggcaagcaagaacaatgacaaaagtggaaatgacagccaaccagccttgcgacagcacaagttgctcagtgaaactagctgggaccagtttaaaattggaaaggcttcaacacctgggaatgctactaagcctggtaatggtggaagggaggttgacagaactagttgccgcctttttggtttttccttgaccgagaagattatcccaacagacaaagatggtgaaaaggaagtgagttatgaaactgattgccaaaatccacggatgctagacttgtttgggtacaattgcagtacgcctggtgctcttcatgccctttgtgctgctcctttgggaatatgatgctacttgagtaactggtatgctctagttcttccttactgctgaaaattcacttctcctgtacctttggacctcgtactctaccattatccaaaagctaatttggtcactgacatttacacagggagggatacgtacatgtggagacgcagccactccacgcttcatcccagatgtaaacggcatcggtctggttatggtcccaccgttcctgatgctttgcatgtaggtattgctgcctcacgcctgaatacctacgtgcggtcaggcgaataaagcgactcgattgtatgtttgactgcagctctagctgtcgagtcggaagggcgatgatgtttatcgtcgttaatgtaccatcggcaccctgtttatgcagaaatgtggacctaattattatgaacttatttccttagttctatgtatggttagcttctgatctagacctagttatgagcctatttcagaagtgctatgtatggtttgcttgtcaacatttgtttctgtatcggtacaaatcactatgtttgtatgtttattatgcacttcttttgtgttttaacatcagatgcgttccatatggatttcgtttatttccgccattgtgatgtatacccggcacaggatccataatagagagggaatcgtgggctagcttctgatctagacctagttatgagcctatttcagaagtgctatgtatggtttgcttgtcaacatttgtttctgtatcggtacaaatcactatgtttgtacgtttactagaggtgaacgcgcgcttcgcgcgttgcaccagtggtgccaggagagggaaatcattgattacatctgttggttctggtaggtaactgaaacaaatgctatttgcaaggtctgtgaaggtcaagtataggctaacgacatggtgtgagatttaggtttagtgtagtgcaaaaaatgaagttttgtgacgtgagcatttatattgatagttgttatagaggctaaaagctaatcacaacatatatgcagattgtggacagtcctaaatagcaaaatgtgccacatgtttgatggcaggatagacagtacatagtagttttatagtggtagcattgaaacagagcacataggagtataggactataaaactatattacacatggctaaattctactaatatggtttggatgccttcaccgaattcacacaggggcccttttgttgatgtgcaaatggaagtgcaatattttttgctatgatgaattgcttctcccgtgtacatagctgcctgagaagtgatgcaaaaatacaattttttttatcaatactggcagtcaataatcttatggcattgaactactcaacaatattagaacaattaagcatccttgtttcctagtaatgttctttttctgaatgtgaaaaaagcaagttaacatagttgtttttttggtatatattcagattgtaagaatcaaagaagcaattgccgatgtcaagtaatctgtgaatgaattaactgaaggaccaccagcaggtacaaatttagccgaatgtgaagaaattaattaaacatctcaaatagcagggggggcacaaaaaggtaccaaccaaaagcaaagtaatgatttatccatactaaaaaaacaaacaggtaaacaatccaaactgttttcagtaattttctaataatcaggtatgtgaaccaaataatgcacacagcagcatatttattcagcaaagaaagttggaatggatggtattgtaggattgtaaaggtcaatctgtcaagttaacctattggtttctggttgtacatcttttacatagattataaaaggtatgtgattttaatacctaaatcatagcaagcacaataattttatgagcagatactatcagtatgtttaaaggaagagggtgaaagtgcaagttagtcaaataatacataacttagttaaaatgggattttaacctacagggcagcgctcatcgtcctaaactgaagctttatcatcccaaaccaatagttatattatcaatagtcctgaaaaaccacttctatggcaagagcaaataataacattagtcgtttcaaagaaaacttcaattttagaaccctaatcaagccaatcttttatatgctagtctaagcattacctaatcatcacatattaaataaaaaaggacataaatattagaagcattaggtagaagattcaaagtgagctgcaataaaaactggatgcatccaatgtagaacatgagaagcatctgaaggacaagtcagttacatttgtaaaatatcataggcattactgaatgcaaattagaaaacaatgtaacatcattttttttatatcaagttaaattctgttgcacatcgtggggatgtcatgataatttaatatgttcagagttaatgtctattatgtcatgataattaatttttttatagagttaccaatcttcagctataacttgcaacagaattcttgttcacaaacaaccaaattatagaactaatatatgcctatttggtaaacagataatcaactaaattttcacttccgtaaagaacatgtcaaatataatttaaacggtgaactcaaggtaggcaacgaacaacgatcagccaaactggttgccagtggtgccatttctcctcctggaggatggcaccaatgcaggcatcctttgttctgatctactatgttgtgtgcacctggagtcttggcgtgttaaggcaggcatcagcctatcatagcctagttttgctactgaaaccattgcaccagctaaagcctacaagaataagagaagtggacagctatgccagtcctttgatcttgcaccaatccatcatgttttctttggttcttctcatattattcgcaaagcaataatgtaatccattgtaatgcagcagctgattggcgttgggaagattagatagcttagaatagaattgaagctatagatggattgtgcaacaaattgagataaattgattttctattgttaggcgccggccctaagtggcatagcgcgtagctgtgctcgacgggagggcgaggacgcacgcctcacctccccggagccgtggtggaaactaacaggaactgggattaacttctttcttgattaatcacttaaaccgaatggcctatataggcttacaatggaaaaccaaacagctactaaccaggaactaacaacttaatcttcctaacaaacttaatcactgaaactaatcctaacaacttgatccaacatcacggcgcctgctctggctgttggcgtcggttccggcgctgatactgaatgccccacataacatctatagtgcaaaaagagcagacacatagcgagctttagtaatcacatccaaaaataatacagagaaaattacagttcattaatttatttttggtgcaacagtaatatacagttctgatccagacctgtataacctttatcaaatgcacttgtatatttttggtacaacagtaatatatagcagcagtagtagtgattagtgtgattagtgtatacgtttagtctcagattctgcatgtaaaaggtcatctaatgtcaagttacaaacatgctcgttataaattaattttatagaagtcactaccttcaaggggcataattagtaatgaacaaactaaaaatgcaaagccacaatctattttgatgaagatgcatgactacatttggatggagcattatcaaattattatccacaaaaaatattgtacattgctatattttgctggaacaaatcagcatactcatacttcaacaaaagatatatcaatttcttatacttggaaacaaagaatcttatgcattaactcatttgtaatttaaagtcatctgcatgctacaatggatcgtagatgaaccccttaaagaaatgcacagccaaattgacagcaacactaccaaagcaaagctcgccgccatcaaagtggggtcacattcggtggagatgcaacctggttgtggtggcagatgaccttagatgctgtgccagaggaccagtagggcagcacggccgtgacgcaaggggatggaggtggcagcatcctctaggaaccccgcgccgatgcccttctctgctttgcgtaagctcaacaaagcttcactacaagctgcattcacacgctcacattcatagtgttacactgatttaaacttgcaaagaaaaattcaatacacatatcttcatcggtccaaattaatcacagtatcacactaagaccaccaacttggcaaagatataacatgcagtatgaaattccagaggaaactttcctctcctcacctccttccaaaaaggcagaagaagaggtaggatggagctgacgaggagccctccatgcggcagatccagcagcacccgccgtactggagaccgccgctgtccgaaacgggacaccaatgccacagatcatgcagctccctctccaaatcggttcaccgacctcctggatccagtgattccccgtctcctcgacgtcccacacgcacgtccgtggccgcctaatcgcaggcatccgttgatccggaaatgaacaggatggagagggagagggagagggagagaggggcagtgccgggcatagaggtagaagagtagaaggcggctcctggcttcccctcgcttcagggcggccggatctgccggcgaggaggccggagtcaccggatccgacagtcccggcctcctcgttggcggatgcggtgcgggagcgagaggatggcgatggcaggacgacggcgcggcgacagcaacagctcgcagtagggagtgcgcgggggaggtcgccaactgcgggaagaagaggatgaggggacggcacgcggcggcggccgtcgcttgggcaggagagagagcggagcgagaggagaggaggcagaggaatggtggcggctagggtttggggaaaggggtgagggttgcaaaaacaacccctaaacttctagttttcagagcgcggttcaattttccgttttttcgcttcttcatatagaatattgttttcttaagaggtcctctaagtaagagcgcacaacgttagaactaaggaccagggatctataacaaattatcaagtaaatgaagggtgtttttgcaaaatcaccaacgacgacacggacgtgcgagagctcacgaaaaccacccgccatccagcgcctcgctgacgcgtcagcacgcgcaggtggccacgccagctcaaaaatctccaggagccgcaaatctcggcaggtttgtatataagcgattatgcacttcttttgtgttctaacatcagatggtttccatatggatttcgtttaccttttcctccattgtgatgatacccggcacatgatccataatagagagggaatcatggtttagctactgatctagacctagttatgagcctatttcagaagtgctatgtatggtttgctcatcaacattagattctgtatcggtatacaaatcactatgttttgtatgtttattatgcacttttttgtgtttttacatcagatgcattccatatggatttttcgtttacctatctcaccgttgtgatgtacccggtacaaagatccataatagagagggaatcatgggtaaacctcgatgacggaccggatgcccaggacgtgcaggatcttgtagccgctgaagcccgcgtcatggaatatcttgcaaaactcccgctcgtcgcgctcggggctccccaccacccccatcatcatcacgtcccacagcagctgcgtctccgtgtccctcgcgccatctcccaagctcgacgacgatcccaccaccaggtccatcacgatcaccctcctgccgtcctccctcgccggcaccgcctccctgcaccgccgcagtatccgcacgcactcctcgtccccccacccatgcaggatccactgcaaaaatagatgtcatgcttagagtctcatcagttggcctaataaatcaaagtaaaagctaaaattaaatttttaatttgattttaagatattttaacgtattttttatagttggcttttaagttgataggaacaaatatataagaagttttacatattaattaatttctattttctgataaatcgtttttggtttattggaatataggcaagcaattgcgaggattataggagaaggcgcctgtgatggtgtgaccttgaggaggacggcgtcggccttggggacgtggtcgaacatgtccccggcgacgaactcgacgcctccgtcgcctggtgggacggtcgcgacgacttgcggtagttcgaggacggtgcacctgacgtgagggaacgcggcggcgctggccctggcggcgccgccggacccgccgccgacgtccaccagcgaagtgatcccccggaacagctgcgcgccgccgtggtggtggccgtgcaggagcacgtccatcacgaagcggccgtcgcacgccatggcgtcgttgaacgccgcgccgaaccccgggtcgtccttcgccaccgcccagagttcgcgcccgccgtggacggcggcgaacggcacgcgcggcgcgtccgctccttcgtcgtcgtcgtcggcggcggcggcgcggaaccacgaggccagagagatggacggcgacacgatgatggggtgcagcatggcgcgcgcgaacggcgagagcccctgccccgcgcccccgggcgcggagacgaggagacgcgagaccgcggtgagcccgtaggcgtcctccgcacccgcggccgcgtcgaagatgccaccgtgcgcgagcagccgcatgaggcggcgcaggaagggcttcctggagcgcggcagcgcgagctccgcgacgagctcgggaaccgtaacggcgccgccacggcggtggacggcgtcagggatgccgagctcgacggcgcagcggagggacatggacttggtgtacgcgaagatatggttccacagctcagcttgggcccggaggagctcgtcggcggcgaggtcggagttgcggctggcgtccattgctcagctgctcagtgtttggcccgagtgattaattagcttttggttccgtagtcaaacatgacaactttaggatactacgaaattatgaagaatcctatattcttgcctccttcaagttgttgggttttgtcttcattgtgaaatcgcatttcgcatgcatttacaaggagaaggtgctgccgaaatccataatgcttaacatgcaagtgctgataaaaaaatgttactagtagattagctctgagtgatcaagtcagaagtcaaaaagtagttacttaagttgtttttctttactaacatatcgtgcatgtataagtcgcagttaaaatttaaattttaaaacctaaacttcaagttgatttaaatgttttttttcatcatattttacttctagcctaaacttttaagttgctcaaaatcagtttgagtaaattttattttggttcaacttttattactgatgtttcattttgaatcatcgtatgagaaatctttttttaaaaaaactcgtatattaacttgagataattggactcctaattacagctcgtgattttctaacaaagtatatatccaaacaaatttaacacggtgaatttcacattaactaaattatatcaataataagattaaaatagtcttcacccgttacaacgcatgtgcattttttatagtttaagaaaataacatagccttacggtccagtaaaccttctttgggtaaaagtacattgggggacataagggtttaatctttcggttgggctatttgtatctgcggtggccgaaatattaaaattgtatgaattttttaatacaatttgatcaaatttaaaaaaaaaaccaaattcacgaaaaaataaaaaaaatgcggccgaaataatatggtatcggctggggcggtccgataggaccaacttcggaaatttcgttcggcaattttaaacccgtagtgttagagatccaaacaaccacaaaattaaattactggagtagtagagtgctagtagaccagaagaggggagtcaaactcaaaagtgtatcaaggataagcagccgaggaaaaggtatttgacggaagcctgcgatgtctgcggcgccggctgcgagcggctggttgcggccgtccgcgaccgcgcggctctgcgaggcggggttcttcaccgattacgccaaccccgccactacgcggatctgcatcggccggaggcggagcggtgcgccgagaaacatgtgagacccccttccttgtctctgaatctcagatttttgggggttgattgcttgaactcacgcctgatgtacgcgcgcggattcagtagtggtaaccccacaagttcgattttgttggggattattgctgttctcaaatgcccctttcaaatttcatcagttttgggagtaatttgttggctggatgggagaggtcgtacgtttagatgaggaaaattgaactatgcaggtaatacgtgcttggtcaaatacgcgcttaggtagatgctaaggaccgtatgatatttggtgaggcctatagaagtgaattttgtagcttgcaaatcaaatatcagttgttagtgcatattcagttagttgttctaaatcccaagttgcaacctccaggtattgaagctacttgctgaaattcgaggctagaagaaagatcattgataatatttgcatcatagatttttttcagttttcactataaaaaggaaacctgtgttttcttcagaatgtctaatatgttatcttcagtgcagggcttcaagttgcatcatccaatttgggccgatgcaaaattgctcatgttaaaagtggagatgctgatggttacccaacgactgaagatttgtcaattgacgaggaaaccctgcagcgtaatttacagacagccatccaggaagaagattattcccgggctgcaaagataagggatgatctgcgcatcctccatgaagataccaaagcttccctccttgcagcaaacacacggttttacaatgctttcaagaatggcgatcttgcagcgatgtactctttatgggctaagggtgaccatgtatatgttatccatcctgctgcgggtcggatatcaggttatgacgtggtcatgcaaagctgggagatggtatgtggcgcagattatgagttcccactaaacattgatctgaaaaatgtagaggttcatgtgcatggtgaccttggttacgtcacatgcttggaagtggttaagaccaaaggaagaacatgggggaagcaagtcgccacaaacgtcttcgagaaggttgatggcacatggcgcatgtgtgttcaccatgcatcacacatagaggaatgaaaaccttagttgatttggcatggaaattttgcagaaaagctagacaggcaatacatgatttcgagatttctatcttagcagctgcatcattagtctatgttttctcgagtcaattgtatcgatgcttaagttttcaaactgaattttttgtggtttcgtttgagattccatagtggttggcatattatgtcacttgagattatatatgactagctatttttccatttctttttggcggctaactgggaatggacttgatctgcaagtaactcgtaccaggctacttcactgaaacaaaacctgatttgtcaattgtcatgtactcatgcttcttgttgtaaactgagtcgtctggttttttatatgctttactttctacagtaaattattagcaatatattttaccagattcaggaattgacaacttatcattggacaatttcagcagtaactttgtataggacatctgcttgccctccggtctacatgttgccctttgttctgctgtttcctggttatatgggataacatgaagtttccacgctgacaaaatttgagataacaaaatcaaacaaagacacaaaaaaaaatacagaaaatacttcctccgtcctaaaataaaccaacgagtagagttcaggattcctctcactttctacgaagttgtttgatctttgatcttctctctttctgatttagggcgagattatcacaaaaaggaccagacgcgaccaccaacttggccaataagcctgaaactgaacgaccccccctcctcctgctcgcttccctctctccttcctctccaagaaagagccaactaggcgagcggagcgcaacaaactcgccaacccgcgccgcgtctcctcctcgtcgtcgcaacccgcagcgcgagcgcctcccaccgatcatacgaaccccaccgccacgtctactccctcgccgcagcgcgagcgcgcacggagaagaagcaagcagagagagagagagggagagggaggggtggcgctgcggcgagaagtgatggtgctgccattggtgaagctcgggtcgctcgcgttccggacgctgagcaagcccatcgcggcccgcctcaagcacaacgccgggatccaccccaagttccgcggcttcatcatcggcctcgcccaggtgacgtctcgtcttcatccctgatcatctctctctctccgcggctccgccctgttgatgcttggattcatagattgccgcgtcgcctgggtggattgaactgcttgagcggttttttttttccgtaagggcggtttggactttggagatttgaggatgttcctccgagactcttgggtttattttgttgggaactagcgacgtgtggggatgtgtatgatgaaatgcaaatacgaaagtacgacgagctagttctgaacttctgatgctttttggtaaattaatgggttgtttcattggtatatctttacattggacggttgcgtttatgcacagttctggtttggttgcagtattctgtcatggagctttcaggccatgatacaacagtgctttgtaatggatctctctgtttttgtagcgagttctggatttttttttattgagtcctacaaggatctgcataactcataattccgctttgatctcctacaaatgtacattcatctcgattgtttctgcaacatttatctgaggtcaattatttgatgtggataaatgtcagaaacacatgttagttattatggattttggtgttcatatcaagtggaataatctgcagcatttacctgaggtcaattctttgatgtcagaatcacatgctagtaattcatgattttgatgttcataataagcaaggacagtttagcttcaagctttgagccagattataatgattccttacgtctgttattcagtaatacatggcttctgcaacactgaggaaacaatagccatgatccttatctgttcagagcaccaccaataattcacattacttcacaaatctaacctttaaaatggattctgcatatactgatgatgggtatatttcaaataagattgatcagaaactatgaatacatatgcatatactgatgatgggtatcttccaaataagattgatctgaaactatgaatacatctgcatatactgatgatgggtatctttcaaataagattaatctgaaaccatgaatagataatgctgctgctcaatccttctgtagaacatcaaagaattttaggctgagattattggcgacctgagcacagtaaaatggatgaattcttcttatcctaactcatgcatgcctttgttttagtttgagcagaaaattttttttactactgtactgacaaggtgtatggcacattatgttcaggtaaaccatcgtttcactacaaacatgcagaggcggctttatggccgtgcaactgacattcacattcggcccctgaatgaggagaaggcaattcaagctgccgcagatcttcttggtgaactatttgttttctcggcaagtactttgatctcagttattctaaatgagtttttgtctgttaataccagaaaattctgaacattttactctgaaatgctataattgaagagcctgaaaactggttcttccagaattcttatttttctctaacttcctatgctcgagaagtacttgattatgtcaaaagattacagctgacatgaattgtcacatgatttttcaggtcgctggtactgcaatcatctacgaggtgcagagaagtgctagggcagaagccagaaaagaggagatccgtaagcaggaaatcgaggtaacatggtatcatgcgtagttttttactgtaatttttgcaatacgcaagcgttctgcagagattgttaaactgtctctgttcttgaaatggcaggcgagaaagcagaggatagaggagctagccagtgaggtgcagatgatgaagaagaggatcagtgagatcgagcggcagcaggacgagagacgggcccttccgaactcccgcggctccaccactgccactccgatgcaggcagcttcggcggcagcggcagcagcagcaaaggcaaagcatcagcagcccacggccgctgctgcttagcttctccagtggtactgtccaaagcccataggctgtctcccctgccctgcatttcggaaggactaacgcagattgattgcccctgttttcctcccatcccgtagctcgattcgattgtagttattcggcgaacggctggacttcttacttgttgcgctcgttctgagttctgaccttgtgaatagcatacgtgagaggtcggtgtttgctctgagctgaagctgttggtgggcggatcagtgaccatctggctcgaagttttgatactgttttcggatatgctatagtcaagtgtacattgcagtattcttgctttgcttactgatgtgcaagactaagtacctgccattaacatagctcaaaaggcaaaatagcctgcatcccctcattgttatttcaccaccatttgcattttctagcaaatgaagtctgctttatgtgatgtttcatattttcttaacactaggaaacaaatcccggacagcaggagttcagtgttgtattataggtgatttgactacttttccttgtcgacttaggcttttgctgaattagttaataaatctaacttaagtaattagggctaaattatcattcccaatttctttagtgcactagcgctaccgggatcgaatcatgcttttcacctttcatgtactcctaggagggaaagaactctcagcagagatatatgtgccagagtaaaagatgaaatgaaaatttctttcgggcctcacgttattgcttactgcatttccatgtatgacaaatgcatcttgacaggacgaccaaattttgtcaggccaacaaaccgatacatatttccaaaatagaggtaaagaaaaaggagaaagttcttacgatttacagacaggtgcggttcttctgttcctacaagagaagaatcttactaaaactagtcaaattctaaaaccaccttgccaggcaccagccttttctccttggcctcgtgagcttctcttactttgctgatgggaaatgtcttctccaccggtatctgcaatttcccagctccagacagcctctgtatctcatgaagtccttcagagtcagctctcatgtatgtccaccaataatctgatattaaatttgtaagaaacatgagaacgtcttgtataaacaatggaataggtcatatagataacttctgtaaagcaattcatccctaaattaaatacaaaggtagacatgaatacaattgtatatcataagatcgcatgatagacacacatatcctgatcatatctattaagaaacaaacaaattgaacccttgtagaattaagtcgttaaccaaacactgacaagcagttcacaagcaatcgacaccaatggtgaccaacttagtcattattaatcacttaagtgctggatctaaactttaaagagcaggcggcccactgctatcagcctcaactcgcatgtatgcagtcaagaattcaatgcatcactaaataaaaatgaaaatattttatattcactgtacatgtatagtttttctcttgagggttattttcaaagctactgatagtagttattaagttgttttctgcagttctgggaaatggttgggatgtttatgagcgaaatcgagtaaggttgcatagatttgcgtattgatctaaaaagctatctgagagaccaggccatgcttgttggattttggcaaaagcaagccctgctcttcgccagttagtcagatactgaccaagttctagttggtgcaagtccacataaataaaggccgtgtttagatttttttttttttgccaaaaacgtcacatcgaatgtttggacacatgcatagaacattaaatgtggacggaaaaaaaaccaattgcacagtttgcatgtaaattgcgagacgaatcttttgagcctaattacgccatgatttgacaatgtgatgctacagtaaacatttgctaatgacggattaattaggcttaatagattcgtctcgcagtttacaggcggaatatgtaatttgttttgttattagtctacgtttaatacttcaaatgtgtgcccgtatacgtcaaaaaaaatttggacagtgaactaaacacagccaaagttttttgccgggtaaacacagccaaagttttaaagtggaaacgtagatagtctattagtctatgaccagctactataattaaagcaaaatatatcccctcaagacacaataaattacccaacaaaaagaaaagattatatgaatagatacaaacctattccatgagaataacggtactgcatttgtttctttagtaaaacagcagtagcagcaggaagtcccacagctaatccatatctatctgctagggcagccgcctctccctatcacaaagaaggatgatacaataatgaacaaatgacaatcaaagcagaaacacagaaaaaattaaaaggggcaggttgacgacctgaagggtcatatagtgtccgcctctcctcagaacattaatgccaattctctcagtttcaggtactcctatggtatccaacacggcatcgaactttcctttaactgctgattcagtatcctgtaaggtaaaccataaaatatgaacattatggagacaatggtactcatctagggaaatttcttaaagagaaaaaaaaaaacaatctacaggacaattagtgagctaacaattttatccaatcgcagaaatgatctatatgccctgacacaaaattcactaatgttttctcactcatggagaataacggaaaacttcagtatcctctcctatatttaccaggcacaaagaattagacaatagctcaaagccacatataatactactgagcaataggactgttcgttccaggtttctcccaacccgtctaaactgtatcgtgttggccactgatgctgcagtcacaccaccagccacaagcggcaatgagttgcaagttttgaatgatgttgaaaaccggttcaaacactcttctgctgtgcagtagtactaatatcattccctgataatctataagtataaagtactatgttttgtattgatgcaagaagaaaagaaaatagtcacattagacctaagaaaaatgatatgtcaagtgtaacattgcatatgtgtagtcttgtaggagaaatgaaagattccacagctaagaagatgaaaaactgctagctgctatcagttctgtgcatagcttcacagtgcaaagtggatgaataagcgattcagagttcatatgtctgcatgtaagcatgagtttatcagataatgtggtaacagaacaacgaaccacaacgactaaacaacatctaaggcaccatggtaccattaaatatccattcctgctgtgtaacaatcctatcttagcaaagacaaataaatatatactccctccatttcatattataagtcgctatgactttttttctagccaaaattatttaagtttgaccaagtttatagaaaaatatagtagtagcattttcaacacgaaacaaacatattatcaaaatatattcaatattagatttaactaaactaatttggcattttagatattgatagctttttctataaatttgatcaaacttaaaaaatgtttgactagaaaaaagtcaaagcaatttataatatgatgaaacagatggaatagatagctagacatattaaggatatggtttgcctgcgttgataccgaaaatagtgcaagggcaaaagaattcactatatcatcatcatcgtaaagaaaatataagtacaagagtttggacttctgaaagcgtttacctcagcagtgtaatcgatagctttttcagcaccagcggccaacacttgttcaatacttttagttccacaggttgcagaaacgctacaccctgcagctactgcaagctgaacagcagctagcccaacagccccacctccaccaatcacaagtactctttgtctaaaacgaaaattaattgcattcagttcaaaaaggaaaggtgagcataacttcaatatgtaaccactcaaccagacatgaaataacattttactgataacgaaaagcttgtgctgtgaattggacctaaataatagggttggttttcggattgactacaagagattacaacttccctgcataatttatatttatataatagaacccgaagagagggaagtgtagtgcagatcaccattaaaattaagaatttacatatgtacctagatatatgtgaaaaaaatctgaaactttatgaaaggagatgaagtaacttttgtagtagtatgcttctagctgtctgccgcacaagcaaactacgaggagcacactttttaataccaaacccatttaaaagtcactaattacatacttacctaccatgctaacaatccaataaattaaaagtaaaggtagatgcaagttataggaaacagcaacaatggcaacaaaaagaacttgttgtctgtttcacaaacagtggcgtataaccagacatacccttcagaaattcgagccgtaccatgtaaagcacgccatgcagtcaaagcagcaaatggtatagcgctagcctcctgcaatataacaaaacttgattcgattagcttgcagtatggtatttttttcacatacaggtaacattggaaaccaagtcctgagctatctacttaagaagatagaaattgttctccccatcaataaacaataaacatgaactaaaaccttttagaactttcattaaaaagctttcaaaggatgggtttttgtttaaatctacacaaaggagttcctatcatcatccattagccacaatgcctgttaaatacaaaaatatgatgcactgttgtacattcctgaaatggaataaacatattgcatacatccagggaaaggaccaggtctgtccagttcatactatgtgaagattaatggtgaaagaaattgacgtgatcctgaaatgatattttgaaatatcaatgttacgacgagaagagttatctgatgaattcataccacatgactgagtgtagatggtttggaagtaagctcatcctgtgaaagaattgcataatcggtgtatgtccctcttatggctgttggatgcaaagcaccaaacacttcttgcccaatagtaaaggacgacacagaagtccctgtagctgcaacttcaccacttatatcccggccaatgatcagaggtaggactggctcaaatattgaacgcccataaccagaccgcatctgaggagagacatttttttatgagatgaattaaatttcaccaaaagaacaatatattccatttcataatttggaaagcacaagaatatatgcatatccgattgttcatgtcaactgcattttgcttaattccaggcttcaaacagagtataacttaactcaaagctgttgtagacctatttggtatctaattccatgaaaattgggactggggtcacctggccttttggttcctaaaagaaaatgagaacacaacatttctcatctggggatcacaaactataaacctactgctgattgcactccttcccttcctagttcatatagcattaaacaagaatccaccactctgttgcattagcagataccaccaactgatcagtgactactacctacagtgcaaagattgacccaaaacgtgcacccgtgccaatttttctacccgacatatcgaaaattataataaaaaaagttatcatttca

SEQ ID NO: 21971 - DNA, 1251 bp, Oryza sativa
ggagatgttctccgggctccagtccgcgcgcaaggaggcccgctccaccgacgccgccgttctcgaggcgcagctccaccagatgctccgcgagtggcgcgccgagctcagcgtctcctcctccccggcctcctccctccaggcaagcgcatcacgcccctccccaccccccaccgtcctccatttctaggcttctcctcggctcacgctttcattgggggggcggatttcggttagcagcaggggaacaaccgggagctgtcggatccgccgtcggagacgctgcggctgctgcagctggcggcggccgagaaggaggaggacgacgccaccagcaagctcgtcgagcagcagcagcagcacccgccatcggctaaccaggcccacggccacccgcaggcgcagggcggccaggacatgaagccggagccaccggaggaagcggtggcctccccggctgatctgacggtgccgcagcagccgcagtcgccaggtcagggagttctggcgagtggtggagggatgctggcacctgccgctgccgcggtgttccatgatcaggtataagattttttaactttttattactagtctgtcaaacggaagctccaatctttatgcgaactatggtacaatggcaccctattagtagggtggatgtggatccttggaaacgtgagtgtttcttcagagatgtgagcggcttggcttttcggttcggtgtgattttgtgcctgtggtgtgcttttctggtttatcaattatatttgtctactttgttgtgtttgtagagatgttcaatgaagtccttgttgtgtgcgtttagttggatataatgtgatctgcaaaaacagacccgttaaatcatttagtgggagtttctgcttttcttgtgtagacaaacttcatgtgcacttgtgcttgccctctgttggtaatgcaataggcctcaccgtaaccacaacaggaaagctttggtttcgcattgtaatggagatttcaaatggacggcgctttgatctaggtgtattgactatttttagataaaattaagcttattatatgtgtgacataaggtagaaactgaacgttatatatgcgctgtaccattcaattcacttctttgaggcatgggctacttatggccttgtttcagccagcatctttttttttgggggggggggggctcctatagcttgttgatgtggcgtttattgctatcagtaggttattatgctccaatatagcaac

SEQ ID NO: 21972 - DNA, 654 bp, Oryza sativa
cgggaaggccgcgcttgtcgccctctgaccccgaggtcgtcggcacagaagccgagtgcgccccgcgcggcctctcggacgaagagcaccctgtatcgactcgacccgggagagagcagggaggagaggccccgagccgaacggcggcccaaggcccccgacgaccggagctggccctctgcccgcttgttcgacggtgccaggagcccccgacccccaggatggccccggggccactgcgggaaggccgcgcctgtcgccctccgaccccgaggtcgtcgacacagaagccgagtgcgcctcgcgcggcctctcggacgaaaagcaccctggagatgcggctggcgaagaggatcggccccgccgaaaggtgcagcggcccgtctacttcgttagtgaggccctccgggacgccaagacccgataccctcaggcccagaagatgctttacgctattctgatggcttcgaggaagttgcgccattatttccaggcgcatcgggtcacagtggttacgtcttaccccctcggccaaatcttgcataaccgagagggtactggacgggtggtgaaatgggcaatcgaactctctgagttcgatttgcactttgaaccacgccacgcgatcaagagccaggccctcgccgactttgt

SEQ ID NO: 21973 - DNA, 569 bp, Oryza sativa
agccatacgactgtaggaaaagacgaaaaggcgccccaccccttttctaatttggccaaggagaaattcccatttagtaatactttcaaaaataaaaacgctatgtttacaaaactcggtacgattttcatcttactcttaactattttctttacaaaacaagttttactctcaactgactttgggtttttcttaaaattagatggcagatccggattcacccgctacctgggagttgagcttacctcaatcagaggggtatgtcattgagctgcatcggatgttgaggcgtctgcgatactctgggttcccgtcataccgagtgagacagtgtggctcagtttgggaggctcgggtcgaggttcacccctgagtcccttccgagttggactacagctttcagacacgtcaccaccgagacctgccagagaccgcgatgcaggatgcagcccgggaggccttcctccgactcagctctatccaccgagctgagttagcgagtaccgagtttgctcatcacccgttccgggaggagagcaactcagtttgcacagttcaggacacgccct

SEQ ID NO: 21974 - DNA, 7809 bp, Oryza sativa
  unsure (1)..(7809): unsure at all n locations
agcatatcgtgtatagggctacgaggatattgacaccatctgtctcagcaacgaccaaccagttcaaccaacatattaatcacattgcacacagaagcagcacatctgcgctgcacatggtgggaaggcagaatcttcactggtagatctgtgaagccaaaagacgtcaatggtgtcctgcctcaggtccaagatatggtcttcaaaaactaactattatccatagcttatttctgaagcaattgaataaagtcaggccagtccaaagaatattatgagctgttcaatacccggactgccgctgaaaaagaagaagatatgccaagacagtgtttgtcaaattataggatcacaaatccagcaacagcagctgctgcagactgcagtatccaatatccctcgacccaaattaaagcctaactggaaagaagcagaactgcgacagggtagtaatgccggtacaacaagtataagattagctttgttctaccatattgacacataaatctaacaagtagaacgagtgctctaaggaatgatatcataaatcagtacaaggactacaaactccgaggaaactcttgttctagaacaacatggccttgtataacatgctaatcgtgctaattaaatctgtaatgagctaatgttttacatattctacatcttctaatgtggcaatccatgacttcatggcacaaaactgaatctaactagtcagttacttcttatcagttcattgttctaacctgctttgatgaagcaggcatgaataataccaaaggaaagctctgaactacacaaattcaaggtctccacaagctgcttcgtccaatacattcctgtccaggcctgcacttgccgcttcttccaattcactatctacatccatgttttcttcctcttccacttcatctgtgccagcttttctcattggttcttcaatttcgtcttttgggtagacttttactctgatgcgtttgcctttgatgcgtcgatattcccattttggtggtggatatttcttctttaattttacatatttgtccaacatccctaacttctggaatacctcaccaagcattctgataatcgaaccgtcaggtctaacacccagctcctccatatcagcaaagatctggcaaatttacaagaaagacaacaatgattagatctttagaatcttggcaataaataagcaattctaccaatgtttccttgagtataacttctcaacaacaaaaaaggttgggttcagaacatgagcgggagaccaaaaccacatatttagtccaaagttggtgaactaacagttgttttgtcaagtaacacaaatgtgtctctttgtacaaagaatgcaactttgccctcttctgggagtaagttaaagtcatagtaataatggattatgttttctcatccaacatgactacgaaaaggaacaaaaattcctaaaacagttaatacaatagctgcaacaggaactgtgccatccgctgtactgaaatgactattgcttataagcaaggtcctttgggagcaattcaggcttattgcataggctggttgagataggcttcagcctcttggcagaaagtggccttgagcttcatgagaggaccaataacccacgccctgtttggggtagcttaatcttctgggaactttaagctaaagcttatcctccacaaaaaaagggcccaagctaccaagtcaggtcgatatatgaaacacgaaactttcaaaaggatagaatcttcgcacttgacttgataatctatcacaggtgggccatgggcttgtttcaacattatttggaatcagaaattccatacctaccaaattttctttttcttttcataaaatatgcctaccaaattttcatcagtggatatgtgtagcatctgcttctcaataacattcaatagagctattcaattaagatgccatttcgcagtggacctttcgaggaggacctaagatattaaaacacttgcaaaatgataacagtctgaaacatcatcatgttcaagcaaattgtagcatagaaaatgtagtttgtcagtgcagtaagcagcaatgaagactttccattaagcatacaagcaaaggcagcactaaaaaacatggagccaaatgatagtcacatggaagaaataaatccaacccatgaatattatttctaacattgtggctgctgatacataccacaggctaatatcatgagaaacttactaaacgatatccaaatacctagctctctaagattagcacactgttaggttttcctagtccaaatatctctgatcagtacactgttaggtggaaataaaaccagtagaaaaacaaagaaaaaatttaaacaaaattacaacttactatcttaacaatacttatgtgttaggctgttagcagaaaatttttacaagttcacttctgttcctccatgcaagggaaaccatggtccagaattaacataagaagggtgtacattagaacaaaagtataatatatttggattcctacctcaaacatcttctgatatgattctagtctgtaatataaagatatcattctcatgaaaaaggtatgaggcaaaccctccaaatatcgtgagaatatttttccatacagctcttctgcttcctccactcgtccatcctcaatcaaagcattcaacaaagtgtaataacttcccattgtctttccttgacctttgttaaacatccatttaataacctgagtcacaaattctgtagttactacagtgtttcagaaaaaaaaaaggtatattataagggagcagctaattcttgacagtcaacacgacactagaaatatgtagttttcatgcaggagatatttacagtgtatatgcacaagtccagtctgagatttttactgcaattacatgagaggaacacattggacacaataatgaaaccaatgcaacaagacctgaattatccgtttccattccttttcatcttcaagggtcttaagtgccttctttactgctatcaagggaaactccaattcccatgcaacaaatgaatcaagagcaccatatacttcctcctttacattagacaagcctttaacctacaggaaaggacaaaagaacaataatttcaggtactcgaggcatgaataacaccaggtagtctgaatctgttgcagcaaaatccgtcatgcaaaaatgtgaaatgaaacacttgcagtcttttgatgtttggcgcctgctttatcagagagaatacataagctgcttaatgaaaaagaggacaaccacaactatcgcaaactgaagagctgcagcagcgggtgaattctagagtagctattggtaagcaggtgtacgataaaccatataatttagcacctcaccaggaagatgttggatgcaaaagcggatacaaactgcaactgaaattacagcacaggaaagcagaagaacctcacacattcgacaagcttttgagacttggaaacggttccgattctcttgcgagttttccacacacgaggatatcttggcctcgggcccctggcaccacatacctacatcacaatcgtaatcaaaaccatcagtttaactgcagctccagcactatcgcaagaaccacatgcagtacagctgaactgaacttaccactaaagtactgaactttgaaggatgcgtaatggcagccctttccaatccaaaggcgaatgcaggcggcccgcacctcacagaaaacatcgtgtaacctgccgtgacaaacaatcggataaaccttccgcagcagacagtgctggtccgtatacgaaacaggaaaagggatagcgagcaagaactgcgcaaagaattgggaagaaaaagttctagctgtcctctcctcttccccttctcgctcgccccacctgaataggggaatcgaagggacgggagcacatctcaccttgtaagaggggaggagcagttgccgccgtcgctggcctcggtgaatccgtgcgccgcggcggcttcgttctccgcggggcgtagagtccgggaacgggaggagggacgcagccgcacgaccgcaacgcaatctctccgccccactgggcaagataatttcagcgttggatgaaaggtgaggcccactgtcagtggctcaggcctgtaagagtaagatatcagtatcgttttctgtcaaataaagaggaaaagaaaaaaaaaaggaaaaagggaatagggaagcgagggcggagtactgcgctcttctcctttgcctgaggcggctggggtgagggcagctagcgatgcctgtggctaggcctgagcctcangagctccgggtgatcgcccatgtcgacatggattgcttctacgtccaaggtcacctacctacctcctcctctctctcttcccccctcgccgccgtcgccacgactcgacccccaaactcgcggaatgatgcctctgacgtgagggagtgagcgtttattttattttgccgcagttgagcagcggaggaacccggagctcagggggcagccgaccgccgtggtgcagtacaacgactggaaaggcggcgggctgattgccgtcagctacgaggcccggaagttcggcgtgaagaggtgcgatgagagcccgctctctccttctccgcggaggcgatttgatcggctgggttttctgacggatcgattgtatgctcattgttgtggttattcaggtccatgcgtggtgatgaggccaagatggtctgtccaagtatcaatttggttcaggttccggtggcccgtgacaaggccgatcttaatgtttaccgtagtgctggctctgaggttggtctgtgcatcttaattggtacaattgacaatggaaaatgaaggtgcttccatggcattgacagttttgcgtctaaactctcaggttgtcacaatcctctcgaccaaggggaagtgtgagcgagcatccatcgacgaagtttatcttgaccttactgatgcagccaaggaaatgcttttagaatctccaccggagttattggagttgatttttgaggaggccacaaagtcaaatatcctgggccttccttctgtaatatttgttctccacgatttaattgttgtttctctgcaatttgatatgaatgtgaccaatagggcttcatatgtgcaggatgtcagcaacagagaagatagcgtgagggcatggctttgtcgagccgatgctgattaccaggataagttactatcttgtggggctataattgttgcgcaattacgggtcaaggttttggaggaaacccaattcacatgttctgctggtattgctcacaataaggtttatatgcattcctttctttcgattgaagtttggtctcttttactctgtaaacctctcttcctattgcaatcctcacccaagatgttgctgtgttttgtagatgttagcaaaacttgtcagtgggatgcacaaacctgctcagcagacagttgttccatcatcagcagttcaagattttctagtatcactgcccataaagaagatgtaatgagctaatgtgacacctccatctttgctagtttcttggtttctgttggacaaagtttttcaaacatcctatttatctggtctcatggttgtgttgtttgcttaaattatgcaggaagcaacttggtggtaagcttgggagttccttgcaggatgaccttggggtcaatactgttggtgatcttctaagttttacagaggacaaattacaagagtactatggagtaaatacagggtaacctggtgcttgcatttatttttttgctctactgttgtttggttgccctactgattttatctttagtacatgacttaactttagagctgatagaaggctagttttatgcattacaaggaagcatacttcatgcagattttacaactttcggatgtcatgtctagttaataataactcagcttataaccgtttaatctcacgcaggacgtggttatggaagattgcaagaggtattagtggagaagaagttgaggatcgtcttctaccaaagagccatgggtgtggaaagacatttcctggcccaaaagcattaaagaataatgcttctgtaagtacttacactctgtcatttttgtttagggatgcttatagcaaagcatatccaggaagtcttttgatgactatgttcatttggtataagccttgactacttgctttggtccatcaaagtcataagtagtgatataagctcatcactccaatcaacaattgtcatgggcattgggtcgggagtccggcccaatgggaacgatatcctcacccctcacgataagtacgtaactcacttgcatagagtcagggtctgttgggattaggttaaggagttctccatctatataaggaaggatcctattccaggtcagttaggcattagattgagttatctcttagtgccaaccggccctgccttcccggcgcgacgtcgataggactccgtcgcgctgtttaggttcagggacagtgctgttacttcctcttttcatcccaaataatcctagcacgtgacaacaattgatattggaagaatcagatcctcatttagctgtcatttagtgacagtttactgatatatccagtgtctgtgcgccttgattgatcatgtaataatctaatcagataccttctacacctcatttctagagcactaggctggagcctaccctcctacttgagtaccagatgctcctatcaaatactccctccgtcccataatataaggattttgacattttggttgcactgtttgaccactcgtcttattcaaaaaaattcgtgcaaatataaaaaacgaaaatttgtgcttaaagtactttggataataaagtaagtcacaaaaaaaaaataattccaattttttttaataagacgaatggtcaaacaattcaagcaaaatgtcaaaatcccttatattaggggacggagggagtactagtttggctagtggcatgttgttgtgtccattcaattacattaagatatgttgcgagcctaattaaataggtcctttgtattgcctgattcaaatcccacatgtgtttgcacagctccatatatgtatttcctgtgtagtttagagaagtttatgttctaaatattttacaaatgggaatttcatggtcctttaataatatcaggttcatgtttaggttaagacatggctggatcgactttgtgaagaactgagcgaacggattcagtctgatttgaaccagaataagagaattgctcaaacactaactctctatgccagggcatgtaaggtacttggtgcaaattatctttttcccccctaggattgcataaattagctcttagtttctgtaacttaaaatgaatatatagtttatttactgattgctttgctacagaaaaacaagtctgattcaatcaagaaatttccttccaaatcttgtccgttgcgttatgggactgtcaaaattcaagaagatgcaatgaagctatttgaatctgggcttcatgatttcttgggttctcagaacacaaaatggagcataacatctctttctgtttcagcaagcaaaatattcgacataccaattgtatgcatactttaactttatcagtaataagtatatcgatttgctctcatgtttaaataaccaacatccctggagaaataaggatcagagcaaaatgattatcttgtttctttgattgcaatacaccatgcatttattgatattgcattagcttctgctctcaaaagttgagggttatttctgaaattgttatctgatgt

SEQ ID NO: 21975 - DNA, 644 bp, Oryza sativa
agctaggggcgctcgaaggcaaacgaggtcctgcgagaatggaacatcaagttacgacggggtgatgtttttgtacaaaaacagaaacaaaacttaagaaacctctgggctgagcagtaccgtgcgaaacaggtaccgtaggtcgaggtcctgctccgacggtaggacgcgcgaggccgtggttgtaccggaccagctggaggtacgacgtccacggcgctgcgacaggagaagatgcgcatgaccgcacgcatcttctcctgcatccggtcgaaggtcatcctctgctcaacgtcagtcaagtgcaaacctctgttcaacctcacttggactgcggtgatatcggcactgatatcccgtgcagcatcagcctatgcaagatggaaataaaaaattcagtagttgtcctatattatgcaagataaatgaaataattgtaagaactaatacaaattcgacgtacccccacgaagtagtctcggtcacggtgcgtgggatacgcgtccgtcacagcggcaacgtgcggctctggggcgtctggagtgaaggtcacacgcgcacgagtgcgaggaaggtaccagcgaaggtagtcacggtagttctcctccgtgtgtgggaagagctcgttgatcgcctcctctgta

SEQ ID NO: 21976 - DNA, 1047 bp, Oryza sativa
tgtatgtcaaggaaaacccgagatcctagtcggttacgattatattttatctgtaattccatgttcttttaggatatggactgtattttgtaaagcggaccccttcccctatataaggaggggtccggatgcttatcggggcacggttttttgacctagattatacaatcaataatacactcggcggaatcatccccggacaggagtagggtatacttcttgaataagaaggcctgaacctgtataaaattcttcgtctccaaacccatccactttcctagcttgatagccacccccttttagtattgccgaaatcttgtttcgacagttggcgcgccaggtaggggtagcgtcaagtttttaccggctaagtgcgatgggttccgtttctggcatcgacgacttcgccttccctcccggacaggcgttccggttcggcagcctcaacttcatcaccaacgacttcggcaagatctctctcctaactcggattcgaactagtcggggagagatcaggtccccgcgccgttcggtattccgaactcggccgaggcctactccaagatcatctctcccgagtcggcttcaaaccactcggacgagatctaatctactcctccgcgaccagatcaagatgacgggtcctatccctcaatcctgataaaacttcctgatgatttggccgctgtcttcacagccaagacatctcctgctcgaagatctaggcgagctccggcttcggccccgatccgatctagatccagggaggttggcgttatactccaaccccttgggacagtctcgacggaagagttggatggctaccttagctcccccggtgtcagttctcgaccaaccgagatcctcgactacgacgacttcggctaccactacgaccacgacgacttcgacaacttcgacgacagctatgaggataactacacgcctctcttcttcggcgtattcgtggctgacaacgaaacggaggaacaacgccgagcccgagaagtggaccaagagcgcgcatggcaagaaactgaacgtcgc

SEQ ID NO: 21977 - DNA, 941 bp, Oryza sativa
aattcctgcagccccgatttgttatcttttctttaaacaatgatcatactctaatgatcataaaactgattttgtattgctgtttcagtattctgtgtgaggatgagatgcaagcagtttctgttaagagccaattgcaacagattgcaaggccaatgtacagcaacccacctgttcatggtgcactggttgtctccataatccttaatgatccagaattaaagagtttatggttgaaagaggtcaaggtaagaagtcttaactacgtaagttcctaatagattaatctatgtgaagcatggaaaggagtttaatatcgccactgggttgtctcagggtatggctgatcgaatcattggaatgcggaaggcactccgggaaaatctcgaaggcctaggttcaccattgtcatgggatcacatcaccaatcaggtaaagaaatcatgaaaatgtaccatttctgaatatgaattcagtgacatgcaaattataccagttcaaagtagttgccagcatctccaaggcccacaatagatatagtcaggttgtaccataaacttgttggagtttggttcattgaggtattagttcatgtggactgatgtactctagtgctggtcctgttgcttgaacttccagcataattgcaaactagtcaaagtggattttgtatcataaatattgtgttctaactcgaggccttgtcaaagtggttgtcttgagtcccaactaatcaattagaaatggataattgtacaatagctattaagtcttgtctgggtatagttgattcggtaagtaacagtgtcagtcaaaaactagtaagaaccactagcttcactcgttctccttgtaagcttacaagtacagacatatccattttgtacgattgatatatgttgggcaagaattatgtgcaacttaaatgtccatttacccat

SEQ ID NO: 21978 - DNA, 597 bp, Oryza sativa
ttgaaagtgttctcacacccttgggcacttagtttatctagtgaggtgttagagagtgagttaagccaatccaagtgcattgcttcattgttatagctagtgtggtacttgatcatcctcggcaagcatcctagacttgttactcttggaggttgccacctcctagatggcttgtggaggtgtttcccggtgatctctccgaggagattgtggaggaggcccgacgccgtttgtgagtgatttggagttcaccaccttcgaagtgaaggaataactaccctagtgatcgaggcttgggtagtcctctccgtgggctggctcccaccttgcccaccccttgatgaagggggcgtgcggtggcttcatggttgagcggtggagttggactcgcctcaacggggattaggaaaccggcgagtttctgaacctcggtgaaaaattccttgtctcttgtctcatttatttgttgcatttacatttgagcaaatttacattcatagagacatatttgagcccatatcacttaggtttgcaaaacttaacttagttgcttagttaaccttgtacctcaccttgcctagcaacttaggttagttt

SEQ ID NO: 21979 - DNA, 532 bp, Oryza sativa
ttgtagacgaagcaatctttcgccacgtgattggagttgggatgatgcggacattgggagttcattatcttgtcgaaggtgttgacgcgggaacgttgtcgggaagatggagaggttgttgccacaagctcttcgggcttacgcttgcgatccttgtggttgttacttccactccctcctgcggtcggctgcatcggatcccatataagaagctcgctctttacccgatcattcaaacattttgtgggcggcgctcctgctctattgttgcgtagcaatacaagcctgctcatgctgcttcggcggcgctttttcgccttctcttcgctctggacaggagccctaatggacacggggagggagcaggcgaagcgtatccttttttggcttccaagtggtgcccgactgcttggacgccgtaatagcatcttcggctttggcatactcattggctttttcaaacatctgcttgaccgtcttgggaggtttgtgtccgaacttgccgactaggtcctcgtggcgaatgccttta

SEQ ID NO: 21980 - DNA, 2382 bp, Oryza sativa
cacaccatgaatatatacgtcatccctgtttttccgtgcaccaagcaagttaataaaatgtgttgagctagctctgatgtattgtattgtgtctaattagttatgtagtaactagttgctggtccatatctatttgtttttttcccattgcttactagccccaacatttggtgcttgatggacattcaagatagctcttgaattaggattcctggctccttggtttatatttttctccaaatcctctgaataatgtgctgaaatctatcacttgatcctcccagaaagtggcctgctaggtacttgatacttctcaccatccttggattcctacttgaagagtactattgatttgctgcctttaactacttagatagtgccttgaacgaatcatttatcattgtgacattgtagccctggcataactctgtggcactctgctcagtttacatgcattacatgttcattgattgcatacaatgccattctgtagtaacagtgtgtttaattctcctagattatgagagctaactgaatttaatttgatctgcagattgtgtgcgccaatggcgcctcaccacattaatggccttgctgacgttcgtgcagttgcggaaatgtcacctacacttcctaccatgattattagagtaccttgtgagcagtcagccaatattcacaggctactggaatttgttgaggatcgtctggatcacggtgctcacgacttgattaaggcagaggacattccccgacttcgagctatcgcccagggaaaccttacaagtgctgatgctccccagttttgtttgtcattgctcaacgagtcccagatctacctgcgggttcaactgttctcgtcgaagtcggatgattgggtgcggccacccatcgactcacgggtagtatcggcagtggctagtgcgtttcatcttccccaggatggggtgctgccttttgatctcaactcaacgacagtggccccagatggtccaggtgcaggtcgtattcatgctgaacttctgatgccaccaggcagcttgcctttaccgcctcctgttgttgtcacagtgtcagggtgtgaaccactgaatgatgcgcgggaactttatcagtacctggaggagtacgtgaatcaagagggctggatagttgatgacacacagcttgcggggcttgcagagctggctgaagctagggacgagttggtaggagctcgcgataagctcactacacttgcatcagatattggagatgatcttttattgggaggagcggtcactgatgatgtaccgttgttatctggggacttcaaagcagctttggccagggtattgaagcttcctgaaggtatggagcttcccaaggactttgaatcacctcttcttgtccctgccattgctgggagggagagaattcatggtgaactcatcaatctccgagctgacctggctgctttgaagcagcatgttgaggagcagtggctcccatgggctaatgatcgtctatcatccgctggagtcatcggagaccagattctactagacatggagtgacacgggctaataatgttcgtctcacatctctgatacattctacaagacatggactgagtcagattctacaagacatggagtgacacgggctaataatgctcgtctcacctctctgatacattctacaagacttggactgagtcgttccgtataggccacacaagaagtgagaaagacgatgtacatttcctgctgatttctaaggatcaaaccatagctgttataggagatctcccagaactgaaacctcaattgctattacatagttctatacttgcagaatgattacgatggatgcccttccaaaatttatgtggcaatagaagatgctttttagtggttagaccgaaaattaataatgttcagtgcgcagaacattctcaccagtcctcatacagacaatgcatggtcatacgcaggtggcactatttctcattacttgtacaacaattgacaatgaggttgatatcaatcatcacgttacatgtataagtgaccctaagggcttcttttgttgcttaccatccatctgagaacaacactgtgcaaacacttgcctaattgccaaagctgaatgaagggatattagcagaatttatttacacactgaaaaagaagtagcattttacatagccttcgctcctaatgaatcggctggggaatgaaatgatacaccccattagttaattctagacaatcagccgccttttacactgctacagcctattacaacactagcacaacatttacagtcgagaagcactttgcttcacccacttattcagaagaaccaaagaacaatctgtgggattatgagctctataca

SEQ ID NO: 21981 - DNA, 1177 bp, Oryza sativa
tcatgtagtaatgggtatacccacgggcacagataatctcatgggcatgggtatgggtaggcactacctgtacccatcgcgcccaattgccttcacaagttgtgaagaacaaatgagatggcagacagatagagataaggcataagatctatgttttagccacctgtagggggataatatataaaaaattttggtcttaatccttgtgtggtgagatgctgatctttcatactcaggaccacaacagctagagaaatgaatcaactgcatcacatagtacaaacactgttatacaccaaactgactgaaatcgtcagatagaaactagaaaacatcatccatctagcaatttcatccatgttgtatctactactatattgaataacccaatatgaacagtaaaaccatggtgaatcaacactactactgtcatccattcccatatctctgaaactcaacatcctggccatcagcccttcagctacctctgaatctggcgcaaacatcgcatgggtgatcccaacaacaccagggttctgactgttgagtaccgaaaaagttgtcgcaaggccaaaaccatagttcatgatgaaatggaccagacctctggggaagatgaagacatccccctcagcaagggtcttctgaaacagcttccccttggtgtcaaagaagcctgccaccacacttccactgtgaacaaacatcatctctgaagctcttgggtgggaatggggaagcaccgccccgctgaccgcgatgtcggtccgcgccattgaaatgccaagggtgttcaggccagggaactcggtggcggtgatgatgttcgccgatgaccggaccatgttgtccaggtccccggcatggttgagcagcaatgtcttgaaatcagaggccattatggtgcttgggctcttgcagaagaaaccattcatgaagagtttcctctcaccctggggtgccatagggcatacatcctgaagaggagggctatctgatatgatttctggagcaaagagaccaaggagaagaaggtaacaacacaggacagtggagagcttcatgtcatggaattgttggacaaaaatacagtgaagcagaacatgggttaaatactgtgttgagacaggagtgcaaccaaagtcagaagactgagtatcctgtgcaacattcttgg

SEQ ID NO: 21982 - DNA, 526 bp, Oryza sativa
agatcgggcggaatccgctaaagccactggtaaatagttcgccatggccttgttgtcacctcctgctgcgcggattgcgagactgtagacggtaagccacgattcagggttagtggtgccgtcatacttctctattccagtcggtttgaagccggctggccaatccactcgacgcaggtcgtcggtgaaggctgctactccatcaaggtcgtcgtcgtggcggtccggcgagtgatggtagcctcgagctgctcggcgctgtatgattgtgtcgcgaagatcgatggggcggcgacgaggtggtgagcgaggccgttccactcggcgctccctatgaaagtcgggaggtgagtgaacagaccgctcgtcgtgacccctgctcctgcggttggatcctgcgccggtgatgctgaggcttggatgacggtagtcatgagatcggaagtgggggactcggctgccagtcggcgtgtggacgctttcggagttaactggaaccgaggccgcaatcatggtctttgtctgg

SEQ ID NO: 21983 - DNA, 7074 bp, Oryza sativa
  unsure (1)..(7074): unsure at all n locations
actcataaattgaattattatactgcaagttaattattttgctatagttcaacttacaaatataaacatttcatatgaaaaatgagaaaatactcatcgatgacgggctttagttaatgcccgatagagattaagtcatgtagaagttgaatttaaacttgcatatttgtgaagtgttatatcgcatattaatacaccttctcaattatttttaatttttttataaccattttagtgacatgcaaacaacaaaaagatatctcctcgagagattaaaataatttccccgtcacggctacgaggcacttggaggcaccgcgctggacgccggagacgagccgttggggaagcccaatcatggtcaagctgaggaaaacgaggcagctcccgctgacgcctgacggacgtggcgaatgccaacaggagtgagacaatgaagcgcgtgttgtcgcgtgcttcgcctcggtggggaggcagagcgaggcggtcagcacggtgaagccgaagacgacggcgatgccgctggccttgatgttcgccttcgccttggcattgcggagctcttcttcctccttcctcctctctgtcggagcaccgccggcctgctcgtcctacattggaaagtctgtggatgaccaacgggtaatttgtaaatacagtggggaaacaattttttttaagaaaaaggaaaaaaggcaaaagaaatgaaagaaaggctgaagtgataagttcaccggccgtccctcaactttatgccgagtctgtttgaggtcccctaaccacaatatccgaaatgtgtacccctaaactatataaaaccatccaaaaaaggtcccgaggcagtatagatgcctgattttgctgacgtggcatcctagtcagcaaaaacaattaaaataaatatgtggggctcatatgtaagtgagagaaaatagtgtgggccctctcttctctccgcttctctcgagcgggcattgtggcagatgggggagaggtggccagcagtggagcaggggcagcggagagacggacggcgcaacagtgagctcagcggcgaaggagaggagcagcgcgtggcgtggcggcaggagagacgagaggactggcacgcagaggccgagctgctgcgccatagcgacggcctcagcctcggctttgccgtgatggacgatagcgccacgatgctcggtgcgctcctccatgccgcttaccgacacagcgcccgccctccccctcccccaacccggtcatctgcaacagcagcttcaacaacagcagtgggagcgagcatttcgcccccctacctgcaggaggaggcttcctcatcggagagcagcagcatgtgttgccggcgtcctacgccgcggcaggtgtccgattcatggccacgggagaagaaacgccgcagagctttggctttggcagcctcttcaatggcgatctcctgcaggaggcgaacgggagcatgtatcattatcagcagcagcagcggcagctgggcattgtgccctcgtcgcagccactgtcagggactcgagtgggctgcacatgggccgctggctgcaccacgggctggtcagcccatcgccaagaagcccaagcaaggccaagctgaaaattatatgagcagcagcagcttacaggagatggatcgaacagattcatttggccaaggcggcgaacgacggcggcggcgacctagaggctggctggcctctttgtcgatctctcctctatctcccttcttctctactagtatagaagctactagaaccttctagcccttgtatccttccatcttccacctcagaaccactccactattgtaacagacttggttgttccctgtgttggatttggcactgctatttctgaaattacattgttgagtgggtctctaacaatttggtatcagagccaatccccaccaagctcatcaagcaagctgccatgggaagtgaggacaagtttaacatgcttttaaggatgctcgaagagtgcgagcgaaggcgggaggaggcagaccaaagaaggagagcagatttcctgtctctcaaggcaacaatagactcgtggatgccccaagaatagaagaaagctgaagaccttcagtttttggttgaggatgagcagtccaaggtgacgcccaccacctgttcaatggagtgccccaatggcagcagcccgagcacaacagcgagatccatctacgacgacgagggggctactccgacgatcatcctggagcttggggatggtgaggggaaggatcgcatgcccttcatcattagcaaggacctttccgagttgacgcctatcatgtgtttgacaatatgctcaagcctcgacgtcgagcctgatttcaccgtggctgcggtggttacatgctccaacactgccatggactccaaggagttggtagccaccgatggtgcaaccggcaccaccaacattgacccccgtgtttgttccaaggagacgcacaccaagtgtttgttgtttggccccgatgtcaacggtgtcactgatagaggtgtgattgtgttccaaagtaggatgggtgtgttcaaggtcgttccgatatcaagtcagtccatggagttgatggttgacgagaaagcaacctgcactgacaccactcaccttcccaaggtgatgcacccaagccatttgatgttgggccccaacgtcaacaccggtactatccaggctggggttgcgtactcactattgcttggcgcgccagaaggaatagcatcctcgggaaaggccacactagtcatggcacaaaagcttaactccaatttctgcctaaaatgggtggcgctcaacaggtgttcgaccaaatgctccaagggctacaagaagctgttgatgagtcatcccaagagaaacccatggccacctccttgctcaggtagagtggttagaagatggaaggagtggtattgccttgggctgcgggcaattatttggggataatattttatttcatgccaccatggccaccaccaactcaaattggaaccataatactttggctgctggtaaacacatggttgacggaagtagagctgaaaccgtggcctgacccacaaccaagtcaatatagcggaggcgtgatgtgaactgagcaagtcccatagcctgcaccagtttttgcacatttgatgggatatgatttttgcagtgcaaattgcataagagaccaaacaccttctgttgcactatattgtgcacctaaaggagatttaaatcatgaaaaatctgatcgagctcataaggatacattggtggcaatatttaacttggaacagttccattatgtgggtggtgaggaaaaagttatagagggaatgttatatggcctaattacagtaaactgcaactacttgatcattcctgctgctacaatgacaacaacatctactcaaaatatatatatggagcttgttggttggaggctagagaagggttaaatgatatagctaagggaagaacttacaaaatttgtaagtccatgcgcatgacacttaatcatgttgagagctggctacagaacccaacaaacatattatacaatggtcagttgtttaactgtccagtgggggtacattttggggtcagaaggatttctgagattattgctagaggtgctggtgagaatcagaataggaaggttaagacatgtagttatgattccatttttgatttctgtgagaataatcctagtgatggtagtgctgcagcaaggttttccattgatgggattgataccaggacagattcagagatgatatatgcatcaattgcaaacagggattattggtctgttaaattattcgaggtcataaaagaggggtgcccaatacgccacttgttactaggtgatgtcaagatagaacaattgctgcaatgtgagacattcagtacaagacagacaaatatagagcaagttatcaagctacagctgagcaattccaaggaaatacaagagctacaggtaccatgggatccaggaggttttcttcatcggcttggggacaagccaaatttcaagaagaggggattgtcaaggactcgggtgggctgcacatgggccgctggctgcaccacgggctggtcagcccatcgccaagaagcccaagcaaggcagctgaaaattatatgagcagcagcagcttataggagatggatcgaacagattcatttggccaaggcggcaaatggcggcggcggtgacctggaggctgcctggcctctttgtcgatctctcgtctatctcccttcttctctactagtctagaagctactagagccttctagcccttgtatccttccatcttccacctcagaaccactccactattgtaacagacttggttgttccctgtattagatttggcactgctatttctgaaattacattgttgagtgggtctctaacagccacatcatctgaatgtgagtagtgatgacaggagcaaaaaacctaaattgaatctgacatttaccattgttcttccatcattcgtccagtggtaacattttacatgtcttgcatcaccgcttgctcgccggcctccccatctccttcctctctgcttctcgtgcctcctcttaaagcggcgttcgttgacgttggagctccctccttgccggtcgtcgacagtagccaccgtcgacaaccacgacagtcgtgcgcgggcaagaaagagggaggtaacatctgccgccggccgtatctggcgatcatccgtgcccgctgcgctgctcctctcccctgccggtgcgacacgcgctcctcctctcctgtagtagtagtcgcgccggccgccacctctcctcctctcccgccactgccatcgcgtcggcctcttctctctccctctcccgccgttggccgcctctctccccctctcccgccgcctccgctccgccgctggccgcctctctcccctctgtcaccacgccaactcgatagaatcaggagagaagaggaaaaataagaaaggagagatgtggggcccacaccattttctctcacttatatgtgggcctacatatttattttagttatttttgctgactaggataccctgtcaacgaaaccagacatctatactatgtcgggacctttttttagacggttttacatagtttgggggtacacatttctggtattgtggttaggggacctaaaagagactcggggcctgatcggttcagttggctgcggcgttttggactgcagctgtccagcctagacgatcggctgcaacccaaaattctacagcaactgttatgttttgaatgtgcacactgctgcaaagagcagctgcttgttggttgttaggaaaaagtatatacgaagtccctcatctcgtcatcggattacaaaatcatttcccaaccacaaaaccaggtatataacatctctcaaaatacaaaaccggttcactctaagtcctttgacggttttaaccgatgtgacagctgaatcattgtgggacccacgtggaccccacatgtcagggtgtccatgtcatcatctctctttcccctcttctctcccttcctcccactcttctcttgtcgtccgccacgaaggggtcgacgatgcatgccgtcgtggcgccgctgccgctggttccgggtggcgcgggcaccacaagcatcggcgccccggcagcggcattgccacgttgctcgcgctgccagagaacgcctgctcgttcgcggccgtcgacgccaccatcgcgtggctgtacatcctgtcgagcaccatcatgcgtaggccctggcccgcacgtcggcggcgatcccgttccgggacttcacgcactctatctcgtcctatttcttctcgatcaaaacacatcccaaaaatccgagaaaaatcaaggaggagcgcgggatactggcgcatcctcgtgagaaattcaggctagatcgatggcggtagagggacaggacaaaataagaaaagaaatacagtagtcttctagcaaaattgttgtgattttcgtctgatcgagacggcctctccatctcgatttgtattctatgttctagccttcagggagctccagagcatgcatgcaggcgactaggcgaggcttccagggttcgttctgctttgaattccgcctcgataaggttactaatctctacccttggtcctatgatgaggcagccgcaacgccacgcnntgcttgcgctnngccgtagaacgcatgcgcgttcgcggccgtcgactccgccgtcgagtggctgtacatcccgtcgagcaccagcatgctgaggtcgcggactggacaagcgccgtctcccggtccgtcgacgaggggtcggacgcgtcgtgcattggcgccgacccggctgggttgcctgctgcccgtgctcttcgtcgtgaacagggcgagcgccagctgctgcctgctgcccgtgctcttcgtcggacatggcatctccgttcaagttaggaagtcgggtcgccgtcgggagatgagcgggggcacctccggctcagcaggcaccgtctccccggccagtctacagtggtggacgcaggattaaaataaaaatgaggtgaagatgctcatctcaataagaacaactaaacacaaaaaaataccatatttatattgtaatcatataaacatatagtataatcaataaattaaggcaaacaaaaaacaaaaatgatattaaaatagagtaataatttttgcgccatacataattcatcatacataaaaatatactagtaaacatatcaatttgcaaatatgagttaattcataaagcatggttgatagatatcttttaaaaagtaaatatatgagaagatatcgcatacccagaataagatgattattattttgcttagattagaagggagagagagaaaaacattaggccctatagtaggggacgggggtgagcaatgttgaggaattgagtcgggaaagcatcacatacgcaggattaaaattggacacttgggctgcttatttatgggccaattgtgatatggagggttggggcggctcaaaaatgatatggagggtt

SEQ ID NO: 21984 - DNA, 1076 bp, Oryza sativa
catgattgaaatacacagaacatttatggaggaatcatttatcactattataccttcagcacctggaatattgatcaaaggatcgttggctttaattaaccaatctttcgcacaaatgagagcttcaagcatttcaggtgttaacgaacttcgtgtgtcaccaagtatcctgcccccacaactgaatgctgattcggaagatacagtgctgaggggtattgctaggaaatctctggccatagatgacaatactgggaatttttgagcatgtctcttccaccagtccaaaacatcgaaactctcactatcctcctcaacatcttcttctaaatatatggcaaattctgatttcgtttgccgtgcagttctccttcgagacttgtataaagcaaactcttcctcgagttttcttttcccaagaacaggtgatccaacactgttgctgccttcacaagaatgtgaaagcatgtgttcatcatttcttcttacaaacccttcgtatttttcataataatccttcaaccaatcttcagcagaacccacttttttgacaatctctgtcacactgttagatgttttctcataaaagaaattcaaataatctccttttcttcttggatctaacattgtggcaatgacaagtgcagagttaaacccactgtcccaatatttgacaaactttgagagcatagctgcagccaatacctttaaaatatcactagtctgccaatcagggtcattcaatgcatgacgaatttgtagcaccaagggcaagaacctatgtgctgttggtttcctatctgctgacaccgataatgtagcttcttcaaaagctttaagaaaagcacaaattgattcaactttctgccattctagttcagtaggtgcaacttcaccatgtagatttgcatagctatccaggacagatatgtacattaatccttctacaatcattttataggtggaattccatctagtcggcgtatcaaaagaaaaactcaacttcgaaggaagatttttcgagtttgccatagaaatgaaatcttgcattcttgatactgaagaatctaaatgct

SEQ ID NO: 21985 - DNA, 651 bp, Oryza sativa
tcgtgacctgaagcctggaaacatattgctcgacaagaactacgtcagcaaaattggtgatgtaagtcttgccaagctcatatcagatattgagccggaagggctcacagagtacagagatactgcagttgccggcacactgtattacatggatccggaataccagttaactgggacaattcgtccgaaatctgatgtttatgctctggggatcatcattcttcaactactgactggcaagcgcccacacgggctgatacttagtgcagaagaagcgataaaaaaagactcaatttccgatgttcttgacagttctcagattgattggccaatcgctgaggcagagatcttggcaaaattggcggtgcggtgtacagctttaaaatgtagagacaggcctagccttgaatcggaggtgctgccagagatcgagagcattctgagcagaattactgcttctcccacattaagaagtccaaacgcagctgtgccgagccacttcatctgcccaatattgcaggtaaaatttgctaactagttgagtgcgccagttctgattatctccctagactaaatagaaacaatgacaattttggtgcatgaggtaatggatgacccttatgttgctgctgatgggcacacctacgagca

SEQ ID NO: 21986 - DNA, 716 bp, Oryza sativa
aaactgtcgttggggagggtttggggatccccgtgcttactgttgatgaaaaatccgcgcttggctgatggtgctagaactgtattggcgcgaactaagtcgacgaacacaacggcctgagagatctgcttagctccagtgcaagtccaaaggttcatgagatacagcgtgctaccagtttgatcctgcaactgacaagatatacaaatagcagatcaatgagccgatcggctgataagccgatggagtaattccagccgatgccgataccagccgatagcaataggattttgagctatcggctatatgtttaatgtagaatatgacacttgatgtaaataatgatataaagacaatcggttgatgatgatgtaataaaataataatataacagtattccctctattacagattataaggcattttgtcccatcatgattttttttcctttgtcctattctgattaaatcacgtccgatatctttattccaaaactaccgtcctgattaagataggagccaaaacatctcttgcctaccgcaagacctatcttgcatcttcccaactcgtgtttgtgtatccaagactcccatcctagctccaatgtcttccaatcttctcccaaatcacaataccgactagggcacgaccgatttgcctcctctgctagggactctttgtcacactcaaggagtcccgacgtcaaggtcgtgtct

SEQ ID NO: 21987 - DNA, 504 bp, Oryza sativa
aatattactagttacagtagtagttagctattgcacaaatattacttcttctatatctggaccctcttcttgcatagactttaataacttattagtgatgaagttctggttgaatgtggttcctcacttcctcctgttggtgtgctactgacttcatcaactgatacaagtttctgcaccacacattccatggtaggtcttctgactctatcttcttcaaggcatgaaacagccaattccatcatcattcttgcttgtgcgctgttgaattggccattcaatcgggtgtcaatgaagtcggcaatccaaaactgatcgtcgccatctgacttaagttgctctgagcatagcctgattacccttcccagggccattttcacgtcctcatcatcattcttttccaattctgaaacacgagctcccttcagcaattcgaggagcacgactccgaagctgtacacatctaccttcgctgttattggcagactgtaaacccattcaggt

SEQ ID NO: 21988 - DNA, 1801 bp, Oryza sativa
tgtgacatacacagctgcaaagaggtcaagtgtgaaccgtcctgcagggacaatcgagatgaagcccattgagtcaatcacaaaggaggtaatccgaagcttcatgatagaaaaggtattgccagctgttcgggctaagtggcctcgtgaagacgctggcaaacctatatacatccagcaggataatgctcggcctcatattgcaccggacgacagaatgttttgtgaggccgcgaagcaagacggctttaacatcaaacttgtttgccagccggcaaattccccatatttgaatgtcttggatctgggtttcttcaactccattcagtccatccagtacaaatcagcctcaacaacaacagaagaacttgtagccgccatcgatcgagcatttgaagattatccagtgaggctatcaaacaggattttcttgtctcttcacgcatgcatgagggaagtcatagaagtactcggtgacaactcctatgatcttccacacataaaaaaaggagtgcttgaaaggcaaggtcgccttcctttgcaactaaggtgtgatgctaagtcagtaaataatgctaacaattatctcaggtaaactactttggttatattttattttcatgaaaatcgcttcatgtgcctaactagtttgatgtgtgctaattagtggcattctttttactccttttcaggaccatggcagatacctgatatgaatttgtttgttgctgcagcagggtgcggatatgaaattgctgctaagctaatctgaaatttttggtgttgctgctgttgctgttgctgctgttgttgatatctgaaattgttggtgttactgctgttgctgatatctgaaattgttggtgctgttgttgatctgaacagaatgaattggaggctttcttttttttctctctttttctagaaagtagcccatgtgtgcagtcattctgtgcagaacatgtcctttgatttttgagaaagcaggaggatatatggacctgaatatgtcctttgatttttttattagtatttttatttcacatgaacacattagctaagcttatctaagatcaatggtgtgaactgtcaatggtcctttgatataattacagactagctatctcaatttacaagaaatagcaactgggatggcagcagccactttacaagctctgtgtctgaatactctgtttacagactagctatctcaatttacaagaaacatcagctgggatggcagcagccactttacaagcttggtgtgcatctctgaatctgtatctcaagttccaatttttgtttccaatttctcattataacatccaaaattcccacgcatattacatcactgacagtactaagcactaatcatctgatcaaatacacaacaatcagtccccagtgaacacgaccagaatttcccagaaacagaaaaatttccccttcgatgaacatcaaatagccaagcaaatgcaatgtgcattctctaaaaaacgaacatcaacaatcaacatacggctaaccaaatcagacaatctgcaggccgttcagtagcttaatctgcaatcaagtgcacagctatcttaaccggatgaaataatcaggtaaattctggacatccagctgaagaaagaaaaaagaaaggaggagacttgtggcaatggagcttttcgaagcccggcgatctcctgcaccaacgagacgtgcaccagcaccgtcctccacgccatgtatcagcctgcgaacccgccgccgccgcgagcagcgaacgaaagaatcagggaaaagccctcgagcc

SEQ ID NO: 21989 - DNA, 968 bp, Oryza sativa
cccagaaatagaagactccaacattgttcaaccggcttcatcaacagaaacaagcatctccaccacactttccatggtgggtcttctaggctctgtcttcttccagacatgaaactgcaagctccatcatcactcttgcttgcaagttgttgaatcgagtgtttaatctggcgtcaatgaagtcagcaatccatgactgttcatccccatcagacgttagattctctgctagcattctaatgattcttccgagaaccatttccacctcctcatctttgtttgtttcaaggtccgaaacacgagctccttttagtagttctagaagcaccactccaaagctgtagacatcaacctttgctgttatcggaagactagaaacccattcaggcgctaaatagcctctagttccttggatccgtgacacgtttaaattggatcctcctctatgtagcaactttgcaaggccaaagtcagctatctttggctccaaattctcatcaagcagtatattttcaggttttatgtcacagtggatgacccactccaagcactcgtgatgaagatatgccaatcccttagccacacctagagcaatcttaaatctttgctcccattctagtaaggcttgtgattcctgactgtcaaacaatattttatccaatgaaccgttctccacgtattctgaaatcaatatcctgtgtggatcatcagaacagaatccccaaaccctcactagattcatgtggtagatcctgccaatcacactcagttcatgcttgaattcttcttcgccctggtttatgtctaacaactttttcacggctactgctctcatgtcctttaagatccccttgtatacaatgcctgatgctcctcgtccaatctcatcctgaaactttctggtggctatcatcagctctctgtaggtgtatctacggaaatggtttgttaccatttcatagccaacc

SEQ ID NO: 21990 - DNA, 659 bp, Oryza sativa
cacggatgcttgcaaaggtttcttctagatccgagagcaaatcatccttttgcttggtcttgacgactacatcatccacataggcttcaacgttgcggccaatttgtgttgagaaacatctctgaatcatacgttgataagttgctcctgcattttttagtccaaacggcatggtgacgtagcagtatgcaccaaaaggcgtgatgaatgaagtcttcaagcagtcggattccttcagtcggatctgatgataccccgagtagcagtccaaaaaactgagaagctcacagccggcggttgagtcaactacctggtcaatgcgaggcaacccaaaaggatctttgggacaagacttgttgaggtcggtataatcaacacacatgcgccactgtcctgtctttttccgaaccaggaccgggttagccagccagtcgggatgaaggacttctttgatgaagcctgctgctaacagcttggtcaattcctccttgatcgcgtccttcctatcttgtgcaaatcggcggagtcgttgtttaataggcttggcgtcttctttgacatgtaaggagtgctcaatcacctctctgggaataccgggcatatccgaaggtttccacgcaaagatatctttattattttgaagaaaggtgatgagcgcg

SEQ ID NO: 21991 - DNA, 1484 bp, Oryza sativa
aactaggatagcatcatcaacatcagaatcgaagaaaggatcaaactgaggctgtacattctcctggccagggtcaacacctatctcctctagagtgactaggacatcatcatcagcatttgaatcgaagggatcaaatcagcctctccattgccttgagcatctatggcagcactgtgatcgaatctagcctctccattgccttgagcatctttggcagcactgtgatcaaatccagcctctccgggatctgtggcagcatatgtatctcccggttccaaatttaaatcaatatccattgttctttgctctcgaccttgacaaattccatgggttgtagcagaaggtgatgttcgttgttgtatagaaggagaccttatccgtatgctaggggacagtaacattctgctcaacggggttctaaagaatggcattgccacgcagggagacttcctttttttgcctcttttccctccaacattggacccatctagtgtaaccctgcaaaaggtgttgcaacgaagttgtcatgaatgcacattttggattataagttgcatcaaatgttaagagtgaaaagcatagtaaggttctgagaaaagataaaagcatccattctgtaagacatctagtactggttgtatagcataactggacagacaaccatgtgatctaacaagaaattatacaataacaagaactccaatttatgaagcaataagataaggaaaagacttatgctaaatgtttgcataaactagaacaaccagcaacagctccctgtaaatagaaatacagtgctatttccttgctctaattaatcgaattttgcacaagcagtagccatgaactgaactatgtgaggttagatgtgaaaattcatttaacctcgcaatagtgagcatctatagagttttcctgaaaataacacattttaggaacacaaaatacatcatcgaaaaaaaatcgaatacgaaccttggagagagagcagttgaggacaaagccgcggcagcgaggcgctcgacacgatcctctgcaccgccgtcgccgacctcctgagccgctttcttccatggtgtgacaaatttgcgacgtctacctaccctgccctcctccttcgtcatgaccaacggcgtccaggaagaacacccggtatcttccatacaaaatcaagaacggacaagaaatgaacaaccaaataaacatggtaaaaaataccagaagacaagaaacacatggtaaacaacaaccgatcaattcaaagaaactactccgtaaaccatacactgttgtccaggaatcagatagaatttatcattttaatttagttctgctggtgtagctcaactatagtgtcagcattacattaggcacaaataatgttcagataatatctactttatccactgatctagctcaactgtggtgtcagcattgcattagtcacagattacctaggtaaaactgctaattacaagtga

SEQ ID NO: 21992 - DNA, 1433 bp, Oryza sativa
tactacgtccattccaaaatataaccatttttatctataaatctagacatataatttttatctataaatctggacatacagttatatagattcatagttaaaaatatttacattttgggacaaagggagtagctagctagctacttcaactacaactgcatgtattataggccctgtttagattttaacttttttcttcaaactttcaacttttcaactttttcgtcagatcgaactttcctatacataaatttttcaactttttcatgctgcatacgtaggtggtgtgatgatgcacggcgtccgatatttgacgtcctacgcggagtcttttccgaagaaacgcattgtcgttcgcgcgttccgctgttccgcacgcgtgacctgatgcgacgcggacaccgacaccgagacggtttgggactggatcagagtatccgtctatatatttcattcgtcgccacgcgtcatcagatcgatcttcctagtagtgctgatccagagacgatcgatccatggagcaggtcgcgccgccgccggtgcgatactgcggcgtcacggaagactacgagcagcagttggacgaggagccaccctcaccgctgtccccgagccgggtctcttccccgctgccgctgccggagcagaaactgtccaccgcatatcttgtggagctccggccgcggcgcaagaacgccctcataaacaacggcccacgctacaggtgtggagatcatgggtatcccatatctacacggcgatggtattcgagctgggcacaggatacctaatgtagatagaatttcttatttgtatcttgggtttgtttcttaacttgtgtatcaaggaaacaccctgaaacttagtcggttacgactgtatcttacctatattttcatattccgttagggatatagattatcttttgtaacccggactccttcccatatataaggggggtccgggcgcctctaggggcatatgttgatttttctcgaatcatacaatcaataatacactcggcggattcatccccggacaggagtagggtattacttcttttataagaaggcctgaacctgtataaatcctttgtctcaaaacccatacacttttccagcttgatagccacccccttttattattgccgaaatctagtttcgacagttggcgcgccaggtaggggtagcgtcaagcttttcgccgatcagtgcaatgggtcctttctccggcatcgacgacctcgtcttcccacccgggcagacgtttcggttcggcagcctcgacttcgtcaccaacaacttcggcaagatttctctccttgactcggaatcggaccagtcgggagagaaccggatctcagtcccgtttggattcccaaacgcggctgaaacctacttcaagaccatctcaatcgagtcggcttcaaacca

SEQ ID NO: 21993 - DNA, 679 bp, Oryza sativa
ttctcaattgaagaaatgcttaagagtgctcattgagcaaattggcctggatcagatcgagatacagaggatctgacttgtggaaagaaatccatccgcatccaaaccagcaaaagaaacacacaaagacgagtggtcagttttacaaggccaaatgaagcaatcattcaaagttgaggctacatgggaacgagaggataaattgaagtccacccatctgcacttcttagccagcacctccgaatcttagggatgagatttcatttaatacgggtagatttgtaataccctgagtttttcccctaagtaataattccattaatagtacatttctagaaattgccaaaaaaatcttataggaaaatctacaacaataaaacccttaaataataatctattctagttgggtgtaattttcttaaattccccatgctttaaattactcacagtatttttgcttgattttttttagagaattggagctacttttaataacccataaacaaatatcataataaataaattcataagagcttagaaaaaactctcatactcttgggtccactctcggtgcatccttcctccccttccgcccgcgcatgctagcaagtcgccatagccatatcctcttcacactcatgccagcctagcctcccatgtagtcgtcaccctaggacac

SEQ ID NO: 21994 - DNA, 871 bp, Oryza sativa
acatttgtgatatttttgacctgattaggcctccatgaaactctctacatgttactagatacaaactgattttatcaaattggctactctaagtattacaaagtattatctgggagaagatctgtacaaaggggggcattggattattcttccagagcaaaaaaccgatgaaattatctggccaagcctggccacaatcaagcaatacctactttgatctaatccctctacatttccaatatgtatgtcatcatacttgtcatatgtatagaactttgtatgtactaaacatggccgtgcgaaaactttggttttgattccagataactagaaattctccttgtggaagtcgaatttcgtgctcgtctttctcgagaaatcttgagcgagctcacgcagttccttcgtcagcaccggcgcgccacagtagaacacccctgtaatgtcaaagaagaatcaaatttagtgtaaaaattcagaattccaatagtgcatgaagacatgataggattggattgagatgatagcatcatgcctgataatgatacagttaggtaagggagcacttcttgaaaacatggcaccagcatatcttgggaatctttttgtgcatatgaactgaactttatgggtgaagaattttaggatacctgactatgtattgtttaatgtatagctcgagcctaaagggactgtatgccaagcggttgtaactatcatcaagtaacaatgattggtcaatccataaattatatagtactaatatgattcctattcaacctaacaaacttctccccaatccacaaactaagtgcataaataaacaaatctcaaaagtctgatgttgctaatgctatgcatgtattgcttg

SEQ ID NO: 21995 - DNA, 2166 bp, Oryza sativa
  unsure (1)..(2166): unsure at all n locations
ataaggtcagaagtcaggatagtggtacctcaagctcccgagtgaatgaagcaccagacaccagtcgtgtgacactggtccaacacctgattaaccagaaccgattgcttatagagatactacagtagcatcagacgccaatgctgaacctgaatcaaatacaacctcaagtgcagttggaggcagtccaagcactcaccccacaagtcagcatgccgccagcatcccgaaggacccatgatgacgtgccacctgttgacccaaaagaagcaagtaacatttgctttacgtgtgatgagcaagtgcactatgcaagggagcgtcctcagcagaaaagaaaaacaccaatgggaaccgaagatgaagtccgtaagatgatcattaccagcacagaatggcctccaccaggaatgacaagacgtcagagaagaaataccttccgaggtgcaccacagttgacagagcatcttttagctaatggaggtagagtatctgatagtgcagattcagatcaagtctcgtcagatgatgaagatgaaatggaacgtaaggcatgctctcgttgtggagaaatcggtcatgtcgccagctcgtgtgccactatatgcgttcattgcgaggaaggccatccacccgacaggtgtccaacgagcaggatcacttgtttcttttgtgaaggaactgatcatgtaccaaaagattgtcaattcagttttctgccgacgaagaagatggccaaccaacccgccagttccaacggagagaagcatcaaggcaacaccaatcctcgccaagattacagtttcagcctaactccagtgtcaggacagaggaatcaaatgagaaaagaaaatgccgagtccgggaagatatctgttgcttcaattgtcaaggaatgggtcatttcgccgacaagtgcccaaaaccgagaaacatagctgccggcatgtcagtccacgcaaccccctgcaatcagaagcttgctcctcaacgaattgtcatccatgcatccagaagcagtcctatagcccgcgttgcaacagctccaattccaatgaatgcactaccacaaggtgtcaatgctcaatttcagccccagccaccagctgacaagacagaggtcagtatctgtgttgtacctttggaagttccaatacagcagctgagaaatcaagtacaagatgaagaacccgagtgtaagaaagttattgtttgttacaactgcagtgaagaagggcattactccaaaaactgtccccaaccaaggcaaaatcggcctccacattttcgccaatttacaggaagcaaccatgccaatcaccaagtagtcagtggagcaaatgcagtacctgttaagcctagtgctagtcagaagcaaccataatactcttgtatcggtgttcaagtacttttgttttatagctgttccccgtcaatcatgtaataacagagaaacatgagataatgcgtgagattggcaagtttatgtagggtccatattaagattgcaagtgttgtgtgatgggtacatttggttgatgattaaggaganttagggtttcattttcgtaagctcatagtgtattatgaatcaagtaattaagggattgatggggaagaaaatcaagtgatcaataaaagagatatttgtttggattaagagtatgacatgtgtcttattcggattaaaggtaggtatttgttgtggaaaaattggatatgttgatagtatgtgtcttattaggtagtcagctctaatagtaaaattgttatgttaggaatttgtattcaaaattgtaaaagnttatatgtgtgtgaatcttcgtgtaggaattagttgagggatataataagaaattgataatagagtataaatattagtctaattaataagcgaatagaatgtcattacagaggtagatagttcctttcaatcaataaagttgtaagtaggggaaaataaataaatggcgcagagggttccattccacaggcagtttgaccaaggatacacttaatctccacaccttcagcctcattgtagaattcttcttatgatgaatgattgcaaggtgagtatatgacatactcagcaagccacgcagcaaatatgcaagtgcacaggataccaaaggatggcataatagggtttcatctgcaaaagca

SEQ ID NO: 21996 - DNA, 2602 bp, Oryza sativa
cgctccgctcctcctcccgactcggcgacacctccctcggcatcgcggcatcgccgtcgacctcgtccgcgcctccgtttcgctcgccgaccgtcggagcaccgtcgtcatcgtcatcccgagccgcgccgccgtctccctccgctccggccgccgttctcgtcgtcgtagttgtcccggggtgagccgaggaccgtcgttcgccttcccccttccctcctctctctcgggcgccgctccgccgcgccgatggtcgccggcggtgaccatcggggcgcgggcgcgtcgctcccgtcggccgcgccggagaggccgccctcgggcgcgccctcgcggctgccaagtgggcccggccgtcagccgcccgcgcccgcgggtgcggctgacgcgtgggacccacggcgccgaccgccgccagccgcgtgcgcccggtccaccgtggaccgtggggctgacgcgtgggccccactccccgtggacccggtccgcgcgtcccctccctcggctgacgcaataaatcggttttttaattaaaatttaaatgaagaaattcgtaaatatccatttaaagagcatataaacttcaaatggccatatcttggccatttgaactcggaattggaccgttcaagtctctaatttttccttaagatgtaaagaacccatttttgtgctttgtttctgcttgttatatggagtttattagagtaaaagccttttcttttccgttggtcgtgtagacgctgcagcttcggaagatccgctcttcgtggaagtcgaagccgtcgtttgggaaagcaagcaaggcaagtcacatcatccttgaacatattgaatcccagtttataaaattatgttgatttaaattattgcattaccgctttatttaaattcccgcgttatcactgttttatttagccatgcctatttacctttgttatgaccttattattgttattgttatgattattaccttgttcaccctagagtaaacaaaacctcaactagtggacactctactcgtggtatccctagtttaaatttaggtagatgcttcgcaatttaataggacaacattagttggatttcataactttagacttgggaaattctcatatcatttggacaccatggaatggttggcttatgttggaattggacatacacctctcttcctctttcaaaacccctaaaacctgttttcggtggggtttgggtgcatgccagttatgggaagtagcaccccggccactataaggattaagctcgggcctctgttgcaaagcactaccgtactaaccacatgtctaatgggtaaggcttaactcggtgctcagtctagtcctgaacaaaaggacacggattggagatggatgaagtcgggcgtcgatggacattctccagggcaaatgaaggctacacgagctgcggcccggtagtcgagatgtcatacggcggagggttggtgcccaatgctaggggctcatttctacctgcctgtcccgggtatcccggccgtaggtaggattgggtcggtacttttgttcacggctaggatgggtgaagggttatgtcacatgtttacgatgggtttcaaggccatggaatgcggagtaaagatgtgttttgtgggtaaagatgtacacttctgatcagagtaaatctatttgaatagccgagccctcggatatgggcaagcctagcaatgtacccaagttagtggtttaattcttaaaatttgcttaacaactaaaatgtggaaaggttggcctgggttggcttgggacgagctgggacccaggtcgggttgccagttcggtccgaatcatcgtaggccttgggttaaggcaggttcgtgtgggtccacggccttgtttaataatactgtgtagctctaggatcgtctttataaaatagctttgggcaactaagtgacttttaaatgctgtttactgcaaaacttaacccctattattatccccttgtactcccttgcattaatcatgcatctgccggtgtggcttgctgagtactgtggttgtactcattcttgctcaatcttttcccccttcagtaagagaagctttggagaagatgtcttaggtggagtcctggcttataccccagttgagcgcctgtgaagatggagccgtaggcccgctagtccgctgctgtttatttttgattgtcaggccttaagtgcctttgtaataatgtaaatattatcgatataataaagatgtgtcttttatatcatgtttgtatggtgtaccccggcttttcctgggacggggattaatacactagcgttcgggaaaaggcaattttcccggtcgcgacaagctggtatcagagccatctcgactgtaggataagccaagtggataaaacctaaggacatattttataaataaaactatttgcgaaattcctcttttttctccttcccccaatgctatttgcaaagggtttacccttttcttccttcttcaaatttcaactagtactaggtggtcagctttgcgaagaagaagatgtcgtcagttgtttgccgaagctccggaagactgcaggatccgctagcgaagcgaaggaagcagtg

SEQ ID NO: 21997 - DNA, 7673 bp, Oryza sativa
agggggagatgggccgagagaaattcggcccatcgaacccgggggaggcaaaatagacttttgcggaggaattgatttggaaggatttggattcggaattgaactcgacgatagatcggggatttgagatctgagaagacacggacgctagacgacaagcaaagaaacaaatttcgcaattagggtttttaagagataattttcccgctaggcgccacgatggaacgggcgctacagaggcgggggatggagttatagagagggaggcaaagcggcgacaagggtggaggtggtagatctggcgatgtccactctcccactccaacacctctctcatcggccggagaagaaggaggatgcagggacctcgaggagatgatgatggaggtagagcacggtgagacccacatggaggtagatcttgccgcagggcagggacccaacgctcaggacaatgcaactgacaatagtgacatgacgtggatatgaaactcgaggcgatgctgctgcatcttctatccagcaagatagggaggaggaggtgagacgctggcaggcaaggtcacggaggaggtggagcttggtgctggagacaacggtgttgatctctaccaccgaggtcgagcctagggccaagcgagagatgttagtggtgggtggctatcaatgtagctgttgttcgattggagattaaggacgagggagagaaaagaggaagaggggataatatgtacactgataggcgagccctaccaattttattgttattacttcttccgtttcataatgtaagactttatagcgttgcccatatttatatatatatattaatgaatctagacatatatgtgtttctagattcattaatatctatatgaatgcaggaaatgctataatgtcttgcattatgaaacggagggagcattagctaacatgactatcacatatcagtcaaactactgccacgtggcaccaaagtcgctctggatttagttaagggataattcattgggaatgaaagaagagtatatgataacaaatgtatggtgtatggtgttagagtgagtgtgcatattggaggggtgggggtttgtttaaactgtactatgccaaaagtttaggtggtaaattagattttttttcctctctttttattttacagttgaggtgcttcaactgcattgatatggagaaaactttgcttcaatttaattactcactctgtcccattttaagtgcaaccatgagtttccatgtccaactttgatcgtctgttttatttgaattttttttataattagtatttttgttgttatgagatgataaaatatgaataatactttattcatgacttatgtttttaaatttttttaaataagacggacgattaaaattgggcacggaaaattaaggctacacttaaaatgggacggagggagtatctagctaggatgcagtaagcaattagtagggtaaaatctgaagcaaactgactccataatatcctaggtgacaggtaaaacaacaatacaattgatcaattaaggtgaacacatgtgaaagggcctgtagcctagtggttacaagagcctcagtagcacataaggtcctgggtttgactcctcatgagagcgaatttttcaggatttaacggcgttgtgctttcagtggtagacgacatacccgtcaacaacgaggcgcctgtggtgactgtcaatctcgaggatttgccagcccagtcttcgaagatacttatagggtagggtttgtgtgcgtgcgttgataagggtgagtgcacgtgcgttgtgagtgtctacgtcagcgaggtgtctgtggtgacttcgtcaatctcgaggatttgccgtgcgttgagtgtctacgttatactgtgtacagggccagctctacatattttagggccctaggccaactccatgacatgggcccttaggcatacactctctctctatatacacatatgcactttggatttttaaagtatacttttgaagcattcatccgctaatcatgctgaaaataaatattgataatatcctctatatatgttgctaaaaataccaaaagagcattaaaatggaattactatggttaccttgaattcttgacttaggatcaagctctagggacttcattaataatacttgacaaaagataaaatgacagatatccatttgcttctcataaaaaaatactccttcgggcatttcttgatgcaaaatcattaatgacggtatcgagatcaatattttccaagacattcttctcaatgcagcacatagccaagccatttaatctttcttgtgacatggttgatctcaaatagtttttcaataactttaattttgagaagcttctttcagttgaggctactgtcacaggcacagttaagaggattcgataggcaactaaaacatttggatagcaatctgcagctgtaatgaattcaagaatctcaggtgctgacttcaaagcatctggcaaagtcgcttgcaacacttttaattcagaaaagaagtcatttagctcaacatcggatgagttattatgtgaaaatgtctctacaaaattagtgcagcactgccatagatcagtatcatccaaggatttcaaattctttgaggtgaacaagaaaccaaacacattttcaaatgccttcaactgctcaaatcgactagtcaatgaggcaattgcaacatcaatcatgactaggaagtaattaactctaaaggactccacaactgattgttgttcttcattttggtcattttgttcatcaaaatgtttctttcttttagcttgacgttttgtaggaaattttggttctatatccatgtcagatgcaatgacttttgcaatatctatactagaagtgaagccttcatttctgtacctctggaaaaatgatatgacaccttcgatttgcttgagagtagcatccatgcacacaatctcagactgcaacttcttgctgaccatatttatagaaaataatatatcatgccaaataaccattccaactaaatattcaaaattctctagtgcagtgaccaaagattgagcatcactcacagcttttgggtcatcggtagaagctttctctagttccaacaaagctgaccttatttggggagtttggtatctaatagcttggacactttttattcgactctcccatcgtgtattacacactgatttgacagtcaagtgtggaacattctcaagaaaaatcttccatctttttgtcgagcatgaaaatagtgtatatattcgttgtataacaccaaagaacgaaatagctttattgcacgattttgccatatcacatagagttaaatttagactatgacatgcacatggcatgtataatgctcttggattaatttcaagcaaacgtttctgaactccttggtgtttccccttcatattagaaccattgtcataaccttgtcctctcacatcactgacattcaattcaagggagtccaatgccttcatcagttcattaaaaagccccaatcccgatgtatcatccaccttcaaaaactctagaaagaactcctcgactcttggaatattactcgataaattgacacaacgcacaattaaagtcatttgttcttcatggctgacatccggggtacaatctaatattacagagaaatacttagcatccttgataaccctcataatataaactttcacagcctgagcaagaagggaaattagctcgttctgaatattgtggccgagatagtgatggtgaacttcatgattttgaatgcgtctaatgtggtcttgcatcacagaatcaaactcagcaaccatttcaattgtgcccagaaaattgccattgttatcttgataaagtttctcattggatcctcgaaaggccaaattatgtttagcaagaaacttcactgcagcaactattcttatcaaaacttgtctccaacgctctttctcctttgaaattccccgttgcaaatcatcatcaattgtctgattttggcttaacctcaacctaagttcattccaagtattcatgttttttatatgctccacactgttctcatgctgtttgagtcttccactgagatgcttccagtccttcaatccatcagaagctaacaaacttttgctctgatttgatttgaacagtttacagcaaaaacaatatactttgtccacatgcttagagtaaaccaaccattttctatcaatcacctcaccattgctcagctttctagagtagtaagcatacgaaaaatgtctaccactactatctgaagggaacagtagattgaattctctgataggccccttttcaattaatatatctctccccctgttgtcaagattttcccaagtcctaggatcatagatattctcatgtacatcaacatttgcattctcagtacaaggtgaacgctgcaaattttcatgttctgaatcatcatgattagcgtcatcttcagtatttacaaaaagaacaagttgctgctcttgttcttcagtactaggataatctgcctcaggattttcatcaggaacagcactacttgatgccgaaaagaactttatgtatagcacccttctgtgattcaataaactgatctcctcgttttctttttttccttttcttagcaccagataaatgctttttaggtaacattgcaaactaaacgtacaaaggaaactgatctttagtatttactaattactaatgactgattaagtgattagtacttcactagttcaattcaatggacaatatggttacagcacagtagtatgcaagtacctgtaaattgaaacctgcagacactctggaagttgaggcagattcacgttgtgttgtgtcggcggtcgccggtcggccggtgtccaaggcgaacagtcgacagacaaaggcacaaagctgtgaagggctgaatgctgaagggatcgccggcggctcggcgtggggcgaacttgcgcaggcgccgtggagggcgctggaggcggattggcggagactgccgccggtagaggagaggagacgagaagacaaaagtttggaacttggacggtcgtgtatgcccaatgattcgatcagaaacttgtatacgtgcatatggtatacctaatacatacctaggtctgggcccctactttttctgggccctaggccatcgcacttcttgccgtggcccagagccggtcctgactatgtaattctaaaaaaaaaattaaggtgaacacacaccctcaaaattaacatgaaagggagtgcttggcagcctctacggacaccacacacgcatgcatgtgcaagttggttatctatcacatttggtgtgataagagtcaacttcatattagacgtacacattaaacatgcctatatgcctatatcagcagagaccatcgtaaaagctttatcaatcatagttaagcttaaaccgatatgcatatatccgaaaaaagaaaagccggcgatcgatcgagaaactagcagtgctaatcaccggaaaggtggtaaattaaagcagcaaagctagcctaataaagcgggacagatgcgcctgatgatgcgatgatttagcagtactagaattaagctagattgatctcttgctcctaataacaacagctcacatgggggatatgggagaggatgatagcgcagctcaacctctaccggcgccgtcccggccgtagagcgaaggaagaagaagaaggaggagaagaatcgtattgtgtgccaatcatgcgccgatggatgcgggggtttactacggtccccgacgagtaccttggtcagccagctctttttctctcttgtatcccccatccatcggcagcatcatgcagtcaggcagggaagtatccaaaagtgaacatttggagtaggccaagcacacacccacctacctacctagctaccaacctgcctgcctacttcagcactatagctaccttagctagcgatagaaagatcacactgatcatctccaggaatgcatgtactcctcctgtcatactgtcctaggttttaaaatatggagtaagtgttttttatttaaaaattatactacactaaaaacctatttttaacatgccatattttacttcatcgaaagcccgaaagaattattacccgcgtgtaaaaataagttgggggggggggggggcttgcgaggcacaacgatgatggcggcggctttggttttttagtgtttattaaacgattattaacacgcaagcagatctttacgtggaccgattgtgacaatgtgtttgcacatacggctgcggttatgcatgtggaaatgcaatactattgtgggcatttgattagagatggtcgaccgaaccatctgtgcaaacccattttgaccgtttacaaaaatacattttgtcatagtgctataatataattatttatttgcttattttctcatctcattcgatcacaaccatacaaatctcttattcaattattttcatctactttttttatctcaatcaatcacaaccatatatcttaattactgctaaaacttctagagatgctcgtaattttgaactaggggagctgaggatagatttgggatgttttagtgagttaaacgtgttcacattttagactattgatggagaactaatgaaaccactttgtttttagccaacaaactccatattctgcgatagtctatgacttggagctttgtcgaatggatcctacacgtctatcattcatgggatcgaaagcgaatggaaggccaaataaaacaagaacatgctgtgattaattagaaacctgtgactccatagtgcggtgtagggaaaaaaaaagggaagttactagggcataagtttcttcctcatctgtaaggctgtaaccggttccaattccaaatcatttgtcaatacgtggacactcacatgcaccatgcatgtcctttctagctaggataaacaccattatcatccgagctaattgtcactttattttttgtcagatgaaatatagtcgaaaatcaaagttagagcttgtgatgctatagtgaagcattagtcattatttttcatctaaaggcgaagagagatcatgacaggtgactttactggtaacagaaatctattttcattgacaactccattgctggtatggtcgtactggcccaaacgattgctacagcttattgggttgctaatataatatcaacatgctacttttcttgtcatttgcctactgattagaggtgtgagctagacaaagttttatcataagaaaatccagaaaatatcatcggcaaatgccctaatataagaaatgtcattgatagacccaacttcagtgaaataccatcatacaagtgcctttgtcccagaaatatactatcgccgttaggtttccgttaagtcctataaaaagactattttacccctagtaactgttaagagctgattaaaacttttgctctttctaccagcttacgctaatttgtaggttgctttccatactaaattattgtaagttgacagaaagaacaaacattttaatcaactttcaacaattcgtaggggtgaaatggtctttttatagtagttaacggagggttgctaaccaaaacctaacaatgatagcatttctggaaaaaaaaagt

SEQ ID NO: 21998 - DNA, 581 bp, Oryza sativa
tgtgattatgatgaataagatcaatgaccggcttcggccaataggatgtagggttattacctgataattcaggggcccgaacctgtataaaaatcatcgtctccatctcttttacctcagtctcgcgtatatcttagtaccaacgatccccatactatgcaaataccggaatcgcgacatcaaatgtcgacaatactccatccgtattttaatgtatgacaccgttgacttttcgactaacgtttgaccatttgttttattcaaaatttttgtgtaaatataaaaatatttatgccatgcttaaagaacatttaatgaatcaagtcacattaaaataaatgataattatataaattttttacataagacgaatggtcaaacgtcaaacacaaaaattaacggcgtcatgcaaggtagtcctacgaacggagtttccataaaaacacattccttacaaaccttgactaggattgaccttcttcttcttttttttctaatacagagaatggataccgtgtacacaacccaacaaccgtccatccactcgttcaggcgctcacacccccgcaatccattccgat

SEQ ID NO: 21999 - DNA, 651 bp, Oryza sativa
ttggttagttcctaaatagcatacaggattattgttcactataaccaactaaaatatagtgattgctttagtgagttataaaaacaaagtagatattaattgcttagacgtggtgtttaggtagttgttatccagtaattactgcgtatcccacagtacgtttgagtggtgtagaggtggtgacagccctcgagatcacttaagtcctccctatccgggtacgtagtagagcgatatctgggaacaacgggtttccagtgcctgaagtattgcgttacgattaaaattaagctttccctagatgtttctcactactaaatcctctctatcctagcctatcatctgcttggtgtccttggatgaactgaaggaagatctgatcacacacgttcccttggattcaatacccttggaatactccatagggaaagtactgcatcggtatatccgtgcgcttgcggattttatctgtgatcataagaactaccaacaagcatttctggcaccatcaccaaagaacggttgctgatcatttccaaacctagttcatcctcgtatcatttttaagttttttattatacctttacccctactatcctatagaagtattcctatcaaactcttctcaaccatgaaacaacctctttttta

SEQ ID NO: 22000 - DNA, 601 bp, Oryza sativa
tccagcgtcgccgccacctcctccacgccggcctgccctccgtttcgcgaggtgacccccggagctgcgtttccgccgtcgcccatccatttcctccgcgccggccgcctccagtcgcctccatctccctgcctgcacgccggtcgacgtcgccaccacctccctcggctccacgacgccgctctcatccccggcatcacctcctcctcgcccgaacatcgccggaacaccgtcgcccgcgccggcctcaccttcctcctcgtcgacatctcctccggctgcccctttcgccatgcccgtgcatcagccgacgctgccgtcccctccctcggcatggtgacgtagccctccacctcgtccactcctcggtttcgccggaacgccatcgccgcgagcccctccatccgcctcgccggagttgttcggccgcccgtccctccacgccgtgcaccggtcggccacacccccatcatcttcggcatcgcagctgcgacgtcgtactcggcctcgcctcccctccgaccgaacaccgccggtgcccgtcgtcaccttcaccggtccctctcgcccggctcgtcgtttgcggcgccgcctccgtcat

SEQ ID NO: 22001 - DNA, 1300 bp, Oryza sativa
catccaaaccagagcaatccaaaaggtcgaatgtactgatgcagccttgaacgacgccgatgtaaacgatataattgcctgggccggcgaaacatcggtgcagccccgcgtcaggtgccaagtcccgccggacgataaaataaagtagaaaaggtaaaaggaggcgatgcgccgaattgtattgatcgtgaagataaattacatagacctcgggtgtacatatttatacccataggttgatacaagtccttctcggacaagaaagaaactttcctaaagataaaaggaaactaacaaactattcctaattaatagataaactgacatgccgcatccttcttgaactcggactcttctggataaattccctttagttgatccgactccatcgagaacacggttgctggcgatttgacgactctcatcggctgattccataactctgaaggcgatactgactctaagtcgatgatgactttgggctaaccaaatttcgttgttaacacaatgcagccgtccggctggacgtcggcgtggcagcggccagcgtagatgttgtcctcatgtatccgtagacgttaggcgtcgcggagctggcgacgcttgttcatgacgttgcggaggtcggcgtttagccgacgtcccacctcgatcttgtcgcgcaggtcgctggtgcgcagacttgggtgtgaccttcccgcttgagatgcctcgacacgccttgacccggtattttgtggcgggatggtctcttgccagaggagtcgctggcagtggaggcggtcagtggtacttcggtgtgctggacagcggcggcatccaccatggccttcacctgagcgatggtggtcttgacggccgggtcgcctggaatcggcatgttgtcgaggagggccttggcggctatcatgttgttctgtagcgtggtgaagacatcatgttctcccaacttgacttggaggatggcattttgggcgagacggccgcgctgtcgcagctcgtttagacgccgagtgaggtcctcctgctgctagtggatacggcgcttctcctcttcgtactcccttttctcctcgtccgtctcttgaaagacgatgaagacctcgcgggagtgatggcttgaagtccgggtgttgttggagcttcccgagtccgagtcggagagacgtacagactcatcaaggaaaccaacccagcaggatctgagctcccccgcagtcgaggacggtgacgcggagcggccgtggtgtcccgggcaccgcgggggtttggacgtgatcgggcggctggtgtcgaggtt

SEQ ID NO: 22002 - DNA, 7098 bp, Oryza sativa
atcggacaaaagatagctgatgcagccgatatcacgaagatggttatataatcgtatacgggattgatcgacgtgctgtgcaaggattgccatgatagagataagctcacggataggcaattgtatctattaattagggtattttaaatagtttctttaaagatatgtttcggcaagagtctgcttaaaagacttgtttgtatcttaacgattgtacccattttagagtcgtgtccggtaaggactagtcatgtatctcgagtataaatataacccgatcctatgtaattagacacacacagttcaataacactttcggcgcatcgccaccttttctcttttcgttactttcgacgagttcttgcttcgagttgggctgcatcggtttcgatctccagtaagaggtaaaacttgttatggcgacttgtgttctcgggattagtgcttacatcttcatgacactctaatcttgtttatgtaaatcgtcaagttatcatatatgttatataatctctatcaatattgttatctaaccctgaatcggttgccatctactattagaaagtagccgatagggttagatgccaacgttgatctaggttatatagcatatccatcatctctaagaggttttcactgacttgtttagatcttttgttactctttctgcttaatgctgcatcagttacgttcgatctattaagtaatatctagaaccttaatatctaacctgttttatgattatcgatagagatagaatcggggttttagccgatcttacttgatttagttatcttgttatctttatatttacttgatatactaaatctgccctttatattaagatcttagcgcgttaaaatatattaagcttactgtttagtacattttgcttgttttaatatcttagtataaagtggtatcggagtactagccgatacatattagatctagtttcatcggctaagctatgagtatatataatctttatcttgagatacttttagatattaagtgatttatactgtctcggcatgctgtccgatctatcccaatcacatgatttaaacatgcttcaagatatagattatatattactgatatctatagccgatcggatagatttaatcttatcttgcttttattattcattgccgatcgatctcaagatgacatcggctcaaggataaacgatatgtcatactctgtttatggatttaaccctgtttatttctttctttgtttcttgttggttacaagattaaaccaactgggatgcctttgaacccaagagcaagacataggacctgcactggagttaagcagatctcccagccagtgtgtgtttttcgcatcaacaaatatatagcatatgcgatgtgaatcccgaataacatgatccgagtgatatatcgactgctttgtaaaatatgatgcgagcaacttaaagttgtgtacatcatggaaaattcacatagcaaaacaactataaaagaagcttgtatgccggaataaagaaattttcaaagtatacatacaccatgcgtacactgctttaacaaatatgcttaagtccctaaaagacacatggtttcaccacacccagaaatatacgacatacgtggtgtaaaatccgagtaaataaactcataaagaatttaccaactgcttggaaaatgaccaaatgtataatcagcctaagccataatattggtcaataaatatgcacacttccgtggcaaaaaagcaacgatattgtatccaaccgattgctttataaatccaaacagtcccttgactatataaaaaaaattagctggacgactatataaagcttcactatttagcaccttttaaaatgcattgtaccaactcctaaaaagttaagtaacagcggtataaaaggattttaaggtattgggcacttgatcacgtgcacttttgcctaagcaaaaaatgcctaagtccctaaaagaacgtgataggccacacctgaaaatatgggctgcagacatattaggcctagacccaaatatgcccaccgatacccttgaataagacgtgtatagcacgcctattaatatgctcccgagtgacaaatctcccgggtgatgtagatcaagtacatatcatctgagtatcttctgaaccaagcagctatccctcatggagagtaccaaagtagatgtgataatcaaatcccgactagcgcaagtactcagctgatggccttcgcggggaatgatgaataatccagtctgtgagcataagaaattagctcatgaccatgaatccatgttgaatgtgttcggaattaatccaaattgaagatataatcctcgcacttgcgttgatgagcccctaagcatgtagcttatccttctgttatagtcacaattgtctattggtggtagctgacgtagtcaacatggagacgaaatgaccaacatgaagatgatatcacccatcagagccgatgaagatgtcagtggtggtaaagacaatgacaccaatcaaaggtgatgaagtcgcatagccgtggagacgaagaaaccagtcggcagcagacaagtcagccaacagtgaagacgaaggcgcccaacgacggcgacaaagttgtgcagcgatggtggcaaaataatcagtcagtgatagatgaggcgaccggtgaagaaaacgaagacgcccattagcagtaacacaataagccaatcatgaaggcgatgacaccaatcggtggcaacgaaggcaagccaacggtgaagacgtagatgctcatcaacgatgatggcaaaatccaccgatcatggagatgacaaaaacagtcggcaacggtagatgcaatagacggtaatgacaattggcagcagtagagatggccggttatgatgacgaagttgcctatcaatggaagcaaaataggctaaatcgaagaagcatgacaggatattgatgatgacgacgatgtcggtgatccagtcaatagcagagtaatagctgatgatgacgacgaggtcacctatcagcaattgcgtagtaggccaaccgtgaaggtgaaataataagtcggcaatgaaagtcggcgatgacggaagaaatcgaaggcaaagatgtagtcacccattaccaacagcggagatgtctgggccgatgaagtagagttgctggtgatgatgtcagtgataataattcatcaaattgttgagaagatatccatgctcgagtagttttcttgatgttggcatctgcataactaagattgatgcaacgcctcttgatttatgaagataatagtagaacttggtgttgaagctgttggagatgcttctcttggaggaaaatagatgttgttgttcaactcgtcaaatctgagttgattgtttgataactctaaactcccttagctcgaacttgggaagttgagaaacttgaagtagattgtggcaacgtccagaagctaaaattgtcggtaaaataattggagttgctgaagtaaaacgcctattctgaagcgtagacgaagataatgactcccgaagttgactcgttggctaattgattgattgcttcatcttgacataaaacttgtcaaattttgagccttctatttgtgtagcccccgactatttggttagttggaaaacaactgaacatagagttaagaactgtagctttttgtctagtactcatcatttgattgaagatatacgttgaggatgtctgagtagaaatattgaagattggaacaccacttgttgtagtaaaataacacggcatcatatttggtgaaacatgccgagatgtcgaggcacttgtagacgtcgtggttggtgaactagcaaggcttgcgaagtagaggcaatagagtttgccagtgccaaagataatgaagatgaagtcgctcaaccatggtgacaaagttgcatagccatgatgacgtgaacacgagtcggcggcaaccgaagcaaaccggtggcgaagacgcgtagtcgtgaagataaaaaccccagtcggcggcagcataatcagtcggtgatggaagaagcaaaatgatgatgaaaacgaagatgtccttgagtggcggcataaaaggccagcgtgaaagcgaagacaccatggacggcggtggagatgagccggcggtgatgacgatgacgcccatcgtcggtggtgtgaccaaccagccgtggaggcaaggacaccagtcggcggcgacgacgacaggccaacggcgaagacgtagaagcccatcgacgatagtgtgaccaactagccgtgtaggcaaagacacaccagtcggcggcagcggaagcaagctggcggtgaagacgatgacgcccatcgacggtggtgtgaccaaccaaccgtggaggcgaggaaacaccagtcggcggcagctgaggcaagccggtgatgaagacgtagacgttcaacaatagtggtgtgacaatttacccgtatagctcgaggacaccagtcagcggcgaacgaggcgcccggtcagtgaagacaatgacgcccaccaacgccggtgtgaccacccaccggaataggcaaggccattattcgccgccgaacaagccgcccggttggtaaagacaataacgccgaacgacgccggtgtgcccacccaccggaataggcaagacctccattggccgttgaagccaacccaccgttaaaaataaaattcattgacggttggttgtaaccaaccaaccgtggaggcgaggaaacatcagttggcgacagctgaagcagccggtcggtaaagacacagacgcccaacaacggtggtgtgacgaaccaaccgtgtaggcggagacactagtcggtggcgacagaggcaagccggcagtgaagacgtagacgcccaacaacggtggtgtgaccacccaaccgtataggcgaggacactagtcggcggcggatgaggcggccggtcggtgaagacgatgatgcccaacaaagtcggtgtgaccacccaaccgtataggcgaggacaccaatcggcgtcgacggaggcaagccgacggtgaagacgatgacgcccaacaacggtggtgtaaccaaccaaccgtataggcagaaacaccagtcggcgtcggcgatggcaggccggcggtgaagatgtagatgtccaatcaacgatggtgtgaccaaacaaccgtgtaggcggagacaccagtcggcggcgacgacggcaagccggtggtgaagacataaacgcccaacaacggtggtgtgaccatccaaccatgtaggcgaggacatcaatcggcagcggcgatggcaggccggcggtgaagacgtagacgcccaacaacggtggtgtgaccatccgaccgtataggcgaaggcaccagtcggcgacggtaaaggcaagccggtggtgatgttctgaccgatcccttcttgaagcgtaggagataagctaatagccatgaatccctattttgcatatccggatctggatcctgcataacaaacatataggatgagtagtatctgatgtaaatacagtacttgaggaaaatttaagtattttaaaatatctataaatatgtatttctcctcttgtcaattttgatttccccgagcagatgattccttacgtttaaacactctgcccgattactcattgacatgagttcgtcattaatgaaacaaagtttcacacatcagaatttactactcgggtacttttgcaattgttaagagcagaaaacaaattatcttatccctatgcttttgatttcttccgagtaatgcttagaaccttgcgttactcggtctatccaatgagcccccgggttctaggaatcggcccaaaggcaactatccatcaacaaactaaacataaagcataggaagatagaactctataacttgataggcactttatttttactcggattattcacaagcaatcaagataaatattgtgaaaattattgaaaaaatatgatataacatctatagcccccgactcactactcaatagagaaccaattgatgtagtgaggcagaggaaaagaaaaatatcatataaaaatgatgacttagctttttggtattccccttggtgacgacagagatggctgatgtgggaaaaaggtcgtccatcaatagcgactaaaacaccagccatggaggcagctgaggcgactggcgatgaagatgaggacgcccatcaacggtggtgtgaccaatcggcggtgtgaccagctaaccgtataggcaaaagcaccagtcagcggcggcgaaagcaggccggcggtgaagacgtagatgcccatcaacggcagtgtgaccaaccaactgtgtaggcagagacaccagtcaatggcggtgaaggcaagccggtggtgaagacgtagatgcccatcgacggcggtgtgaccaaccaaccttgtaggcgaggacaccagtcggcggcggcgaaggcagaccgacggtgaagacgtagacacccatcgacggtgatgtgaccaaccaaccgtataggcacaaacactagtcggcggcggcgaaggcgtacaaccgtggtggcgaaaaccacccgtaggcgatgacaaaggcagccgttggtgaagaagaaggtgtatatgtgtcatcagcggagtatggcatgcttgattgaatcagagacgatatctcccgatgatctcagccaatatgttatatatcctgatgtatgttgtgtggattccataaaaaaggttgctgtgtgcatgtatctgtctaggtaggtagatcacgcacgtgcatgtatagcatggacagaagtggctttgatcgatgccattaaggggtgaaaacggtacagaatatttccggattccgggcaggttttcgaaaacggaatcggtcggttggaatttttttggaatttttcggaaacggaaacgaatacggaaatattttctcggaaacggaatcgaaaatgataagagcagtttccgacggaactcggaatcggtcgaaaactttccgaaaactctctcggaatttccgaagttacaaagtccataatacctcccgcttgcccagcccaacccactacagctaaccctaccctatttgaagaaagtgaga

SEQ ID NO: 22003 - DNA, 4864 bp, Oryza sativa
aaatattactatatttatctacaaacctagttaaacttgaagtagcttgattttaaccaaagttgaaatgacttataatctaaaacgatggagtacctgtatattaattattactatcatgcgtgcatcacaaagagtttgtgttatcgttgactgtcaaaataaagcaaaaatttcagatagaggtcccaggacaatgcctacaaatgtagaaacttataatttcagtaatcggagtactaaattgagtaattaacaagatatataggtgtctctttcaatctatgcattttgttgccatgtgagagatgatgtgctttgcctaattttctggtgatgtgaaagtgtgttgcaccggggagcaagcaagtaccaggagatcgctctcattgatacaaagcattttggcaaggtatctgtccatttctgcctctcttttttctttcttttttttaaaaaaaaagaaacacagaagtcctatatatcatttctattcttgtttcgtaacaccaacttgtgtggtgtaatttagtactcccttcgttttaaaatatattaacctaatactagttagaaaaatatattttagtactagtttgctatttttaaaaatgaagagagtaagtaactagaacactgatatgacaccctttttctaccaggctctaataatcgatgggaacaccctttttctaccaggctctaataatcgatgggaagatgcagagtacagaggtggacgagttcatctaccatgagtccctcatacaccctcccctcctcttccatcccaagtacgttaaattaccatcgcgcaatcaatgatctcacagctgcttccttcatctcgaaatatattaacgactacctcctattctagtcaaacactaatccagattctttagacatgtaagtatatataataaaatagattctaatctctcgaggtgagtacgtgcagcccaaagacggtgttcatcatgggaggcggcgagggttccgcggcgagggaggtgctccggcacaacaccgtccacagggtcgtcatgtgcgacatcgaccaggtactcgatgatcgatctagattgcaccgttgattgatatatatgcagtactacctccgtttcagattataagattttatatgtctagattcattaacatatatatatatatatatatatatatatatatatatatatatatatatatatatatatatatatatatatatatatatatatatatatgaatgtgaacaatactagaaagtcttataatataaaaacggaggaagtaatagattcttaaattaaactgttgttttgtttctctgaatgaacgcatatgcgtgggtgcgtgatgataattatattaagcaggaggtggtggacttctgccggacgtacctgaccgtcaactgggacgccttcgccagcgacaagctctgcctcatcatcaacgacgccaggtatgtaccaaatcatatatagaaggtggtcaggtggacatactagtgttctctattaaagatgacgataaaattagagtatgaaacaaactattaacatgtgattaattgagttttaaatattataaagttgaaaaatagatttatctgatattttaaaataatttctacgtataaagttttcgtacaaaatataccacttaacaatttaaaagcgtgttaatgaaaatcgagataaaatctgtatcttaatctggaaaaaagaacgaccatattaatgctgcaaactgaaaatgaatcagcatcatgtattcatgtgtatgtatgttttcttgatcggtgtgtgcttatatgcatttgcatgcagggcggagctggagaagagtagggagaagttcgacgtgatagtgggagacttggctgacccagtggaggggggcccctgctaccagctctacaccaagtcattctaccaacacatcgtcaagcccaagctcaacgaccgcggcgtcttcgtcacccaggtacgtatataatttttcatcaactctttgcctagttatttgactgaactctgaacttctctgaaattttagcgtttttactgacagttgttttggctgttgacaggcagggcagccggcgttctgacccacaaggaggtcttctcctccatctacaacaccctcaggcatgtcttcaagtgtgagtagcccagcaattaaagactcccttaattatattttttgctatatgcatggggtgattttgtttttgtgattctgatgatgcatttgttaatcatatcataccacagatgtcaaagcatacactgctcatgtgccatcctttgctgacacctggggctgggtcatggtatgtagctagccaccttattacaatattacttactgaaaagttcagttccctttctattctttttagatggttttcctttctgctagcatcaattaattaatccgttgctattcttcttcctattattccttttgtatgtaggcatcagattatccatttagcatgaatgctcagcaaatcaatgagaggatcaaggagaggatagatggggagctggtgtacttgagtggggagtccctcatttcctctaccatattgaacaagagcgtttaccagtcgtaagtaactatcagtaaagatcactgtaaaaaaaaactactatacttattttcagcaacacgtgaaagatgcaggtggcatcgatgcttaagtgaaaagatattcagaacattgcactgactgaactgtaatttcttttctttttccttgaaaaaataatactcgcaggctgttgaatgagacgcatgtgtacaccgaggatgatgcaaggttcatctacggacatggaagggcacgttgtgcttgaatcccatatcttacacgcataaacacctgagcaaaatggtgataaattagtagctattttccaacttaagaggtcgagatgcacaagtgtggatagcaagtctgaaattgatcagttagctactagatctccagatcaaccgatcgagaacagaaaaaagaacaagtgatcgatgcaactttgtgaagaacttttttcgcctttgttttcctacgtgaggcgaggaaagaactgaaaaagaactagaatggaataaaaactatataatgctctccatgcatgtgcatgtttcactctttttgttcagcgtaaatgaatggtagctctcttgacaagcagaccgcatatatctatctggtggcatgattgttaacttttgggaattgggagaagagatgactttttggagattgaacctgttcactgctaggctgtacaagagggtaagaaaagactgaaaaggtcttgatacattaacacacatatatattaggctgcgtttggcagggcagagagaaatggagccatcgtttcgcttattcgcggaataagcgaaacgacatatttgcaaacgaaaaataatttgtgaataaaacttttatatacgtgttcttagcgatctaaaagcgaaggctgaaaaataaacttcgataaaaaaaaaccttaaaatcagcttcgtatttaaggttgaaaatttaagatttggctgataagtataagaataagcgaaaatatgaggcccaaaaactcttttgtatttcacgcacacactacctgaactgttaaatgatatttttaaaaaatatatacatataaaagatgttttgagaaatcacattaatctatttttcaagttaaaaatagttaatactcaattaatcacaataatggttcatcttgttttacctatcttctcaagcttcttctttcccccactctcaaacacacacacccaaatacaatgtacttaaatacaatgtgtgtacagtaacattgcatttgaagctacaactatataaatccaaactcgttccttttgcacgattttaatagtgaatcagatttggctcctatatgaattcaaaatggactttttcttccaagcaagaaactccctgaccgggccgtacaaaccccaacctattttgatccagccgcgcgcgtactcccccttcacgcggttttcccttgccgaggccgaccgacctcaacccctcccaccgcccagccgcccgcacccgcgacagccgtgtgatgcgatgcgatgcgctgcgagcctgcgacacgggccacgacgtacgtgtgtctccgtgatgccatgcagatcgatgcattcccccgtacgccgccgacattagctgtccgcgagccgcaacgcgcgaccctgtagtagtggtacgtgtctaattgcagaatgcagacccaagctttggccccccacgcgaccgacgcgtcccgatcaaaagttgatgtcaagtacaaacaacaaatcaacagaatatatataaatttacgtatacaaattaacgacgaactatatgtttgtagtatatatatatatatatatatatatatatatatatatatatatatatatatatatatatatatatatatatggtttaatttaatcgtaaccatgtcctagtgtactgtttagttacatgtaattagtgtgtgtctagttgggcttccggcagttgagcctgacctccaccggcgtcccggcggccggcgcgaggttccccatcttcaccatcgccttggcgaagtccctcgcgaacttcgccccgttgccggcgtacttccgcaccagcgcgtcctgcgacgacgacctgccgccgccgccggcggcgaacagctcctggtccgagtgcagcagcccgcgctgcttcgtcagctcgcggaagtagccgttgtcgaacacgtcgggcgtctcggcgtccagcggcgcgaggttgccgtctccgcccgtgcccgcggggcac

SEQ ID NO: 22004 - DNA, 25093 bp, Oryza sativa
aaaccgaacttgggccttggaccttgtaataaactaagcccatctcggaagtgttttcccttcaccttcacgccttaacacttaaccctagatttattttcctctataaatgtctatatacaccctctagaacaattgggttttgtttaattgaattttgctaagtaccattcaccttgtctctagtcctcgctcgattagccgacgactatagattcaaagcccccaatagttggtgtgttgatttgccaggttgattagatctaccacttcaatcgcaactattactttatgcttcatcacctattcgcaatatttatattgcatttatcttgttcttacagtgttctctcgtttgcattgcagggatcatcaaccgcgcatcacggttggtacaatatcatttgtggtgtagcgattgcacggtgtcctggacttgttctggttagtagcaacgtctcaaacgtcacactcgatcaaagcgagagttattctcctcaccagaagatcgggccacgagtcagagcgtcatcactgcgaaaattgttttttatagtagtttgttaaaagttgatttattttgggatgtaaagagtataacattgttaacttttaaaatttatcttattaaagaaaaatatataaatattatttgtttttttcagatgaaagttttttttaattattttgatgtaacttgctttattattaatggtactataagtctaatttaactatgccatgcacatttgcactaaatcttagagaagatgtacgaatattttaatgttatgtttaaaagtcaaaattgttgtatatgcattcaaaaacagatggagcttgtctatctgtcaagcttatccgtttagtttgttgccggtatatatggggaaatgctgccgatcggtcgaccggcgcccggtgtccaggatcggtcgctcccccccccccttcccacgtgtccatgtccacctgcttgtcaccaccacatactccattgcaacaaatcacttatatattctggaaaccctctattaaaaaattcgttttattttttttccaaaaaaagttttacctagtgtagtcataatgttttactatgtgtatagatctaatgttgtagtgaattgaaacattcttttgcaacaaatcacccacgtattccaatattaaaaaaattcgtttaattttttgttccaccaaaaatatttcacttagtgtactcacaatgtttcactatgtatggatctaatattgtagtgaattgaaacattctttcgctatttgctgaaacattattttcatataaggtgaaacagtgtccgatttaaacgattgaaacattttcaatctacttagtgaaacaattctgatatacttagtggaacaacgtataatatttaaaaataatttaataataagctaaatttttttcatcagaatatatacatgtgtgatcttgttttaaaaatttaattgcaacgaatttaataatacaatcatatcataatttggataaataatttaagagaaaaaatagtttacgttagcggccgatttttccacggctgatcgagcgcccatcggtagtatcgtccgtatatatgtcgccacaacgtaacaacaatgttaatgtctggatagttagctatacgtgcacgtgtactaaatatacagtattactttacttgcctcaattagtggcatttatatacatacaccagtatatacgtatgcatcaaatgaatgcgtatatatcgaactaatctacgtaccaattttaaatcgtcctagctatattctttttttttttgggaaacctcaccgggggccaggtgcagctatattcgtatattaaatatgtggatgtgactgtgcgtggcctacatgagcgaattttgttccttgccaccgcgtatattccaacgcgatgtgccgttgaatttgcgaattcatatgtgatattctttttccgcaaacacggaaaaaaagaattatacgttaatatattaaaaaaatcatattttctgttacacaacacaaatgacaagagaaccattgccggaggacaaagaaagaaaaaaccagcaaataaaccgaaatgcaaaatataggacttctaaggtaaaaaaaatgttgctcctatatagagggagggtgatggcgtaagaacctccctacactttcaataggcccccaaaagcaacagtgccagtagaagaaaagctgaaaagctttgtaatagatacaatcgcaaacacaaagtgaccctacgttaggcgcaacatgtaaggatgaaaactgaaagagaaacaaatattattttttagaagatgattattggttggtcaaaaatttacatacttatctatttatttatttaatgttgactgtaatacaatgttaaaagaaattagaaagctcaaaatttatatttagataaataaaaacgatgataggtcgattaggaatttcgctgttttcacgtttgtaggaggccttgacctgagcaagttgagcttgagcccttcacagcaaagaggaggagcagcgcattcctggtgggcctactcatgggcctactggccaacctcctatggaccacaaactgaaaagaccggcccatcatctccgctacggatcgtcccaaactcatcccgcccgtaaactcaagcccctcccttttaaagggaataagttcactttaggtccctctatttgtcggtcagtctgattttcgtccctcgaccgcaaaactgggtatgacccgtcccccaacttacgaaaaccgggcaaacgaggtccctcggcagtatgaagggcgcttttggccgacgtggcgcctaagtgcctcctttgactaggtcttcgtcccacgtggcattgacgtggcgattacgtggcattgacgtggcactttcgtggcaattttatccgaaaaaataataaaaatagtgggacccatatgtcagctaaaaaataattaaaaaaaggtggggcccatgtggtcctacctgtcagcctccctcctctctatccccctctttgtcccttatactacacgaaggcgagcggcggcggcgcagagggggtgacggcggcgggcggtggacggagcgacggcgggcggagcagaggggtggcgggagcggcggcgagcgatgggcggagcggtgacaggcggagcggtggcaggcgtgctcaccggccgaggtcgccgcccgcctcgctccctcgttctcgacatgaactcgagggggatcaacgtcgaggcacgaagagggcgagcaaggtccgtgggtagtggtcggcgaggacgggcgggtaggatggtgagctcgagctcgccggctcccctctcctctccctctccactctcagatcttcctcttcttcctctcagctctccctcgtcctcgcggcggagcggcggcggcggcaggccgcgggcagagtggaagggcggacgcgaccacgccaaggacgctgtgcgcaccttcgacgcgagaggagcggcggtgcgcaccggccggcgggagagagggagagaagcggcggtgtgtttggatcggcgccggcgggagggcgagaaaggaacggcggcgcgcggctgccggcgggagagggtcggcggcgcaagccggctaacgtgtgagagggagagaagcggcggcacgcgcagcgccggcggagaaggcagccaacgggagggtggaagaggagcggcggctcgccggcctctccagtctccacccttgttgctctgtccaccgcccttgtaggggagagagagaaggggatagagaggagggaggctgacaggtgggaccacatgggccccacctttttttaattatttttttgtgtagctgacatatgggtcccactatttttattattttttcggataaaattgccacgtaatcaccacattaatgccacgtgggacgaagacctagtcaaaggagccacgtaggcgctacgtcggctaaaaccgccctacatactgccgagggacctcgtttgccctgttttcgtaagttggggatgggtcatacccggttttgcggtcaagggacgaaaatcagactaaccgacaaatagagggacctaaagtaaacttattcccttttaaagaggacgccgctgcagcgacactgttctagggctctcccctttctctcctgctcatcgcatccgcggcggccggctgcggcgacggcggcttggatgggtcgccttcctcccttgctgctcggatgaaccctcgccgcatgcatcgcgatcttgatattcttggcatggaattaatagcgtctcttttttatcccccttacggttcttgatctccagcgcttctctgaattctctggttcttcttgctcgctcaatttacttgttttgttttctcgattgattggttgcctgatcagctgtgctgtggatgcatgcgatgttgcaaaaccgagcgcgctgttgattaatcttatctccctcgggcacggttgatcatgtgcttggagggggctcgatggagctcggatatgaacccttccatggagtttgtcaggcttcctgcgtcctcccttgtacgcttggagtttagaatactctccaacatttcttcctccctttatttctatgttttttattctcctttcaaatgtattattatattgtgtgtttgaggaagtaagaacactgcctcgatcagggaggagcagatcttcaggttaacagattactgaatgagttaggtttgtgaacatatttggtttcagctaaattttatccaaaaccatgcaagttcaatcgaatattagtacctcgcaatgttctttgtccacgatgtcgttatcttgatcaacaaatctgataacattgcaagaaaatagctttacactttttgcagaagaactgaacgatggatgcacgtccgtggactgaaatagacattcagtttcagtatgctgaatgtaagatggcatgtttagtcagtttccactgtcaaattaaccgatcgatcgagcagacttgattcgattttaagcgattccgtttcgagctggacaacccatcgctctcgcttttggcgatctgcacttttgcagttcttgcacagcttcgctttgcctttggtgatctgcagctctgcacgtttatttatttcttacagattattgctagtcaagcagcagcatatttcagcaccgaattttaagcgaggcaccattctttttctttcctgcgttgattcccgccaccttctcgttgcacacaaattgtacatgtgacatgtccatcagtccatgtctccaactctgattgcaactcatatatgtggcccaaagagaccatgaacatgcttaataatctaggaaagcatttggcactgcatatggcacgttctaaacagctaatggaaggtatggattattcatggcctgttttcaggagtactttctcaaaaaactttttatgtcagtattgcttagtttttttgggggggtaagctgtcggcagctttatatatttattctacatatatgccatttaacagaacaaatactttggaatcttacaaattttagatcggccgatagctttaagattcgtgccaacaccaaacccattcttcctctctccctagtctggtgcccccagtagaccagccgcgagtcacaattgatccttgcctccttcgtcgccactgcgtcattgcctggcctcaacagttggccaaacagcgccaacgagccccctgctggcttcctcccccttcccccccacacccttcccccttcactttcccaagctggtgctagcaagtgccccgctcgccaacttctccgtctttggtagccccccgctattggatctaccaccaccgaccggtacatcctaaccacaagccttgactttgccctcgttgccagcacccgcccaccaccttcctccatctccatagctctggcaccaccaccgcctcaccgcccgcccatgttcaccacctatcatggggccacctatatctctaagcctgacgatctcccctctattccagctctcctcacccccaccacaacttagcactctaaactgtaaatcgtcggaccgcccttagttgctagagctggaggaggagaaaaagctaggattatcgaatcacgaaacaaagcttaaggtcagaaatttacaagattttggacttaatattttgttgaatgtgatttatcaattccaatatttattaattcattcatcgttttctttgtctgtaattgtcggagatatgggcccgggggtatgtgaggtagaggagaattactcttcctccggccacgtggcttggccagatagccccactcacacgccacacgtatcatagaagcagcgggagggggggggctcggggtacgacgtcaccccctcggggtatcacatcgccccctcggggtatggcatcgcccccttgagccctaccgcaccttcgccccgaggccctcgccacccccttaaaactataaaaggaggaccctgcccacagtgcaagggtgtggaaccagagaaaacccaaacttcggaagagaggaggcaagagtgctctccaaagaaaaggaacccttgtaacttcatccataatcccaaacacaggagtagggtgttacgctctattgcggcccgaacctgtataatctgtttgtgtactagctcactgagagtcttagggacgacaaacgaattctgagggacgagcctccgcccccggccgaactcacgaaaggggggtctcacgactccctgttattgagggttctccctcgacaggtggagcgccaggtagggggcggttgtgcgtcccgggagaaagttgttttcttccgtcctaaggttttccaggacttggccgactatggtcgaggtcctggaaatggaggaggaggtggtggcattcacccccaccccatcggggagtgaggattccggcgagagccgaggtcctcgtcaccgtcgccatggatctccaactcctccccgccgcgaaccttcgcggagggagaatgccgctcgttcgggtggttcggcaccctctcctctccaaggcggagtgaggccgcgacgcgccggggtacgccgctgtctcgattatggagacggcgattcgccccaaggcgcgcttcaagcagtaggcgcccttctacgacatcccccggtgaacccggagctggagactcctgttcagcgttggctggacgatgtgaccaacttggtcactgctgctcaacggcagttggccataggtggtcgatccgctgccgccggtacatcacgtacctcagtcaccctctcctcgtcggcgaggagaagggctcatcgatcggccacgatctcgaggcggtctatggtcccaacatcatcaggggcctctggaagccggaggcgtcacaaaggcctctacggtacacaggacgctcgaatcaacatcgagcgacgccgggatgagcgccgagctgcccgtatgggcgaaggcgcctcctcgtctggagcgccacattcttcctcacgaggcggtcctcctcccacactcacccctggggggacaggttgtagggccttcgtggcgagtctctggaatgttcggtggcccctgaagtttcgccctaaccttacggagaagtatgatggtaacatcaatccctccgagttcctccagatctataccacggtcatcgtggctgcagggggtgacgaccgggtcatggcgaattactttcccatggccctcaagggtcaggcgtgtggctggttaatgacccagccccccgactccattcactcctgggaggacttgtcccagcagttcatcacaaacttccaaggcacatatcctcgcccaggggaagaggcggacctgcatgctgtgcggcagaaggatgatgaatccctccgttcgtacatacaacgcttttgtcaggtccgtaacaccattccgtgcattccagcccacgcggttgtatatgcgttccgaaacagcgtgcgacataatcgcatgttggagaagatcacctccaaggagcccaagaccaccactgagctcttcgagctggcagacaaggtggccaggaaggaggaagcgtgggcctggaactctcctggcaccggtgcagcggccgcagccacccccgagtctgccccccgctctaagcggtgagataggagaggcaaaaggaaatcagtccgttccgatgacaagagacatgtccttgcggcggatgggcccacatgggccccacgcaaagggaaagctgccggcgacaagccgaaccctactgttccctccggagaggcccggtcggcggacaagtggtgctcggtgcacaacaccgaccgccacagtctcgccgactgccgctcggttaaaaatttggccgagcggttctgaaaggctgatgaggagaagcggcagggtcgacgggagggcaaagcccccacgacctcgaccggtgatcggcaagaggaagccaagaacaaggcccccgccgatgatggcggagacagtgaggatctggatttccagatacctcaaggggtcgtcgccacgcttgacgagggagcttgccctcacacctctcgccgaagcttcaaggccatgaggcgagagcttctggccgctgtccccacgcatgaggtggtccggaaggcacgttggtcggaggtgaagctcacattcgaccagaatgaccatcccacggtgctcgctcggcagggggggggagttggccctggtggtctccccaaccatccacaacgtcaagatgaagcgtgtgctggtggatggctgggccagtctgagcatcatctccccggctgcttttgacgcgctcaaagccccggggatgaagctccagccgtcgctcccgatcattggcgttactccggggcacacgtggccgcttggtcacgtagagtttccggtaacttttggcgattccgccaacttccgcaccgagcggatcgacttcaatgtggcagatctcaatccgccctacaacgcggttctgggtaggcctgcgttgctgaagttcatggccgccacccattacgcctatctccagatgaagatgccaggtcccgctggccccatcaccatttttggtgatgtcaaggttgctctcacctacgcagagcagcgtgcggacaacctggcggtggccacgggaccacaggcccctgaggcatctgcgtctcacgcttctaagaagcgcatcacctcggctgacgaggtgcccgtcaaggaaatcccccttcgcgacgacccgtccaagaccgccaagatcagcgggaccttggacgctaaataggaaggcgcgttcgtctccttcctgcgggcaaattctgtcgtttttgcatggaaaccgtcggatatgcccggggtccccagggaggtgatcgagcaccgccttgccgtgtggccggatgtgcgacctgtccggcagaaggtgcggtgtcaagccccggagcggcaggccttcatcagggaggaagtggcgcggctcttggaggctgacttcattcgtgaggtgatccacccggaatggctggcgaacccggtggtcgtcccgaaggccaacggcaagctacggatgtgcatcgactacaccgacctcagcaaggcatgccctaaagatcccttccctctgccacgcatagatcaaatagtcgactccaccgcggggtgcgaccttttgtgttttctagatgcatactctgggtatcatcagattcgtatggctagggaagatgaggaaaaaactgcttttattactcctgtgggtgctttttgttatacaaccatgccttttgggttgaagaatgcaggccctacttttcagcgcatgactcgtattactttaagtaatcagatagggcgcaatgtagaggcgtatgtcgatgacctagtgataaagacgtgccaccagaacacgttgctgcaggacctggctgaaacttttgatagcctcaggtccacgcacgtaaagctgaaccccgataagtgtgtgttcggcgtgccggcgggcaaacttctcagttttctagtctcttcccaaggcatagaagcaaattctgagaaaatacgtgcaatagagaggatgcgcccccccagcaagcttagggatgtgcagtgcgtcactggatgcatggccgccctgagtcggtttatattgaggctgggtgagagggcgctgcccctgttcaaactcctcaagcgctccgagccgtttgtatggacagaggaagctgagcaagctctcgatcagctgaaggcttacctcacttcccctcccatctaggtagccccagggctagaggaacccttgctactctacttggcagcgactccccatgtggtgagtgccgccctagtggttgagcgtagggaaggcgaacaggagggccctccgacttgcgatggccccttgactctcgaggaaatagcaaccgaactctcctgcatccgggagggccccgaggcacccaagggaggagtgcagactttgatagatggccttaggctcgatgaccccgaggcggtccggggtcccctcgggacctccgaacaggtgcgccccgaatcaccagcccctgacagcacgatccggccccaccgaaaggtgcagcggcccatctacttcgtcagtgaggcactacgagatgcgaaaacccggtatccgcaggctcagaaaatgctttatgctgtcttgatggcctcgaggaagctacggcattactttcaagcacatcgggtttccgtagtgacgtcataccctcttggccagattttgcgcaaccgagagggtactggacgggtggtgaaatgggctatcgagctggctgagttcgatctgcacttcgaaccgtggcatgcgatcaagagtcaaatcctggctgacttcattgcggaatggaccccggtggacgaatcgattccatctaataccctcttcttccccggagaagaagaggatccaaacgccgacattcgtggcgggcactgggtgatgcatttcgacggctctctcaaccttcaaggtgtgggtgccggagtcacgctgacctcgccgaacggggatgtcctcaaatacgtcgtacgtctcgacttccgagccacgaacaacatggcaaaatatgaagggctcctcgcaggattgagggcggcggccggaatgggcatccgccgtctcctggttttaggcgactcccagctggtcgtaaatcaagtatccaaagaatatcagtgcaccgacccgcaaatggaagcatacgttcgagaggtacggcgcatggaacgccacttcaacggagtagagctccagcacgtgccccgacgcaacaacacagttgctaacgagttgtcgcgtgttgcgtcggcacgaaccccactccccccaggaactttcgaggaaaggctcgcacagccctcagcacgacccagccctttgaaggaccccaatgatgcgcccttcgacccaacctctggcgacccgcgtcaggtcacgtggatgaccgacatccgggcgtatctcgatggtaatactcttcccgaggaccgcgcagaagctgaaaagctcgcgcgtatctctaagaggtacatccttgtagagggggccctctaccggcgtgccgccaacgggatactcctgaagtgcattcctcgagagcggggcatcgagctcatagctgacgcccattagggtgagtacggagcccactcggcctcacgaactttggtcggaaaagcattccagcaaggtttttattggccgaccgcattgcaagacgtccaagaatgagtccagcggtgcaaggcatgccagttccatgccaagcagacccaccagccggcccaggccctacaggtcattccgttatcttggcctttcgcagtctgggggctagatatccttggaccgttcaaggcggctcgaggtgggtaccagcacttgtacgtcgccattgacaaatcactaagtggcccgaagcctacccagtcgtcaaaatcgacaagcattctgctcttaagttcatcaggggcatcacgtctcgattcggagtgcctaaccgtatcattacagacaacggtacccagttcaccaatgaggtgtttggcgattactgtgatgacatgggcatcaaattgtgcgttgcctcacccgcccaccccaagagcaacggctaagtcgagcgagccaacgccaaaatcctcaaaggactcaagaccaagacgtacaacgtcctcaagaagcacggggattcatggcttgaggagttgcccgccgtgttgtgggcaaatcggaccactccaagccgtgctacaggggaaacaccttttttcctggtgtacggcgccgaagcggtcctaccctccgagctttccctgggttcgcctcgtgtcgctctgtacaacgaggccaaccaagatgactttcgccgcgacgatctcgattctcttgaagaacggagaaggcgggtggccttgcgcgccgcccgctaccaacaaagcctgcgacgctaccatcagcgccatgtccgggcccgatcactataagttggcgacctcgtcctacgccgtgttcagtcgcgtctagggctgagcaagctctcgccaatgtgggaaggaccatacaaagtgatcggcgtgccccgaccaggttgcgttcggttaaccacggaggacggcacagagctgcccaacccctggaatatcgaacacctccgtcgcttctatccatgaaatcgagattttttttttcctggagctcaggccagcacccgcacaatccctcggtttgtacggaactggccgggggctgccactatgtatcatgttttcctttgaaagcaataaccttctttctatttcttcgcaaagactgctttttcccctttccctctggcttgtcccaactcaaaaattaatctgcgtttgttctaaaacctaagtgctataaagcgaccgggacaccccggaaagggagcacgaacgcgggccatgccccggactgtgccgaaccccgcggggccggaagggcctacacacgatcatccccgacccccggtcgtcgcagcctcggtccggccagtcccgctgggcgactccctcagagcgatggtcttgcttatcgctacttaggttccgtggaccgaacgcgggtctaccttcttgatggaacaagcccgagggggggatggagtcaaacgatatatcaatcgcagactgtctaattatccctttctgccttggctttttctttttactatgtaacaggtattcgatggaaaaggcaaaaaagtgaaagggtttaaagagttttcaattgcagaacaagacaggatgacctaaatacaagaagtgcttgttataggcacacagcaaaaaggaataaaaggtgtgagcaatcacggagtgcccggtcccccgagactggcgccgctaacaatgtcgtcccagtcgtcgccaccgtcgtcgttctcgcttccgctctcctcgtccgaaatgtgtccggaggtgaaccggggggccgacccctcgaagcttgaaacgatagcgtcggccgcctcccggacttgctcccgggcccgtgcttcggtccctgggggaaaatcctcaagcgcacgccacggcatgaagtcagggtcacgcgcttggtggctcgcaaggaccagctccactgcagcccgcgccaaagaggccgacgaagtctttatggtttcaccgacctcctcctctaacctctccaggtttgcagccagcccgtctagccgaagcgcgagtgccggctatgtgggcgggagtttgctgtcccggcgcacggagatgccgactcgacggcccgcgcgctccagccgatcgagtgcgtcagagagctccccgggcccaagctcgttggtgaggcggagagccgcgatctccctagcctgatcctacgccaggcactccaagtcggcgagggtgctctgagccgtggcaagttggctggccaactccgcgccaccggacggcccgctcgctgccaagtctttctcccgggcctccagttcagaggtctttgccgctatcgccgcgcgctcggcgcgggcgctctctagatgacgagcttcgcgcccggcaacagcctcctcgcatctcgcgagttgctcgctcagccagcgcgaggctatctcgcggcggctcacttcagcttcacgctcggcaagcgcggcatcccgttcccggcatgcctcctctcgcagccgtagttcttccgcgtggcgatctgcgtaagctttcgcggcaagggtgatctggtcacgctcggacgcggcctcttcacagaggcgaagggaagcctcgacctccatcgctgttctctcgtgagcggccagggtggactcccactggtctagcaggcgtgctcgctcctccagctcctgggcccgccgtgcctgttctgcaccgcgcgcattttgctcgcgctgatttcgatcgagaacttcgatccgccgacggatcgtggcttcaaactactgcgcggagcgagcacgatcatccaaggctttgcgctcagcctcgagcgccatcgtccgagcctgcagagaggcattagcctctgacacccgccgctcttgggcggcagctgagtcgaggatgccacgggcgtcccggatcctcttctccagtggagtcggcggcggcgagtacctgcagaagcggatccatgctcgccggagtcggggaggaaaaggccgcggtccgcccccgggacaacggggtactgctagatcctccacgagaccgggggctgctctcggccccccttccgcgagaccagccccgagggtgccccaagcgccaggaggaacggctgttcctcttaccccccgcttcggggcctcgggtggattcggcctcggcctcagcctctggttccgggccgccctcggcctcagcctcggcctcggactcaggaccgccctcagcctcagcctcgggctcgaggccactcctggtttcagcgcttgggccacgtcctccttcgccccctgattttaggggacgctccacgtgggctccggtcccggggccgccctcgggaggagcgtcaccacccctatcgcccacggcagattgggtcccgcctgagggccgctcggggtcgggcccagggtgtgacttctaggccccaccgcgaggctgcgaagaccccgcggccttagattggccgagcccagactgcccgtgcgaggggttagaccctgggattccctgggaaggaatctcactacaaaggaacccagatcatgttagcaaaagaaaatgaagagacaagagcaccaaggtgagcgccaacgttcgtacctacggggagggcggttgaaggtccacttcgggggctcgatgaagcttccccggcatggctccgtctaccctatcttccagagccgcttctttttccgaccagcatcaggctcggctagtcgcttgtggcatgatcgcgaacggtctattgcacgctcagcgcccccccctcccccgcgcgggggagagggcggacgggagtaggccaccttccgcttcccctttgggtcgctggcgggatcgcctccaggtccgcggctcgatccgggcgcccttgagtcaccgccaactaggccgctggcccgcccccccccctgctgacggcgctgccaccggcaccgcctcggctggaccggctcctgccggcaccaatggcggacatcacagccaggatgctctcccggtcgcggtcgcagcagaggggaagaatcccgtcagggattagtgttggctcggcggagtccaggcccagcaccccccgaatcaccctctttgcgtcttcctcgccccagtcccagcgctcgcccacatgggtccgcatggggtcgttgggaccggtgtattcccacgctccacgggatcgttcctgaagaggtgcgatgcggcgacggaagtaatcgccaaagaccatcgcccctgtgaggcccaggctccacaggcccctaaggcgatcccacactgcgtcatattcctcacctagctccgacgttgccagccatgcggcagacctttcgggagggccagcgggaactcgaagtcgcggatggtccggcaaggcggtgtagaaccagtccttcttccaatcctcccatttcttgcggaggtggctctcgatgtattggcccgctgtgcccggtcggggctggaaatagcatccccccaccactacgccttgcagcagctgcgggatgaagaaggcttggaacagccgcatcgtcggtcgcaccccaatgaacatctcgtacaaatgcgtgaagatggccagcgtcatcacggcattaggcgcgagatgcaaggcgtgaatctcgtagaaatccaggacttcatggaagaatttggagaacggcgggatcaagcccaccatggcaaaggacaagaggtgtacggatcgctccaaatatcgcggccgtggcagcgactctccctcccgcacgacggcctcttccggcataatcttgcgaggaaggctaaggtgcttgtctaccgtgatgcgggaggaaaggagcactgcgtcgccggcgtcttgggccatagcaactggcggagagatggcacaggatgaggggtctaagacaatgtgaggaggcgggagtgttagggctcgagaggcgaaaggatgagtgagcaattggcgaaaggaagaaggcagagtttccttctccgcccccttctatcctcgcctcatccgcgttcgcctcctcgtttcgtgcccccataactgccctcacgatcttcgcgcccgcgtctgcctctccgcatctcgcgcccaatcattgcgtcgcccgttgcgtccacctccgccttttgtgcgcctgtcagtgacgcgctcgaggtggagtgtgcaacggccataagcgcaattggacaaactgtcaccacttccgtcgcgggtgtagcgggcgagagaatcaaggcgcggtttgagtgatcccccggttatcgcgccccaagcatctttgtcatgagcgcagtctaaggcggtcaaattactgccgtggtaagtgcgctaacctagccaccccaaaatttctttcaaaatccctggcgggcccacaaccccaatttgaagaatcatgaagcgccatgtcaggacaatcctgggaagatcaacacctgatacggcgccaggggctactgtcggagatatgggcccgggggtatgtgaggtaaaggagaattactcttcctccgaccacgtggcttggccggatagccccactcacacgccacgcgtatcataaaagcagcagggggggcctcggggtacgatgtcgccccctcggggtatggcatcgccccctggagccctaccgcaccttcgccccgaggccctcgcctggccgccacgcggcagaggggagcataggctgaacagccgtaaatgcacagcgccccaactgtccctcgcagggcagacgtgcggcgcgtctggctaacccctgctagtcggatgtgactggtctgtaaccggcccgtttccgtcacatccgatggatagggtaatcatatcatcacgtcacccttgaccccggcggagtgggggtaggtgtgacccgtcacatccgggtgatgctcgaggaagggctgttgcatgtcttcgatcatttatgagggaatgaccgggctgaccaccgtgtcaggcgggggacggcgccgggttccactcaaggatcggttatggcttagcttccgagagaaggcacgtcttgaaggccaaaaaggtgaagtggggtctttcccccccccccctttccccggtgagagtaggtagaatcggcgcatgtggtatccccttaaaactataaaaggaggaccctgcccacagtgcaagggtgtggaaccagagaaaacccaaacttcggaagagaggaggcaagagtgctctccgaagaaaaggaacccttgtaacttcatccataatcccaaacacaggagtagggtgttaagctctattgcggcccgaacctgtataatccgtttgtgtactagctcactgagtcttagggacgagcaaacgaattccgagggacgagcctccgcccccggccgaactcacgaaaggggggtctcacgactccctgttattgagggttctccctcgacagtaatctatccattcaaccagttaaaaacctctaaatttttctattaagcatggctttttatcctctattttttttctattaagcattgactttgatgtatgacagtatgaggtggtgacggatcaactcaattccattctacaaaccaaataaaaccaatatacaatcgagcaatcaattcacccatcctatttctcaacccaaacataatctataagtgataatgtcctaagatcaagaatgtatttcagttgcagactttcagtacaccacaaagtgctgcgaaaataatggggccagcactgggggcatgtacaatacaactaccttcatgtatatatgcagagagatctgaagtggtgtggagtaatgtgtgggttaaaagtggcggccgggcgcatatatcataccgggcgtgcatgcgcaaaactgaaagtatgcatactcttgcatatatgctgcaccttcttcccaattgctgccaaattgcatgcatgccgacatcgagcaattctttctcttttcttttcttttcttttttccctctctgcatcttcctctttccaatacgccgaggattgtctttctaggcgtgcactagtgcgtccatggaagcactatctactgtgcctggtatatactagtacaataatgtgctaccacaggagatccaactccaactacaactggtggaactttcattcattcatatctgcatgcatcttcatgcttagctttcttgtgaatttttgagcatatatattcaggcatttatccattgcttgggcatgcaattggcaattgggatagaaggtggttgcttgatgctaattggcatcatagcccagtgcccccagtggtgccagccatggtggtggtggtgcccatcgattaggagagaaaagaaaatggaagagaaaggatacatagttgtttttgtttgttgcaagtacctgacaggcagggcacaatgagtactgatgagcccatgatgcagggcctggattggccagttcctgcaaaatcaacatagaaaaatgcaacatccaacagcataggccgtgtttatttccttctccaaaaattttttatgtatacggacacatattttaagtattaaacatagactaataacaaaacaaattataaattcctcctgtaaactgcgcagataaatttattaagcctaattaatccgtcattagcaaatgttagctgtagcatcacattgtcaaatcatggcgtaattaggctcaaaagattcgtctcacaatttacatgtaaactgtacaattagttttttttcatatttaatgctctatgtatgtgcctaaatattttatgtgacgaaatttttagatgtttgaagggaacacatccatatagcgcctctctgcagcaatctctgcatgcgaactttcaaaggcaggagacgtgctcacctgccattatgctacgagacaaactcaacaagcagagcaggagaggatagctaggttaggtgcccactagatagattttcgatcgaaaaggcgatggatgcatgattgcggcgagtggcagcgactgttggtgcctctgccatctggagcggcaaggcggcgacacaggggtgaggcggcgatcattgtggctctccccggagggggcagcccacgcataatccaaaatcctctcttgatctcatgtcactagctaacctaagtttttttttggatttgcacaacccccctagtgctagttatctcctttctttggagaaaaaatgaaaagaaggttgcacggcactagatacattttgaggtgctgtttggaacatagtcatccaatccatatcttcaatatagatgttcttagagattgaaaactggtgcatacattgcgttgttcttgtcttcgatgagattttaagtgaaattgttgctatggctataatgactcaggtcatgatattaatgggttctgatgaaaaaaatatgaccaaacaactgcatggtgatcaatacaaagagtcaatctaacttacagtgctgcggcatatgtagcacaagccattaaatggttttgtccgatatcatggatgttttgtccttttaaagtattaattactatacgcatgagaatcgattaaaatatgagcatcattgatttttttttttttttgtttgtgatgttaatatggtattttactgaagcactcgatgtgggttgtttcagttggggtgactcaccatcatgatgctaagaggaaaatgctttgacctgattgggggttaatgatggctattattaaagagataataaggtcttggtcagaagggcttagtggaaatgggaagccaatggataggggttaactcagaagtgggagttgtgcccaagtttggctctgccaatgtggccaagaacggctatatgtgctataacattgctttttcactttaatttcttttagttgacacgagatcatgggctgtagggtagtctcatggaaagagctagtgtatgtcttcatttcactgaacaatttggcatgtgcacttatatgtaatcttaactttagaacaaaatcaatggcatatataacctgttacacaacacacgcaacccatcagtatggtcttttgactagtcattggatgaatattacaggtgacagatgcaatagccacaataatgcaattaatatgtccaagaattgcctatatctaacaaattctactttgggttaagccaataattattcatattagcgatattaagatccatagcatatacaaataattgtaatagagggcttggatatttcaatacagggcatatgttgtgtggtgtgttttgttttgacgatgataaactgcctatggaaaatgcactatcaatttcagaaagtatgttttctacacctagctatatgcatgtgattcaaattattgcatagaaattcgaccaaatttctggtaagaaatgaaaacccaaaactattatcaggtgcatatattatcttaaaagcttcctgtatattctgacatactattctttttcttttgcaatagctttgttatatatctagaaataaaaatatatgtatatatgattgattgtaccttaaaaagagacaatctgttttctacaatactctcctagtctcctccatatactctctttgaactaatatatggcgccattgactttttaacaaacatttgactattcatcttatttaatttttttgcaaatataaaaatatttaagtcatgcttgaaaaatatttgatgataaatcaagtcaaaataaaataaataataattacatttttttaataagagaaatggttagaaaaacagagtatgttcagggaaggaggcagtgtatataccttcacctggagatagagatgaagagctagtaggagcgtatagtacggatctttttgcatgtgtatacatggtgatgtgttaattaatcgaaagaaaaaccacacgttgggagtggattggccttgtgtgcacattccattcgcagagacggcagcggccggtgcagcactgggatggatggatcgacctggtggtggctgctgggtgcttctgttatgcgcgcgcgtgctcaagtgcatgaaacccccgcactcgcgccgcgatcgacttggatttacacaacatctgcacgcgcgcgcggaggtgctcatccagccggtgatactctgcgacctgccctgcatgtgttccctagctgtcactactagaaaaatcattttaccagatggtcaaaaacagttttcacaagtgaaggaaaggactgcctagacgcaaaggcctgcaaaaatagttgaattttgcaggcggcatcaccatcttcgcagacggtagattcacccgccatcaaaaacacatttcagcgaataaaaaaaagccgtaccacccacgagcgccaccgcgggcctccccctccgaccgatggctctcctccatccgccaccgcccctacaggcgtcatccttgtcgcagcatttttcgttgtcgtcgtcgcgtcagcgctgtcgtcgtcgcgttgatgccatcgtcgcggcggttgttgtcgtcattgtcgtcgcgtcggcgccaccgtcgtcgcgcgtctcctccccctacccacaggcggcgccgtcgtcgtcacacgtcgccgggagaggaaggagccaagtcgccgtcgctgagagaggccggatccgcgcgcccgggctagctggcggcggatccataggcgtcggtgccatccgttacagctggtggcggaggcggcgagctgcaggggatccacactcccagggcgagccagcggtggatccccaggcatcggcgccatcatggccggcagcggaggcggcgccgcggccggcaactgaggcagcgacgagctgagcctgcggtggatttgtgctatgaacaaatgagagagagatagagaggatggggagggaaatgagtggtggggagagaataaggatggtggagaagaagataaggatgaaacttagatatttttcttggtagcatgatttttgcaggcgcactatataaggtaatccctcatgtcataaatatttaacatttagggtaaaatttctgtcaagctttcaaggctttatctgttaattttatgtaagaacaaatttaaaaaaaatagtaagtttacgatattatcacctcggatgttgtggaacttgactcccatgtcactctctagagagatttaggagaggcaactgcccctaaactcccacactccaccccaagacctccacaacttgacacttctagtgatgggcgatggtgccttccaccctcctccatcttcaccttattgttttctctttcctcctccatttcccttcctcattttttaccccgctctagaatcaagtagggtgttggcggtcgaagtacaattcgttgcacaagggcttcccagcaaagctacatgaagaggttggacaaacgatggttgttcggcggtactgacagtactacgcggaatcacagaaacactctatgtgggataacaccatgtggtggcatgggctagtgggatgacactctatgccggggttgttgccactcttcgctcattccacttcctccatgaagctcttcctcttctaaggttggtctgcttccagcagggttggaaatttctgtcatttcggtcccctccgatacgatattacttcggccgaaatttttcaattttttcatgaatttgggtaatatttgttcaaattcaactaaattttgttcaaattttcgaaaattttggaccgaaattttcaaaatttcgggatttcggtgacccccgatcaaaagccctaagccgatatagtgaaccctggcttccagatctggatgtggggagctccgtgacatggtacggtggtggatgtcagcttggacaagaatagtcaaacatttacatcagtggtttagcgactagtggctaggaacaaacctggcccctagtgcgcaaatagtgtcaagtggtgtggctacacaacaattagtaagggatatgttgtttcattctatgattgtgcatggttgcaaatgatgccttgtgttgggtgtgacctgctacgaggagtcggagttgttgcattggtcattgagcttggcaacaatgacatttgtgaagccaatgttgttgtggtgatatagaagctgtggtcgtggttgttaatgctcttctagcatggtgttgacagtggtggccatgttaaccaacatggggtgtgagacaaaaaattggtgactttcctcatgggtttggtggttgggtaagcgttttagacaaaagcattgtttggcttgttggtaccagtatgatttttgtaggcactgttcatctcattggacacgttgctatggcgtttttacctccttccgacttaggggagttgtttgggtgtgtacctagatctattttagatcacaaaatgtcattttgttggagttttctacttacatgtatcaccttggcccatcccgattcgcttgcttagggtatttggtgatgtgcgggagaaacccgtgacatcttttgatggagttggtgttttcatttgttggtggaggttttcgttaattaatcatgctactagtaagttttttttcctaattttccttatgaactctatagtgaaatgcattaactttctgcccttttataaaagattctttgataaagataataactttccaggcaaatatatgcatgatgtttttgttttatgaaaaattagcatttgagaggctactgatggtcaaaggcttgaaaagtttaaccgaatcatttgtgaacgccaaatatttacgaccaaggagatcagcagttaccaaaagttaagaaacaatttgagagagagagagagagtgtgtgtgtataaccaagacaatctttcatctgatgttaatgccataatgtagctaagagcaaggttaacagtatagccaactactagctccaaaccatttatagccaatttaatagccaactcatacaatagttgtttactatactattaatacatggtcccacctgtcatacacacattacgtcttagagtccgtgctgcagctgactacatatctgttgcctactgctcttctctctcctattttaactttttaaaatatatttacagctggcttatagtctgcttattgtacctgctctaaggagctcttcagttaatccgagacgcagaagcagaagctggtcaggtcagaaaagaagctctatgggactgggctactcaaccttgagtaagctaagagatttcgaggcagaggatctgaacactgcggtcgccatcatgccgcatgcgactccttta

SEQ ID NO: 22005 - DNA, 1064 bp, Oryza sativa
acaatgtatcctgggaacagaacaaggcatatcccctagcatttcaatggaactcctttgttccaaacaggaaatttcaaccagaatcaatcaatgggccatatgctaagttacagcgtactcttggtttctgttcccaaaaccattaaattgtcctcctgaatctcatgttcaagttcacttagcattactactccattaactatcaccagtgtacaaaagtacgcttgtacacacaagattgcatagctgattagcttttcatcccagcagctcctgaatttatatattcttatacagtttaacagactaaggatgagagtttccaattttatttgcaattttcagttcttgaacctaccaaccacctttcaccccaaaaaaaagtgcaaacaaatcagtcttccttcggccgcagtatttctctaacatcataaccagattccatataaagcaaaaaaattccaacaattctacacagacaagcaaagaatctcgcaacgttcctcctcgaaggacacgagaaagcacaaatgccagcctattttttttcctccaacccatctccgatcatacgactctcatcacaattcttgtcagatcttctcgatcgtgcgaaacaggaatcaaatcagggcacgcacgaactgaacacggtatgtctagatctcgacgtctacaaatccctgctcaacatccaccacgagcgctacgagcaaccgaaacggaagcgaagaaagaggaggaggaggaactcgtcccgtacctcccgatccagaaggagagcgaggcgccgagcaccttggcggagaagacgcaggcgacacccgggaggaagccgaagaggagcgccgcggcgccctcgaacaggatggcgtagggcgggcacagcgccagcgtgagcgcgtgcgccgcgacgtacgcgggcgccgcccaggggcccagcgcgtcctccgcccccggaacgccgccaccgccgcctccccgtcccacccgtaccgcctccccaccgccaccgccgccgccaccgccgcgaacgccaccgccccgcgcgcccacccctt

SEQ ID NO: 22006 - DNA, 707 bp, Oryza sativa
caagggacggaggcagagcccctcctccctctgccgagacgcccccgctcccctcctcctttttccaaagaagcaagggacaagccccctttctctccccccttttctccctttttccctctcgccggcgtcacctcctgtcgccgttttggccgctagccggagcgccagctcgccggcttgaccgtccaatgtcggttcctctctcccaaaccgaccttgtcgcccatttaaacccaagctcctccccctccaatctccctcgttttcgtctctcgccaccaatgtcgcccctgttcgctgtcgccgttcgtcgttgcgcgtgtcggaggagccggcacgagcaaggacgcgaaaggggacttcggccgcgccctcttcctcctcttcctcggcccgaggccgaaacgatcatgtttcgcgccgtcggctctcgtcactgcgcccgcccgcacggtagtgcatctccccgttctccctcctcgttccatctcctccccttagactcgggtagtagcacgagtagcctccccgtagctagccggcgccgccccgaccgttgccgtcgctcgccgtgtgctcgccgccgtcgccgcccgagctcgggaacgcctctcgtcgccggcctccctcgaagcgtttcctcctaatccggcgcaagggacggattcccgtagccgcatagatgctctcgcggcgggaatcgg

SEQ ID NO: 22007 - DNA, 3839 bp, Oryza sativa
cgcgtccaccacctcgaacccgcgcgcggagccggcgttcgcgccggcgcccttctccccggtgaaccccggcggcgcgtcgtcgagcaggacggacccgtcgcagccgttcacgaagcagtcgtggaagaagagcctgagcacggacgcgcccatgcgccggtccgccgccaccgcccgcgccatcaccgaccgaacgacggactccacggcggggcacgtcttagcatagtacctcgtcgacaaaccctccgccacgccgacgccgccaaagccgccatggcaggagacggcgacgagcagaagggcaccgagcaagaagaccctccggcccgaagcagacattgccgccattgtcgcggagaacttggcgtgccgcgtcggggtggcgcgcggcggcgacgatcgaggtggtggtatttgtagtggcgggaaagcatttattgtaggggggcatgggaggagggaaggaggcagctggccatggctgcggtcggttgaccgcacgcggaatgggtcgcgtcgtgggctgctcttgtgctcggtttatcgatggatggatcgatctggcgtccgacgcgagcgagccaagctgctgacctacataggagtgtacatgttgatgaggtgtggtgtagtaatgacttggggttgggacgtgaacgtgacgagctgagctaaggctaagagatcgggtggtgttttctttgcttctactccatttccggctctatctgcttttgtcgtagtagtaacaagttagcactagtgctgctgttgcgttttccttgtggcgactcatcaagtgtaggttcgagcgaacacatgccgtgtgccagtgccaatcaactatgtttgagcatctccatctgacttcttcaaatatctatttaactagcttgctaaaaaatagagagttaaatttacctttcacgtcaacaacctttctattacacttttcaatttaacaacatctatgtgcttcttcctccttctctccctacccatcccatccacctctctccacgtttgggcaggcacagcgacgacgacagacactagggtactagccaagaggtggggcgattgcaacaccggcgagccgactaatgggggtcaccaccgttggtggatgggccatcctcatcaaacagttagatcctcgcctccccccccctagggttgccgatttggcaccttgcgccaactgctactccgttatcgtcctttgctccgcatttgaatatgggcaccgcgtcaatgggaaggtgaggcagacgcgccagagagtgaggtgtagttgatgaatggcgctagaggtatgttggtcgatgctaaaggtcaacaacaatgaaggattctggaggagagagagaaggaattaggaacgaagatgtatggggccacctgttactcagcgagtgtgcaattgtcagatttggccagccgaatggcttggccaaccggttggaggggctgttaaaggatttttttttgtacttattaaaatttagcttagagagctatttaactactcttttgaagatactctaacctccaaggcaacctcatttcaaaaaaaaaaacatccaaggcaaccgtggtctcttgcactagagatgaggcttagagcctatttgaggagcttaagattatgagatgtgagatgcagttggttggtagccaccttctgagaatcagcttatgagaatatggaaaagctgggtttcccagcttctgtcttctaatttattttctggattttataactacagcttcttaaaatttggaccaaaagctgaaccgtttagaggagcttttgatttttaggagaagctgcaccggctaaaagctctcaaaaggcccttaaatatggtcatggcatcgtcacgccatgtccaggtaaagtgggcttgtttggaccataaaactcgatcagtatttgggcctttggtcacggcctcatggagttacgtcatgggtcagccggtgcagaacggcaacatatgtagttggcagtttggcattcacaattgcacaagcccctgataatgtaggcgcaaacagagggtttgtttgtttgttgcagcagcctgtgaccgtgacgatcgatctcatattctcattattgcgttgcgcatgggattcgctcatgaacgaaccgatgaaccgtcgtggctggctgcgcagccgcagcgcgagcaagttccggcacgtacgacgcgccgacgtcgcgagaggctgcgcgcgagcgaaggtttcctcctcatccaccgatccacgacgacgactgtgctgctgtgcgcgcacgagacgagatggccggaaggcggccgatcgagctgtggctacgcgccgcgcagggggatggatggatggatgcctggatggtggcgttggcgcgccgaggcggagatatcccaagagttgatcatggcgtccgtattccgttggggctcgctcggtagtcgagacgcggtttacgcgcgcgaagctgttgcgccaaccgccaatatgcatcaatccgggcagccgcatacccgcgccggttttgctatcccggcccataaggcccacgcacgcgcgctagaattttttttccgctggcgccggtttttccgttttctcttctgttttttcttttcgtgttttcttttcttttttttgcgcttttttcatattatactttctttaatcttttagcacacgtgttttttatatgtattgagttgaaagttttaaaatattgacttgaaaattttcaaatctagcaaatttttaaatctcgagtgaaaattttcgaatctaagtcgaaaattttcaattttttcaaatctagacttgaaagttttcgaatctgctcatgggctttgcttggtcgactgcccgatctgctcatacctctctgattctcagtttgggtttgccctggctagctcgatacaattgggtctgtttggctgtccgtacctagatcaaccaagaccagactgaatagcatgagacgtccgttggctggtatagtgtaaattttttttagataatagaaatatataaaacccggcttctacaccgtgtatacagccacagtggtatagtgtaaatgctcctatgtatataaggtattatttggttggttctgaatcatatgtgtagttactttttcatttgattgtgaggttacctctttgacgtataatactattgttaagttttaagcattttaaattatagtaaccagtatagtggcccgcgctaacatcattatattttctcttatataataacatatatgttttctcaacgtattattccaatatattaaatgacaacataattttaaattttgtactaactttacgaaactactaatgtgtaatattcatattgtattttatatacgtgttggttattaattatttttaatatcaaattttagttatttgtaaattatattcctatattcctatatgttctttttttaattccaaattttcgttagctgtaaattgtatttctatatagactctaggctcttcttccaatattatttatttttaattctgaatttttattatttctaattggatttctatgtagactccaaactcatctttcaatattctttaatttttaattttgaatttcagttacttctaaattgtattcctatattgactttagacacttctttccatgtattttttttatttcaaattttagttatttgtaaattgtatttttatacgaactctaaactttacttttaattttattatgtttattccgaattttagttagttttaaattcatatatagactctatactctacttctaa

SEQ ID NO: 22008 - DNA, 1457 bp, Oryza sativa
gctcgcgcgacctcgccgcgctgtccggcgcgcacaccgtcggccgcgccagctgcgtcaacttccgcacccgcgtctactgcgacgccaacgtgagcccggcgttcgcgtcgcaccagcggcagtcctgcccggcgtccggcggcgacgccgcgctggcgccgctggactccctgacccccgacgcgttcgacaacggctactaccgcacctcgtcgccggcgccgggctgctgcactccgaccaggagctgttcaacaacgggccggtggactcggtggtgcagctgtacagctccaacgccgccgccttctcgtcggacttcgccgcgtccatgatcaggctcgggaacatcggcccgttgaccgggtcaaccggcgaggtcaggctcaactgcaggaaagtgaattcctgatcgatactactagatagcattgccgcgcgcaaattgttcatagtacaaagtttaaagttatataatcagctgtcaatttcatgtattaagtgaattatgacataagaatgcaatagaaatgtcccaattttagacatcaatcactagtggataattcttccgtttgttcaattaattaaaccttgcttaattcagctaccatgtaactattgcgacggctatgatttttgcaatgaacacaagaactttacccgattgttactagtagtgatgttactgtgatagtactactgctgatcactatcacagtagtatcagtagacttgacaaatgcgtagcaacaaatcactggaaaaaaattcacatgatgtgttttgtgtagtcctgaatagtgagcggtgtggtcgtgactcgtgagtgatcagtttctgctcgtgatggaagaatattggcctactatatgtcgttttgggaagatacagaaaggaattcgatggatacaatagcaagagcgaccaaaaaatccggcaaaaatgcatacgtcgactccgtccggaacgatgtggttttgtggatggatctgaagatgttacgaaagggactaatcaaccaaccaacttggtgagcttgtctgtgtagcttacctgggcttgattggagaaagaaaaattttcgaaatcatgaggaggcatgacctgtttctcataaagtggtttctctaatgcatctgaattttgaacatgttcttttccattttaatagttgaagaacattctctgcgctcaacttatcggtggtgcgcatgtatccttctttacaatattttcagttgcagcttatgatattattttataaaacagaagatgacctcaatgataaaaaaaaaagctagttgttatccatatatatgcgttgaagagctccatgataccacttgctctaaagagtggctcctaccaacggataaaatcgaaagcccctctgctaattgctaaagcaatgaccaaaattgcagacaattggagcacatgaagttgggggt

SEQ ID NO: 22009 - DNA, 4500 bp, Oryza sativa
agtggttgggttaattacaagaaaaatccaatatctgggggttgataaaataatgttgttaagttggatcaaacaactcaaaaccccagcccataggttacatgcaaattagttagttaactacaacaatttgctgaattattaacctcttaatttattcactaattgtccatgcatgcaacaaccaagccactatataggtcagtggaagagagaaggttatagcaaagcagcagcaactcaagtactcccaggtcaacaaggccaaaagggccagtgagtggctagcttaattagctaagctcatagtcatagcaatggctggagccgtgctggtgaggagaatggtggtggtggttgccattgccgccttggtggcgcccggcgaggtggcggcgcagctgacgccgacgtactacgacggcagctgcccgagcctgcagtccatcgtgaggtcggccatggcggccgccgtgcagcaagagccccgcatgggcgcctccatcctccgcctcttcttccacgactgcttcgtcaatgtaagtacaccatagctagctagctagcttgagagtggccagccatggcggctctgagaatgacggcggatggggatcgagctgatggtcgctcgccggcgttcatggcgattatatatgattgcaggggtgcgacgcgtcggtgctgctggacgactcgtcgacgatcaccggcgagaagaacgccgggccgaacgccaactcgctgcgcggattcgaggtcatcgactccatcaagtcgcaggtcgaggccgcctgccccggcaccgtctcctgcgccgacatcctcgccgtcgccgcccgcgacggcgtcaacctggtaattaatcaatttaccaaccaatttaattaataattacttttacactgcatgcatgtcaatttttttttttaccgtgcggccgctcgccgacaggccgtacagccaactcaagctgcaaatgcaacgcactgcatcatgcccgtgtcaaaaagccacctacatttttaatgacgcacgcatgctcgcgccgcgcgacaaattacaatctagagccatccgcacatgccgtaccccctcagtctcaaaatattgtttacatgtaattcaaataaaaaaatttaactctaaatattttcgttacgaaatgcaaaagttaaatttggatttacatatttgtgggaatgatatatcatatattaatacatctgcttaattttttttaatttttttagaattatttgggtgacgtgcaaataaggaaggacataccctcaagagtttagaataatttcctgtccaatatctcactgccatgtgggccatcccctcccacgtccatgtacagttgatttgcgttgattttacttgcggctgcatgcatgacgaaaaatgattgacgctgatggatggatcgaccgatcgccttagcctgtcaatcttgtcgtgcatggggtgtcaagacctgcctaatcaccacaccaaattgtaactaaactaattttacagcggtaatcaactcgagagaagtaaaactaatttggtgcgtaaatttgatttgctgcagttgggtgggccgacgtgggcggtgcagctggggcggcgcgacacgcggacggcgagccagtcggcggcgaacagcaacctgccgtcgccgtcgtcgagcgcggcggcgctggtgtcggcgttcgcgtccaaggggctcgactcccgcgacatggtggcgctgtcgggcgcccacaccatcggcgccgcccggtgcgccaccttccgcgcccgcgtctacaacgacaccaacatcagccccgggttcgccgtccgccggcggcaggtgtgcccggcgagcggcggcgacggcaacctggcgccgctcgacgcgctcagctccgtccgcttcgacaacggctacttccgcaacctcatgggccgcttcggcctcctccactctgaccaggagctcttcaatggcgggcccgtcgactccatcgcgcagcagtacgccgccaatggcgccgccttctcccgcgacttcgtcaccgccgtcgtcaagatgggcaacatcagcccgctcaccggctccagcggcgaggtccgctccaactgccggaagcccaactaagctccggcgatctttgagattcgtgcccggtcgatcgatcgatcgatctttgagattcgtgcggagatcgatcgatcggacggtctggatggatggctagtcaactgccagctaggactaggggatggaggaggtggggcccagggatcagtgagacgtgtggctttttttggcgtgggaaggaagcgatcgagaatccaagggaccgaaataattaggtggagtggcgctgtcaaaaggggaggatcaagagggaggtggggcccacgctgcagtgacacaaagggctgcatgcattgcctttttttttttgttattttggtttggggttaattatcgcattcttttcctgtatcataatattggtggtgatcgatcgatcgatgcatttggtaataatttgagctgtaattttttttttttgtatatgtactaccccatgatgatgattgagaagatgactgattagtttgcaaggcatgcagatatgaataatggagacactagttcatgcatgcatcgtgcatgtggtgtgttttcctcaggatgcagacaagtcgtatataatgatcatccatgcatgcgcttatatatgggacaaatatgttactgtaactaggggaaaatgctattaccttcctaatatcgggacgaagaggtaatattgaataattatactcaatctaaaacgaacgcatgtgcataattattagaccaattaaccgtttatcatatacacgtatactcaaatacaaagatccattattcttttagtgtatcatataaactagctaggtgcctgggtggcccgcgcaactgcgtggttagcacccatacaaaattatatagtttttaatatggttttacttaaagtttattaaataggtatcttgttgtcttaagattttgaaagaccaacccttatcatccccgtttttctaattttatagtttttatactcctatacggctcatccactgtctcttctatttcgtgtcattgggattttaaaaattggatataattattgtttgggtttttttatactttctaaaagtcccgtcaaaccatcagtggctttgccactatactcctctacggcttgcccggtgtctcccttctttattatcattgagaatttaaaatcaaacatgattatcattgggattttttttatttttagatgtctcgaacctttaaaaattggaccttgtaatttttagagtttattgtgtcgtggggtttcatttttctataaaatttcgaagtcacttcaaacgctgccactatactcctctacggcttatccgtcgtctactctttattatcattgggattctaaaagtcgaacataactatcgttggaattcattttttactttctatatgtcccgccaaccgtcggcggctctgccactatacccctgtacaacacgcccgctttttattgtcattgaaattttaaaaacgaatatgattatcatgagtgttttttttactttttagaagtcccgccaaccgccttgactggttgcttcacgtcttgcctgtcgttcctccttttaattgtaattaggattctatttagtgttttatcaatagtttttagatgtcccaccactactttactcctttataggcctattacttacttcctcccgtttacaatgtaagtcattctagcatttcctacatccatattgatgttaatgaatctagacatatatatatatatatatatatatatatatatatatatatatatatatatatatatatatatatatatatctatttagacccattaatatccatatgaatgtggaaaatgttagaatgactttcattatgaaatggagggagtaattattctcgtcatgtgttttagatggtcctttctttcaatggtctttattatcttatcaccaattttagttatttataaattgtattcctagttgaaatcttatttttcttttctaatttcagaatttattttattttttattttgaattttaattaatattgcattgtgttcttttaatatttttattttttattttttattttcagtttcacttgtttcaaaattgtattcctacttgaactttttttattttctttttctaattttaatttttaattaatctcgtattgggtttttatatagacttttatttcaatatttcttaattttaattctgaatttcagtatttttaattgtatttctacttgaactcttcttttttttttggctaatttcatattttattttattttttattttgaatattaattaatctcatattaaattcttatatgatctcttctttcaatagtgcttatttttattccgaattt

SEQ ID NO: 22010 - DNA, 4248 bp, Oryza sativa
  unsure (1)..(4248): unsure at all n locations
tgccgcctggggaagagcgtgttgccggttttcctcacccaatcgagaaacccctatgcataaaaggacaacgtggcagccatcccgaggagaaaaaaaattcaattctaagaaaatcggtaggagtagagcttttattaattgatgataggtagaagaaaagagggttgaaatataatattatgagggccctttaaaaccaccgtacattggagaggtgccaaatgggcaccttaacagtgacttcaatccatgcatatatatagatggcaaaccttctctcgtttgagatagataaagatcaagactaaacttagaaaaaataaagcacacaaaacggaaaagtaatagtgtattattaaatgagttctaattattataattttagaaaatgggtttatttattattctaaataatttttatatagaaagtttttaaacgaaacacaccgtttaccagtttgaaaagtgtgctaacgaaaattatgataaaatatatatattaatttaataaaaaataatgaacggggctagattgcaagctgtccaatactgtggctgcacgtgtttttgaccgatatttgcaaattaaatccagtgatcgacgtcttagggtgtgtttagatccctcggcaaaatttttcactctgtcacatcgaatatttggacgcgtgtatagagtattaaattaaacgaataaaataataattacacagattgcgtataaattgcgatacgaatcttttaagtctaattgcgtcatgatttgacaatgtggtgctatagtaaacatttgctagtgacggattaactaggcttaataaattcgtctcgcggttcacaggtggaatatgtaatttgttttgtaattagtctatgtttaatacttcaaatgtatttctgttgtccgatgtgacacgccaaaactttacacctatagatctatgcccctgtttagatccaaccctaaaatttttcaccctgtcacatcaaacgtttgaacatcttcatgaaatattaaatataggctaaaaaataactaatttcacagtttgcgattattttgcgagacgaatcttttaagcctaattgctccatgatttgataatgtggtgctacagtaaatatttgctaatacggactaattaggttcaataaattcgtctcgcggttttctcacagattatgtaattagtttttttattagtgcccgaaaccccatataacaccctatatagtactcgatgtgataatttttgcatttttaggtatcaaaataaacaaaacccatcctagtggatttgccaaaaccttatccctgaatgtaaacaccctcttattatgaaaatcaaaatgaaccagcactagctactactctagctaggtagtgcaggttctagggtctggacacgtactggcagtacagcatgcacggctgcacccaatgtcccagctgcaggctgcagccgtacagggcttcccagccgacacgatccgggaaatggtaaactttgtttcaaaactaaccctatcaattaagtaatgactttatcaaaatttgacgaggtaatctaaaacatggccaaaatttacctccattatcaagttttgataattctaaaagttcctctcacaaaatcttaataatggtaacaaactaaacataacttccacttctcaactttaccaaatacaatatcaatatttgataacattgatttagacattaaagtgaacagccccttaattatctttcgtcctctttccggaagaataatactccatctacataactctgccagtctgccttgcaaaactaaagcacttggaacagattcctctctgcaaacagcggaacagagcacccaaacagcagaaagggagtacagacacgcaccaaaccaatgaagcagccgcttctcctgcgatcgacacgaagagagatcggtacagctcatgcgcataattccctcgcccaggacagcattaggttgcgaagcagcagtacgcgaacacacacatgcagtagcacccgcaccgtaggctgcagcgatcgaatagcagtgcagttccatgaattccaaggttggtggcgaactcccgatcgccggaacgctggccggacaggcgtttggtggatccattccatcgcattttgcatatcttcgcgtaatcttagctgtagccctgtacttggagtatgtatgttttctggtcatacctgatcattatttgctaataaatattattagccataccttacaaagactaagaaaatcttgtcatatttttttaaattcattaatatgtgagatctaatttattggaaagataatcttgtgataactataagtacaactaaacagccaacaaggtgatcaaacttatcaaactatggtaaaatatggttaacaaacaaacactcacaaaggtcgttctgaagtgtggcaaactctgccacacttttcatattgttgtcggcatcacggactcatgtacgtatattgtacagaatgcatgaatgtaatggaataagtctatttggcctccctcatgtcttgttgttggtcaaatcgtatccctcaaccgtaaaacagggtacaaattaatttctttggtagttttaaaagtggtttttgctgacgtaacacgttgacttggtccaagtatgtgtgggtgtgtgcgcgcactcgacaatgacatccaggtgaccagtttatcgctgccgtgggacatgtcgtcattggtgcatcctggtgagagagaggggagagagagtggggagggaggcgaggtgaggaagataagatttggatgatacgtggatcccacccgctgacttagctagtcaattgcggtcaatatatcacgtcagctaaaatcaccttctaaaacacctaaggagatgatttgcaccgatgtttaaacacggggaggtgttatacccggttttgtgttagacggaggcgattcagtcatgaccaagactgaggagaaattatagacttaatctgaatgttattgactgctatctccgtccagcccatcgaagaccctgttagttccaattgttatatgggccaaaatgggcccaagaaaatcctcctcctttttcagcgtaaccataaccctccgcgaaagcagccagctaacccaatgtgacgcgcgtagcgcaactgtagagcgtgtgcgcaaccatctcgcacgcacttgactgacagccactctccgccgaaccccaccaccatgccgctgccaccccatggtgggctccctcccgcacccatcatcgccaccgccaccgccacgcgcgccgaattcgccgcccacttccaccacaccaccatgcgatgcaacaaccggtgggcgcgccgcgcgcagctctcgcggttaaattctcccaacacctgcgcacggcgcacaacccaacgccggcccgccaagactacggacgaacgttcgtccatccaccacggccctcggagggcacacgacgctgacgctggatccgacggagtcgggtgatatagattgattggttactgtttcacaagttcacaacttgtttcgatgcttaaaagttcgtaaagcgaaataattgcacctaatagataaactaattagcaacatgtggttngggcaaaaaacattagtacaaaggatagggaatcttttgccaaaaaaccaaacaatattgtcaaaatttttgccaggaacaggagccccttggcagcaaccggaacacaccggcttttgagcctctatcaacggtatcgattaatcacccttatcgtctttggttccttctgcttgcttctcttgctggttcgtcggtcggtggagtttgagcctgcgccatggctgtcggcgggagagggagacggccgctgctcctgctcctgctcctcctcgccgtggcgctggcgctggcggcgcgcgcgcgggcgcagctgtcgccggggttctactcggcgagctgccccaccgtgcacggcgtcgtgcggcaggtcatgtcgcaggccgtcatgaacgacacgcgcgccggcgccgccgtcctccgcctcttctaccacgactgcttcgtcggcgtaaggaccgcgccgctcgccgccgtccggacgaacacatgctgcctcttctccgcgcactgctaagctttgattttgtgttgtggggttggggttcacagggctgcgacgcgtcggtgctcctcgacgacacccccgcggcgcccggcgagaagggcgt

SEQ ID NO: 22011 - DNA, 593 bp, Oryza sativa
attatttgtcctggatcacaatttttttacctagataaagaaagtaatttccccatctttgtgtggttaggtaaattgttttataggtcagttcatttctcagttgtccatcatcttctatatggctgtacccatgggtttgtgctgttatcattcatgcatcatatattttcccttgcaatattgtttttaaaatacttactatttcttggttagtacctttagtcttggctctctttgctaatgtatcttcttaaaattttcagggcaattttcagactctttacttcagcaatggattggctaaagagtaacaagtacttccatattgtggttaaaggggttgaacgtgatggctggaaatttgtgctacttgctagattctctcctctaccttcctacataattaactatgctctatctgccaccgacgttggatttttcaaagattttctacttcccacagttgttggctgcttaccgatgatcctacagaatgtttctattgttagccttgctggtgctgcagttgcctcaaccacaggatctgagaagtctcggatatactcctacttgtttccagtacttggtat

SEQ ID NO: 22012 - DNA, 1148 bp, Oryza sativa
aaatatgataaaaaatcatggtaatcaacgagtctaatagcctaggctatggccctcatcataaccaaaatgtgcatataacatgctaagagaatgactattaataaaccagtcatctcaaatcaacccaaacaacttttgcagcctaataaagctgacaaaaatggtataacacctttctgtcgggcacctttttatttgcagcataataattccaaagaattatcgaaccgcgttaaaaaggattttagcagcatcgggccacatcattgtgagcacaaattgccaaagcaaaaagcacctaagtccctagggatcacaacgggccacgctgattataatattgggctgaagtactgtacagacccaggcccattagtactcccgataccctaacaaagcaccgaagtccaagcatcgcttcgtcttccccaccgagactctcgccatttccccactccttgctacagtagcaaaccgcaccgtcgaaactagggttcatcaatccgtcccaatccattctcaaaaaatcccacgaaacttctccgcgtgtccaccgcaccaattcctcattcccctccagctatatcttggaccaaatctaaccatgcaactcgcatccatggcggaggagagagaaagtttcgagagtcagtgggctccctccgatgtaacggaagagaatctgaaagaaatggtggtgcacggcgttcttccgacgaaggaaatcatcgggtggcgaccagcgttcggcaaagcattcccgacccccgacacacacgagattgtggtattctctcacttcttctatggcggattttctcttccaacctcaagattcttccggggaattctgaacttctatggaattagcttgcatcatctgaatccaaactccatagtgcatatcgccaattttgttcatgcttgcgaagcttttctgggcattaggcctcatttcgccttgtttcgccgcatcttcttcctcaaaccctagccaaacaagagcaaactgtgcgttgttgggggtgctggtttccaactcaggggaacactaagccaaaaatatttctccatgcccttcaagacctcaaacaaaggctggcacgccaactggttctatgttcaaaatcctaaaccagcccttc

SEQ ID NO: 22013 - DNA, 640 bp, Oryza sativa
ccagccagatttacgcaaaaggaagttggtgtcaagtgatgacgaaagcgatactgctagaaagcctggagaccgagaggcaaccaagaaactgccaaagcaggctactccaaggaagaaaacatccagttgtcctgtgccaaagatcaggaagtcttccaggtacaaatcatataacgatctctcttgcattgatgtgcacccagtgcagaaataatactgacaaccaaacttgcaggaaaccatctgatatagatctttctgcaaaagactctgacccgactagcagggaaacaaacttaaaaggaatcgagccaactgacgaggatcagccgagtcacagccagccagcaaccgataatgtaggatctggtgatcaacccccgactgagaatgagtcggccgaagctggagccggagttaatcaggagcccccgactaaaaaccagtcggacactaggccaagcaagagattccagaagttggagctcgggcagacagccctcgtagacaagacgccagcaacgacccgatgccagggtctcccattaaggtgcaagagtcgactcgttcccgtccggaaatcatcacaggtaaacaccttgcctgaaatcgtgttgatccaaataactctgatcaa

SEQ ID NO: 22014 - DNA, 4521 bp, Oryza sativa
tcatatataagtagcatatgaaagatagtaaattaaattgtgaaaaactctaatatatgaatgatagttttaaaaatatattaaatttaatacttttaaaaattctccagtcaattataattagcatatgaatgatagtaaattaaatgttaaaaactctaattaacatatgaaattgccacttgcgtgatttaaaacttttaaaaatcctctagtcaattataattagcatatgaatgctagtaaattaaatgttaaaaactctaattaacatacatatgaaattgccacctgtgtgatttaaaacttttaaaaattgtaagtatcacatataactaacatatacatgatttaaacttgttgaaacctctaataatcgtgcgtaattaacatatgccatacatcaattgatttatatggataatcaatacatccaaaatagtttacatcgtgtacacaataattacggcattacatcggcggtgacggttgaccgcacgtactttctcctcactattgttccctccttgtgatcgctgcgtgagtaaggggtgtcttcatttgataggaggatgctagggtcaatcgtcaccgtgaaagggggttgcccatccaactgatcgtaatcctcgtcagtcttgtcctcaactccgacgatttttcttttgcctgggagaaccacttgacgcttaggctcatcaggccctctgcccttctttcctttgctagatatgtccttcacgaaaaagacttgcgttacatcattggcaaggacaaaaggttcgtccgagtatccaaccttgttaaggtcaacagttgtcatcccactgtcattcgcaaacattctcttcatgcgctccgcaattgggagataccacaccacctttgctgggcctcccctctttgacttacttccttcaccttcactctttgctcgtttgtatcttgatgccccacagatagggcagacatccaagtcagcgtattccttgtaatacaaaatgcagtcgctcggacatgcataaattcttctgacctccatgcccaacggacataatacttgcttcgcttcatatgtcgtctgaggtaaattgttcccctctggcaacagatcctttaacagttcaaggagttctgtaaaactcttgtccgaccagccattactagccttaagcttcatgagttccaacacgcatgacaacctgctgtgcttcgacttgcatccatcatacaacggcatctggcaatcttccaccaacttactaaacttctcataatctctgtcattgtcctctgcgtcttcaatgtcatgcaacattgtagatagacattgagtgtccaaatctatggtctctccacctaaagcagaaggtacgaacatgccttctcgagctgcggcggtgttctctacatcctgatccaacacttcttcagctgcgacatcaggcgcctcttgctctccatgcttggtccaacaggtatatttcttcatgaatccattcattatcaaatgagcatgcacttcatccttgtcttcgatcatctgttcattcttacagtccctacatgggcacaacatgtgcatgctcatcctactttttctgtcattatccgcaaatgtgacaaattcagtgaccccctctctatactcggtagacgaacgatgcgcatagtatatccatctacgatccatctgaaatcaacaacatacaaagaaaaataaatgatgatcgatatgttgagaatgaatggagaataatgtgttttttaccttgaattttagcaaaaaatcgcccccttgccctcccaaccgatttgtgaacagtaaaatggtcgggatggaaagcagttggcagtttggggggtattatagacccaacacacctcaaacgggttagataaaaaaagcccgtcaaaggtattggtcatacctttgacgggcttctattcagtggcccgtcactggtatacctttaactgttactgctttcagcccatcacaggtgaggggatacctgtgtcagctctgagacggatggctgaccggcgacgttatacgtgatgacctcctcagaggtaatggtcactcgtgaccaattcgtgtgccagtcacaagtgtcccttcttacgtgtcaggatctggaggggatgtcttagctagctcgctaactcatgctgtcgtttcttagcacaccccacttgctagctagctagttatgctcgatcagtgctctgtcgcgttcgatcgacttggatcatgtcatgaaggaggcgtgggacatgatcgagagtttcgtgcagtctagccgaagatgctcctccatccgatctgaccacgagcagcgtcggaatgtgggtggagctgatcgagcctgttgcctctgatccaaataaactcgagcaggaaacgcctcaggtccggccgttgcacaagatcgagacaggacactgccgcatgcacaagcttgcattggtgaacacaaaaaagaaacgcgcgaaagagagcgacggaggtgcatgcacagtagccgtggaccaccgtaccccaacgcgttgatgcaaaaaggacgcgctcttccatattgagcgatatagatgcaattaatgcagtgatcgacctgcacatacagatgagtatatatatcccgggaaagtttcaggtgcaacaaacccacccaatcagttagctagctagctggcttattgcaacccacccatcctatatatatcagctagctagctggcttattgcagcctcgatcaagacagtgatcggctcaaaaagctagcaacgacccaatgcaagctctgccgatgcaatccttctacatataagggatcggaggatgcatatatagccatctccatcacatctcttacagcttgatggagcagcagttggttatttttccttaatttgcctagtacgttaatttggaagagtaaatgtactatgaaactgaaaatgtttatgtggctacttatgatggatagattaaacactagagaaatgctacagagaagacatttcacagtacatggtgaaccagaatgtgtaatgtgcagtgatgcagcccttgaagacacgacccatctttttttctcctgctcctttgcaaagagttgctgggtttaccttggaatacattggagaatggacctcagtttcatgaatatgattatgtatgctaaagcatatttccagaaatctttctttattgaagcggtggcaattgcagcttaattggaacatttggacgacaagaaatgcacaattttttgatggtgttcaacttaatctaaactcttggaaacaaaggttcagggtggattttactctacatatgtttagagtaaaagaagtagaaaggcctatatggaaatcatggatagacagagtgatgtaataactttgtaaattctatctctctccctctttgtaaatattcttccctttatatatattctaaatggatcacatgcgtatggcttgcacgatgaagcaagccacccaccaggccaccactatataaaggggggcagagttgcacggtatatctattccagcacccacctacaagccgagcagagcacaactgcacgatggcaaccaccccacgcctgccggttgtgctgctggtgttggcagcggcagcactggccgcaccggcgatggccgactacgcacaccccccattggatcctaaccagtaagttttccaaccctctcctgcgctctcactctcacgtactgaggattcattctccttaagtctcctagctaatcgatcttaattaagccccactaattaactagtctccctatagcagctagatcggcccctatatataaatcaagggaatatacatgctttgctgccgatgttagcttttgcattgcattattagttggaaacttggaacaattaagcatgcccggccgtgcaggactgactcatccactgcactgcacgaccactactctgcagtctgcaccggcctgtgtagtgttactagtgtagaactcctcgatcactactctctcgatccaaatatgatactaccttatcaagcaagcatgctagtgatctcattaattgatactgatcgacagtcgtatgtatgtacatcgatcacactggctactaggaaggagatgcatgaggccatggtatgtatgtatatatatgatgctaccataaatgcagaatcagcaagcatatatcgatcgaatgcaataacttgatttggattcattagtttattattaagtctaattaaccgcgcaatatatataattgggagttagtacgtaataattgtgcagtagctcggtcagatcatccccgtatattacgaacgattctcgatcaagagggttgtgctgctatgctagattttgtaatgttccattgaatttttaatttgtgttccgatcgatatgagatatgatcatctcatgcatctagtatctcagaaatacacgtacgtatgaatttttttgagaattaatattatttt

SEQ ID NO: 22015 - DNA, 649 bp, Oryza sativa
tcgagttcgacggcgaggcgctctaccagccacccaacttcccgagcacgcagtggccgctgatagcggacacccgcggtgacggcacgtgttccgacgagcacctaatgaaggagcacgtcgccgggaagctagtcgtgtgcaaccagggtggcaacttgaccggactccggaaagggagctatctacacgatgccggcgccgccgggatggttctcatcggccctgagttcatgggctcaatggtccaacccaagtcgcacatcctccccgtggcgcaaatcgtctacttgtcgggggaggagctcaaggcctacatgaaatccacgaagagtccgacggcggcgctgatctacaaaggaacagtgttcggcgaccgcaagacgccggaggtggcgcccttctcgtcccgggggccgagcaggcagaaccaggggatcctcaagcccgacatcaccggccccggggtgaacatcatcgccggcgtgcccgtgacctcgggcctcgccacgccgcccaatccactggcggcgaagttcgacatcatgtcaggcacgtccatggcggcgccgcacctcagcgggatcgccgcgctgatcaagaaagcgcacccgaagtggtcaccggcggcgatcaagtcggccatgat

SEQ ID NO: 22016 - DNA, 604 bp, Oryza sativa
caacctcatgagccatgacggtcaaatcaagaagagaatgaaatcatcatcccctgcacatctcgtgcctctccccttgggcgacctcgccgccggcggcggcggcgacagatgacaccctgggcgtgttggttaccgagtagaacaccacgtcgctgacgcttctcctctgctgctgtaggtgctggtgctgcgacctcttgcagtgcgcaatggcgccctggatggcgccctcctccgacgacccggcgctgctactccgcttcagcgccggcgccgccgggaagaacctgctcgcgttgccgcaggacggcgtggacgacgacgacgacgaggtcgagcacagcggcgaggtccccggcgccgacgccgacgccgccttcgtcgccaccagccgcacccgccggatgatgccggagaaggacttgcggtggccgcagagctcttcctgatccatcacgccgccaccattgccgccgccgacgacggcgatgccggtcggcttggcggtggccaagaagagggacttgatgtactccctcgacgtccacctcttcatcagcttcaactcttggaccacgagtacttcttgggggctgcagga

SEQ ID NO: 22017 - DNA, 2268 bp, Oryza sativa
tgactaattttttaaatatttttcataatttttttaaataagatggatggtcaaaacgctgagtacgcatatctatggctgcacttattttaggatggaggtagtaccatcaacataaagtatcatatcttggtcgatttgttcagtgaaacgtttatatattcttttcatggctttgacctgtcagtcaaacaatctgctgccccttctgggctactgctgccgagttaccagatgctaacaacctaacagtacagtaattccattgttcttctgcttcatctgtgccaccacttgatggttgtggtttgccaacatttaatctactagtactgttttcttggtttttcgtttgatgactcattttgcatccaagaacacgacaactgttagctaaggattgcacacgaaccaaagcactggtgagtgctgtcatcatatgaggctcttgacacttttccagttgttttttgcgattggaaatctctctccttgaaactttttctcttttttttcttcttctcctcttgagcaacagaaaggtgaaaactttttgccatggccactttatccaccccaattccccctttttccctctctcatctgggaagattctttggttgtatcctgagagctggtttgacaggcaaatggtttgctccatccaaggtgctgttaacattaagcctgcactgtagtaactttgacagtcattcacaggcacaggtatggtgaaagtatggaatctctcttgtgtttatgccattgcttgctttctctctggctcatcacagggcttgctcgtgctcatctgggcctgttgtgtgttgttgcatgacccatcccaatcagaagctggctggacaagccatggtggtgggagaactgggaactggcaatcacaaccccaaagctgctccccttttggccacccctactgtgtttgtgtgagtgtgtcagtgaccaatgctaagagcaggtacaatagcaggctctaagccagctgcaaacatattttaaggagataaatgaggagagagagaggagagaagcgggctacagatttatagccagttgtagcacggactccaagacgcaatgtgtgtatgacagatgggaccatgtattaatagtgtagtatataactattgtataaatgagctattagattagctatagatgaattggagccggtagttggctatactattagacttgctctaacaggagggagtatactgcattgctagtgctactaccttgcaactgtttcagatgctatacttactactatctcccaattcaaaaggagtagcagcaaatccgaaccatcttggtaggacagtatacaaaatttttgaaatgatggtttgaagatactagtctggtctttttggacgatgccatccgtaatcgatggcaatggagtactgttagcttgttcttgattttgtttgctcatcactgcatttgctccatctcgatgtctgtctgcagatacatgggacccctaatctcctcttgctagattcctcaaaagcatcaccggccatgagagtgagctcaactgaaagcaagcatgcattgcattttcatttatacatttttcagtgaatacactactactcctactacaaaacctttgttttgaagccaaggaacagcgagatgcagcaggagcgtggcgtggaagctgacaaagtcacaaagagatgtctgcttattaatttgggagcctggactttggcgtgccttgtacaactacacaaagagatgtgaggtaggtgaagggtaatacatgatgcaatttatagccaaaagattgattggtactccactctactcctgcatgaacatgaggcatatggtatggtcaagtagcgagaagagagtgtacttcgagagaggaatcaaatctgccaccaagtcagtgccaccctagcaccatttatcagtacagtaccccaagccccacaacagtacaacttctacccccccccccccctccctccactgctatggtaatgcaacgcaatgcagtattggaatgcaatgcttctcaacactctgtcaacaaggaagaaaattgtatgaaaatgaatgcatcagaagttcagaacagattcaggatggaagcaaatgaacagagattcatattaataaagctaaagattcatatgctacattaggaaaaaagaacactacttcgaaacagggaaaattccactgctatggcaatgcaatgtgttctaaatattggtaatgcaa

SEQ ID NO: 22018 - DNA, 684 bp, Oryza sativa
ggagctccagtatcagcagctgctcctccgccgtcatgttccccctcctcacgtccggcctcaggtagttcagccaccgcagccggcagctcttccccgtccgcttcagccctgcatgcaccatccaactcaattcatctatccatccatcgatccatcggagaagaaggaagaattgctctgcttaccggcgcagcgcgcgagcgcgttccagcggccctcgccatgggcggcgatgtagttgacgaggagcaggtcctcctccaccgtccacggccctcgccggagctcgtcgccgccgccagcctcctcctcgctgctcacctctcgcgccatcatcatcgggcagagcaagtgtgtagtagagctagctatatcgtttgaggaaaatggcgggagagctcgggtcgggctttggccttatatatagaggagaggagaggatgataatggcatgtgtggacttggaagaaaattactaacaatcaagcagcttaattagcttaatcgatgagatagctgctgtgctctgatcgattccaaaagcctaaagcgacggagctggccatggatgccatgcgtgattagtttatcttttggaattacaacaccacattaacgatgctaatccacccacacacgtcaactttgacgcctcctctgcacttatctggctgcaggaat

SEQ ID NO: 22019 - DNA, 3587 bp, Oryza sativa
atatacgcaagagcgactcctagctaggcaagggggtcccgaccgctgggacctggaatgactgtgtgaagtttgttttccattttttaagaaaagaacatgccctacaatgtaatatgttgaaaactcggattgctggaaggatacttcaattcagagctgggaagtgtttttttagcttcgccctgctcctgtgagaacgtttttgggaccctggtttgtgttattgtgttattgtgagaactcatgatgtatattattttggtttgtccattttttgtgtcattgtttgtgttttttttgttgtgtgccaagttctcaatcttgatgtatgcacatcttcaatatcatatcaatatatcatgcatgccaagcaaaagaatgggaatgtgttgactttattcatgttgcaggatctgaccaaggtcttcagcatttcccactcaagaagacctcgagtgcaaaaggtacatggaaatatgaattttcccagcagaagctgggatatactctagtgaatttacacatattacagaccttatcttcattatatatctatttaatattcacattcattcaactaggtgcttatacgaaatatgaccttacactataatttatacaatttaaaaatcaatatatgaattgaattcttcaaacccatatgcctggcatgcaatacagaacgcagcagcaggagtccctttcagccaggtttgttcaaagtgtggtaaaattgattttggagcatttcatcactcaaggctttggtactctgctccttacctaggccacaaatcctgatgaagatgatgaaccgtatatctcttccgcttgcgccaccggaacatacaccacgtcggtcaatgagctgtgggtccggccatagaaaatgtacacgaatactcccattaccagccataccccaactctcatccatgtccctccactggaggcaaggtaacaagattcagaattgagtacaagcttgaagcatatgacagttctgaagataagtacatgtgagcaatggaccatgacttaccccaagtttactaacaagtatgtgttcacgaggatgcacatcaccggcaacaacggaacgaaggggcagatgaatcctgcagcaggagcagcaccaagatgtcgtgatattaggtaatttcgtcaatagaatctagtgtagacaaggtgcagagatgtgttgttatgtaagtacctccagagtgaccaaatgagtgcctcccgtcatcttggtcgatatagcagaggacaccgagaccggctaggaggagtaggccaccaaaaacacagaagaagcatcgcaaaaggctgacatggcatggaagtgatgcatatatcagagtgatgagtatcttggttgcacatggtagggggatgaaatgtgtacaatttgtacttacaatggcaagaatgtgaaagaagctgaagttgtgaggaccacaacccctacacatacagatgatatgctgcaaacagctgctttccgacgctttgactcctccacacctgaaggatttacagaaaacctgattactaaactcaagaaatgtacatctacttaggaatgtcaaatagactaagaaatgtacatacttgtgtcttgcttcttctcgataagggtgtcatttattgattctaccacagatgacaactgttcatgattcgcatctacaggaggacccctaaccttttcctcatcatattcttggctcaaacggaatgacgcttccagagaagatggcaggggtacctcatctggaggagcatatctgaggatcaagatggacacagcaactatagtgaatgcaaggagtgtgcccacactgacctgcaaccaaaattaactctttttgctcaggctaaaatttctggtattgtttagatacataaaattgcagagtatgctaaaatattctctgaagggaggtctggtcatcaatcacatgtaccaaagtacatcaaaattctcaaacgaaaactactttgcagtagtttctagatcctcaccattcctgccagttgtgacacatccatgaagaaggccagacaagctgcacatatgccagtaacaattgtgctcttgacaggaacttgtgtccgctggttgacatcagagaagaaggatggcaaaagcccatcgcgtgccatggccatcaatattcttggctgtgagataagtagcaaaccataaattctctaaattcaaatatctgtctcagcctaagattatggttatactatgtacatgttggatgagagaatacacatatcaatttccgatcctctaatcatgacatgttatctgtagaaagatacttatgagagcagacaatgttatcaagattccagatttaacgactaacagtcatgtagcactaagaaacaacgaaatctgtggggctgttgaacattggttcaacttaactgatgagcacacagttatactacatcacaaaattaatacttgctcatataaaaaaaattctactgtgatgaaatttactaaacagaaaacatcagcctatatcagttacatatggggaaatggttgcatttatagggggtattgactatgatcatttatgaattgcaaatttgcaatcatataagttccatcacatattaatggagattgttgtatacctgtggcagaatcgatcccatcaaggttgagcaaagagcaagaacagcaccagttgtaacaaggtacctaaacaagatagccccttaactgcctcagttggaagcacagtagatcaattatagtagaaaaaaaagagacaaaaaaagtccatacatggcccagtgcatcccatgtcttgcaaaggctgatgatataggggtatctgggtccatagcgaaatatggtaccagaccaacgataacaactgaaaccaacatgtataaggaacagcaaactgacaatgctgttcctattcccagtggcagatctcgttggggatttttcacctgttgttaggatgaaagaattcccatttatcaatactggcactgatctagcaaacagatggatattaattggggaaatatgatcagtccatacctcctcggcagtgctagcaactgaatcaaagcctatgtaggcaaagaaaacagttgctgacccagcaagcattccgttcgccccataagggaaaaacctgaggcaaaaaaaaaaaaaggttaagtgcaccactcaccagctagagaaaatccaaagcaccaagaacgtttcgcattacccgccagccaccttatagccgacccatcctgtttggaagccaatgtaactgccggctataataacaaatagcatcacgaagcaatttaggactgtcacaactccttgtacaaatgagctctgcgacaaaaattaaagagagtaaatatcacatgtggtacttcttgaaaaagagagaaatatacttctgaattagagaagcaagtgagacctttttatccccttgcatagcaaggcggtgacaacgagaaccaggaaagccgcacagagatcgacaacaacatcaaaccatggaagctcatgggtgctaaaaaccatggta

SEQ ID NO: 22020 - DNA, 2978 bp, Oryza sativa
tctttcgttaggttaattcaggcttgatgatcttaggtcgattttgcagctttgcgtctgcgttttttggatttctgggagacattcatttccagcgatctctctaatcctaatttcacagctaaacactctcgcagtatgaaactttgtctgatgtttgtgatgaaatgcattgaccgcttctgtgattcgtgattgggctatttgtaatgttcagatggtgaactgtgcatgttgtggttcaaattttcagttcctcgcaaatttcatctggaatttctcttcgaattcgtctgtttcatgtgaaaaagtgatggaatcatggaatgaaaaaggttgttttgccctttttgcaaattttttttttaaaaaaaaggttgttgataactgggcagtctgggctaccacatatgccccaaattaacatgctgtgttcgccggggaggatgtgattgattaagtattagttaatttttttttcaaaagtgatcaatatgattttttttaaacaactttcgtatagaaactttttgtaaaaaacgcaacgcaccgtttagcagtttgaaaagtgtgcacgcggaaaacgagagggggacatgagggatgtaaaatgacttattcattttcacaatgtttcttattgggctagaacgttcggcccaaaagaatactggaggcctatagcgttctctgtaggcggcccacttttgaccggggcccacctgccggaaaccacgaaactgcccgcctcgaaattcgaacgaagccgaaaaaaattgaaaaaagaaaaagatcccccaccgattcattccgaaaccctctccaccgtctccggcgagccctccaccgccgccgccgccgccgcgagatggaggcgaagatctcgtcgctgtgcaccgccctctcgtccgtgctcaaccacgccgacgactcctcccgcgcgctctccgacgcgctctcccgccgccccatccatctcggttggtaccaccaccacctctcgtcccggcgtttctctcgacgccgttagggtttggggatcctatgctcacgcggtgggggtatcggatactgcgcctgcctgtgatgcagagtcggcggcgagggggttcctgcaggggctggaacggcggtcggaggcggcgggcgccgacctgtcgcggctcgagtcgatggcgttcggcaccgtctccttcgaggagctcctcggccactgcggcgaggcgctcgccatgttctcccgccacgccgacgccatcgagtcccgcctcgtcgccttcggctacgtgccacccggtagcaccaactcactccccccatgggagattctgaacccgatcgtgtcaatttttttaagctcttggttgagaattgcaagtttgctgtgcttcttgtagacgaggaggcgagcgaggatgtggaggaagattgggatgtcgagaagcttcccggggtcgctgggaatgggtgctttggtggaacgagttcagtgctgaggtccagtagagagatggtggatgatgacgatgcattgtatccttatgtttggtttgattgtttttcttcctttttctgttcaggatagtctctgatttggttgctttcgcttctgcgtatgcttgatctgatggaatggttagatacaggacgtcgaaatgtatagggacttgttcattcagcttatattctgtggctagttttagtaggttcgtgcacctgcaattctaattctgaatttggaggtttggtcatttagcccctgtttattcatgtagcaggtgtacaacaccattattagctatgagcctatgactctatgagtatttgttgatttgttcctcctgttctattaaatcttccttctttttttcatttttccatacattatttgagacacgcagtacatcataaattagattggtcagggagccaggggctcactgttcgcgattatatgaaaaatatagtaccgtattaccaacaattctgatgtctgaggggcttttatttattcttggcaaaagggtgcaataactataattctagtagtttatatagtgtaagctgtctttgtccgcaatctgctgttcttcaccacaaccgttcagcattaaaaatttgtgcttgcatatatttgttcggtggttttatatgacgaaaatgagaagcgttgagttctttcttgaccgccagtaagatttgagaactccatgtcactaaagaatcttggcttctcagatgcttgtctagctaccttgtcctctcaaggtatgtcacactagaacaatatcgtcgttacaactgtttgcatggtacacctctttgttggcatcgataatttgcttaaattttgcagacagtggtttatctggaagcacagagatactttacaggaaacctgaaaggtatctaaaggaattgtagattatttttgtattgctactagcctacaattgcttttcctcagtgttcttttgtacctatcaggttcattacttctttgtttctaaaaatgacttgtgatgcttctcagtgttgctgatgttgaaaacaaagtaaatgatgccgaatccatgattcccccgaaagaaacaaatggtcaaggtgggcagcagcgatgtcttcctgactaaagagatggtttttgatcattctgatttttttcactgttgaatttgttaaggtaatgatgcacaaggagccataaaggcatccaaggaggagtatgagaaattacctccgtacatgaagactcttgcaacatgggaggtctgtttttcctcaattaagtgggaattctcatattattttttgcatattagctattggtgatggtaaaagatcatggtacagattacttaaaatgaaaatactaaaaggagaatattctgcaatgtcaagagtttcctgttttgtcttagtgagactacctcagagaaatttaccatattgcttacctttctgctaccttattgcat

SEQ ID NO: 22021 - DNA, 19739 bp, Oryza sativa
ccccattgtgaatccgcccctgcaactacgcaagcaattaagggggtgtttgagtgagagggaatctcactaaaatataaaaagtccctcatattttggtgagagctctcacccaaacacccctgcttcccgtaccaaaagagtttatccactttttttttaaaaaaaagagtaaaattaaggatagtaaggaaaaactagctagaatacccctattaaatgagatttggttgtaagtgagtgggtagttgagggctaaattaaaataggtataaatttaaactgaagttgatggatatgataagtactactacctccgtaccaaaatggatatccaacgtttgaccgtttgtctattttaaaaaaaaatatgaaaaaaaataaaataatagtcatacataaagaaatattatttatgttttatcatctaataataaaatatgcttgtcggtgatacaggtccggggtatgcgaagtatgggggagtcacctccccatccagctacgcggccctacagcctggccttccccccacacctcgaacgacgcggaggcagccaggggacctcggggtgccacgtcacgcctctcgggccctcgcgctgcctcgtcccgaggccctcgcccaaccgccacgtggcgagaggagcgagtggggcggagactcaggccgaatcgccatcaatgcacggcgccccaaccgtccctcaccgcatttaatgcggtaagggcggacgtgcggcgctgcccgattgacccacgtcaatcgggcgtgaccagactgtgaccggcctgtcgccggtcacgtccgatcggacgggcggcagtgcccccacgctccaccctgtacccggcggagtgggggcaggtatgccccgtcccatcgaagcatcatctagagccccctccacgcgagatggaccgccacaagtctccattcatttaagagggaatgacaagggtgtcccccgtgtcaggcggggggcggcgctgggccccactcgaggacggacggctgcttagctttcgggcgaaggcacgaattgtggtccggtctaagcggagtgggtccccttcccgtgaaggagtaggtagaggtggtgcatgtggtatccccttgaactataaaagaagaaccttgcccaccgaggaaaaggacggctctcagttagcctaaacctcaggggaagaagagcgagagtgctccctagtgtttaggaacctttgtgacactcaaccataaatcccatgcacaggagtagggtattacgctacatagcggcccgaacctgtataatcttggcacctgtgcacgatctcgaagaactcgaggcggatacacgatctcgatcaatgtaccctttcccccggccgaactcacaaaaggggatctctcgatcacctgctagagaggaccactcctcgacaatgctaatcatattttttttaaataagataaacggttaaacattagatatgaacaatacaaaactgtatttattttgggatgggaggagtagtgtatcaaaatccttcataattagtaaggacaaaattttcttatattctgagacaaataaaataaagagtaaatttcacaaaactacacgttttgtgatccaagttgcagaaaaccacacaaacttttgacactggcgcttaagtacatattttttggtagtgtagtttcagaaaaccatggtatcaatgaatggattcaactgtgagatgacgtggttgtttcacctagaataagaacgtggcatcctattaatttcgtgcgatggctgataataatgtcacatccttatcctaagtggaacaaccacgtcatatcacgggtgaatccattcattgataatgtggttttgtgaaactacattacgaaaatatatgttcttaagcgcccagtgttaaagtgtgtgtggttttctacaacttggatgacagaacgtgtacgtgcatcctgcatccttgagcgcagctggaccggccttcccttgtagtagcagtagtagtacactggagtagtactcttgactggtcccgttggggaactatcgctagattcgtggtaaaaaagaagctcaaccccacatccccttgggtctaggtcacgcgattcctcttctcctctctcccccatccgctccgccgccattttagggatccctcggcgcgtggcctccggtgcggtgatgccgccgcatgaggacgccctcgatgccggcgccgttgacgtgctcaccttcaggctccaccccctcgctgtcttgaaattatcccaccgcatccgcgagttcgtccatctccacgatgaccaataccagcaagcgaggatgtctgggtgcgttattggggttcggcgtggtgggacggtggatatctccgataccttcgacatcttgcacgaccccgaccccggaaccttcgaccgcgccttactggagaaggatcaggagatctgtaacgtaccccaagtcctctccccgtcatttttaggtaaggtttgattatccatctatccatcgatggattttaatttgtttcttgcggttgtttttgtgcagacaagaaggccttccctgacttgtccgttctcgggtggtactccattgggaccaatgtgcacgccaccgacacgggaatccaccatggggactacaccgacatgcaaatccaccagaccgtcagtatttataaccatttaaatcaactctatttgttcgagtgcttttagtgcttggcatggtactagttgggatgttcagtgtggacaacaattaatgattggaatgtctgctggaaatccctgttgcgagaacaccctttgttagacacgtgcttatatctacacccgtagagaaagcagctattctgttgtctagcatgaccatgcatagctttagcacagctttgtatgcatgaaggtgaagatgagttttcatgcattttttttctaccttatgaatatgtagtctgatatagaaagtcattgtgtaaaagttcttgatatgattgttttgattgctgaacacaattcatattggaagtcctttaaggcatgcatcacccaaagctaactggctacatgctgaaagtttcttttcatcctgctggaaatcacctaatggaaagtttcaccgttgaatgtctcctagtagaaagttttaccgttggaagtctcctaatagaatgtttcactgttgaaagtctcctaacagaaaatttccttctccatataaagtacatttttaactttgttggaaatctgcttctactcttttcagaaccctaagcaaaagcaaaataaattattttccatgcaagccaagcagtgaatctgtgtattaaaaaaatcccagtggctactggtttgaatgcaaaccaaaaaaggtgtatcatggacttagcttgcaacaagaggaaaatgataagagttcctcgctcatgcaaacactcacatccacgtgccatatttttattcatgtaattattttcgcatgtttatacttacaacataagttgataaagtagcttttagtgcttgcggaaggttggggactccctcattatagtattgatggtcgttaacctcttgccataacctaatcattgtaaacacattttgcttctaataaggttgtattcaaagtttaacatttgaggatacaatgttcactcctgagaatgaaaactgaaatttttgatgaggtaacatgacattgggatatagttttagcattattttaagttcttggagagtctgagtttaactagtatgcgaaatgattacagctgatgaaatagtcaagaatagtagttatgctgggatgtacactgttcttaaactttatgtagagctctagcttgtttttatggatggatggaatggtggaaaattgattttggctgagaatatatgattgagagaatacttgtcaaaatggatgtttgtttgatctaattttactccctgcataacctttcccttgtactattttatgcagttgatggatgctaatggaacagccttttatcttctattaaatcctgcaatcaacttttcccataaggatattcctgtgactatttatgaaagaggtaagaatcattgaatgtattgcaatctccctgcaaaaaagaatgtattgatttctcttgatccttggttacaacctgaatctgttatgttacttgaggggtttatatgtgctgcattgactgtcaaggtttgattttgcgtatgtatcaaattcgcgtgacttttgtgattctttccttgtgtgtaaactaccaagtctagcactcaatatctcattgaattgcatgttgattaactttattgtttagagcagcaaatgatagttatttagcgagctgaagattaactttcttttgcttctacaatttcaagtgttgtgcaattccgatgggagtcccccggtcagctttgtccaaggaaactatacagttgaggtttgtattctccccatgtgtttgtttagttataaatactagttaaaaacgctacaagcatgttttattgaagattgtaggagcagagaggatatctttagaccatgctgattttctctatccaagtccatgcgtagtcttcgatgttcttgcaccacctcttggagaaaagtaagtacaaattttctttccttcctatgagatatgacttcactttacaattaaatgtgggatataaaacttcacaaacaaaacaagtttaatactgtaaggctgtttggtaggttaagcagtgttttgaacaaaatctgttgctggcaactactttgtgttggctacagcctctttaagctatgtaattacagattttttttcctttttgtcacatatgccttgattctaatatatataatcgcaaaacaggctaaattattaaattactttggtcttatacctgcagaaaaaatgcatttaggacgatgttgtttgaaaccccttcgggatttgcaatgttccgtgtttcggatgttttatttagatatccggaggtatatatagcttttcattcaccctaatgtgatgcataattcattttcttctattacatttaggccctacatcttatctgattttcctttccttttgtaggacatatggtcgagttttactgatccacatactgcacaccaggtatatttaactcctaaatttcctttcatgctttttgtttgtttatgtctatttatcgctttattgttttttgcacctttattgtctatgcacatcatacgcattactgttcttttttttcatctttactgtaaaagtacatccaaagccaactaattattttagtttattatttttttgcatcttaactgtacatgtaaatcctaagcctttaaatgtgttttatacaattctatttgtatttgtacccttggttttattaagatcataagcctttaaatgtgttccgtaccattctatttgtaggtcgttcgtaccattggttttattgaggttggtgacaaatctgttgtatgggataatgatattggtcctggcgaggatatagagcactttatcctaaaatttccaattaaatcattggttgttccagatgcacagcttaaatttattattgagaaaaaccttgtaagtttacatctaccctaatgtattttaatgttgatatttatttaatttgttgtattagtgtggaattattaatgtttccctgttatatatttctttttccagaacattagctgttggtttaatgggcgtattgttcctgagttgatttggggactaaattatgccctggatgaatttgtgcctcgagagaagggcaacctatcaaatgaacgccattttccactgagcaagcaactgcatgagcagttaaaagcatatggatttagtatctcaccacaattggtatgttttctcctttgctaaaattgttattattgtctgctgaccttatccttttattgtttaatcccttaaaatattttctactgtactgtctgttgtgttaccttacccttttgtttaatcccttgctattatattgcttactattgttgtgttgccttattattttatccttctcattttagattaacagagagtttataaccagttttggtacttaaattatatggaacgtacttcaaattgcatttccggagatttacaccagaaatttgatcgtttcttttgtggacttgagatgtctgagggagagtttgtaagaggagttgcacaccgtctccattccatggaggtcagtaaatttgctaaaagcaaatagtactaataattaagtggtggctagtggctactgataaacaatttagagtaaatttcacaaaactacagatactatgaccaaactatcacaaaactacagatttaaggagttgtatcacaaaactatacatttagcaccaaatttatcacaaaactacatatttaagatgaagtgtcatgaaactacatgtttagtaactaaattataataaaactacaggtttagaaccaatttaatcacaaagtaataatgtttatagctccaccataacaatagtgctagggatttaaactctaaaagttatagttttgtgataagttcaatattaaatatgcatttttgtgatacttaacctaaaatctgtagttttgtgataaatttgatgctaaatgtgtagttttgtgatacaactccttaaatctgtagttttgtgataatttggtcaaaatacctgtagttttgtgaaatttactcaacaatttattttctttgttttatgtaggaagtggcatctacaccaggcagacgagaggcattgagcaatgctgaatttcttttggcggttcctaagaagaagtgtaacacgatatctcgtcttaagcgtatggaggcagaggataggggtacagggcttgggcatccttgggtttgcgctgctgctgttgcggtgggcttcggggttatggcaggattgtgcattgcgatgaagcgagcaaattagaactgggtaataggaccaatgagactaaattaggatccgtatgtacggtgacaaacaacttttgtgatctaaagtgaccagtaaacaaccgccagttcatcctatcacgtggcacagtaatttcttaaataaatctcaaagtatccgtgtgaagaaaaataataattctagaaaaaagattagcctattataccattgaaaagacaagaaggtcggacgcgtgggcgttacggagatcgatggtgttttgatttgttcggccagcaagggaccagtaaacaagtattcttagggtgtgttaatcatcggttcagagaaaattgacattgtgccatcctcaaaagtgggtttcgcccaaatgccatgctgggagtgggcttcgttaaaatgccactttcaacacatgattacatgctaaaatactatcttggaccaaattaccctcctctcatcttcttcctccctccatcatcagctctcgccggcggccaccatccgccttcgcgcgagctctcctccatggagaaccacaggccacaggcccctgcggggacccctcccatggctcccctccccgtgtcccctcccatcgcccccatcccagccccgccctccgcgagcccccgcacccgtcccggccgccgccgtcgtcgcctccacctctgatgaccaccgcgccgtgccttcgccatggccatgcccaccaacgactccgccgtgcgggcgcgcctccgccgcttggaagaacgggagtggctgggacgacgggttggcacgaaagatggagaccgccaacgtcggcgtcggcggcgcggatggcgtggagcgtgaccacggggtcgtcagttggggacggtcgaggcggggaggaaggggagcggaggtggaggcggatgaggtgggcgcggcagaggcgagccggcgaggcatcccttgtcagaggtggaagaaggtagtaacaggggtatttttatccgttcgggcattatagcgtgtagtcttcgattgaaagtggcattttaacgaagcccactcccagcgtggcatttgagcgaaacccacttttgaggatggcacaatgtcaattttctccttttcaaactgctaaacagtgtgttttttgcaaaaaagtttctatacgaaagttgcttaaaaaaatcatattgatccatttttttttaaaaaaaagctaatacttaattaatcacacgctaatggactgctctgttttccgtgtacagggcatgtgttcctaacctctatacatgaacacagccttaggccatcaccaatacgtactcggagcgtgtccctgctcacggccgtcgccgctccgtcgctttgccgtccccagtagagggacgcggctctacgagcgcctcggctgagggagcgagcaaggaggcgtgctgggcggggcgtggctaggggagtagcccaagacaccactccgtcctcctgtttttccctttctaccctcgacggccgccggaggaagagagaagcggagacaagagagagagagaaaagaggccgaccgtgggacaacagcgtcgcgccgccaccgtcctccctagccttctccgccggcaccgtgcccgccgccaccgcgccagccaccgccggcgccgccaccatctcctccccgatctggccgcggggggaccagatccgcacacgccggtgccggatctgccccctctagccggcgacgggcggcggcggtggcgagaaagaggcgggcggcggtgagaaataggcgagcggcagcaggagagtgaggcaagcagcggcggcgagagaaagagagagagagagagataggagaaagcggcggcggcggttggggagggcgaggagggaggtggcggcggcggcgctcgcgggagagaacgacgctcgtgggagagagacaacgcgacgaagaaaatgagaaggggagagaagccgactcggtgggtaggggtagaaaaagaatacatatgtgtgggtttggacacccattgtgggctgagtatctctatgggttacttgagattttgaaaagcccactaggtgtcccctccattgtaaggggagttctccaaatagtaccctcaggtagtgagggtactcatatagtatctctgattattgatgcccttactccctccattccaaaatatgaccattcctcttttcaacatttggcaattcgtcttatttaaaaatgttatgtaattatcatttattttattgtgacttgatttattatcaaatgttctttaaacatgatataaatattttttatatttacacaaaaatttggaataagatgaatggtcaaacgttggtcaaatagtcaacgacgtcatacattaaaatcagtacttcccatacataaaaacgaatatagtactagatgtgatatattttagtatattcagattcgtagtactagaatatgtcacatttaatactagattccattttttttgacagagggagtatggcttaacaagaaagtcattaatgtatgattaattgacttttgattatttcgaacttaaaaaatagatttatctgatatatagaaagtttttgcacataatacaccgtttagtagtttaaaaacgtgctgacgaaaaccgaagtaacatatgtatctcaacgagacaataacagggttgtgtccgatttaaatcatgatttccacacaaaagcaatttagcaaacaaattgcatcccactgtgtttccaaattttacagcttatcattttctaaaaaaaaccaattaaatacagtgaatttgaccctaaacagtaaaacaataacttcatgcatgtacaggattagggctgtcaaaaaagctcgaagctcacaagctgctcgagctcgactcgtcccaggctcgattcgaactcggctcgagctccaaacgagccgagcccgagcctgtctcccaaagctcgcgagctttgtcgagccgagctcgagcttctaacgagcctagtaatatatgattttttattgctatttaataaattggtagatcaaaatatgttatttgcatgtcttgtattggcatcatatatttattttatactttttcctcttctactaatatgattaaccataaattaattatttttttaaaaattatcctttgaagtatacattgttttaattaaaaatcgagctcggtagtcgagctcgagcttgatcgagctccgaccgagccttgtttgaaagcttgaacattttatagactcggctcgagcttgtatcgagctcgagcctaggcaggcgagctcgctcgagctcggctcgttgatagccctatacaggatatgtatgtatgatcaaatagccttcactgttgcaacatatgggcatatttttctagttagtattaatgaatggtctatgaaatcagttcatctcttgtggcacaaagggttttgttttggttgggtctcttgtctgctcatggtgtttggaagatgaagaaattattttttaaaaaaataatttttaattttaaaataaacccttctaaatttatttttaaatctaaatcttctgggtatgtcacaaaggctagcgtaccacacaccactttaactaccgtgggagtgttgtcgccactccaattacactggagcggttagacataactgtagcacaagctaaccactggtagcgagatacggagtaactttttttctccacgccatataggggtggcatggctaaaaaagctcagatttagaaataggtattgagatgatctgtttttaaaatttactaaaaacgtaaaacgataatcaagatacggtaggtcagggtgctgctcctgtttgtctgtcctttttgcggactggagagacgagggaggttgggacttgaaaacattgcatcccattcccatttccctcacaggtgttggtgtaattagtccataattaattttcttggacaattgcaggtgatgaagaaacttgtactacctccgtcctctatttatatcaatctatttatatcaaccgtccgttttatttaaaaatattttattactagtatttttattgttatcggataataaaatatgactaatttttttcataatttttttaaataagacggatggtcaaacattggatacagaaatctacaactgcgcttaaaataagacggaagtagtattacctccgtcccaaaataagtgcagccatgagtttctgcacccaactttaatcgtccgtcttatttgaaatttttttataattagcatttttgttgttataagatgataaaatatgaatagtactttacttgtgacttatgtttttatttttttttcaaataagacgaatgatcaaagttggacgcggaaaatcatggctgcacttattttgggacggaggggtactaatgaagttgattgtggtcagaagtaatgatggtgatcaaccttctggataaacagattatcaatgccagagcccaaagtacagaaagcatctgcatgcaaaatggtctttgtttaacagttaaggattagcttgatcctaattaaccaagccattccttgcagtcaaagaagatactagtggagtactcctccagtagtactacaaaacaacaactcactctctcaccaaagattcttctttttcttgattcaaaataaaaaaatccagctctgttttgtctcatctctcgtcttcttcttcctcttcttcttccctttgcattgctgtctcctgcactgcagcagcagcaaagctgccaccaccaaccacctctcctcctcctctcagctctctctctctctctctctctctctcgccgtcgcctgtgagccatgaccgccgccgccgtcaacgcctcgcgcgtcatgcgccgccgcgccgccggcgaggacctgggcgacggcgacttctgggccggtggcgccccgcgcctctacgacttctcccagcaggagcagaagccgttcttgccggcgccgccgtcgcccgcgcccgtcccggcgtcgccgccgtcccccgcggcggagtcggtggcgccgtgcctcctcacgctgcagtgcagcggcgtcgggtggggggtcaggaagcgggtcaggtacgtcgggaggcaccaccacctcgcgcgccaccacgctcccgaacgcgccgtggacgccgcgcgggacgacgacgaggcgagctccgccaaggccaagaacgagagcccgaaggaggaggcggcggcggcagaagaagacgacgacgtcgaacacaaggtggcggtgcgcaccacgtcggaggagaagaagaagaagaggaggaggaagcgcggccgtggccgtgtccgtggccatggcgtcgccaagcgtcccaagaaggaggatgaggaggggacgaagctctcggctcccaaggccgagcagctcgaggaggaggaggagggcgccgcggtggcggcgccgagcggcatgatcgaccggtggaaggcgacccggtacgccaccgcggaggcgtcgctgctcgccatcatgcgcgcccacggcgcgcgcgccgggaagcccgtcccgcgcgcggcgctgcgggaggaggcgcgcgcccacatcggcgacacgggcctcctcgaccacctcctcaggcacatcgccgacaaggtggcgcccggcggcgccgagcggttccggcggcggcacaacgccggcggcgggctggagtactggctggagcccgccgagctcgccgccgtgcggcggaaggccggcgtggccgacccgtactgggtgcctcctcccggatggaagccaggggaccccgtgtcgccggagggctacttgctggaggtgaggaagcaggtggagcagctcgccgttgagctcgccggcgtcagaaggtctcctcttttgatctctttttcccttctcttctattgctgcttctgattcttgcattgctctagctggtagtgaattctgcattgctgattcatatgctactttgcttaatttttgtggtaaaattggcttgtgttgctataaattttgcatgaaaggcacatggatcacctcacttccaatgtgagtcaagtgggcaaggaaatcaaatctgaggctgagaagtcctacaatacatgtcaggtgatcatactacacactctgatgtgcattttgttttctcgattcacactaaatggttttatatgcagtacgctcattaaactagtcatttgtgtgcacatgtctagccctggtttgtgtgttttgagttactctgaagccaaattttgatctttgtgttgtgatgggaaactgcataacaaggtttttgatttttgaaaagaaacttctacctagaaagtttttgcacaaaacataatgtttaacagtttgaaaagtgtgctaacggaaaataagaaagttgtggtttggagtggaaggttagaactcagccaagcttacaagtcttacgatggacattgtcgaggagtgatcctctctagcgggagatcgtgagatccccccttttgtgagttcggccgggggaaagggctcgcctctagagatcgcgtatccgccctgagtgttgctaatcgcgtgtgggcgagaggattatacaggttcgggccgctatggagcgtaataccctactcctgtgtgtgggattaaggttgagagttacaagggttcctaaactccggagagcgttcctgcttctcttctcctagagctcaggtctgctgagagtcgtcccctttctcggtgggtaaggtcctccttttatagctcaaggggataccacatgcaccgtctctacctactattctgtagggtggggacccaccctaccttgaccggatctcgatccgtgccttcgcccggaagctaagccgcagctcgtccttgagcgggacccagcgccgtcccccgcctgacacgggggacagccctgtcattccctcataaataggtgaagacttgtggtgaccatctttcttgtggagggagctccgaatcatgctccgataggacgggtcatacctacctccactccgccggggacagaggcgacgtgggggcacagccgcccgtccagtcagacgtgaccggcgacaggccggtcacagaccggtcattcctgactgacgtgcgtcagttgggcggcaccgcacgtctgcccctaccgcatttaatgcggcgaggggcagttggggcgctgcgcgcattgatagcgatacagcctgggtcccctcccgctcgctccccccgccacgtggcagttgggcaggggcgtcggggcaaagcggcgcgagggcccgaggggcatgacgtggcacctcgaggccccctggccgcttctgcgattcgcgaggtgcgggggtagggccaggctgtagggccacgcggcaggatgggaaggtaaattcccctcactccgcatacccctaggcccatatctccgacagacatactctctccgccccataaaactaatatagtattggatgtaacacatcctagtactacgaatctagatatatctatgtccagatttattgtactagaatgtggcacatttagtcctaacgggatggatggagtatctagttaaatagttttaaagaaacatgtaagatatttgttggaagtgtcacaaagtaagtagcaaaagagtaattactctgtgagtagtatgtgggtgcatttcaatacaacaacttatagtcacttggagctagcaaaccccttacacctccatatagttccgcaaaaataaatgaactaatgtaccacatcgctagacgtcgccaactagtcgtgtagaacccgcctccacggatatttgaaagatttttttttggtaaattattttctttagaaaaaaccaacaatgtgtcagaataaactattttgccacgctaaccgtattgacgtggtaagataaaattatcgtactagctactactagcatgacaatgtaatgtggggtggcatggctaaaacgtttcagatttaagaacaagtattgagatggtttattttcagatggttcatctattttgcctccctaaatttcttttatcactagattgtgtcgtcgtgacgtgtcggctagcctaccgtactgaggcagggacataggcacggcccaatggtcaggcggggctggcacgggctggacaccagttaggtcgaaaccctgtgccatgggccaggctatcggtgtttaagttcacgctgaagtttagaagtttggttgaaattggtacgatgtgtttgaaaagttgtgtatgaaaggtttgatgtgatggaaatttaaaattttggaaaaaaaaactttggaactaaacagggcccaagtcatttggtcatcatagaaagtattgagatgatttattttttaaatttagaaaataataaaaatttaagatgcagtaggtcaaggtgctgctcctgtttgtctgtcgtttgtgcagactggagaccagagggaggttgggagacagatttgcttttcatgaaatcttcctcgtcaagtaaacattgcatatcccattctcacacaggtgttggcgtactccaattagaccatcattaatattcttggactattgcaggtgctgaaggaaacttgtaaaatgatgtggtcagaagactgctttattggcattacctgtgtcacagagcccctgatggtgatcaacctctggataaacatatcatcaatccctgatggtgatcaaccactggagtagtagaaagcatctgcatgcaaatggtctttgtttaacagttcaaggattagcttgagatcatagtattaaccaagctattaattccttgcagtcaaagaagatagtggagtactcctcctacaaaacaacaactctctcacacacacaaaagattcttcttttcctgattcttcaaaatcaaaatccttcttttttgcagctctcttttgtctcatctctgctcctcttcttcttcttcttccctttgcattgctgtctcctgcactgcagcagcaaagctgccatcaccaacccacctctcctcctcctctcagctctctctgtttctctctctcgccgccgtcgcctgtgagccatgaccgccgccgccgtcaacgcctcgcgcgtcatgcgccgccgcgccgcaggcgaggacctgggcgacggcggcgatggcgacggcgacttctgggccggtggcgccccccgcctctacgacttctcccagcaggagcagaagccgttcttgcccgcgcccgcgcccgcgccgccgtcgcccgcgcccgtcccggcgtcgccgccgtcccccgcggcggagtcggtggcgccgtgcctcctcacgctgcagtgcagcggcgtcgggtggggtgtcaggaagcgggtccggtacgtcgggaggcaccaccacctcgcgcgccaccacgctcccgagcgcgccgtggacgccgcgcgggacgacgacgaggcgagctccgccaaggccaagaacgagagcccgaaggaggaggcagcggcggcagaagaagacgacgacaacgtcgaacacaaggtggcggtgcccaccacgtcggaggagaagaagaggaggaggaggaggaagcgtggccgtggccgtgtcggtggccatggcgtcgccaagcgtcccaagaaggaggaggaggaggaggagacgaagctctcggctcccaaggccgagcagctcgaggaggaggagggcgccccggtggcggcgccgagcggcatgatcgaccggtggaaggcgacccggtacgccaccgcggaggcgtcgctgctcgccatcatgcgcgcccgcggcgcgcgcgccgggaagcccgtcccgcgcggggcgctgcgggaggaggcgcgcgcccacattggcgacacgggcctcctcgaccacctcctcaggcacatcgccgacaaggtggcgcccggcggcgccgagcggttccggcggcggcacaacgccggcggcgggctggagtactggctcgagcccgccgagctcgccgccgtgcggcggaacgccggcgtggccgacccgtactgggtgcctcctcccggatggaagccaggggaccccgtctcgccggagggctacttgctggaggtgaggaagcaggtggagaagctcgccgtggagctcgccggcgtcagaaggtctcctcttttgatctctttttcccttctcttctattgctgcttctgattcttgcattgctgattcattcatatgctactttgtttaatttttgtggtaaaattgactcgtgttgctatgaatttcgcatgaaaggcacatggatcacctctcttccaatgtgagtcaagtgggcaaggaaatcaaatctgaggctgagaaatcctacaatacatgccaggtgatcatactacacactttgatgtgcattttgttttctcgattcacactaaatggttttatatgcagtacgctcattaaactagtcatttgtgtgcacatgtctagccctggtttgtgtgttttgagttactctgaagccaaattttgatctttgtgttgtgatgggaaactgcataacaaggttttgctatgcaatggcccatttgtgggtctgtcacctatgtcaatgcacacttgcagttcagcaatcttttagagtttacttgtcacattgttacatctttcagtttaggtagagaatctagttctatttcaagttataatcttctgatacactggagaaaaggaaattactttcactgtttatcttcagtttaaatttgcactctggaagaacactagcacagtgatagtattgctcttcatgcatttgtctttccatgactagtttgcatcttcttttgtttttttttactaactgcatcttcttttgttacacgagtattttagtagggtggtaataaatgaatgtgatgatcttatttgcaggagaagtatgcctgtatggagaaagccaatggcaatctggaaaagcagcttctgtccttggaggtacaccgaaactaatcacaactatttatcagctttcagtttcagtagctctttgctctatttcaacatactaaactacagctgtcatgcttatcaagttgaatctgatttggtccaagttttttctaatcatattcaatctctacattaacttgatcatgttgaaacaatgttgtggtttattttcaggagaagtatgagaatgcaacacacgcaaatggcgagctgaaggaggagttgttgtttctcaaggtatttgaaacaatcttctcaacctgtactaaccatgtttacttacatctcaaatcatcaacataatcgatgatatattgataatgtgatcacttatgcatgtaaagcatatggcttgaatatatgcaaacagtattaatgggatttgtcttgcaaaacactttcatgaattatatagtttcattgttttgattcatgtcctgatacaaaattattgtcaaagtcctgtaatgtaatatgaagcattgatttgggaccttcaaaagcaaaatacaacctatattttgggacatagaaagcattttgtatctgcatttacaatgaagctttcatacaagattatgtgtctgttttgcaaagcattcatacaaagtcatagtcacagtcatgtgttgtaatatgaagcatttatttgagacattcagaactaaaatacaacctacatttttttgcaaggaaatacaacctacattttgggactgaatgtatttatgtatctgcatttacaatgaagctttgatagatactgagtctgttttgcaggagaagtttgtgagtgtggtcgagaacaacaccagactggagcaccagctgactgctttatccacttctttcctgtctctaaaggtacaataattactactattttatctctgtaaattcaccaggccatgaatggttcagtagtttccatggtttaccctggacaatttttcttgattacctattagcagtggtattaaaccagtgatgattaactcatgaaaatatcatcatttacataggaggaactgctctggctggaaaaagaagaagctgatctgtatgtcaaggaaccatgggaagacgacgatgaaaagcaagaacacgatgccgggaaagaggcgaaggacgacgatgtcgccggcgtcagtgcagccaacgaccagccggacgtcgacggcgatggcaccaccaccaccaccaccaccagcagcaatggtggcagcgggaagagaacatcgaggaagtgcagcgtgcgcatctccaagccgcagggcgcgttccagtggccgacgccgagcctgccgttctcgccggagctcgccgcgccgccgtcgccgccgctgaccccgacggcgcccgtcgtcgccggcgccgccaacttcgccaccatggacgagctctacgagtacatgatggccggcggcctccccacgccaccgtccaccaccagcaacgccgggaagctcccctcgctgcccgccgccacggcctgcgccacgacgccgccggtgaagacggcggacgccgccggcgacgtgggcaccgagctggcactggccactcccgcctactgacacccccatcgctggcgatctctctctcatcgatcggcagctcaagttttggctcaccattataccaaccagtcactgatcttagcaagaagatgaagatagcaagaagaagaagaagaagaagaagaaga

SEQ ID NO: 22022 - DNA, 4350 bp, Oryza sativa
acctaaccacatttattgcggtttggctgagcgtgtcacgccgcatgtaacgcagtgcagtgcactcgtttatccggtctgtgaccagtcacagaccggtcagatcgcgggttaggtggcgacaggcgatctgacgcacgcctcgccccatcccgtcaggacgagggcttctaggcgctcgtccccagctggagctagcgtgttatctcccagagatggcacgttagtcctagtcagatatatgccaggcttcatcctaaccattacaggcaagatgttgtgtgaagaagggcgaacatgtagattgctaagctgacatgtggtggacaagaatgaccgacgtgactggtctgacaccggtcatgtcgtcagcagacagccacgattccacgtcgcatctgctcccggcgaaagtggaggtagttgtgggccgtctcatcagaaggtgactcggacggcaactatacaaatctccgtccatttatgaaaaggtggggtaagtccccacaaaaaagagagaaagggtgcatgtgttatccccttaagatataaaaggaggaccttgcccactgagaggggggactggacttttccagatggggaacccagaacaagggagaggctggctcatactttgtagctccttcatacacagatctcccaaaacacaggagtagggtattacgcttctcagcggcccgaacctgtatacatcgcccgtgtcttgtgtgtttcctgtctcgcgagccttccacatacagagagcttagaatctcaccctgagtccccggccgaaccggcaaagggaggcttgcgcggtctcccggtgaggagccccatgctccgtcatctggcgcgccaggtaggggactctgcgagggattttctgagctctcgcactctttcgtgtgcgccaagcttttccagttcagcccaatggccgagccagcaaaggcgcacgacctctccccgagtatgagcggtgacgacggggagccaaacccacgccgtcgagctcgtactccaccgccccctccacgccaaagtcctaggcgggagaaggcgctcgagagggccgaaggatccgcgacttcgacacccacaggaggtggagaagggcggcgagatggggagcgtcgcctcctcgtctacggcgacggcagcacgccccagggcgcgctccaagctgcgggcgcgctcctacgtcacccgcccatcgcccatgacccggagtctccagcccaacgttggctggacgatgtggccaaattggtcatgactgcacggcagcgcctagatgctggtgggcggtcctccgccaccaaggcctctggtgctgctaccaccggctccgcgtcgtcaagacggagggcgcggcgagcggcagccgctgttcgccattcggccgccactccttcgtcaacgcctccgacccgggaagatctgcgtggggaaccggatgcccgcatcagtatcgagcgccggcgtaatggccgacgtgctccccacgcaacggagggcgcctcctcgtccggagtgtcacctcaccacggacgcggggatcagccctccgtgcccccggttggtggtgtcggctgtagagcctttgtggcgagccttcggaatgtccgttggcccccaaggttccggcccaccatcgccgaaaaatatgacgggagcgtcaaccccgccgagtttctccaggtctacacgaccgggatcgaggccgccgggggtgacgacagggtcatggcgaatttctttcccatggccctgaagggacaggcacggggttggctaatgaacttgccacccgcgtccgtccactcttgggaggatttgtgccaacagttcaccatgaactttcaaggcacattggcgcgcccaggtgaagaagcggacctgcacgcagtacagcgaagggatgatgagtcacttcgctcgtacattcagcggttctgtcaagtccgcaacaacataccatgcatccctgcacacgcggtgatctacgcgttcagggggggtgtgcggcacaaccgcatgctcgaaaagatcgcctccaaagagccccagactaccgcggagctttttcagctcgcggaccgagtggctcgcaaggaggaggcctggacttggaacccctccggttccggtgtggcagcttcggccgcccccgggtccgccgctcagtcagggcggcgggacaggaggaggaagaagaggtcggcccattccgacgacgagggtcatgtcctcgccgtcgaaggcgtttcgctggccacccgaaaggggaggcctgcgagcgacaaaaagaaggaagccgacgctccctgacctcggctacttggaagagcgaaggtggcgcgcggcccttcgagccgcgcgctaccagcagagcctgcggcgctaccatcagcgccacgtccgggcccgatcactctgcgtcgacgacctcgtcctacgccgtgtccaaacgcgtgctggactgagcaaactctcaccaatgtgggagggtccgtatcgagtgatcggcgtcccctggccgggctccgttcggctggccacgggcgacggcacagagctgcctaacccgtggaacatcgaacaccttcgtcgcttctacccctagtgggggtcgggtgtcaggtcttgggctcgggccaaccccgcacccccccgggcgtgcagggttggccgggggcttatcttttttctcttccgtatttcaataaaagcattttcgatttcctaaaggctgtatctgtgccgttgtttccttttgaaggatcttgacttgaaataggtcactcgtgttcaatcctgccctcgggggctcgggtcggctaaaatcgccaaacggggcccagaaccgagccgtgccccggggcgtggtgaactccggggggggggggaatcggcaaaaacccacaatcgggtcacccataaccctcggtcaccacgctcccggcctggccagtctcgacatgtggatctccccaggcactagccttgacccgcgccgtttgaagctgggacctgggcacgagcccttgttcaagccaagacacagaaggatcgtggcacagaccatcctcgtctcatacacagaacaaatgaaattgacacaaaaatttcctctttatttgattgcagattaaatcagcctataacaagaagggggcccgaaggcctcggaagaagaaggaaaagctattaagattggcggaggcctgggggctcactctgacgcgcccgggtagccggcctcgccgtcgctgtcgtccgcaccgtcgtcaccgcactcctcgtcggagttgaaggcaaacgtgagccgaggggccgctcataattgtcggtcggttttcccttgctgatgcgcgcgatttgcgaccgccgggattctgcccgaagagagagagagcagggaggagaggcccccgagccgaacggcggcccaaggcccccgacggccggagctggccctccgcccgcttgtccgacggtgccaggcgcccccgacccccaggatggccccgaggccactgcgggaaggccgcgcctgtcgccctctgaccccgaggtcgtcggcacaaaagccgagtgcgccccgcgtggcctctcggatggagagcgccctggagatgtggcccctaacgaagaagatcggccccgccgaaaggtgcagcggcccgtctacttcgttagcgaggccctccgggacgctgagacccgataccttcaggcccagaagatgctttacgctatcctgataacttcgaggaagttgcgccattatttccaggcgcatcgggtcacggtggttacgtcttatcccctcggccaaatcttgtataaccgagagggtactggacgggtggtgaaatgggcaatcgaactctctgaattcgatttgcgctttgaaccaagccacgcgatcaagagccaggccctcgccgactttgtggtggagtggaccccagctcccgagctcgtctccgcccccgagaccagctcgagcccatcgcagctgcctcacaccgccctctgggtgatgtagttcgacgtcacctgtaggaaccggccccacctgtcaccaggccttagaagtggcgtcacgcccgaccgcttccctcggggagggcgatcgccctggcataacgccgggggctactgtcggtgacatgggaccgggagtatcatgactagaggcttgaggcagacacaatcgtccacgtggcctggcaccctcggggggcgtcgggcccgagggtgatgtgttcgccctcctcgccccgagggccgaggcgccccgaccccttgtgggtttttgctccgcgtgtatgggttagg

SEQ ID NO: 22023 - DNA, 5580 bp, Oryza sativa
acatatgtgaaagaatttgttccacgacctccattttaccgaaataacatgtaacggagagatttttgaaagttacatacaagttacactatagttacagtgtaattacatgcaagttacagtgtaattacactacgattgtactgtaattacatctgtcaaattttgggggaaaaatttatcgacaaatatatagcaaaatcgattgttatatggtttagttaagatgaaatttactgtgagagttcgcttggatatatatatttttagaaaatcatgagctgcagttaggagtctgatcgtctcaagaaagcatgctagttttttaaaacaaatttattatatgatttcttctgtattaccaaatgtgaacgctcttaaaaaacaactcaaatacggatatgtatttctaaaaacaaatgaacttaaaaaccgactcatacatggatgacgtaccaaaataccgacaaaaacatttttaatttttataatagtagaaatatatcctataaaataatactccctcattcctaaattaatcatcatgtaatagaatctaaaatttctcatcattatataactgcatagacataaatttcatcggaatacaattaatgcagtacaggagaatgcgtgcatgctagaaaatttctcatcatcatataactgcatgaacatgaatttcatcggaatacgaatgcgtgaatgctagagtgtaattggtatgaggttttaatcgatgcatgcattgtgagagaatatgtacatgatatcttaattgatgtgatttaaatttttcttggtcttgatacatgatcaatttggaaatgagggagtagttgccttcttagaaaagttatacggtttatcagtcgtatcccaaccatatactttacaattctgaaaaattaaaagaagagagagaatgtctaaatttactcccttacattttaaccccaatagatcgattcttacttttcaatacaaaaagggcatccaacataactgaaatattggagtctacgcatacatgtactgaagtactgaacgaactactgaccaaagattaagaaaagggcatcactgagactgaaagacagcatcaggcatgcaagaactgaaagctcaactctgcatgattgattcgcatttgcatctatggctatctgctgtctactacatggttagacgtcgacggattcacagctgggctggccgtccatgtcggaatatcactctttcagatcaggacaagccggcggtcattcgtcatcggagatcggcgggccgccgtaccggatctggcgcatcctcagcatccgcggaatggtctccgttagccatgagaggcgatggccttcttcgtcgactccggtgagctgatcggccgcgccatttttcactgtcgacacaaaagcaaattcagcttcggtaagtctcgagtgcagtaacatatgcaggtaatagatgtgaaaatgatgagggtaagtggatttaggaaattttggtgcaattatggaccaatggtcaacaggtcaaggaacctatcatgcaggtaagctcaaaaccgtgtgctcgcaacaccaatcaagaggacatgttgcaagtggagtacggcaatatcatatattcatatacacaaaaagctatctgttggttgttaatttaacaaacaaaacctctttccttattcagtgggcgtctcctatgccaaactactgatttgataggctaacaattaggcatacattgcacacttgcaagtaatcaatgcctaaaccgtacatttagcctcttagatcatgttaaagcagcaacaagtcaaaataactattactcaaatttccaaactataaaaatagtatgtaccaatgttctgcaaaataaatactgcagaatttgctacttacccgaatgacgtgagtagggaatagcgcggtaatatgtgcagtctcggccatcttccgtggaataaggggggccaagaatgtcgagaattgcacacggcgcaatagctcgaaaccggtgcatgttccctcctgttgtaggatacaggactgatgtatcacatggtgctgtaaaaacgccattcaccactctctttgccaacctcactgcaacaatgaactctaccaatatcagtatggcggaggatgcatgatggtgaagacagacgaccgttaaaaagtgtcgaattgttcaaaagcttacattgatcacccgacgatgaactacaacttaaggcaggctcaggatcaacccaatcatacgaccttatgtgcagcgatccgataagtagtttactgaacaccgtcattccagggtgatcatgcagtgggatgatcgcatttcgtggtaagaagaagataatcatctggcacggtaagaagaatgttagaaaatttgttttagacatgagccattttgataccagaaaaacatatcgtggtaaatcttgaattcagttagtttcgtgcactgcctgctacttaccgtaaagttgtcgcattcatataatgtagtgtttttaatgagcgggattccttcgtcatcatctctagccgtgaagaattcttggtctgccctaaggccaacatcttcgggtttcattttatctgcaaatagcatcacaagcgattcaaattcagttaattcagctcatcaaacagacacaaactacccacatatactgtataggcatgggccataatatttattttgttaggacaaaaggctatccgttgctaccaggtgataattaacatgtgctaaaggaagaaagttcagaacatttcatctgaacaatttctgcaggcaaatccatacccaaccaaaaaaaaaaactgtacacatcatcaactacaattcaacaaaacatgtcgaaaccagtaatcttactactagattgttgcatgcacgaacaaataaaaaaaatccagctaaatctgcatgataaactggaacatgaactgcatgaaagaaagagagaggggactcaccgagcatggagcagagcaggtcgacctcgccgggggccgggacggtgccggtgcccctgaagacggcgcggcaagcccggaacagccgctgcagcggcgacgcctccgcctgcacccgcctgctccccccggccccagccgacggcgccaccgccacccgcctcctcttcaccggcggcgccgcctccaccccgccactcctctcctcctccaccacgccgccgccatcgcggccacctccccccctcgatcccctccccaccttcatcaaagatccaaccaagaacaacagcaacaagaagcaagaagcagcaagaatcaagaatcaagaagcaatgcgtggaggaggagaggtgcaagaagcagcgagggagggagagatatactggcgctagaaacagggaggggagaaactaggggcagcatcaaatccatggacagcgacgtgaataccgccgctgggttgggttgggttggggatgcaaaccctccgcgacgggagagagaaaccggattttatttatttcttcttttttttttttggcgcgagagagagagagaaacgtggcggtggttttggcgcgcccgccatttgtggaaggcggaaagcaaaaccgccgtcttcctacccaaatccggtattccacggaacacagattttcttctctattctccgtatcaaatctggggagcatttcatcctgcttagtactactgtagtactctcttcgtcccattatataattgattttaggcgaatatatgttcagatttatcgtaataagatgtgtcatatctatccaaaattttttatattatgagacggagggagtatcaaattaagttgaaactgaaggttgagtaggcgcactaaaatgagagatttattagtgtatgagtaattaagttttaattattacaaacttgacgaatatatatatttgatttttgaaagtaatttctgtatagaaagttttcgcatggaacgtaataaacaataaacagtactccacccttcctaaatataaggattttactccttccgtcccattttaaatgggaccatgagtttccttgtccaactttgatcctcctcttatttaaaatttttttaataattagtatttttattgttatgagatgataaaatataaatagtactttacttgtgacttatgttttaagtttttttaaaaagattttaaataagacggacagacggttaaaaaagttggacgctgaaaaccaacgctgcatttaaactgtgatggagggagtagtatagtaatgagaaaagaatggggctgcccaatttgctaatccaaatccaaatatctaatcaagctatagtaataagctggacacggatgactcttcagcaatggaagagtcgccatcgccgacgaccagtggggtgagactagtgagagatactgacagaccaggtggatctcatctggagttgcagttcaattgcattgcttaattttcttgcaaaagttagtaaagtgaatcttgcagctgatgaaattgcaaattgcaacgcatctcatgataatgtcccgtttctgtttttttttccctaaattagatcagttggttatgtgccttttttgcttggaagagtaaatgtgatctcagtaaagttcttgcatgtggcatataaggaattcttttaccagttctttggttcatgggctttctttagctttgttgccactttcataaacagaagatgaaagtggacactgaattatctcatatatgggcactgtctgacggcaccatcgtttcatttatgtttatccttatacttatccctacgacttactagaaaaaaaacataacttatggataaaactttatatactgtaaaataaactacaatagaaaaaccacaaaatcaaatttaaaacttatttttcaaatttagatttttgacttatgagtataagtataagcgaaacaatggacagtgaattatcaacgtgtttgttctaacaaatgcaaaaccaactccaaaacctgtcactgatataagcttttgtgataaatttggaggtaattccaatgataagtttaattgttgtagtaggagtaccatttactaccacctcactcctaaaatacttatcgctttgagtttttgtttataatatttgatcgttcgtcttatccgaaaaattatgaaattattatttattttgtttgtgatttgctttattatcaaaagtaatttaagtatgactttatatttacattaattttttaaataagaagaatgataaaggttgcaaagaaaaaaaaaatcaaaactacaactaatttgagacggaagagtaacagacaattaaagtaccaattaattactgtacgagtttggttagcaggaggacacagacaggacagtgaggacaaagtggcagtagtactgctcgtgagtgaaccaccacagatcgacaggtggcactgccacgtgtccctgctcctcaaaggtgggcccacaaaaccacctaggaacgtacgaatggatggatcatcaatcaatggataaacggatgaatgaatgcagtcccactag

SEQ ID NO: 22024 - DNA, 1073 bp, Oryza sativa
ttactgggaggtaaattttaactcacggtgcatggacaaatcccggatatccatttctcgatccaacggtagtttccaagtttccactacatatatagtttgcactacatattttcccacgttgtaaatgctcaatgggagcttcattgtaaatgctctaactatactcattatctacatattccgtatgtttgataatgcatgtctaggaattttagttaccagattaggacgaccttaactcaacatttttctgtttaaaacggaaatctcagagaggtaattaattaagtgtaaaatatcaatcgagcattaaaatccattcgattagtttgctttgtttaattttacagcacattcaactacagttcatatatggtcgggccctagctccgccactgcctgcaagtgttgtcctccgttccatatatgtgggtccatccaagctacaattacagtacattctaaatgctcaatggaagctctagagtctggttagggaagcttaagattataagaagcggctggttagtaaccagcttgacggagcgtggggctcctcaccgggagaccgcgcaggcccccctttgccggttcggccggggactcagggtgagattctaagctctctgtatgtggaaggctcgcgagacaggaaacacacaagacacgggtgatgtatacaggttcgggccgctgagaagcgtaataccctactcctgtgttttgggagatctgtgtatgaaggagctacaaagtatgagccagcctctcccttgttctgggttccccatctggaaaagtccagtcccccctctcagtgggcaaggtcctccttttatatcttaaggggataccacatgcaccctttctctcttttttgtggggacttaccccaccttttcataaatggacggagatttgtatagttgccgtccgagtcaccttctgatgagacggcccacaactacctccactttcgccgggagcagatgcgacgtggaatcgtggctgtctgctgacgacatgaccggtgtcaggccagtcacgtcggtcattcttgtccaccacat

SEQ ID NO: 22025 - DNA, 1409 bp, Oryza sativa
agcagcagttatagacttgtttgtacacttacttgtagacaggaaggatgctgctcagaagggaaagaagagcgaacgacttctctacacccttggcaggtttggagagcaacaagtatgaaactggtccaacaagtactggcacggtgtcaacgccgagctgcatgaagaacaattacatgagacatacaaacgaccagattacatcttaatttttaagaaaacactatgattttcaatccagaaggaatactacttaattcagaatttgatgcttaaaaatagaaatgttactattcacaaactggaacaagatagtaaattcaaccaaagcatgtttcaggtaaactcaccaattaagcataggtaaaatcagacaatttcgccacaaacaacatggacatcttttgagaaagatggaaacaacatatagtgctaaaaaaacattatttcataaatgtaaagtgaattttagtctttgcaaatctgaaattgctagtttcaaaatactaaacaaggggccaaaaatttgcttggacacgagtattaacactgaacttaaacaaactgtcacttggagggcatgtgatttacaggccatcaatctgaaggagtgacaatcttcaaaaaaaatcatggtaagcatgccatttaatgtacatcagaatttcttttctaggacaaaattattaagcaaatgcactataatagcagaaagcaacacgctaaactaataagtaactttacgaactaagacattaatgacaataagaatgtgttagcaacgcctatgtagtcaggcagagaaaacaatcatgaaccagacagagacgtaagatgtaatcctagtatcttaccgccttagcctccttgtattcattcacagccttgtgggaagagtaggagaacttggtgttgggaccaagttcagggacgataaagtggctgtaaaggcacaacagcagcagttagcaaaatgttgaatgtgaaatctaaataaaatgttactgtcagacagcttaaatggaagcaaaggacttactagttggtgtcaaaccacttggtcatctccatggcagggacagtggcattgcccctagccatcgagaagtaggtgctgaacccaatctctccaccagtccatgagtagcgctctgggacagcaccaagcatggcagccgtgtcaagaacctgatcatagtacgagaaggtgttgctggggatgtacttgatcccagcgtcagccatttgcttccagatgctggccctgaggtcggtcgcaaccttctccaaatcctcagcgctgctcttcccatcccagaaagactccagggcaaacttgagctccctcttggggcccatgcgggggacccaacaatgtgagacgccatctttctataaaaaaaata

SEQ ID NO: 22026 - DNA, 5471 bp, Oryza sativa
tatcatattgttagccacaatatcagctgtatccaaattctgttgttacattggaagatcggagatgatgagattgcacaactgatgcaaggagcaattatatagaaaagaatattaaagagagaacacttgaatcattcctaaagatattttgaatttgagacagcagcccccacgaaagtttttttttccccagtagggcaggtgcattcctgttatttcatttccacattttgtaatataagtgcataggtgctagacaacttttgtgaaagcaaaattgatttctactccacttttaacattttgaagcaatatatatatatatatgaaaacaaaccataagaattataaaacatagtagcatcactatccaccaaaaaagttaaataacttacttcgacaatagcaatgtcaacattttcttgtgagaataggagatatgagagagctgtgaaaacctgcagaaccatagcagtactttctaagctcatggtcatcagaagtgaaatatgagaaattaatgcctgtcaatatttctaacatgactaaatatgctcagtgagtgcattttggttaatcttgaattgagtgagaacatagcaactgtacaaactcaatacattatcaaccaaagaaaagtgcaaatgttaacaaacaaaagtaacactgatgcagtagggcagtatgaggactcagaacacagctttgctaaatgatcacagagtaaaatgcaattaacaacaaagtgtggtgcccattttttccttattgctacaggcaccatcatgctttcctatactagcagttggacatggacttaaaccagcaagttcatgtaatcatgttatattggcaaatatattttggtatgaaatagttttgccattgtatacatgaaaattagactacttactcagaagagatgaaagaaaaggacagcagcaacaccatagattcatgaaatgatctgaactaataaaagaaaaaccatagattcaagaaagcagttacaaaatagactttgtttatttcatcttgcatgcattattgctgtttttttttcaatcgaagaatccaccagcatataataattctctgaggaaaaaagagagaatacctcaaagtgagtcagggctccatcttctgattctattgattgaccaatggcttctttagcatgaccaaaaagatccctcaacaattcagctgaacaggacctccactttgtccaacagagatgcgttcacgaattgttagaagatgtgggctgcaaccatagtttaatgcattataattatcacttaattgtaattctactccgaggaaatcaacaaggctcacttaagtataactctacaatctagatacggtgagtaaatgtttgaaacaactcaagatgaaaggaaacaacacagaaatatatcatagatccttcacatcctcattgtatatcgaacagtcaattaacaagatacattttccaactagaaaaaaaataagtgattaaataatcacagtgatgtcgtggagtacctagtatagcatccaacattgtagccttgttccctcatgatattggacaggaatgcagcagttgaacctttccccttggtgccagcaatatgaacagcctataaccacatcagttcagtttcacccaaatatccatcgcattgcttccatgcaaagtgaaatcatgattcatatgcaaggtggatgcctaatgcttgaaacaagcaaatgccccagcaaaatcacgcattatcccattcttatatttttactagtttcttgcaagtttcaaggcaaagctgtgaggctgtggtagtaaggagagggtggtggggggtctcaccgggaagtgggtgtgggggtcgccgaggcggcggaggaggcggcgcatgcggccgaggtcgaagccgtcgtcggagtcggtcccggcgccgcgcggcaccccggagcgctcgtagttgcgcagccgctccatgtactcatagaactccccgagctggccatcctccccgccgccgccgccgccgccgcgggctccggccatcgcagtgacgaggccgcggcgggcgctgcctcgcagcaggctgcgagaccggaggagcgagacggggaagcgggggagcatgcggtgaggccgtactgccgtcgcgccggcggcggcggcggagttcgccggagggaggagtggaggcgccgccgtgtcgtcggagaggttgtcgccttgtcggggatgagccgctcgccgtctttttgttggcccactactttttagtgggccgtagcttgtggacggcccactacgttttctccatttctcaatctcattcttgggccgcaggcgagttacaacactttaccggctcaacacagatgggccgcaggtagaccgaaagcctcgagaataagatcatctgtcatcccttaactttacaataagattgtttaactcgtttatacattactagtatataatactccctccgtttcacaatgtaagtcattctagcatttctcatatttatattgatgttaatgaatatatatgtttagattcattaatatcaatatgaatatggaaaatgttagaattatttatattatgaaacggaggaattacgtaataataaccatttatggtggtgtagccaattatttttcacccaacatttcgtcagggatgtcaggaagtgattgtttgctgtcagccattcagcttgatgaccctaaatcactggaccctcgtcatggtagtacttgttttgcttgtagcaatgcctagctttcatttgcatatcgacacagtgatctcttgttgctgcaagcctgaaatgtctggatgctgcatctgaagctacctgaagcaaagcaacactgcaagatttatcccatggaaggtaaagctccacttgtttcttccagactggaagctgaagctcatcagttgatcagaatagcacgacgtgctagctggtcaactcctggactacagcttcactgcttcagcaacagctcaagtttttatatattatgctctctttttttctctcctgcctgcagaagataaatttttaagacttgagctcacaaagcatattccaggatctctttttcaagagttgttacttttcttgcagggattcttggatcatgacatgtttcttggcagcctgtgtggtcttgacaaagattcacttctcagaaagcgatgtgtaagtagaaatctgttctgctatggaaattatggaccagtttttgagttttgacccctgcacagagatgatttggctcaactaccccatccttggtgaatcacagccacaaatttcttctatttcaaattctgaattctgtgacctgcactcctggttttccaagtaagtgtgaacttcccatgatttgcaaccttgaaaatgaaatgcatgcctaacatttagctctaaagaggaagaagaaatacatggacacacaatgtcattttcatttgatatccaccaacctcatgggagttaggagcacctaacatcttcctttttctcttttgccatgggccccacatattatgcaagcaaatgggtaagcatcattgatcaactcccctctaccatgacatgaacacataaactcctgctaaatcttactcaagaaaatggactttccatgattcaaaatgaggagatgtttgcagctaaggtgaccacatcatggttgttagggtaggaggaacaccagttaagatgtgcttggagtgaagaattgcaaatatattccatgttcatacttgattggcacgatcaaatcaagattccaatgaaacactttaaatttccactactcctactgctccagcctccacatggtttgcattgagttctaagatagtcagtgctcagttccatgttctgtatgatgcagagacattggcattaggagttggtgcatttctgatttcagtaacattgcatataatattatatactactacagcatacaaaatcttctttaaccttttgcattggttggctaaactattgttacactccatgtcaagaatgatagtagtactgactaagtgggatttggtaaaagtaaaaggttcattgaatccagacatagttgcacacaattccaggtgaagaaataactgtggcttaagagcaagtttaacagtatagccaactactctaaatcatctatagtcaatgtaatagctaattcatacaatagttgcttactatactattaatatctggtcccacctattatacacacattatgttttggagtccgtgctgtagctggctatctctttaaaatatgtttatagttgtcttataaccttctattgtacctgctctaatggttcagcttttttttaaaagaataagtaaaagccttgcgtatcttttgtaggattaagagaaggggagttttaaaactttagctgaaaggaaaaacaagggaacaaacaagaaagaaagaaaggaaactttaatggttaagtcacacctcgtctcaagaaattttcctctccaagctcttctcaggattcatccaaatttcaaagagctttgggcaaatggttggatacacccaagttccgtcacaaattattcaagaggattgaattctttgtatatttatttgtttatgatgttttatagcattccaaaggaaaagtgtatgctgaaccaaactaaatcaaacaaaattaataaactgtgagaatcttgcaagtagcctccagccaccatctcaccaaccacagcctctcacctactctgatcctccatgtttacttgttccatttgtttactttatggagaaaaagaccatgcttgattggtcactatagctaataaccatgctatatttctctcaataattatgtgcctttgggctctaaaaaaaactatgtcacatttgttacatgaatacattatacatgcatagctagctagcattagctgataatacgatgtggtaaaccataatttaatcggcgtgcctcatcatgcataaccgtggaaaaaggcagacaagctttcccaaaggcgactttgtttcggtggaaacacaattggcttgagttgggtacataatcatagctatataaatattttttttctaaaataatgcgatatgtaaaccttatctaacattaaacaattgtttatatgagaaacgagaccaggggtcttccggctagcttcacaaggtggttggctagacaacctgggtatttgatattaagttcttccctaatattcgtgtttttttagtttggtcagaatatgttgtaaacaacagtatgaaaaaaaaatctatatgttattgtttcctgacaagactgctattatggtggttgatgggcagtgaaaacagatcaaacttacaacaaataatctgaaaaatgtttctccattttcttgggaaaacaaaccaaatcacaacccatg

SEQ ID NO: 22027 - DNA, 1334 bp, Oryza sativa
ggaagtgaccagatcatccatgaagaattttgataggcatgatggcattcttatggttttactacctagctcacggagacataaagctgtgcagcaagctgttacagcattctggcgctgatgatctcccagcaactggagttttaaatcttgcaattcaataaactgcaaatataatcgtttggacttgataagtaaagagagagaaatcagtaatcccctacttatttctggagaaatagataaggttggcaatggaactataccaatggaatatcatttgaaatctcgatgacaatgtcacagctttgataaggttttccacaatcccaaccaatgcatcttgtgatgctcctgatgccgggatcgcatgcagatattacgggagattgtgttaagaatgctctatcccggagaatttgctcgatatctggggaaaatgggccaccaattataacctgaaaatatttggtatgcagacagcaaactccatgtcaggaaccatacaggtaacctggaactgtggtgacattggtctgaacacaatgcagcagcatcacttgatatgtaaataacattgcaaacaactcaacaaatttaatcacataaactcttgctagaagtggcacatgtgagaagtgcttgcaatgagaatattttagccatgctggtcatgctcatgcctctgaggaatgaagcttcacatatagaacttacacttagaagaaaaacaggatttgtctggtaaaatagtttgataacaagtacaaaattaacatagaagacagtaatcaaaatatgataagagaaaagcaatacaaaattaatcactcaatcagaatataagctggaattacaagcaagagcaaattaatcatgatgaacatggaaagggccaaagatgagagaacaacataactggtcgctcctgcttgatgattccagactttgccactgctatactttgtaaagaaccacccaaagcagccaaatgttctttccctactgttgttatgacagatgcagctaattcagtactttgtatgacgtttgtggcatctctagctccaccgaggcctgcctaggcaaccaatagaaagaagagccaataatttgtcacagtaggtgcaaatgctataaagttgaattcaataatcagttttaaaccctagaggcctacttttgattagtgctagatctcaataaaagagaacaaaatcaatagttagaaccgactttggaaatacagacatcctactctccaaatgaggcctagaaatattgctaactcttagaaacttgttcttctgggaactgccttatgtcaaacctat

SEQ ID NO: 22028 - DNA, 1761 bp, Oryza sativa
ttttgaaccttttggaaacaacactaacaccagcagaaaagacctgaccaaataacggtgtcatactagccagaccgacgtaacagtgttgttttaccacgaggcgtagccaaaagattcagatcaagttttgaatgagtttatttttaaaattaaaaattcaaaaaaaaaataaaaaaaaactccagcctcacacatttcacacgctgctgttctgtcctcagcttcaggtccaaacgaagagaaggaagagagattttttccagggcaaggcaccgacagcaacctgtcaaagcaaacaagattccagcaccaacaaagcatcagctgtaccacaaaacaatgggcatcaggagcagtatttctccaaaccacacaacgtgccatatacaaacacggcgtttcactcacgctataattcttgcacccatcacatgcaaatgctaatgacactacgacagtaggaatgaatgacccggctccaacagttggatgatagtaagatagtaaagtaaagtagagaaaagaaaaccaccctctcaaccattgtgggagagttgaccatgtccctatattttacaatgattgacacagttttgaccgagttatgtattctatattatattataattatgctattaagatcttttcgggtttgtattatgttcaaactctttaagtttaaccaaatttatagaaaataaaataacatttgcaataccaaattagtttcattaaatccactattaaatatatttcatagtatatttgttttgttggaaatactattatattattcaacaaacttgcttgacttgagaaaaaaatataacaccttataacagagggagtacatagtaagatagctggttttaatatatagatcaaaataccctcattaatatctcaatcacaggaaacatggtaggcaaacctggttagacaagtaagatgaggaaagtttagggaaaatgtattgacatttgtgaaatgacaatgtatttattagtgattagaaactgagggagtaattgtgtaccagcctgttgcaagctagctacctccagtcatgttcatcaacagaggcagctactgcctaagctgtccaagaactgacgaaaccatgtgcaaggagccggtcacgcagatcagcccagtgtcgccatcttcttgggtctgaagcagccgagaggcaaccctgatcaggtcggacgaaaatggcgtgcaacatccaatcagcatgggtttgtcaccgctcaaggaccgggatgtcgtgggacggctggcgatgatcggagcttcaacgccggtgatcgtccctatgtccgagtagcagctgatgccctggctttgtgcagcagccatccatatctccttcagtgatgaagctggcatagaccgggagcgtcctccagcaatgctcgcctctgtcagcaatacaacatctggtcttgggcctgtaacaaaaaaaaaacgtgccttataagcaaacaaaaagatttgattgcaattctcgccccaaatgaagggaaatggttttttgtatggcgaagaatgacatggattgatgggatgatagtatccctaaggtcttcatgagacggcattcatgaatttgtgcttaaaatcaaataataagccaattgatccgatgcgtgtggatttgaaatgtttagagtgggaaaaatcttgcctgacagaagctgtcagcaaaggccaagtgttctttgtcattggccattccaacaaccagagccaaag

SEQ ID NO: 22029 - DNA, 9030 bp, Oryza sativa
ccgttcctttgagtttagcttcagtggtgttttccaaagcttatagttaccatatcagcctacattaaacataatcatatcccaagtcccacccccactatgtttaaatttcaagtagggaacaatgcaatgttctacagtgccactaaattaagtgaactgatacattcaaataaattagttcccgactgcaacaaacaaactcagcctaagtgtgttctcaagccaacaaaaagcaagaaccataatgtaaaattctaagaataataaatacaatagttaaatccataaaagaaaagaaacatcaagcttgatagcaaccacggacacactacccagaaactgtatcaaaacaaagaaaaatacagcttcatacatactacagtaatacaatatcataatacataattcaaccaagtagcaccgaaaagtgatctcattacaagtgctcgcgtgaaattcatgtcacatacaacagaaacaaaataaaatgttaaggtacatttcaaaaccaggtgccatgcaataaaaatatgtttgagaaagcgcaccccttttgccaagtgccaccctataaaaatattttgagaaagaacatcccagtggagagcttaggttaccctggctgtgctatggggacatcagagtggagaaggccctaaacttgtgcacaaaatagatagtgtcctctaatataatgaaaattgagattgtgtcctctagtattcttaacggaaattcaagctttggttttcataacaagctcaatactgtagccccagaagtggagagaatgtatagatcattgggcacccatttttttagacaatcccatatccaagaggtagttgattcaataaacattcaaatactgtcaaaccttagatgaaatccttctttaaaacgttattacaaagttaaaaagacttttaaaatgcagcaaaaagcaactacaatgaaccataatgcaggaggtctgatatatcatacccttttgaagttggcaccataattcaccagtaaaaacaattcctggaatcagttcatctggaaacacaaatatttaggtcctttcctgaattcattaaaatttcacattttctgaatatgaatttagagaacagaaaatatgaaaattttgaagtggtattgaagcgactggtccagagtttcagacacaggtatgtcaggtttcgctagtcagtgggtacggttgtcaggatcaggctataaatttgattccaatccttgatatatatccaagtatgcaaatcaacaattatccatttctgcttgtaatgattaagaaatgatgctaataggggaagaagtgcatgattacatgagaatttggtgatccacataattaaatattccagcagcatgataatatgatccagcaatgctatgatttgcaaggccagaaaagaaagggatgccttattattttaaaccaccgctgacaaaaattgcatcacttttgaccagacaaagtgcataatttcttggttttaatcaagctgagcagaaataaaatagaagcaagcatcaccttcgaacgcatacaccattaccacaattatactcatttaccataaaacataagccaaaagtggatggccaatgtacctcaacagctgcctggcaaaaaaaacctgatcagctctgttatactaatcataaaacctcattttctacctcctagggctagattgatctcctagtttgcaatgattaaataagaaataccataagtttttagtcatgtacttttattagattcaaatttcacgaatgaactaccacagcagaaagtgaagcgtatacctctctatcacgctttcttctaagttcgattgcacttaaattagtaacattggcaggtgtacctgaagaaaattgcataaaacatttgcattgaagtggcatcctacctccgttaggaaaaaaacaattctttgtgtatagcagtgatgtgaacctgtgacgattgtagaaggaatagacacattagaaggtgtttcatttcgaacttcagatgtagcaattgtcggtgacatattttcatcactgtactcggttcctgaaacaaggcttaaatattgatgtcaaattcatgacaggaagcaaaaaaaaaaaaaaaaaggagagcattgtggtacctgttagagatgcaaagttatccttcttgctctgcttgtattcacgttttttttttgaagattggcctctttttcatcagtgcatagtgaaccgcacctctctctggcacaatttgttgtaggagaacctaaatccagaagacattattatcagactggaacatggtaccgaagctaaaaatatggcactgttattgcagcactcagaggcagtaatggagggttggtactactggtaatgatcaccgtgggtccaataaaaatagcaaagttacatactccaccaaagctgataatataggtatagcaactcaaaatattaaacgcaagcagcagtgagcttgccgattaagattaagatcaaaacttgctgaacaaacgtgagctgcgtgattaagattaagattattattctagtgttatagactcgattaatcgacaggctcccatgagttagtggccaacacattccaggatcctagctctgcctggctgcctgcagaagcacacacgaaacaacctaaaacaactctgaaactgaaactctgaactctgaaaaatggctggaaaagcgacaaatgttaagaagaaaagattcctgcaaaatggcgagatctctttactctaattggctatctagatgcatgcatataagctacggcaatattttgtgaatctaaaaaaatatgcagctagaaaggaagcatagcttgttttgttgtaaacaaacatgatgcctaatagagtatatatcgagaaatttgtggaaacaaacatggtacctatgttggttcgtggactgggttgtacgactgcggaagcatcattctcctggtcaggggtttcattttgttgaggatgggcagactttccatgtgttgtcgtgtaatttgatggcgccggcctcattagggcgcccagccttgcaacggcggtcacgggtgttaatggcctaggcgcatgtcagtgaggaattatgttgacatacataaatcaaacacaatatatcatttgaatgacagtgtgtgtataaaaaggcaattaatagaaggtgtacagcaagacatgatgctgtaaataacagaaattaacagtgaaaatattatgtgcatatatgcaatcaaagaagggaattagaaaggttaaaacatgaactgatgaaccaaagtgggtgctaatttgtacactgctcattgccaaaacctaacatttgattcagataacttgattacgcccatgaccttgcaatccgaaaaagaaaaaaaaatcatgtctagctgtatatacatggaaatcaaggagtaatcctgtactgatccagaagagaatttcagtttgcactatatgtagacaacattcattcaatcggttgtgcataatacattcaatctgttatgcattatacattctgaagtacattctcagatggaaaaggaatagagtctcgtacctgcacagcctccgccggcggcgtctccggcccctcagcctagacagcagaacagctccatgcccgtcgccggaaagaggaggagtaggcggggcggcagaaggcgggggaggaggcgcgacggcggaaggaggaggaggaggcgcggcggcagaaggcggagaaggcagaggcggaaggaggagaaggcgcgggcggtctggcgacggtttttttttttcgatttggcgacggtttcctttgagaagcgctaattggatggttaggcgctaattgcaattgcggtgttaattgcacttaacaactcgtactttttatattagtctagaataagcgttaattgcaattgcggtgttaattgcacttaacaactcgtattttttatattagtctagattatttcgacttgactaggacaaaaccaagccttttcactttggtctctgtatcttttcactttggacctggtatctttacatgttatttcaatttggactccattcttcttcctccagttccctttctcctctctcccctacgtatagctcgagaggcaccctatactcgagcagcgcatgtggaggaaaagcactgtatcagggctgtgtttagatctaaagtttggatccaaacttcagtcattttccatcacatcaacatgtcatacacacacaacttttcagtcacatcatctccaatttcaaccaaaatctaaactttgcgctgaactaaacatagcctaggtttaaccctgaaacctcctttacactgcatgtctacacccttttctgaattctgatggagacggcgttgctgcaacggaacagtttgattgatgaagacaaatggcaggataattcagagtcattccctcttcctgcatggagtgccggactcatctccttccacttttctcctcattactgatcaagcaactcaatttgaacatgtaaagtcttccagagactagttcatgggtggatgtttccggagtgttcagttcgaggcctcctaaagaatcatgaattttcttaaccatgtttgaaccgctgctcaaagatcagtaggctagttttgtatgtcagtttgatccaacggctgtaatattttgagtgatgtggctcattgtggtgatgagaaagattagttatttcactactttagatgtgacactggttttgagtaatttggaggtatggacataatactattcttataatttttttgagaagatctataaaatgccatcgacaagcaccctaatctcagaaatgacatcgacaaagccaacttcccagaaatgccattgcacaagcctctttcttccaaaaatgccatcaccgtcaactccacaccgttagaaccgttatttttttaataatgaccattttgccctcggtgcaaaatatacccagttcactgtcaaagaaaaaaattataaccctaaccctatcgctactgatcccaatccccccgatccagcattctaccgatcccaatccccgatggcgtctcgcggcggcagtccccggcggtgcccgtggcaccgctatgctagcggtccacgggggcggtgcggcgaggaagaccagggcggcgacgtggtagggcgccacgaggaggtccacggtgatggcggcgtggcagggtgcggcgaggaggagcagggcggcgacgcggcaggacatggcgaggaggagcagggcggcggcgtggcaaggcgacgcgaggaggtccacggcagcgcggcggtcacaggatgtggcgcgggggccgtaggcgccggcgagggggaggagaggcccacagcttaagtcgctgaggtcgccgtggaggaggaggctgcagtcctagcaagtggcgcaactctcagatttgaactttttccctttttgtttgatttcttttgaagactttgccggcgaggaggggaaatcccgatccggcgaggaggccaagggcggcggcgcggcgaggaggtccagggagcggcgaggaggcccgcggcgccggcgcggtagggagcggcgaggaggcctcgtggcggcggcgttgcagggcacgttgacgcggttcatggaggtgcggcgtgggggccgtaggtgccggtgagcagagccccacaggcgccaacgaggagggtaaatttgttttgcttcttttgatgaatttgaaatatgcaagagatgaattttgtgtgtggatagtagattgattcagttgtccttctgttgctgtgtgtatggccctatttttgctcagcaaaacaatcctgattattgatagcaaaatttctttctgaaagaattgcgatggcaaaatgtgtgaaattagtttgtgaatttaattctgaaataatttgattgataacaaaataatgatgtacgtgaatttagttgtggacagaaatataaatttaaatgaaagatgaatcctttcttgcaaagttaacgcatccacgtcatcaacaaaacttcgatattttcgtgagccaataagaaccatcagattccccaaatggataaattaagaagataaacatccttgatgaaacttataccaaaactagatccttccatacccttagaatcgattctttttatactgtatttacccctcctctcctctcctttgcgcgctgcgccacaccaccgcctccactccaagtcatcgtcatcccagctgccgcgtcttcctcctatccccccaccgcctccgaagtcggctcctcgtccccgccgtggccaaatcgaggccgccgctccatccaggccgcaccgcgttcctcgtcagattcaagcaccccgcactgagctcgatcgggggcaagccaccgcaagctcaggaatcgctgggatccaaaccataccgacgatgaagatgggtggcggcgaggctgaggtaccacacgcatcctctttcgctgggctgagcagctcaacaattttcctctgggagcaacagagtgggatgatgcgacgccgccatcttccacttcttcctccctatccctgcacttttgcctgctcccacgcatcaggtatgggagtggagaaggcggcagcggcagggagacacccctggaatcgtggatgccaataaaaaaaaagtgcttctttccagtttagattgaaatgagcaaatagcaaaaagagataagaggtcataagcacatgacttcattgcaaggttagtgctgcctccttcaatgtgttacagtaaaaagttgctcaagtgactcacggtgactgaacaatttggaatgaacatgcaactgtccaagtaagatgttgacctatagggatatggtgactcactgtgactgaacaatttggaatgaatatgcaactgtcaattgagatgttgacctatagggatgaattggaaagaagtacagcaagatgactgaatttactgcaaaactatgactgaattatacaagtttataaattaaggttgagtccatgggggcttagataggaagcatctctttctgtttccagcaaacaaagttcctatttaagccttaatgttttgtttgcatatatgcagatccagcaaatgcttcagttaatacttggtttggtggaattcaattttgcatatatttgctgaaaggagttttagttctttattatcgattccccagttttttttcctatgaaagtaactcattttcaattagtacacgacaggagaactatatgcagaactatatgcacatgtggctttgtatgatttctggaaaccttcaacaaagaaagacactgaaacaagatgtacttagggcagtaaaacagtatgctgcggttggatatgctaataccagctttagggcccctttgatttggaggaaaaacataggaatttttagaggatttcaatcctaatggaaaatttcctatgaagccctttgaaacaaataattgaatcctatccaatcatttgaaattcctatggaatggacaattctatagagattttggaggaaatttagcaagagcttcaacctcttgctaactttcctttgagtctatctctctcacccaattcctgtgtttttcctgtggttcaatcaaacggtcattcctgtgtttttcctgcgtttcgcaatcctctgttttacacttacattcctatcaaaatcctacgtttttcctattcctacgttttctcaatcctgcgaatcaaagtgccctagtaatcttgaaaacactttcctggacaagcacgtcagctcatgaaagttctaatatgagcctagcttgccaacatattttttttctaattccagattgagttgcatttagatagaggagtatttggcctgtaaatactatttccacaattcccttctaatcatggctgttgccttcctttactaattacaagtccaaaacacagaatttaatctgtttggcaccaaaatacttttccattgcctattattccaattcctcttatgatatgaatttaaagtcagctctgtatgcgaacaaattttcagtcgttttcacttatatccatttggaagccggagagtataattttcagttccattttcggtaacttggaagccagagagtacaattttgggcaagctagattcagtgttataatcaaagggctacggtttgttgtacaaaaaaggtaataatattacaatatgagatagggaaaatgtgatataggtgaattactcatggtcgcacaaacgggcgacttaattggctagtatgcatgaatgcaaaataatattgtgtgagcaaacaatacagaatgatgatgtgtgagcaaatagatgtctaggggtaagattgtcttttcatacaacttaatgaagaggagttaacagcacttatggtgtgattgcatttctgagagaaagaggcttgtacaatggtatttttgggaagttgtctttgtcgatgtcatttctgagattaggttgcttgtcaatggcatttcatagattttctcaatttttttctctactctattaatatgaacttcgcgttgtctggtgcgagtcgttcaaaaaatatgccacgtagaataagggtttgtttgggggaagtttcttgctgttgcagcttctcccataattagaaactcccccaaacagtttaccttttagtctagattctgagaagctatatttatttgtagaatccaaaaagtgaattagagattagaagctgtgtcggtgacatgggaccgggagtatcatgactagaggcttgaggcagacacaatcgcccacgtggcctggcaccctcggggggcgtcgggcccgagggtgatgtgttcgccctcctctttgtctccccgagggggtcggaccgctcccgcctcggcccagagggccgaggcgccccgaccccttgtgggtttttgctccgcgtgtatgggttagga

SEQ ID NO: 22030 - DNA, 5032 bp, Oryza sativa
gcgggggatagaggggtgggattcgaaatcgaatcccgcccatttgcggtgcgcgcgcgagcgggaaaagcgaggcgtgggcggcaacgtgggcgtggggcgtggggatgcggagtggggcgtgggagagagcgagcggcggcggttggggcggttgccgccggccgggcgcgggcagctggagcttggggacgacccaacaggtgggccccacctatcggcgtcctagaaaggagggagggggcgcgggccggcctagcaaggagggaggcgcaggaggagggttaggccgacgacccaacaaagggaaaaagaaggaaaggagaaaaaggaaaaagggaaaatgatttccagggatttatattgcggataaatgaattttaattggttaaaattattttcaaggctctgaaaattccactaaaaatttccacgacgctgattccaattattaattgcatttattaattagggaattagctctaggttaatttaaacaatttcttctggcaatttattcaacaaattttaaagcaagacgaaagggataaacttcagggcatgacacacgtgcaccataactaatagattctagttgagaagatggatttttttttctaaaaatatacgtttttttgaccgaaattgcaataatatattgagtagggaaagatttaccaaaatataccgttgccgcgctttggttaagcaagaccgtgatatcgctgaaaggattaacgaaagcgctggcgttgtcactaattgggaaagcgggagtgctaatgcatcggtatcgctcttcaaaagcgtgataccgactcggtctcgcacatgagctacgcgataccgcctgttgtctgacgtagcgcgaggaaaagcggtctcgcactttgttagtgcgagagcgcacttggtatcgcacaaccatagcgcgataccgtagcgacgtggcccaccgtgctaatcacgtgcgtgagcgcctaacggcgtgtggggacggaccggtctcgcacaatgcaagcgcgatatcgcgcgttgtggggcccgcaagagcgaccgcttcggtcttgttctttcaaatcacgagagcgcgtgcagtatcgctcaacgagagcgcgataccgatccactaattgtggttatatttcatgcgaagatggttgatatttcatgtgtgattaagccattgctatggagagtaaacgtttatttcatgatttttttagttatatgtgcaatatatatatatatatatatatatatatacatatatgtatatatatatatatatatatatatatatatatatatatatatatatatatatatatatatactacttcagacaatatacactgttcaaaaacactatttattcggctgaatactattcagtttactgtttattcggctgattactattcaaaaacactattcagtttactgtttaaattactgttcaatactgttcactttcagagatattttaactttaggatctttgcagggtggcgaatcctatttagacagcctcagaagcttgcttcagatgatgtaaagtcctactcggtactcaccgtatgcctcacctatctgtctttttagaagcaacttaaaaagatattccaagtcacacttgttctagctaagagtttatcgtctccccaggcagttccacccgaagggaacacttctctacggataccgattctccagacgcctatgcaagatgcaggctaaaaacgagaacaaaccgaagaggtttctcctatagggtccttagcataaacacttgtctagaacaaacgtgcaggaatacttaaggaaaattacttcatattaaacagataagcttacatacggttttccctttcgggaaacccgaaggtaggtacaagcaagctgttcttaccttacacagcgttataacacaactccttgcttcaatatactatgcaaggtaggctaaagtcactactactaagaacggtggaatggagggtgagagcgcgcttggaagctttgctctgaatggtgtcttcgttgttgtcttcctcagctgggcaggcccctccttttatagaggtcaggggtggcgtcgcctgtgcctcctgcttatctcttcgctactgtggattcacgagagcaggctaaagttgaggcctttcctgccgaaagttttattcttcacagggatatgtcattcaccgcaccctatattgttcctttatgcttatagggtgtccttctggattccttcttctggattccttcttgagtagtcttctgaaatcttcgtttattcttcttccacgcccaaattattgatattctattatcaatatatattgagaaacatatttagcttaaagaattctattcatctggctgcccatgaccaccaagatctatagtgtccagatcagaaaaagaaacttctaatttctcatctactgccttttttatttgttcaaatttctgatccatctcttgttttaattctttaagtatttcctcctttaattccttctttaattgtggggaggcttcttcaaatttttctattattttccaatcaatatattccccatctaatggatccactccttttgttaggcattccttgtatgtgggttttttagaatacccttcttcttttatagtcgttttaatgggtatttctggagtcttctttcctttagcttttttgcatttttgaatatattcttttgcagcaggctctagataataatttattcctagtatttttctagcctggcttaatgcttcatcaatgtctttatatttcttccaagatattcctcccattaatttagcatctatcttttgggccacaatttcttcaaaagatatatagacccctgggagctttccatcaaatacgacatatataggcttctgttggattatttcatgatcttcattagctggcattaataacccgtttattaagtgaaaatattcagagaggctattcaatattgataacatatatcctttttcttcccttttattattgtattggtaccaaaaattatccaagatgcattctttcacttcatctaagattatatggtcttttggcttaaatttatatgaatttggtgggaatattctgagcttgttgtcatctccaaatgtgaagcattcaattccgctgtaattcattgatcttttcatacctgcaattcaggtaaacgagaaagcatgtcaggcaaattattatctttccccttaatatgttcaaatataactttataaccgtttcctgttataatatcttcaaataaaacccatcttctagttgagcttttcttgctatttagctgattatagtacctacaaatggcttcacaatcggttctaaccgtgaattctttaaatcctaagtacaacctaaaggcattgattgcattgattattgccatgatctctctatctgtattattgacagtttttaatttataacttccagaagcatatctacatattttttcttctgatttagcggaaaatttagtaggtctttgctttaatatagcaccccaaccgtattgtgatgcatcagtttcaatgataaagtaactttcttctaatggtaattctagaggttttaattctttcaccttctcttttattagtcttactaatttaatgtcttcagaattaaaatatctctgactattttttcttaatttagcatataacggtcctgctaactttgctaaattattgatgtaatttctggcataatttacaagtcctaagaattgctgtaatttctttttatcattcatagcatcaggaaattgtaaaattttcttagcaatatgttcttgcaaatgaattttgccctctcctatttcatgtccaaggaagttaattttttctttgcatatttccattttctttttggataatattaacccattttgttccacctttctaaagaatatttcaagatgagcaatatgttctttgtaagtccttgagaagactaacaggtcatctatgtagactaatatgaattcttggttttcgttaaatatattctgcattttcctttggaaaattgctggtgcattttttaatcctaatggcataacaagccattcataatgtccttgaggacatgtaaatgcagtccattctatagattcttgtgccatctttacttgccagaatccagctttcaagtcaaattttgagaaatatttactaccttgtattctattaatccattcttgcttatttgcgatattataggcatcttctatagtattatcatttagtcttttataatttatgaccatcctagatttacctctaacttcttctgcatgatttcttactatgaacgctgcagacctatgtggacttctgctttctcttatggctcctagtttcaacagttcttctatatgcatcttaaattcttttatgtctttcggagttgcttctattgggctagtcttaataatatactctgggtttattatattaattttgcactcaatagcatttttttcccaatatttcataggaatttctcctataatttggatatcttctaatctttgaataattttttctatatcccttttagacttaatatccctataccaatttggtgcaaatgcttgtagtcctatgcactctatattggaatttgatatataatagttgtctatattctcactaagctcatattcattaattctttcttcagactcaagattaggtacttctaagaattaatgaatatatatatatatatgtatatatatatatatatacatacatacatacatatatatatatatatatacacatatatacatacatacatatatatatatgtatatatacatatatatacatacatatatacatatatatacatacatacatatatatatatatacatacatatatatacatacatacatatatatatatacatatatatatatatatacacatatatacatatacatatatatatacacat

SEQ ID NO: 22031 - DNA, 4771 bp, Oryza sativa
aacttgtaaatattactggatatcattgggctgttcagcgagaaaagcattctccatttgaagcttccatgatcacaaacatcatataaacaatcaaaatcttgttaaaagtttttctcctctttaattaaattgaccaagtttccaagtataaaacggtgaactacattacagaagtagacatgtgtaactaactttaaaaaaacagtgaattactcacgttatatggtcatgcacagcaacgaacatgtgcaagcattgggtccaggcatacatataagtttcacacaattacatggcacattatattaaactacatgctcccattgattttgacgagccacattatatcattgggcatccctgattgcgatctgcatcttctctgcggcgcctcagttacaacgatggcgagtacggatgacagtgtccctctaacttttaagttggaggagctccttcctggcgagtacatcgcatacacaacggtgtgagctgcaatacaacacctcgaagccatagctgggaagcaagacaagtactattcgtgtcaagtgtagccacttttgatgttctacgactacaaatggggccatgggggtcctatctggttgagcccctcccatcaattagcctcaatgcctcgtccatcagacaaggcatgcaggcagagaagctgttagctgctgctggtttagtggttttctgaaaggcaccgtgtcaaatatcatgaaatcgaccggtctgaacatatggatgatttagcccacacaacaaatcaatgcaatgtggcatttgattatttggttagtattcactattcaggtgtatgcattaagtctcatgttatatgtaggtctaatgatatccattgcttcttgataagtactgtcgtaatccaaaaatgtaagacaattggtgttaaagttagaatgttgctgcagttagatgatattgccttcaattttctgaaattactgctatccccatgaactggtttatttggcccactacacaaatcaatgctatttggttaatatttagtaaatacattaagtgtcatgttatatattggtctaatgatatccattgttttatgatattttacaggcgtactccaaaaaagtaagaacattttgtgttgaagaatgttgctgtcgttatgttgcttgggttttgtgaagttggaaaattaagctcctaaatgtttttttgtgtactattgtctttattataccgaagttataatgttcttgaatagggcatacgcagattgaggatttattttcattgagtaacaatatttttattgtacttttgtccacgcataggggagtgtggagttgctattgtgaaattattcaaatccagattagtattacataaggattttacctattcttgatatgtcatgcctaaaattgtaaggaaattgtattgaagagcttccctgtgcagagctcattggtgctggagtttgagcgatggttcttttgctctttgagatgtatgttgccttcgctgctgcaagctaatttttttcttccaaccacaatgataaagaaatagcaatttaattattatgtttttttgtcacttggttttagtgccatctatgaacatatgtctctcttcctccaactctccatggaatcaaactcctcacctgctagccacagctcaaagctggtgcattggttttctccctggtagaaaatacataattttcttattgcattttgttgtttgttgaccactgactaacatctccattgctgccgagaacaacatctaaggtttgcatgtgtactcgcaattcatccttgaaaatgtcttgatcagaagtctggtgtgcatactttcttgcggtatactgatcttaggaatttgattagagttttgatgcatgaaagtaaaagtgagatgaaggtttatgcatgaatatatttggtcatcttaatttgttttcagcattgttaatatgtatgtatgctgtcattttctcctgagaaaaactcgcatagtctcggtcgccatgtatcaagtatagatatatggtttttttttccaacagaagttttgcgtacattttgttcagtgcagttttcttatattctagctacttcttgcatgtacatcttattagcttggtttccctttagcacttgaactgtaattcagtaagaaaataatgccttgatagttattctcttttacttgcagtttcccttctagctgaaattgtgcaaagtttgatcattaattgtttgcattaaaatggtagcaatatcgcattgtataaattgtgcttgacccactaaatacgtttagctttcttggtaaggaagtagtgattcgacagagtccaaattgtcagcttagtatagtctatatgaaattgtcttagtaccataagaatttatgtggagtgcattgcatagaaatgattgcatagattcttctttgtttgctaatatatactgtcaaaacatgtcttgcatgttgtcacgtccagaaattcacgaaccggaatttctaagctgaatgtgcattaaacccctatccgggaccagccatggtacacaaacgataattgctgacacacagatccacgtcttacaaaaataggaaagattacaaatgcagcggaaaagataaaacgagctagacttaaaagcttgactcctgcagcgaggcgactctactccacaggcatccttgacggcagcgacgaaaccaacttcaacaagacaacttcaactgggaagatcttcagctctggcgtgggggaagagagagcaagactgagtactacccactgtactcagcaagtcatactggaagaggaggtatgatgcaggatataaccaaaggaggctaaaggttcatttgcgtaaagtaggcatttaaaacagtagttgaaaacagtaaaacatttgtaataaattaatcaatattaaccaatcaccgctcaacgctacaccacgttgagacaggtccaaaccaccacctgtactaaccagttccattaaactaaactaggggtgagactaatcacggtgaatatgtttgatcgcccataaccacgggcacggctattcgaatagttttactctagccagaggtgtacaactgtacccacaagacacgattccacacatgtcgccaagccccgaagtatcaccatgatactgcaaagggggaaatcgtgacaagaccattcgcataacccgcccctaaccatccacaccacgctaaggtttcacccccacctcctaccccggaggtaggcagcccccttgtgcgtcgcggtgaatccgacagctggacaaccggacaccccggccgacccaactccatcacgcctgccctcgccaccggtgcctaggaaatggtcgagctatactacaagtcaagcagttacccactcccgcttgtggtaagcatggtaagtcttccagggtttcccgtgaaccagtccttaactgccatgggtgcgaccaacaaaaccatgcacccacatcccaccatttagtgtgttttaattaactaacaccattgcagtggcaccaaaccaaagtcatactaaaagctaatgtctacgcattaatgtgattccccatttgtgtactagttgaactaagcttggctaagcatttcctaaaccaatatctagtcattttaatacccaagttatcaatggcataaggtaaacgacatatggctgagtaatatgacccatcccacgtgacattgtaaaataatgcaacatttaatagaaatgcaggacatttataaattgggtacaatatgatcaattgtaatgcatgacttaccttgctctcgcactgatgagaccacaacaacatcttcgaggaaccgcggatcaacgaaacggccgaaatctatgcgacaaacaaagcacacaagcaaaacatgctataagtctactgaaacaggaaataaaaaccattttaaatggattatttgcatttttctcgatttactgagacttgaatggacttaaacggagctcggatgaattagttatgacttttagaatattctctgtgtttttactaataaagaaaacccttatttgatttattgcacaatatatcctagggctgacgtcagcggcggggggttggggggggggggcgacggcgccgacatgcgggcccactggacagtgactcaagggagaggggagggggcgcctggcaaagcgggccccactggcagcggctcaaagggggagagaggggcgccggctggtggctcggcatggctcaagctggtcggccatggtgaggcggcggcgcacggtcggagcggcggtgcggccaaaggtggcggcgcacgtgggacggggagaaaaggagggggagggattcctcatcggcgaactcggaggccggagcggtggatgaaggcggcgatgacggcccgacgagcggaggggcggagggacggcggcgacacctagaggaggggaggagaggggttaggagcggagaggacaaccacgacggcttacatcaccggtcggagatggacaaaaatggagggctcaccggcgaggcgagggaatcggagctccgacggcgattagcgacagccgagcggtggccgaggtagctcacgcgacggcgaagctaacggcagcggttgcacagcgcagcggcgaccctagaagcggtagcgcgcggccggagagtgatggcgcggcggcggtagggggcgcagaaggaagcggcaagagcggaaa

SEQ ID NO: 22032 - DNA, 1460 bp, Oryza sativa
caggtttcattttgccctcctatcatttcccttgtttgtgttaacggggttgcagctactgactggttgtcaataaaattgtccaacttgcaggcgctccacattgacgctatgtctgaagtcgacaacaccacacaatcgcttctttcatttgtgggcaataagagtgttcatggtttatatgacttcttgttgaactacaagtaggttgcttaaaacctttgctgatcatcctattacaatactcccaaaattttctagctgtataacatgttcttgttgttttcaggtcattcttaaattctctatctgccacagatatcccggtgttatattccccggtgccgtttcaaaatggctgcctccatattccagaggtaatttgactcgtttcatttctgtcaacttaaaatttctccctgctatcatatggcaagtttcagtattctcattttttgtaccagttcacttcaagtattttcattaaaacctttctgaaaactatgtgtctaactgtctaaaggttgccctgtacaatagtaaagctgatttagaggtctgatcttctgagcacgcttttgcaggtgaaatgcaaggagatgaggaaggcagatataggcctggtttcaggtgggtttgatgcaggagagcctggatctactttcgcttctttaacgggcaatatctgctatagcatggaaataaaggatcccgtacttcctccatgggttgtttctggaatctgcgctgcaatgagctctgatgcaaatagcttcgatttaatgtacgtgccatcatcttccccgatgcagtttctccacctcttgccatgtgttaaataaatcattctcatttcctctttcaggatggcaacagagccttcgtcgatgggcttaaacgctgccttgagctgcgtaagctcaaattcccagtccaaggcacattcctctgaaggctgtgaatcattgggcatccctgaggccacattggttccctccttgcgatctgcatcttctctgcggcgcctcagctacaaggatggcgagtacatcgcatacacaacggtgtgagctacaacgcaacacctcgaagccatagctgggaagcaagacaagtactcctattccagtcaagtgcagccacttttgatgttctacgactaccaatgggggttctatctggttgagctcctcccgtcaagaagcctcaatgcctcgtccatgagacaagcaaggcaggcaggcagagaagctgttagctgctgctggttttgtggttttttttgcaaggcaatgtgtccagtatctggaatcatctaactgtttttgggtgagcctgtagattatctacaggacaatgagctgctcttgaatggtgcagtaatttatgggattgtacagtgtatttgatgcccttgacagtgcatccttcgatgactgatgggggggggggggggggta

SEQ ID NO: 22033 - DNA, 16765 bp, Oryza sativa
gtcccctgtgtcgggcgagtgacggcgctgagcctcactgaaggacaagctgtgatttagtttccgggcgaaggcgcgaaccaagttttggtcaagatagggtgggtccccatcctaaagaagagtaggtaggagtggtgcatgtggtatccccttgagatataaaaggaggaccttgcccaccgaatggggggttggttgattcgaactccggccacttggttccagagcctgaactctctctcgctctcgagctctctgtaactccttcatacacagatccaccaaaacacaggagtagggcattacgcttctcagcggcctgaacctgtctacgtcgcccgtgtcttgcgcgattcttctcgctgacatcctcagatcgacgagggcgaagaacctcacttagcgccccggtcgaaccggcaaaggggggcatgcgcggtctcccggtgaggagccccaagctccgtcatcaagcgcgccaggtagagggcgcgcgtgtcattcgaagccctcgtcctctttcgtgtgcgccaagcttctcccgctcagcccaatggccgaacgggcagtggcgcacagcctctctccgaacgctagtggtgacgacggggagcagaacccgcgccgtcgggctcgcaccccaccgtccccctctcgccgaaatcttgggcgaggggaggtgctcggagaggtcggaggatccgcgacttcgctgcccacggacgacgggggaggacggcgagacggggcgcgtcgtcgcctcgtctacggcaatggcggcacgccccagggcgcgctccaggctgcgggcgcactcctgcgtcacccgcccgtcgtccccgatccagagactccagcccgacgttggctggatgacgtggccgacttggtcatgatggcgcagcagcgcctaggtgccggcgggcggtcctccgccaccgggacctctggcgctgccgccgctggctccacgtcgtcgaggcggagggcgcggcgagcggcggccgtcgcccaccgttcgtccgccattccctcgtcaacgcctccgacccaagatgtgcgtggggggtcagatgcctggctcgatatcgagcgccggcgcgacgatcgtcgcgccgcccacgcaacggagggcgcttcctcgtccggagcgccacttcggtccgggcacgggggccggccccccgtgtccccggttggcggtgccggctgtcgagcctttgtggcgagccttcggaacgtccgttggcccccaaggttccggcccaccatcaccgaaaaatacgacggaagcttcaaccccgccgagtttctccagatctacacgactgggatcgaggccgccgggggcgacgacagggtcatggcgaatttcttccccatggccctgaagggtcaggcgcggggttggctaatgaacttgccacccgcgtcggtccactcttgggaggatttgtgccagcagttcaccacgaactttcagggcacatatccgcgcccaggcgaagatgcggacttgcacgcggtacagcgaagggacgatgagtctcttcgctcgtacgttcagcggttctgtcaagtccgcaacaccataccatgcatccccgcacacgcggtgatctacgcgttcagggggggcgtgcggcacaaccgcatgctcgagaagatcgcctccaaggagccccagaccaccgcgcagctttttgagctcgcggactgtgtggctcgcaaggaggaggcctggacctggaactcctccggctctggcgtggcagctccggccgtccccgagtccgccgctcgatcagggcggcgggacaggaggaggaagaacaggtcggcctgttccgacgacgagggtcatgtcctcgccgtcgagggcgcttcgcgggccccccgaaaggggaggcctgcgagcgacaaaaagaaggaggccggcgctcccagcagggagcgcccgactggcaagtggtgcaccgtgcacaacacctccctccacgacctcgcggactgccgcgcggtcaaaagtttggccgagcggacgaggaagtgggaggaggagaagaggcaggagcgccgtgagggcaaggccccggcgactcccgccggcaatcggcgaggtgaggccaaacagaaggcccccgccgaggacatcgacgatggcgacgatgacctggggttccaggagcccgaggccaccgtcgccaccgtcgatgggggagcgtgcgctcacgcttctcgccggagcctcaaggccatgaaacgagagcttctggccgcggcccctacccatgaggcgacgcggcgggcgtggtggtcggaggttgccctcaccttcgaccagaccgaccacccgccgtgcgttgctcggggaggacagatcgcgatggtggtatcccccaccgtctgcaatgtgaagttggggcgtgtcctcgtagacgggggtgcagctctcaacattctttcccccgcagccttcgatgccatcaaggccccggggatggtgctccggccgtcccagccgatcatcggtgtgatgccggggcacacctggccgctgggtcacatcgacctcccggtcaccttcggtggtcccgccaacttccgcacggagcgggtggacttcgatgtggcggacctcagtctgccctacaacgcggttctgggaaggcccgcgttggtgaagttcatggcggcggtccactacgcctatctccagatgaagatgccgggccccggtggccccatcaccgtccatggcgacctcaaagtcacgcttgcttgtatggagcagcgcgcggaccacctcgccgcggtgtccaagcccgcgggcggcgacgagaggctcagcacctccgtcccagccgccccgaggcagcggatgatcacgtgcgacgaggtcccggtcaaggaggttgccctgggcgatggcccgtccaagaccacacgaatcggtggtcttctggatgacaaataggaagacgcgctcgtctccttcctgcgggcaaacgccgacgtcttcgcctggagaccggcggacatgcccggggtccccagggaggtgattgagcaccgtctcgccgtgcggccaggcgcaaggccggtccggcagaaagtgcggcggcaggccccggaacgtcaagccttcatccgcgaggaggtggcgtgacttctggaggccggattcatccgtgaggtcatccatccggagtggctggcgaacccggtcgtcgttcccaaggcgaacggcaagcttcggatgtgcatcgactacaccgaccttaacaaggcatgtcctaaggacccttaccccctgccacgcatagatcagattgtcgactccaccgcggggtgcgaccttttgtgttttctagatgcatactctggttatcatcagattcgcatggctagggaggatgaggaaaaaactgcattcattacccccatagggacttattgttatacgacaatgcctttcgggttaaagaatgcgggtcctacttttcaacgtactactcgaatttctttgggtagccagctaggacgcaatgttgaggcctatgttgatgacttggttgtaaagacgcgcaaccaagagaccttactctcggatctagcggaaactttcgaaagtctccgctccgcccgcataaagctgaaccccgataagtgcgtgttcggcgtgcctgcgggcaagcttctcgggttcttggtctctgcccgaggcatcgaggccaaccccgagaagatacgagctatagagcggatgcgcccccccagcaagcttagagatgtgcaatgcgtcaccggctgcatggccgccctaagtcggttcatatcgaggctgggagagaaggcgctacccctatttaagctcctcaaacgttccgggccgtttacctagacggaggaggctgagcgggccctcactcagttgaaggcgtacctcagttctcccccagtcctggtcgccccggagccagatgagccgttgctactctacctagcggcaaccccgcaggtggtcagcgcggcgttggtcgtggagcgtgacgaggacaaccctcactccgcgcatccccaccctgtgtcgactcgacccgggagagagcaggaaggagaggcccctgagccgaacggcggcccgaggcccccgacggccggagctggccctccgcccgcttgtccgacggtgctaggcgccccgacctccaggatggcctcggggccactgcgggaaggccgcgcctgtcacctccgaccccgaggtcgtcggcacagaagccgagtgcgccccgcgtggcctctcggacgaggagcgccccggagatgcggcccctggcgaagaggatcggccccgccgaaaggtgcagcggcccgtctactttgttagcgaggccctccgggacgccaagacccgataccctcaggcccagaagatgctttacgctattctgatggcttcgaggaagttgcgccattatttccaggcgcatcgggtcacagtggttacgtcttaccccctcggccaaatcttgcataatcgagagggtactggacgggtggtgaaatgggcaatcgaactctctgagttcgatttgcactttgaaccacgccacgcgatcaagagccaggccctcgccgactttgtggcagagtggaccccagctcccgagcccgtctccgtccccaaggccagctcgggcccctcgtagctgcctcacaccgcctactgggtgatgcagttcgacggctcgttgtctcttcagggtgccggtgcgggggtcacgttgacctcgccgagcggagacgtcctcagatacctggtccgcctcgactttcgggcgaccaacaatatggcggagtacgagggactccttgcgggactcagagtggcagctggactggggatccgccgcctcctggtattaggcgactcccagttggtcgttaaccaggtctccaaggagtaccagtgctctgacccgcagatggacgcttacgtgcgccaggtgcagcgtatggagcaccatttcgacgggatagagcttcggcacgtgcccagacgggataacgcggtcgccgacgaactctcaaggctcgcttcctcgcgagcccagaccccaccgggcgcctttgaagaaaggcttgcccagccgtcggtgcgacccgaccccctaggggagacggacgcgcctgaatggcccccgaggcccgtcggagtccaggcctcgggacccgaggggagcgcttccagctcccctagattgattgcttggatcactgagatccaggcatacctcgcagataagactctacccgaggaccgcgaagggagtgaacgcgtccggcgcatctccaagcgctacgtgctggtgaaggggaccctctatcggcgcacggctaacggagtcctcctgaagtgcattcctcgggaacaaggcgttgagcttctcgccgatgtccatgaaggcgagtgcggagcccactccgcctcacgcaccttggttggcaaggcctttcgccagggtttctattggccgacggctctcaacgatgcggtcgacctggtccggcggtgcagggcgtgctagttccacgccaagcaaacccatcagccggcccaggccctgcagaccatacctctttcatggccgtttgctgtctgggggctcgatatcctgggtccattcaggcgggccccgggcgggttcgagtatctgtatgtcgctgtcgacaagttcactaagtggcccgaggcttatccggtcatcaagatcgataggcactccgcgctcaaattcatcaggggcatcactgttcggttcggggtgcctaaccgtatcattacggataacggcacccagttcactagtgagctctttggtgactactgcgaagacatgggcatcaagctctacttcgcctcccccgcccaccccagaagcaatggccaagtggagcgcgccaatgcggaaatcctcaagggcctcaaaaccaagaccttcaacatcctcaagaagcacggcgactcgtggatcgaggagctgccagcggtgctctgggcgaaccgaaccacgccaagccgagcaaccggggaaacgcctttcttcctcgtctacggcgcgaaggcggtcctcccatctgagctcaccctgaggtcccctcgggtcaccatgtattgcgaggctgatcaaggtcagcttcgccgagatgacctcgactacctggaagagcgaaggcggcgcgtggcccttcgagccgcgcgctaccagcagagcctgcggcgctaccatcagcgccacgtccgggcccgatcactctgcgtcgacgacctcgtcctacgccgcgtccaaacgcgtgctggactgagcaagctctcaccaatgtgggagggtccgtatcgagtgatcggcgtcccccggccgggctccgttcggctggccacgggcgacggcacagagctgcctaacccgtggaacatcgagcaccttcatcgcttctacccctagtgggggtcgggtgtcatgtctcgggctcgggccaaccccgcacccccccctcgggcgtacagggctggccgggggctaccacatgcatatacttatcttttttctcttccgtatttcaataaaagcattttcgatttcctaaggactgtgtctgtgctattgtttccttttgaagaatcttggcttgaattagcacgctcgtgctcgatcctgctctcggtggcccgggccggctaaaatcgccaaaaggggcccagaaccgagccgtgccccggggcgtggtgaactccgggggggaatcggcaaaggcccacaatcgggtcatccataaccctcggtcaccacgctcccggcctggccagtctcgacacgtggatctccccaggcactagccccgacccgcgccgcttggggttgggacctgggcacgagccctcgttcaagccaagacacagaaggaccgtggcacagaccatcctcgtatcatacacacaacaaacataactaacgtagaaatttcctctttatttgattacagatttaattacagattaagtcagtctatacaagaagggggccctaaggcctcggaagaagaaggaaaagtcgttaagattcgcgggggcctgggggctcactccgacgcacccgggtcgccggcctcgtcgtcgccgtcgtccgcgccgtcatcaccgccctcctcgtcggagtcgggcgcgaacgcgagtcgaggggccgtaccctcgaagctgtggacgatgtggttggcggcgtcccggacctgcgcgcgcgcgcctcctcggttccgggagggaactcctccagcgctgcccacggagagaagtcagggtccctggcctggtagctcgccaatacgagctccaccgccccccgggcgaggtccctcgaggatgacttgatcatctcctcgagctcctcggggagccgccagaggaccccggccatctctgagaggcgctgggcgaggcccccctggttggcggcgtacttcgcgcaccgcccgccccagaggcccgcctgccgcccggcgcggtctagacgagagacggcgtcccgaagcatgccgggccctacctcgttcgccaaacggagggcctcaacctccccggtggacgagtccagtgcgccttgcagcccggcgatggtgtgttcggcggctgcgaggcgggcggctaggtcgctgtcgcccgcggcagccccgccgctgtgcgctctcgcgttcagctccttcgctcgcgcctcgagctcagcggcccgctgatccagtgcggccctctcggcgcgggcgccttccagatcgcggcgcgcctgctccacccgcgctgcctcgcggagggacaggctgtccgctagccgccgcgccgcggcctcggcctcctcgagagctcgctcccgctcggtgagcgcgtcctcgcggaagcggagtgcggactcctcttcggcgcaggcggcctcgtgcgccgccagtgttgcctcccgggtggcgacggcggcctcgcggtccgcaaggtctttctccttcgcgtccagggcgcgggcgcgctcctccagcgccgtggcgcgagcctcaagggcctcttcgcgctggcgggacgccgcctcgttctccgccgcccgccgctcccaggcagcggcggcgtcgaggactccccgggcggcgtcgcgcttcttctctagctccgccgtccggctcacgtattggaggcggaggtcgtcccgcgcctcgtcgagcacggcggcggcgatgagagcggtctcccgctcctcctccacctccctggcgatctccgccaggcccctacgacgggcctcaagctctgaggcgtgccggcggtgtgccttgcggcccgcctccaccatggcctcgaccgagcgccgcccctcctcgacgcacgcccacgccgcgtcgagctccgcccgctctgcctgcaggacctccatctgggcacttagcccgtccagcaccgtggtgttcacggcggccaaggcctgcaggaggggctccgcgctcagtggggcagcggaaggtagaggggagagccgcctcggtgtgggtgccgcgcggctcggcccgccgatcgacgtgccggactcgggggcgtcccccgaagctggctcctcccgagcatcgcccgaggggtcaggcccgagcggcgcgctcgcggcctcgtcgtgggtggcctcggaagtcgtcgtcgcctcgggcggagtcgggtcgggggtttggcaggccgcctggcgtgcgcgcgccgcctcctcctcccgggcggactccccggcccggcggagtctggcctcctcccgagcggcctccttagcctgacgaacccggacggcctcctgggctgcctcctcggcttcccggaggtggtctgcggcttctcgccggtcagcttcgcgcctccgggcctccgcggtcgccgtctcctcggcctcggaccggccggacttggaatggcgggggggggggggggcgatgggatctcgctgaggcagaagaaaaaccagaaggcaaaaagaaacgggtgagtgaaaactcgccttgggagatggaagaacgaatatggccgcgatgggcgcgggaacgaacctgcgaggaggtcagctaaacgaccaccttgggggcgagatgaggtcccccccggcatggctcggtcccccccatcttgcggagccgcttcttctttcgctccccctcgggctgcggcgacggcgcggcaccctccgggcgcctgctgctggcacgcaccgccccgccccctcggggaggagatgggggggcgtgccctccagcttcctcttcccccgggcgtcggcagggcggctgccccccgggcccccgtcgcgaggcccagaagcacgaccccttcccggggtagattgttcccccctacggctcccgcccgcgccatcgtggcctcggagggcccgctcccccgacgccccgaccgtctgcatgatggtcaggatgctggcgcgatctggatcgctgtagagggggaggataccttgggggataagggatgcctccacggagctgagattcagcacccgttggaccactatcctgaagtcctcggagtcccagtcccattggcgcccctggtgggtcctcatgatgtcctcgggcccggtgtactcccaggcgccccgggcgcgccgctggagcggcgcgatccggcgacgaaggtagtcgccgaacaccatggcccccgtgagcccctgggatcgcagacccgccaggcggtcgaaaacggcgtcgtagccgtctcccagatctaccgtcgcccgccagctggaggcctgcgccgggggctggctcggaagtcggaggcgcgcttcgtcggcgaggggggtgtagaaccaatcgcacttccagtcgtcccacttcttggggaggacgcagggaatgtagcgttgcagcacctgcccccgcggttggaagtagcagccaccgactaccgtcggcggcgacaccggctgtacggtgaagaaccaccggaacagctggagagatgggcgcaccccgatgaacatctcgcacaggtgcgcgaagatggccaacgtcattatcgcgttgggggtgaggtgcgccatctggagatcataaaactccagaacatccatgaagaaattagagaatggcgggaccagccccgccattgcgaaagagaggaagaagacggaccgccccgggtagtgtggcgccgggcgtccctcgcccagctcgaccacctcccggccggtggcagattccggcatgaattggcgcggcagcccggcctgcctctcgctcacgatgcaggaaggcggcagcacgctaccgtcaagcagtgcggagccccgtgccatgacgccggcggaggaggagcttgagagcgagtgagtgcggcaagggtagggcacaggaaacgaagagttagagctcaaatggcggaggcaaggggaagaatggcgagaggaaggaaacgaatctcttcctcggcgtctttatacccttgccaacgctattcccggctcctcgtttcccgcgcctactacctcgccccctcgtttctcgcgcccacgcctccactaacccaactcgtccgtttgcggcgcacgaggcagatgtgcggccgtagcagttgagatgggacagatcgtgcacgcattaatcgcgctcgccaaacgcgaagatcgccatcatcatgtctccaggcgaaacgaaccggctcgtcccgattcgcgcgctgctcgagtaatgtagcggtcttgaagagaccacttattattgtcgatcggttttcccttgccgatgtgcgcgatttgcgaccgctgggtttctgcccgcctgaagagaccggccccacctgtcaccagacctaaggagtggcgtcacgaccgagcgtttccctccaggggggcgatcgccctggcgtaacgccgggggctactgtcggtgacatgggaccgggggtatcatgactagaggattgggcagccgcggtcacccacgtggcccgaccccctcgggggggtcgggcccgagagtgacgtggccacccctccctctgtctccccgaggggtcgggccgctcccgtttcggccccgagggctggggcgccccgaccccctgtgggattggcaccacgtgtgtgggttaggtgagcacagcggcgctcacctaaccgcatttactgcgggttggacgagcgcgccacgccgcatttaatgcggcgcagcgcacgcttatccggtccgtgaccggtcgcagtgtgtgaccggtcacagaccggtcagatcgcgggttaggtggcaacaggcggcctgtcacacgcctcgccccgtcccgtcggaatgatgagagcctccaggcgctcgtccctagccggagccggcgtgctaacccctggagttggtatgtcagtcccggccagatacattccaggcttcatcgcaaccattgcaaggaagtcattgtatgaagaagggcagacgtgcagcatgctaaactgacgtgcggtggacaagaatgaccggtttgtgactggtctgacgccggtcacgtcattggcaggcaaccatgctcccacgttgcatctgctttcagcggagtggaggtaggtatgacccatcccatcggagggtcatccggacagcggccatcgcaaatcttcgcccattaatgaaggaatgacagggttgtcccctgtgtcgggcgagtgacggcgctgagcctcactgaaggacaagctgtgatttagtttccgggcgaaggcgcgaaccaagttttggtcaagatagggtgggtccccatcctaaagaagagtaggtaggagtggtgcatgtggtatccccttgagatataaaaggaggaccttgcccaccgaatgggggtttggttgattcgaactccggccacttggttccagagcctgaactctctctcgctctcgagctctctgtaactccttcatacacagatccaccaaaacacaggagtagggtattacgcttctcagcggcccgaacctgtctacgtcgcccgtgtcttgcgcgattcttctcgctgacatcctcagatcgacgagggcgaagaacctcacttagcgcccccggccgaaccggcaaaggggggcctgcgcggtctcccggtaaggagccccaagctccgtcaactgtagtagtcaattagacgtggttgtagctaggagggtggtagtggtggcgagatggacctggggagggcagtagtggtgacgaaccgaagtcatggaaggcggtcccccccggagcaattaggcaagcccaacgggagaggacattgacaccgtaccaaagctccgccctctcctgccactcccccatcggtctgtagtgcgaagtgcacgcgtcctcgaagccaactaaagacggtgctggtgggcaccctcacgaatcccaaccccactcttcctcaggttcgagacggaaggaagcagcacggagatggagctcctaggctcaagacgagaggacaacagtcgccgtttgttagggatgacatgcccctccccactgttcgtcttctctcacccttcctcggctccgcctcaccactatcgccacccttcccgggctccatttcttttggaaggtgatagaggaggaacatagagagagagagtggaggtgaaaaagaagatgagatgagtaggaagtcgctgacatgtgaattccacctgttgacctatcgagtcaacctaccatgtcaacagaaaaaccgtttcccgcaccaccaaggatgcgaagtagacttatttttcaccacactacaaagctgagtttgaaactgacctcaaaagtgaatgtacatgcgtgtgcggggtcgcatgttcagacagccaggcctaattcccggcccaagttccggcccatccccagttcactccgatgccagccattatggcgggatgcgtgaaataccaaaatatttttttcccatctccctcgcgagggttcaaactcctcccccaaaatccaatccccaatccgcgccgcccccattcgtctccccttcttttcaaatcccctctcctctcctctctcctcgccgccaccgcctacctacctccgccgcaggaagcttccagaaggttccgggaggccgcggcggagaggcttcaggtgagctctcccctttgccttcctctccagtctccatccggtcgagatttgacccctcgctgccgagcccaccgacgctcgccgccgtcgagatcccagctgctcgctcgcctcctgggccgcccagccgctggatcggggtctttgctgttgatttttcttttcatgccaaatgcgggggccatggttagggtctagtgcccaatggcggcgcgccgcggtttgattcgagggcactgcactgctgcgagttgcgcagctcagatccaatcctctcacttgcttgggatttttatgaactagatccatacccaacctgctagtgcaactgctagtggatagtaacaaatttgctctaacttaaacggttttttttttttggtcacatggttcttcctttaggggtacaggttgagggagaggaaggtatggtttggtgagtcacaggaagggatgcggagctagaagattggaggctacaatggctcaagccgctgttcaatcttctctgaatggtgacttgttgattgggagggccgcgggagttccgaggatgaagaggaagaccccctctgaactcagagtaatttgcctttaacctttatatgtgtcaactatgccttctttattttcaccatgatgtgatattagatgagatatttggtgaaaatgtgtgtgcggtttcaagagatttccatttgataaaaaagtattctctaatactgttctgttccagataccaagaatgcacattaactatactttgtataagcaaacctgcaatatttaaggacaattcatatccttgcaactttccatggtgcagccctgatgcaatgagcatgatatgttatgccatatgaaaagactgacgaagaccattcccaacgcatctcaaaaaattactatatcattttactgcatcaagtgatatttgttttacttagctaatgctagagaagagtaataacatagtcacttcaaactgcatttaggataacttctgttatatatgcatgtttcctttccatggctgaattgttaatgacaattagttcaatggaggccagtgtaagcacacacattacttattgctgctctcttgagtgctgctttaggcataaaacagtacagctgcttatgaatgctgaaaatgttccgataattacttattgcagggagagcaattgaagcggcgtgcttctgacaagcctgctaatgaccaatcactccattctgcggcatttgataggtagctaatctgcaatctgttttagtgatgttccactttgcttgtatgaaaaacttaataattctattatcgcggtgtagggcaagcaatgggtttcggaacccagagcaatcaaaaatatcgaaatacatcagtactcgtgttacagaggtgttcccagtaaaaaaatctagaaaccttggaaaggaaaacttcaaggtcagacattgtgacatcattcacttttatggaccttaaattgttcagtgctaaatgccacatcttgaaactaggatgctttgcagaataatgagaaggctcccaagtctgctgatgctgtgacaacttctgattttgcatcaccttcactcccatggtaattatttgactggataattttatgtacttgatgttttgcatcgtgtttatgttcttatgtggattgtttttgcgaaaattcagtggttatggtgactctgctaagttggactctgctgttccatcacatactgaggcagctaaaccaagttttaggaaagttgagaaatgcagtgaaaatgctttgcggagtgtatctgagctccatattggtgatgagcagcagtctggcactaataaatttgatatggtaaggagcaccaatctatctagatcatcttagtatatgttgtttgtgtgctaatatttctaatgctttttgataggaaaaagtactcaaaggttttggagctcgtgatgcttttgtggcctctaagctcactgacccaaacatacaagttggtgttgtaccctcgaaatctttggatttgtgcccttctgagatcgctgttccaggaaaaagagctctttggatctcaccctgaagactactttgcaatttgtttcatcatcttctgtaaagtggtgggtattttactctttcttgccctttcagcttgtcagttggatgacatatccatctcaaagtaacagttgtctgtttgcttgaattggtagcatatcttaaacctgtaactataacctccttgaaaacaggtttcattttaggtcttaaacatggcatgctaatatactcatagaacaaggaataacaacttagttttccgcgcacataaatctaacaccagtattatatttaacccaaaagaaagatgacaggcatttgcaaaattgaaattatatatatattttttaaaaagcatctggtttgaaatggcagagtatttggcaaatggttatgcaccattataatacctcaaataatattacatctatagtagtcccaatagatggcatctacgaattaggggaatggaaatcaaaacttctgcttttggagtgttatcatgaaatgtggctgttttcatttgaggttttctgcatagaagtgaaaaattctcctgtcaataactcttgtatgttacaggtgtcacaagataagtacaagttttggtaggagcagcattgtaggacccattgcccaaagttatcatcatgggtgtcaaaattcaggatgctcaaggcctgagagaaacaaggaattcttgttctcaaaggcactacaatcatgggtatatccacaatccttgttgcctgcttccatcatatctgcaatggtatcatcaactgtacgaggaggtaatatcaaaacctgaaacaatcctgtaatgttttgtggatgtaactaaaatgatatattcctctggtcatgtagaaagtgattttctcctcaaaaggcatcaggactgggaagattcatttcagaatctttactacatgctccggaagaatctgttgaatattttttatggtattttcatgctccttgaatccaactgattcatagtaagctacatagttggaaaaatgtaatattatggcatttgtttagtgtttcacatggtctgcttgcttttgtgctgttgtgcactaaaaaaattgctgctgcaaggtttttatagcaaaaagtttagttggacacgatagttatacaataagtaaaaacaccatctatctaaggaaaactatgaatttaaatttagtgccaacacatgtgccttttgctcaaggcctcatttgcagttttcaaatatgagatgttttattagactatctctgaattactcattaattacaatgaacatttgctttattgttctagtttatacgccacaatttgttgctctcttcatcggtggaaattgtttggacaagaagcagacctgtaatgcgtacctatcacaatcaacacgtgggatacgatcattgctgcgaagacatgtgagttctttctgtttctctatgcaattacaattcgcaatgcacacattctcctcttttttttttcat

SEQ ID NO: 22034 - DNA, 20637 bp, Oryza sativa
tagactttttgttccactgcttttgttgtggcgggtaaacgggcactcccgcgggaaatgggcatgggcaaccattcttacccatcatgtagtatgggtaggcactacccgtgcccgtcgcgcccgattgccatccctagcggccagtgagcttgtccacgtgaggatggtgggaggtcggcgacgaaggggcttcggttgtccgtagcaatggaggagaggagtaggaaagtgagggagccagtcgtccacagcggcgacgagaaggaatacaccttagatttgagatgggatgtaggccaatcatggaagaagctagttgcagcccccttcgaacctgctcacgcaccgtcctccgtgagactagggctcactcacacgagaagagagggtagcatgggtggactcgggaggaaaggagccccatcctgaggaggcgaagagatggagggggggggagtccagcggtggtggtggtccttccttaaattgcttcctcatcaccactccaggcgtcctgtcccgtccacgccatgcgcgcgcgcggttaacctactcatcggcaacgcgcgtacaaggaggtgaagtggaggaggggaggagtctggtgatggcggagactctcctcgccctgagtaacgagggggagagatagagaaagaaaaaggagggagagagaggagtgagagaagaggaaaggagggtgaggatgatacgtcgggcccatttttgtttttgtcatgtaaacgcctagccaacacaagtggaccaggtcaatttgccacgtccgtgaaacccaaaagacctaatttaaccatgttttgcaagttggtgtttaagatttttggtattgcagtttagggatgccaattaaatccggcgtaaagatgagggaaggtaagtggacttattcgcagataaaaaggcctactaagcccaccaaatttaatgggcagcacgtaactcgcattttatttccggggcaattgctcaaatgccactagggtttaccgtatttgtcattctgccactggtttttcatcaattggtagaatgccactggtttcacagttgggcacgccaaaatgacactctgtcgttaagacggttagtctacacgttagattggagcaattaccagtctgcccttattacggatttttgtgtttctttgccaaccgatggtagttggatataaatgacgcaagcttttgtgaagaatggtattatttcgatatttttttcctattatatttttgaggttgcaggacatttattttatttttttatatgcataattgtaccatggtccttacgttagatttattttgtattttttaacaggatgggtcattttgtttatatttaattaatgaataagatttttcaacaaatatgattctattagcactagctcaaatgtaagcgagcaatccataaacatacatgaatcaaacatcatcaacttgcacataggcacacaactggtttcatcagaacatagccaccatggttcaagtgacttagacattacataacaaaagcacatttttgttccagtacttaaagaacataccatggttcaagcgactgagacattaaataacaaaagcacattttgttccagtacttaagaacaaagggctccaagaacaaaacacagattagtttcatagactatcatagagcatcatcatctactgccacttttgagttccatcagattggaagacaacactagatggaatctggagttggtttgttccttccaacctttcttggcctgggaatgtttggagttggcatagcactgttcaaggtttgcaaacaaaagactaattagcactagagtaattagcacataagatgtagttagtatttttagtttgaataaatttaaactaacctagaagatgtagtgcaactgtcctttttagcccttcctgccttttttggtggcatttggacagtgatggaagggtcattgcttccctgccctgaatccatttcaggggttgagttgctcttagtcctgcatgtaataaatcattagactgaaatgaatacacttatgatgtacaaagaaatgaaagtggcatacattgtattccttttcttctttgttgcaacctctcctccctggcagtttttatctctatgaccaaatcctccacattctttgcatttgtgctttgtattttgtccagattcatctgaagctttgattctgtttttccttggccttccacgcttcctccttagtctaggtttttgtaacttaaagccaggatccacaaattcccattggtgtttccctattatgggcctaaacactacagagtatgctagctgcaacttctctacagagaagtacttatccacatatgtgtgcattgatgcacctctgattgaagtaatgaaagcaatagcatgtgtacaaggtttgccacacatttgccatactctgcagctacatgtttggctatctaagtctactgcataccttagttccataccttggttatcagggatagtcacttcagctgtagttagtgtgaccctactaactttatgtttctttagccctatgctctgtttattgagatctttagtcacacttggcagtatgactccttccatcttacttgcaatttctgctctatgacagaacttggacactatcttttgcctaatcttatcgatcatgtctacaatctgcacatctttcaagtcctttatccaattattgaaggattctgacaagttattgttgatatagtccaccttggacaattctgagaatttcgctctactccacaacatagggtggttgtcattgaggaattggattgcctgtggtgattgcatcttgatggcatcataatgcttgttgaatccagccattgtataactcttagcagctggctacatgttctccgcatatactgctccatggaacttctttttgaagttcttccaaaggtgcctaaaacactccctatgctcagctatggggtagacacttctcactgcattttccaagcccttgcatgcatctgagctaatgactaaacctgaaggatggccaatgtgtcacgcccggaaattcactagtaatttccgaacttatttgtgcataaaatcctcgtccaggaatcagccgaggtacacaaactgacaatttaatatacaaatccatcataataataacgttacacacttacaaaagaaaagaaaacagcagcggaataacggtctagcgatggcttcagctccactcccacaggcagctcaactggggtataagccaaacgtcttctccttctggatcctttttcttcaactgaggttgattgattattgcaagaatgagcatatgacatactcaacaagccacacagcaaaaatgcaagtgcacaaggataccaaaggatggcataatataggctcatttgcaaaagcagcatttagcaaaacatttaagagaagtaaaacagtggagtaattaatcagaaattttaatcaacactgaacaacacacccatgctgcacaggcccaaccatcctgaacaaccatacccggctgtacagatctaactccaaaccaggagctaagcaaattattaccaggtataacatccataattattataagaggtgtgagactaatcacgaaaaacattgctcaacccgcccataaccgcgggcacggctattcgaatagttttactctggccagaggtgtaccactgtacccacaagacacagccccacaacatgtcaccatgtgcctcaataccaccacggtacctcggaaaggagctgtgacagtacccctcgcacaacacaatccaccacagtgcaccgttcccggatcataatcacccccttataaacaaggtatggactccccagcgacccccgtgggcttatctccgccacttctcagtctggtgctccgcaatgaaccatgctatacaaaaggtaaagccgttgcccacgctggcttatggttggcacggttaatgtttcacaacagtagctcgcgaaccggtccttaattgccatgagcacgaccttcaaaaccatgtgctcacaacccaccattaatcatattttagttggcaagtaattaagtaaccaatcacgattgaccatcgtgaactatcattaagccatcattaaataatagtgagtcataagttatcccaatagtgtgctaatgtttctaagcatggctaagcaattatatctaatatctagttgaaccaatatatataaagctcaactagtccaattataatcacccaaggtatcaaggaataaagtaatcaagaacaaaagggctataacaaacaataggttatttccacccaatgacattcgaaaataaatgcaatagttgaatagaaacaatagctttaaatgggatcaacatgctcaaagggttgtttgggatctgtgtgacttgccttgctggccttggaactcttcaaattcttctcctgcgaaaacggactctccggaaacgtcggaatctaaacagaaaagagcaaaaacaccaaaacagcacataaacaagcatgaacagtacaggtggatatttttaacatgtagatctcaattttagaaaaatttagagacttgaaccaactaaatccgagctaagatgaattagttatgaattttcaaagattaaatcggattaaatcatttatttagattttaattgaattatgatgcaataatgaattatttttgaaaaggaaaagggaattattgcgtcagcggctagggtttgcggtggaccgggtgcacggcggcggttcacgggtttggacggccgagatcgatccatccaaaacggacggccgagattgatcgggtctacggcggctcacgggagacgacgacgatgacgccagcgatgacgtcaccaccggcggcggctcgggcgcgcatgctcgccggcgaacgacggcgcggcggcgcgaacggagagcacctacgggtagcggatggcacggcgaactcaccggtgaccaaagcaacggcggaagatcaacggacggcgacagcgtcgaggaagaaacggcggcgaccttcggcttgacgacgacggcgaggctccggcggtctacagcaacaatgaaggggcggacgaggacggcgacgcgacggcgaccacgacggcggccttcccgagcgacggcgacgactggagcgacggcgacgcacggctggagcggcggcgctaggctacacggagctagggctctaccggcgacgagaggcgaaggcgagggtggcggcgggtagcggcgggcttgggggtccttttataggggctaggaggcggcggcgaaggcccacggcgaccggcgacggcgaaggaaggtctagggttcggggagagagacgaatccgattcgagatcgaatccacggatttccaaacgattttagccgacgattccaaaagagaaagggtagaaggggtcccggggatcaattcccctctattgatttcaccggaaacggaaaggcgcggctgaatttggaaggagacgacgacgacgcggcgctagggttcgggtggcggccggccggaggaagacgaagactgacaggtgggccccacctgtcagcgagcgggagcgcgcgcgcgggcggcggctcggctgcgggccgactttggccagggagagagagagagagcggttttgggccgactttcggcccaaagccaaaagagaacttttaaaaccttttccaatttaaattattcatgaaatgcaattccatttattaaaaatacttccttagctcaaataaatcccagaaaaatctaggaattatagaattaagcaaagtatttaatgaaattttatctggccctattttatattgggatttattatttaaaattagatcttttcaaggcttttaaaatgaattctaataataatttattaaataatttataaatcctaaaacaaaaaaaatcaggatgtgacacaatggctgattgaaggttttgaacaaaccaagtccaactttctatggattctgtctctatgacaccgaaagcaaccgggaacatccaattatttccatcaatggctacagctgcagcaagctgacctttattttttccaactaaatgtgtactgtccatggcaatatagggcctgcagcccagtaggaacccatcaatacaaggtttgagagctataaataaccttttgaagcacatctgaccattatgctcttcgatatcaatctgaactttacttcctggcgctgacttcaatagctcttccttgaaagtaaacagcaaagcatagctatcatcccatttgccaaacaatttctctagtgccttttctttccctttaaaaaccttgtcatatccaactgtaatgtgatatttccgctctagcctttcctgcaactcctttggccccaagcttggtttctctctaagcatgtcgataactctgtcacatacccaactgcttgaagccatgtcttctcctgacctattaacagatgaacatatatgttcaattttgtttctttttatctgcaaatcaaaatggcaagattaaagatgattgaaaggttcagaacatagcaaaattagattacacaaattcaattacctggcaaatcttggtgcctctcttgcatgaagcatgaatcctccacttgcaattctcttcttttgccctcttgcaaacaagaatcaaccttgttttgtccttcttcttagtaaaaaagccataagctttcagaactgcatggtgtgtaaaagcttttttgcattgattgacaatttggaaaaatgtaccctcatcaacacatggtttgtcaatatcatgtgtgtaaactacctcatcatcagtatcagagtcaacatcatcatttacttcagagtcctcagaacaactctctggttcatattcacaatctgagtcagatgaagaagaatcatcggcacttgtgtagctactgttactatccacagctaatgaatcatcgctagaccctaaggattcagcatctaaccctgaatttttagtgcccaagtctacatcaaccaacccatctttgacattagctgcagtctttttcttgcttgcacactttggactctcaagtagtgggcacttatttagtgcacactcattttttgcacactcatttggtgtacactcctgtgttggttgggtctgctcagctagcaaaggaatgcattgaggaggagtacatggtgtccgatcttgtgatttctgattttccaatgtgttttttgaaggtgaaacagcaataggaccctctaaatcatttacttgacaatgcaatcgaagcaaattttgtggtttatgtcgtaccaacaatctccacaaatgcttatctgttcgaacctcaatgtactcctcatcattacaatctggatcaggataccaaaaagaaatcaactgcctagaaccccagtctattgactttgctaagtcagcactcaaatccattaaggaataccgatctggattaatataaattggaatttctctgcgatctatgtatctcttcggcttaccatctggcatgctaaagaaagcgcggacgctaaccaaaattttcattaaattgcccctacatagcatggaagaaaacctaatcaaccaacccactggacggaaagaaagcaaatttacaagattagtacctattcggggctacaacttcactcgtttccattctgctcgatgaattcacagctcgatgtcagccctgttcgctaagctttgccgtagcaacttgctcgtcgagacatcgctgtagccggttgggcccctcgtcctccgtcctccaggacctgccacgcttcgacttcaggacgcaaacgcagccgctccgtccgctaggacctgctcgccgagaccccgccgcagccggacgcccaccgggacgctgccgtagccgctccgcccgccaagacccgccgcgctccgctcagctagctggacccactgcgctccgccctccaggacacagctgcagctccctgctcaccggaacccgccgccgacacccatcgggatgccgccgacgcccatggagggatcgatctagggtttaccgaaatgaggggaaatttaacggtcaatagaagttttatagagcagttaacggtcattgacggaacgaaacgacagtggcatctcaaatgaatttttgttcattctagtggcattggagcaattagctccttttcagtgtcatactgccaaatagggcgcccaggagtggcaaaacagcaattgttcctttatttccggcccaattaatatgggatacaccgaggccgcaattcctttccgggccagcatacatgggccgcactgaggctgcattcccgtccaagcccacgtaaaattgctgcggtttcttcggctcgttttcctttttcgtttttgatagtttcagcaagtattcttgagatcagaagagaggcaacaatgattattatacctttggctaaaaaagtgcccgctagaaaattacacaaacagagtttaaaagctagctaaaaaccacagttcgcttcaaaaatagtttttaaggtaaaaaggtggagagactctaccttataaccattaccatattttttttgtttgacgttggttagctcaaaccaacgtcatacatttgtgtaaggaggtagtatatattaatggtgggacagttttacaaagcttcagacaaacataagaagtacagacttcaaaaacaaagtgcaaagtacagaaaggtcttagactcttagttcagctcgatcatccatcatctgatgtgagcgcggtggctgctgtgtttgatgtttgcttcaaaatagctccagaagatgatcgaaagatgaacccatgcattcttttctttttctagttgatgaaaaagcatgcagtgcacttaacaaataattgtttttttatctgacaatgaattatttagtttgtacacaaaagaatattagcaatgcaagtattcagcacactgaaaatgcagagtatatacacaatacactcggaatgcacttgaggattggtcatcccacataatcatcatgtgacaatctccgaaagaacatcaagtgaataatctatgaatgaactgacaatcaagtgataatttttgtggcgcaagataaacaagaagactaaattgttttaaactttttttatataaagtaaaaattccatggtttaaagagtcaacaagcatgaatcaaatatacaagtatgaagatatatcagatttcaactataaattgctatccacatatataacgatgcggcgatcaaaaatttcaattggcaatgatcaaacttcaataggaaccgcgatgctatgcaatcctatatcaaattgaaaccccaaacacgcagtgcaagtatgcaatctttttcttgattacaccctccggccgttcttaaaaaaaaatcaaattctgaacatgtgcttcatagctaggatttttttttcttggacgaatggagtaactatgtagaatccgaataatggtttaccatctcttaccatcgcacaaaatctaccagaatccccataaactttcacaaattaaattaactgttcttttcctttatcttaacatgaaattaactgcgtgtgaatcaacgaataatcgacataacgatgataaatgaattctttcacctgtataatcaaaaccaaaataacaaaagcacaatggaatggagatcatcggcacggcaaagaagaggacacatcaacgatcgagcaggcatcaatctgactccacaattttgttttttccctatcaatttcttttctttcctcccaatcgacaaaatttttggaaagagagaagaacacagccaattgccaaaaaaaattggtcaattgcggctaaattaatcacaagatcgagttatctgtcttctcttttcccaagaaaagggaggagaaaagccaagaaaccaacaaccgtggtgaaggagaagaagaagagggcggcggcggcggcgccgtcgccggcggcgatcacctcctgtcctctcgttgtgaggggctcctccagaagccgccgccgtagaagctcgcccacacctccttctccatgtcaacgaggtgttcggccttgggcgtggccgggaaatcggcgtccaccttcctggccttggcggccgcggcggccagcgacctcggggaggcgatgtccatggcgcccgtctccttcggcttcgtggagcggacgcggcgtcggcgcccaccgcggacggcgcggcggcagagcgcggcgggagcgcggacggccgcgaggacgacgagctcgacgacggcgaaggggaagcagcagaacaccgcggcgcactccgccgccgtcccgcccgccacctccccgcaccgcggctgctgctcccgcgcccgccgccgctcccgctcccgcctcatctccacggccggcgacctcctcaccctcctcgtcgccgacaacccgttccccgccgccgctaacgccgccggagacgccgccaacgcgcggcggtggtggtggtggtggtggtgcacccgcgcgggcatggcgatcggtgccactgcggccatggcgggcggcgggggctgggttgccgttgccctccctccctccctcctcgagattcgtgcggcggaaaaccgacggccgagataggatgcgagagagagaggtgggaaagcggttgcgcgaccgaaccccatatataccatgacgggttcgcgggcccacccggattcctcggcgaggaacacgttaaaccgctcgaccgtttaccggtttgtggggcccacgtgccagtcgcaattacccgggaagcggagggggagactgtaaattcgttaaattatttttctttttcgttttttttttttgtttttgatcggatcgccactagtgcgccacatttttgcatggggcgtttgctattttagtgcgaagaacacggcggcgacgtgcgcgagacgaagccccccgcgggtttgatttgatttgattttgattttgatttgcttcttcttgggcgtctcggaggcgtcgcatcgcgatcgatcatggaggtaaggtgacgagatgggtgttgggtgtttgcgatcgcggggttggtggtggatgcagatgaggtgttcgatgtaacgccgggtggttttgtttggtgcagcagaaggacagcggcggcggcggcggtgggttggcgcggcggttgatgctggatgcgagcgggagggagatggactcgccgcggttcagggcgatcctgcgggcgacgagcgggcggcggaagcgggcgcccgacgtgaagagcttctcgcacgagctcaacattcgcgggccgctcctccacccgctgcagcagcggaagccgcgcgggtgcgtgaacagcccggaggagttcatcggcgccatcaggacaaagttcatcaggctcaaggaggaggtcgacgccgagctcggggtgttcgccggggacctcgtcggcgcgctcgacaaggccgacggggacgaggagcgcgtcgcgctcgaggacctgctcgtcgtcgcgcagcggtgcgccgagatgagccccgaggagctctgggtcaagtgcgagtgcatcgtccagggcctcgacgaccgccgccaggagctcaccgccggcgtcctcaagcaggcgcacacccgcgtcctcttcatcctcacgcgctgcacccgcctcctccagttccgcaaggaaggcggcggatacgtcgccgccgacgacaagcagcacgtcctcagcctgcaccagctcagcgacctcggcctctaccccttcaaggtcgccggcggctccagcgagctcggccgcaagagcacctccagcttgaccgagctcaaggagaggctcatcaggcggaggatgctggagcacaagcaactcaccctcgacttctcggcgggccgtgtcatttcgtcagacaccggcggcgattccccgggcagcggcggcaagatctcatcctggaagaagcttccatcccctgccgagaagaccctgcacaaggttacggaaccgacaacggaggagaagaccacccctacaaagaagaaggccattacgaggaacaaggtcgccgtggatgagatcgtcgagaggattgacgcggctagcattcaccccgacggattgtcatatcttggggactctgctgtgaagctcgaggttccatctgggttcccagaggctcagcagatcatcgtcgacgggaagccgaggatgatatgcaggatctgtgactttgagatccccatggtatgcgcagaagggcacttcatagtgtgcacattagctgatcggtgtgattccaagggcctgaatacggaccagcggctgcagagggttgccgaggtgctcgggagggttttgggttgctttgaatcgaagagcccgcaaactgcagaatgtaatcataatgagactgcaagaggtagcacgtcgagtttaacggaatccgatggatccatggatcatgatattctgtctcatctgttgacagtgccatcgacagagttgttttcagaggtagttgcctcttcttcctcaaacaatagtatccttcgaagaaacaattataactgctctgttttgatcatatggattgtggacattttgctggtgaaattggcagggagcactcacaccagcgtcaggcagcatgccacagtcaccattgctgacaccaagaactagccacgcagagtcacagctgactaaacacaaggcattcgtggaactagagaactttcagcaggtttgtgcatatcaacttaatactgatccttgtttcattaaattctgttcttgtcagaatgttagttggaacattattcttttgaggttatgttaaattttgcttcttcagtgatctagactggtagtttaccatactggcaggttgaaagcttaatgactattgctagaggcatcgagagaataaaaaactctgagtacaactcgcttgaggacttgagctcttatctagaagatctaaatgctgtcattgacacaagaaaagtggatgcccttgttgtggagacatttggaagaaggatagctaaattactacagtaagtgcaatgccagtttaattgttttacatgtgtttgtgccccttagcatcttcagatttatttgtccttagcagcgatatacgcattgctgtttcattactcaaattacactacctgaaaatatagccctgagtgtctcgttaacattatggcttctcagggagaaatttattcaactatgcggacaaatagaggactcaaacactgattcattaggttcaatagacgaagatggtcctatggagagtagtgtaagctcgagaacaagccagatgaatggtaaattcaaagatcgtacctcaattgaggactttgaaattataaagccaatcagccgtggtgcatttgggcgtgtgtttcttgcaaagaaaagggtaacaggagacctttttgccatcaaggtaatggtcattacactgggccttcagattcttatttgtgccaatgtagtagtgtccttctggatcaagtgcaataagagtataaacttaaaaataatcaattttggctttttaattctccttctgttgagaaaaggaaagtgtttgagatccttttagtgtgaattttgaattttgatgaaactaaatggatgctttgcttcaagattattagagaactcttcaaatgaatagactaggataattcgccggcccggcgaaaaagaatagactaggataaaaaaaatatagcacttacataattgaattgctagcttcagtggtggcttttatcctgatggtttcatcttgaatccaggtgctcaaaaaggctgatatgatccgcaagaatgcagtggaaagcatcttggcagaacgtgatatcttaatatcagctcgcaacccatttgtggtaagtacttcgaatgttaagtaaaatgaaatattggatttcatttaacttcaatctgtaatggacaggttcgatttttctactccttcacatgtagggaaaacctttatcttgttatggagtacttgaatggaggagatctgtattccctcttgagaaacctaggttgtttagatgaagatatggcaaggacgtatatggctgaacttgtaagttatgagtgtcttttatttcctgaaagtattttacaaacaactaaatcagaaaggtccatccttagccattcctttattttaaaagttttaatcgtaggcatttttatttctatctgtaggttcttgctttggagtatctgcattctatgaatgtgattcatcgtgatttgaagcccgataaccttttgatctcccgtgatggccatataaaggtaatactaccttcttatttcttttctttcaatacctattacctattaggttcttatgtgtttagtgttgttatcggtgactgatgattagattgtctgaggaaaattgttgctgtactttcaagtcttataagtatttttttcatgcaatagaatgaaggcggttgtctatttccgtgcagttgactgattttgggctatcaaaagttggtcttatcaatagcaccgatgatttgtctggtccagatgtcagcaatgttcttgttggtgatcatcaacctgcagatgcagaacaacgtgcacaaaagcgagagcaaaggcaaaaacaggcagctgtgggtactccagactatttggcccctgagatactgctagggatgacccatggtctgtttgcatctttttcgtagaacttacatttactttaaaatgtttaagtcagtactttagggtgttgaatttattacatataacttatgtttaccttcatcgaaaagtgaaaatgcatcttctattaaaatatatggcactcttacatgcaggtccaactgcagattggtggtcagttggcgtcattctctttgagcttcttgtgggaattcctccattcaacgctgagcatccgcaggtagtcttctatcctctctaaggctctgttctatttcttcaattccaacttcaacttcctcgttaaatgatgtatttttgacaaaaagtttctatatagaagttgttttaaaaagcaaataaatccattttttaattttttacaataattaatacttaattaattaggtgctaatgagctttcttgttttgagtgcgccaaaaatatctctcccaagtcagggaacgaacggggcatgtttgataatatagtgacaagctggctctaactaatttgttggtactactaacatgttggttgtctgttggaaccattctaagagagagaatttatttactgaagaagacgaatattagttagagccagtttgtcatttaattactccaatgtctcgatgcttatggtctatcaaaggtcttccagcagtaacataacaatgttgtttatttacagataatatttgataatataatgaatcgggaaataccttggccacaagtaccagaggaactgagtttcgaagcatatgacttgattgacaagtaagtcagaaaattattattttggaaataattgctatcaaccgtttatttctgttcatcggtatttcttggtgaatctgtagtgttaaatgtccaacaaatctgcattctacagatgctattttaactcagttaactttcatgtcaggttgctaattgaaaaccctgtacaaagattaggagcaactggtgctggagaggtactcgttttcctttttcgtattccagttatacctcttatgtacacaccactaactgacatatgctattagagcaggtaaaggctcatcctttcttcaaagatataaattgggatatgattgccagacaacaggttagaagctaaactaatgggcagtctgaaaaacaggaacctcaaaaaactgcctccaaagaagtttctgaactggattcaatttttgtaggctgcatttattccttctacagatgatgaatatgatacaagttattttgcctgtcgtcacacatgggacgaccaagtgaatgtagcctctaacgactacgacgatagaagtgaaactagtagcatgagttgtggcagtagtccacacagttgtgattatgaggaagatgtatgctagatcaatccctctaaaatcccccttctgatttagacatccaaatcattatgtagcccacacctcatacctctaaccttttctaaaaaacattaacaggcggatgaatttggtagcatggaagaattcggagctccatcactgtcagtgaaatattctttcagcaatttctcattcaaggtaaccctcacctgaagttcccacgatatttgaatctttttctcggttagtaagttttttttttcttttcctttgtaaacagaacatttctcagttagcatccatgaactatgatctgatcacaaagcataacgaggatcccctacagtcttcaaaatcttgagagtatgcactccctcgacatggtaatgtctcattgttgaactggtgtatcgtccttgataccttgatcctgtgtacagggcctgcaaatcaagctactaaacttaccatcttgggtcttgtcaggcaggctgcaggaaggagcttcctcaacagtgaactcccacagttttgctacaatggtttggtcgatgacaaattgataataggaatttcctcggcaagactggttcaagtaattttttttctcttcagtttctctccagtgagcaaagaggtgcatttcttcatggcaaatgcaatctgtaatcattgaagaagaatggataggtagcacaggaatcataggaaagaatggcacccactgttttggcaaaataggtatacctttctcaaaacttgtgagtggtgcaagattaagttgtttggtactttggtgcagtgtttttttgcatcaatagtagaaaaaaaagtttatagcatattttaccctattgtatttattctcatatttattttattgctgttgagacccattactagctgaatgatcaatgccctggtttagtccaatatatatgccaaaaatgcttgctgtgattggcaaatggaagttgcagatcttactctcaaggatgaattcagaataggaaaatactttacagctaattaccagtctttcacctacaccatccatgatcaaccacaaaagaagagaatccaaacgagccaggaaatcaccacacaccacaagaattaatctctatacgcacatgtcgcaaataccacaagctcagacacacagagagtccccaagaatccaacctctccaggatcagagacatcgcagatcaatcgaagtaattaattaactaatgtaaactgaatcgaaacataatccttacaggtaataataaattaactaaaaccaaaaccgatcaaattcgaagctgggagttgcttattggtttattgattattatcgcagtattctaaactcttactgctagctagaacgaaagctaagatacaaacagctagtagtagtgatcacatctagctgccactgccactgcaaactctgcaagcttcgtcttcttcctgcaaatccgaggctagctagctagctgggtgtgattgcatgacgcgtcgaggcctagcgaaaggcctagccggtggtgaggaggaggaggagttgcccatcgccggtgaggggcggccggcgacgtaccggcggcggtactcgtcgccgtcagacgacggctccaccacgtcggcggcgaaccgcaccctcctcgtcctctcccgcggccgctgcggcttctcctgctcctgctgctcctgctgctgctgcgctcgcgctaagaatgaaaaagaagttgaatgctagtatcgatttcgattggtctatggtgattttggttgtagttcgatcgatcgatctcaccgatggagagcttgaggtcggcgaggaagcggcggtggagggagtaggagatgatgatgatgccggtggacgcgagagccaaggcgatgagccccatcgagccgccactgccgccgccgcggtccatgcaacgccgccctccgacgagtgtgggcgatggctgctgctgctgctgcttgagcatggccgatgggggaggaatggagatgggtataagaggaggaggcgaagaggaagaagacgaggagggaaaagccgtttttagaaggaaacacacatggggaatgcagcataaaaacattctcttttagaaaaaaagagataaaaggcatgctggcatggaacaacaatgtatcagtgggcttgattggcacaaccccagctccagctccacctggagctcaaccaaacagtttcagttctatctaaaatgggagtggacctctctcataaaatgaactatagaggtggagctggatttaggcagctccacaactccactctagatccaactcctgaagctaaatttaggagttggagctctaccaaacaagcccatcgtggccgcttagctatgccttctatggtgtcgtccaagtttttaccaatatacacacgacgagcccgggatcggacgaagcgtacgtgatggtttttcggtgtatcgcaccggctggacgacgtgtaaggagatatggtggacatggtgtgcattttgtgtcatcttggtgttattgatgccgacacgaggcagttttggtgaagcgtgaggcttactggtggtgtgtcgacgagcgcgcagaacactgggtgatgatgtgtaagggatacatatgccagctctaacttgtgccggtatctttgttttatcgatgtggatttgagacctcgtgatcttttacaacaacccttttaaagttttcttgagttaatttgcttacgaaatgtgataaccaatgggtatgtagtcatcagataagatagagatgcataattacgtaacaggcaatagtagtattgtagcaagggagaaaacttaccggttgtggtgacatactgaacccatatgctttatatgcttatccagttgtttacttgtttacccagtggaggatggcgtttatttgataggttatcttttttcttgaggcacaaattacatagtttagttcccaaatcagctcagaaaaaaaatgcacgcattaaatcaacaaaaacaaccttctcagaacaaaaatataacagatatacaggggtaacactaacggtataatacatttggaaaaatatgaacttacaagtttttttcctcgataataaacttaagctatgcatatggaatttgtcatggggaatttttaggataaattgttccagatcctctccaggaccaacaccattatcctaggcaatagattcgttaccaatcttaataaaattgagggtacgaacaaaataataaaacaataaatagtaaaggtcacctgaaaactcgataaactatgtaaaaattaagagactaagaacataaacagacaaattagcattgaaattacattaaagggctataattaatatacattgcgtgcatcacacatatgggtaaaccatgcccataggtcttgcaaaaaaggaaaggaaaatcatgtgtgagggataaggtgtaagacccaaatcgtaacttaagtaaaatggattatgcatcaaactgtggtggatgactagtttgatacctcaggatatgtaaacaaatgctttgaacacatagaatttagcaaaacttgaaggagtttgaagcaacatcgtctagaatatatcttttctgcaagaataggtaagaccaaactaaaaagtatcggagtagttttgcaaagttatttttccactgccctctcctaataatcctaacactagcaatagcaatattagatgtgtttactctatttcaatgttttatttgtgattttgtatattacacatatacttgaatagtgattcaagctatatctgagaggaaggaaagataagtatgtaatcataagggttattcgaaagagctagctactgttgtcggtgacatggaaccggggtatcatgactagcggattgggcagccgcggtcacccacgtggcccgaacccctcgggggggtcgggcccgagggtgacgtggccacccctccctctgtctccccgaggggtcgggccgctcccgtttcggccccgagggctggggcgccccgaccccctgtgggattggcaccacgtgtgtgggttaggtgagcacagcggcgctcacctaaccgcatttactgcgggttggacgagcgcgccacgccgcatttaatgcggcgcagcgcacgcttatccggtccgtgaccggtcgcagtgtgtgaccggtcacagaccggtcagatcgcgggttaggtggcaacaggcggcctgtcacacgcctcgccccgtcccgtcggaatgatgagagcctccaggcgctcgtccctagccggagccggcgtgctaacccctggagttggtatgtcagtcccggccagatacattccaggcttcatcgcaaccattgcaaggaagtcattgtatgaagaagggcagacgtgcagcatgctaaactga

SEQ ID NO: 22035 - DNA, 1309 bp, Oryza sativa
aacgagaaccaggaaagccgcacaaggatcgacaacaacatcaaaccatggaagctcatgcgtgctaaaaaccatggtagactatcctgtcctccaaaaaataaagcctgaaaagacaaatatatactgttaggtgggacgcaaatattcaaccattaatcaacatgctgcaggaacaagagtggtacaagggaaatcctacttaccagattgggagaaatgccacgggcaacagctgatccgccgatggtgtattccagtatcaatgcccaaccaatcagccatgcaactctaaaaaaaatataacattggacaatgttaagaacgcccaatcaatggagcaagagagggctattcatgaacaatgtttactctattgtgtaggtaaattacccttcgccaacgcagatgtacgaataatggtaggcacttcctgcagaagggcagcgactagcaagctctgcataacagaaagctgagagtgcagctgccactccagctatcagaaatgaaagtgtcaatgccggcccagcatgctcccgagcaactgttcccacaagaacatatactccagctccaattgttgaaccaacacctgatagatcatgaaaggtttcatgaacaataaattcatagaagctgtataaaatgtggaaagacataattagacttgtggtaattcgttttcaactactttacttcaaatttagcagacatcaagcatgttatttgcttcaataaggtagtaaagtaatatttaggcatctacccacggcccacctacccagcacttacccaacaagattaaggtagaagcaaagcaataattctccaaaacattgcaagaatccatatcgagataaaaccatcattcccataattaaggagatttaccaagtactacctctgtcccaaaatggaagctatttctagctatgaacctggacaggtacattttcggatcgtaacagatcatgccgggcatctgaattccgtgtttgaatcaaaactgtctgtctgaaacgcagactaccagaaaactctatctaaaaagttcataatccacaagttgagccgtttaataaggactaatatatgtgacacccggccaatcaaagactcacaaactttacaaaccaaatcaaaacaatacaactttatataacttgtaatactcagcaaacatgacaaccaattaacgaaaatccaaacagactctaccgagaatcctgcaccaaaaaaaacaaaaaacaaacgccacaataattcatgcatagagatcacacctttcccaagcaataatccctca

SEQ ID NO: 22036 - DNA, 9458 bp, Oryza sativa
cactccccgggacgcaaaacgaagcagcgtttagcaagtgattaattaagttttagttatttttttaaaaaatggattaatattatttttttaagcaacttttgtatagaaactttttgtaaaaaaacgcaccgtttagcagtttgaaaagcgtgcgcgcggaaaacgaagagggggttgggaacaactgggaacgaacacagccttagtatatcatttagatgtgtaattatccattggacttatacgttgagttgagagacttatatcctctgggttggtcctgtacctccaattaaccatggggaattcgcatgtttaatatcattctaggttgcttgtgacagttcatgatatagacacagaaggaatttcttaaaaattgcaagtaaaagaatttaaatacattaagtgcgtggagtatttctggctagtatgtatgcactggcagtttctcctacggtcttactagcattcacttttgtactaaacatgtatctattaataatatatccatgccaagaattgactatacttgatggacgacatgacaaccgcttcagttatttcatcggtggtatcgcaaccaatctataaagagacgcttgtattcttttatgatccaggcgtctcttattgttaactcttagtacttttaagtgttggtcgatgcaaagctcaacaagctaatgaataaactaatgtaaatccaccaagtataaattatgattagtagtaactaatcatagagttaaaatgacccttagccgacaactaattaatgaataaactaatgtaaatccacttgtactctcagccaaaaatttttttatcatagatatcaagaaaataaaggggctacgcttttgaagttccatttttagagtcacaactagtttcattgaacaaaatatagatacagttgcatccaacaagcataggatccaatcgttaagaaaagatgaaaaatcacatttaggaaatactatcatctagacaaagcgacacgagcgtgtggccaaaatataatattaagctaattagtcatctaattagcttttgtaaggcctaactgaattagaggtccagaccacaacccataatttttcgatcgatgaagatgtcatagatgatgagcgtcgtagttatataagggtcggacattttagttgtgtgtatagcattttccataaattaattgccaagttgtactcggcggcaacggcagcagcgccggccatagctcgcggggtgttgcaatcgctgctaaccaagcggtgtggaaggaggggatagagaaaagagatacgagagagctgacatatgggtttagggatatttctattatttcacatgatttctcttttcttttcaaccgaaaattattatttgaataggtgtaatgtccactatttataaatagtgttttataactaaaaccataaaatcacagtagataatattaagtggttccaagtgaaaaactcagctaaaacttagcccaaaagctacagcaagggtaaaaatacattgcccaaaataagatttactcgaagtattgcttttattagggtctaacttgaaaggaaattccccaaatttcgtcgtactcctctgacgactccgatgagccgccaccgctcgccgtcccggtccccgctggacgacgacgacctcctcggcgagatccttctccgcctcccgcccattccctcctcgctggcccgcgctgcctgcgtctgcagccgttggcgccgcctcgtctccgaccccgccctccgccgccgcctgcgcgcccaccaccgcgaccaccttcccctccacggcttcttctaccacagcgaccacagcgcccgcctctggcccatcctggagcggccggatcgcatcccggcgtggcgcgtcgcccccacggagaagctgctccctggatggcaagtcctcagctgctcccacggtctcgtcctccacaaggatcgcgagaagttcatggtgcttgaccccgtcgccggcgagcagcacgccgtgcccttcccctcctcggtggaggacacatccgggttcgtcttggggatggtggttccttcacgccgttcttcttcttaccgcgtggtggcgctcttcgccggtagatctaccagcacaagagtagccgcctatgtctactcttcagagtctgggagttggggtgattcggattcccccatcgcgacattggttctaccatcaaaggccaaacatcgagccaggcatggcaccattgtgggcagtgtgattcactggtttcttgatggacacaaggtccttacgtttgatttggagaggcagattctagccatcatcgagctgccgccggaggtggtgaaggatacggattcattctatgaatttcggtgtcagatcataccagcactagatgatggtgttggtgaggttcgtcttgccgttctagctgatcctaacatgcaattctgggagaggaagaagacagggggagatgggagtggtgccgcatacacatgggtgctgagttcaactgttcggctgaacttcccttccattgaatcaatcaggagtgatctgaaatatcaggtcctggggtttgatgatgaaagtaatgcgatctttatatgggtgcagaatgttcttttcatggtctacctcaggtcgatgcagagcagaaaggtgttggatcattggccccctgctgacatcttcccttactcaagcttataaattgcaaggtgtcatatcctctttagactgaccaaattatttttgtaataagttgtcagattattttatctttttacacatgattcaattttgaagtggtatgtggtcaatttgcaaagtatcttcttctatgccaaatagacctatgaaatgcccacttaatgatcatctctgtttctccataaataactaaatgatttagttcatccattctatgcgtgcaaatagatatagtaagtaacagaatgaaaggctggcatgttctgttctagaaaacatgattatgtgtcttggagtcctattagaaataatgaacctaaataacgaacaaagcagtgtctcctatgctggaaattttattcatgcaggatgctgccattttttatatagaccatcaccctctcttgttatgtggtgtttttattttaatataattaactgcattttcctttttacaaacaaaatcaataactagtgcatttgtaaccttattattgtaatatcattgattagcaccaatactctgctttttttccaagaaaaattgttacaactttgtgaattatgaggtatattttggagatgattttgaaaagaagacattgctactcctaagttttgttatcttccagataattattatgaccatgcgtactggttatattaatgataaagtgacaatgaagcaatgccatgtagttctctatcatttttgtgtagactattactaaattgcaatctatagtaaaggaacagaaattcatacttatcaaatatgaacttgacatgcccagcttctctatactgtgggacagcttattttctagtcaatgagttttgtgtatgcattcactcaattattttgtcctggagtagaatgagaactgtatatgccaacattgttttggttgctaagggtctctacatatttaatcagttgtgcaactttgcttatttaagtgacaagtcttagcctgcatagccttcattataagcttaattgtagtattattggacctaactgtacaatgtgactgatcaatttatgacaataaagggcatcgtttgttctagttttggacctttggcatattttattgagttgttttttccttgcttctagatggcagctcgttggtgtataacaagatgattgcacctatggtagaagattatattcgaccatgtagtctgtcagaatggtaatctagatggctgctatgcatttggtattagttgtaggagatagtgtatgccattcaatgagctaaattggaagcatgcagataccatgggaaaataaactgtcatattttgtgttggctgcttattgacaatatgatatgtagtgcacttttaatccccttgtgtttgggtgccgactatcaatttggtaaccatgtgaacctgtgacttgatgcttcaattcgttgtgtaaaactgaatagccaggtctgctgtcgcacttgatgaagcttgcatggcaatatgctgtccatgagtacaatggtttatatgactactgttccctaagaaatgttaatggagtgatgcaggtcttattgctgatatgctgatcatttaaagggcactgcatgtatgaactgtgaagtagttgtgtaactggttgattgcagatatgtgatgccacttgtcttctaccgacgtctaatgtgcccttgatgcttagattgactgcgtgtacggcactatgtgatgaagcctgcgtgctgatctactatgctgtccatgcctagctatatgagtatagctgttcataaaagtacatgttcatgtagatcttttccatatgtgaagtacagctcactggttgcatctctgtgaagcaacttgagattttctgttagtgtgcaaatgtcccgtacgtgatctcatcgttttgtgccattccaaatttgttggtggttcaagatatgcgattgcagagtgctcaataaaattagctccggtgcaaaggatcattcttttgtgatacagccacgtcagggggacaaagacaacatctagctaactggaagagcaagtttagaattgagcatctgcattgcagcactactggtctactgcacgcactttacgaaagcacctggggcatttcattatcctctagctcaaaagtcacgtctaatgccacgtgagacagcgactaggttaaaaccaccacgtaggcacaacaacagtgagcccgccctccaaaactgccaagggagcaaaattacaccggtttaatagttagggggtcagagataccgggtattgtgatacagggatacaaattaaattcgggaaaaagtacacctaaggtcccccaacttgtcatcgagttataaaatcgtcctcaaaccacaaaaccggctacaacgtatcgtccaacttacaaaactagtacaaaactagtccctcggcggttttgaccccggtattgtttcacgtggcggctgagtcagcgtggaacccacgtgggcaccacatggcagggtgtccccgtcagctcctgcgtctctttcctctcttttctttctttgtttttctcctcctttcctccctctcgctctctgctcgtgcataggcggcggcgcgcgcggccgacgacggcggctcccgggtggcggcgcgtgggctcagggcggcgcgagctcgccggcctccccgtccccctgtgtggttggcgatggcggcgcgcggctgcggccatcatcaccgagatcgattcgacgccgccgccatcagtcgctgccgtcggcgcgctgcagtgggccgtccgcaacttcatccgcgccggcgactgcatcacgctgctgcacgtctgcccgtcggcgaggtcgcggcggaggcggcgcagcctacgcctcggcggcttccagctcgccctcgccttcagggagctatgcaacggcatcgcggaggtaaaccaattaatcaatggtggtagttggctcaactcaaaacaaagaaagaagcaatcatcttgttaattgtgaaatggtatgcaggcgaaggtggagatagtggttaggaagggggaggtcggggagacggtgttggcgacggtgaaccagctcaccgccaccacgctcgtcatcggtctccacgacaagagcatgtggcgtgtcggaattttatttgccgtggccgcagcggcgggctgtatcgcggggtggtcggcgcttgagctgctggagcatggcgacgacgactggattccgaccttccccagctcaaggctcagcctcgtggtcgccatctccgccttgtcctcctgctcgccctcgccgccgcctcctgccgacatagcacaaacgaaaatcaagcccaaggcgttcgatgtgcatgtgatagacggcggtaggcaaggtcgtcgcgcggatttactactactcacctgcgtagcatgcggaggcggcgaggcctcgtgttgtccggttgtggcgccggccatgtccgcgagagccatggcggcgtcgagctgagcggattgaacgccatggcagcgtcgagtcttggagcatcctgggcgcggtgagtggattgagggtgatggtggcggcgtattggggaggcacatcggagcggggaagggatgacccagtcgcggggggagaggagcggggaatcgacggcggcgtcgagggcgtggacctggccgaccccctcgtagcctgcaacgacggcggggaggggagggcgaacggggtagacgccctcgacgcggttgaggtcggaggggttgatgggggcggccagcatccgcacgcacacatcgcggttgccgatctccgccggcggcagctcagccaccctgaggactttgtcgggcgggccgtggtggtcgtagaggacggctatggcgggcggggacatcgaggcgcctcgcccttgccgtcgtcgttagtcgcttcgtcgttgacgccacggcggtggcattgcctctgcccgtcccggcgcaggtggaggcgacttccgaccgacacttccgaccgcctacgccgctccccatcgccgttcccacgcgcaagagatgagggagagagagaaaggccgggtagagagataagggggagagagagctacacactgacatgtgggtccctccatgctgagtcagcttgtcaatcgggtcaacacgccacgtcggatgaaatcgtcagcaaaactaccgagggaggtgatttgctctggttttcagagaaggaggaggcattatacccggttttccggttgagggcacacaaacgcaagagatgagggaggcaaaatggacttattccttcacaccaccgtacttggtgtaaggctgggccttaattgggttgagatgggctggccacacgctccccttgtgaactccgccgatatccggtcgatccccttccacggaataggacggtggtcgcaaggttcgatcaagcttcctcctctttgcactttgcttgctggttttgatttttggattccttccgtttgcgtctggattcattgatggcggcggcgacggggtacggtgacgccccgaccgccgacgatctggccgcgtacgaccaactgctcggcctccgccacactcgccacatggcggaggtcttcgccgtgcgcctgccgcacgccgccggactccgcaggccgccgccctgcggcaccatcagcttctgcggcggcaaccactgcaacgacgtcatctacagccgcagccgtacggacgactccacctacccaccgccctgcgacacccatgtaaaacttccaccttgtaggcagctaggtaatctcattcagaaaccggctttcatgcataaaccatcacacttaatttgtttcttgctttcaaattctgaaatataatatatctataatagtcaaaactgtaaaacagagtctaatcctgcataatgtgtaacatgacccaaggaaatgaatccacaagactaatattccgatcgaatgaccagtgattccgaatgagcaattcaggatttgtgtagctcctcaatatgttccggacctgtaattgttggtgctgcatattttcttatttagtgcaaatgaaaacctcaaaatttatgaaatcgtatttacaactagcattcatattaatcaagaaagaaatagagattaattttagtttttaaccaaagtttcgttttggtttagcatattttcactctggacacccttttcaaacatattcactttagtcccattttcctgaataccctttcgctttgggtatataaaggacaccaatgcaacggcattatcgagatgagcatgaccaaggtgcagtttgtaggatcaaatcacaataactaagccaaccagagaggggtgaatggttggtatacccaaaaaccgaaaacttttagcggaaataaaagttaccctcgaaattgacggaagtcggtctgaccgagattgatctgtcggtctgaccgagtggtgccgtcggtctgaccgagattagatctctagtctgaccaccgagatcagctaccgctcgctgtcgccgccgccggtctgaccgcctcgccaccgccggtctgaccgccgcttgccgctggtctgactgccggtatatcgccggttagaccgccgaaacccggtaaaacacaaatcgaagaactcttaaagtagatgacgactttattgattctctctgtgtttacaaagtgcaccaacagcactccctacaaaaatttcgactaaactcgaaaccctaactcaaaactcaactcaattgctctcaaaagcgatatcgggaagcatcacgctccccctctatttatacccgaggtaggcagcctaaagccatgaaccaaacttatactaggagtgctaaacaccttaggaaactctctagtataagaaacaaactttacataaccactcataccaaatttggactccttccgaattcgactccgcatcccatatgcacacaataactccatcgtatgccatatggaatctccatcaaccatgtgcatcaactctagcctaagtatcccgcatgatctctgaccaccaggacgtcgtcttatccccaagctgactcccggtccatcaccgcaaatactctcccgaggcatcgagtcacctacacatgaaataaacaaagaaaccatattccgagaccaagctatcacaacttgagtcattagcagcaaacaatcgtatagtatccatctagaagccataatcatgaaataatcacggatatccaaacaagcaacccaaatccgaaaccgacacagcgtcggccggtcagaccgcgggctaggccggtctgaccgcgcgatacacgccggtctgaccggctactagagcccggtctgaccagtcacatgaaataacagaacctgcgattcacctataaatccaatcatctccaaaaccacttcgtgaataaattctaaatatcaaaaccaataatctccgatgccaattgttcatcacagaataataatcaaaaacacctttgattttacaatctcccccttgatgaacacattggcaaacccatcaaaaatgttttggtgtttggaaaaaaaaataaaaataaaagtggtaaaaagcacacttcgtacaaacgtacatatcgtgctcaaaaattcaaaaatccaaaagaaaacttcttcccctttctaaaagaaagaaattcccaattgaaccaaaaacatgctcttcttaaaaaaaaactcttcgct

SEQ ID NO: 22037 - DNA, 504 bp, Oryza sativa
cattcccaaagctaagggatcactgggacgagttcgttgcatataagacaggtgaacaagggcaggcgatgatggaaagaaacaaagaaaatgccgccaagaagaagtaccatcaccacttggggtcaggaggctatagcgtcgcgatgccgaagtgggagcagatggaggctagcttgattgagaggggtatcgaaccggcaacagccaattggctggaacgatcgaagttctggtactatgctcacggtggaacgctcaacccagctgatggctcactgaacgctgaagaaagcatcttctggaaagtccaaaccagtccctcagcttggagagcaaccaaaccaggagatcgagccgttggtgaccggtaaagaaatgacgatagaacaatttattactgacaccggtctaactacggatcaattgttaggagtcgcaccaatcgaaaaggcggaagtgaaatacatgtacgaactcggtaaaccgcttgtcaagcctgag

SEQ ID NO: 22038 - DNA, 734 bp, Oryza sativa
ctctctttagtcccggtgtgtgtttccacccggtactaaagatagatctctcctttttttttttgcatggccctgttgctgcttgatttatatatatatatatatatatatatatatatatatatatatatatatatatatatatatatatatatatatatatatatatatatatatatatataaaccatgcatatatatgtttcaatacatatatatgcatacatatatatatgtatatatatatatattattatattatatgtatatacatgcataatatatatgtatttatacatatatatgttatgcaaatgcatatgtatatagatatatatatttccaaaatatatttacattatagaaaatgtgtacacatgcatacagaaacatatgtagtcatgtattaattacaatctattatatgtcctagctagctacgatttcgacgtagtagtactcgctgctagctcagaagctaaggaccggtgaattgtgtttccgtcgtagtagaattcactcttgggatcaaggatttcttcgttgatgaatcccatgagttgttcttgaaccgccgcgataaattccttgtgtgtggtcaggttatccctcatgcgaattaactatatgaatgtatgaaattgattagtaattaaacaagaaatcgctacgtaatgaaattttgaatttatttgtacgtacatcgagctctctttgtggtgatgatttggtctg

SEQ ID NO: 22039 - DNA, 4564 bp, Oryza sativa
ctgcacccctgttcgcatgagggataacctgaccacacacaaggaatttatcgcggcggttcaagaacaactcatgggattcatcaacgaagaaatccttgatcccaagggtaaattctactacgacggaaacacaattcaccggtccttagcttctgagctagcagcgagtactctacgtcgaaatcgtagctagctaggacatataatggattgtaattaatacatgactacatatgtttctatatgcatgtgtacacattttctataatgtaaatatattttgttcatatatatatctatatacatatgcatttgcataacatatatatgtataaatacatatatattatgcatgtatatacatataatataatataatataatatatatacatatatatatgtatgcatatatatgtattgaaacatatatatgcatggtttatatatatatatatatatatatatatatatatatataaaccatgcagcaacaggggcatgcaaaaaaaaaaaaggtcagctcgatctttagtcccggttggtgtcaccaaccgggactaaagatcgatctttactcccggttatttcacccgggactaaagatagcgatctttagtcccggattggtactcccggtttggaaaccgggactaaaggggggttacgagccgggactacaaagagtttctccaccagtgggcggcgctccgccgcgccgtgaacgtgcacggtagtgctagtgttgagcaccagtagcactacacggcgagcctgctcatcgtcgttgataccggtctcgctactaagcctgcggggccatggtgttgtctcgtcctggagtagcgcccgtgacataagccaccagttacgcaagtaatctacttgccgctcgttgaggctgatttggccatcgttcacggcgtcgtagtgcagagccatcctcgcgccctcgcagaagacgacggtcaggtgcaccagatccagtttggtgtcatcgtctgcagcgccatatggatcaggtggttgttcgtagcccgacagcttatggacggcatccagcaggacgacctgtcgcaggtcaatatcattaaccaacatattcttaacgtcgtcttcatcgcgaccaccaagtaagcttgggtagctgccgtcgcatcccagaaatgtggatggctcagggagaatcggcttgctcatccccgagaagcccatgtggaaccattgtcctttcaggttcctgaagccgatgaggttgacattgtcatcccggacggctaaggttgctctgtcgtcgccgttgcccaccaggttgatgtacatccacctcgccggctgttttgggcatcgttgcatcgcgagtacgggacagccggcgtagacgtcgtcgaggtcaggatgctccgcgagcctgtcgcgaaggttgttcatgaattcagggtagttgcctgtcctcacgttgaactctacgttctcaactctcaccgccatcctctgatttctgatctacacaatgattaatttgcagttatcaaaaaccgtaaattgtactctctcctgttttatagtacttaacagtttagacaggggttgaggttaaacttttgtaacttcatttgactatcaataactttaaaattattttgtttaaaggaactagaacaacatatatagatttatctttgaaagtacatcaataaaagtaaatatacatttatttattgtatatatattataataaaaaacaaggtaaaagatatattttgaaaattgtatcattatttaaaacatcaagaattattaaaccagagggatcgagtttctttgtacgagctatagccagtaatatcgatctatgagtatgcttatatactagtatatatgttctcttgtttcagaaaaaaaaaaaaccaattcctgagctagattttctaggacggagagggtgtatatgtcaagctggatgttaacgttttaaggtacaggtacaccacattaaaaatgagccttggattttcttttctcaaaaaaagaaaagagccgtatgattttttttctcaacaataaaacaagaaatgagcctttgtattcttttgatgtttttatctatgttctagatgacaatcaaatttgtttagctctctagctaaggtgtgtttggttgtagaaaaatatgttgttttgattcttagtaatcagaagaaaatttaagtttttggtatgatcaaccagctgaatggtagtttggaatataggattgtgatatgatatgtctagtaagtaaaacacacataactggtgatatatattaagattccgtttgaaatacgaatatatatcatctgtttccctcccgatgaaatcgtatcaacctttctttcatgcgcatgagctatacgatgttgcattccccgcagtctaatacttccaagttgcccacaactaaactgaaaatttgaatacaaaaaacctcccatacagaaaaggaaagtttctttgaatcgttttccatttaaatttacttttaaatagaacccttttggtttacactactcgaggttgcatggtactacctccatccataaatatatatgggattcaggtattcagtacgtattatctaggtatatatgccgaaacttaatacctccatccataaataaaagggattcagctatacgtgtaacacaataacttaatatcttcatccacgaaggatccaggttatgcatatacctgaacagagccactattttatgaattggcaataataatttgtcacaccaacacgtgtagcatggctaaatccttgccatacgtgtttttaaccggccatgacaacattgtattaccacgcagatatatggattgtgtggttaaaaggattcatataagaaaatggtaagtttatgcagagtttatttttaatatcaatgaattatatatatactattttggtagcctgaaacaagccatcacatttgatgtaaaggcctataaattcctacgttaattaataagagaaaagagaaagatttgaacggttagattatgcatgataggtccaaattataacagtgtagattggtcaacaaacttgtttacgaaatacaattgtatttataaaaacataattaagtaagagttgtatatcacataattaaacaaaaaaaatatgtgttttctaaaattcacccacaacaaactcgcacgataatctactagttattgtatcatcaacagaggtaaaaacgagcaaacatattcactagatctggaggccacaaaatttccgtataaatccaagaaaaagaagatttgcaccattagttcatactaggttcgaatattataacaacgtaattaacattacttttaaaaaaactaataagtgattttttccagaacctatacacatgtcggattcaaaacacccgacacagttgagtggagcttattggtgctagatttacaaccgacaccaatgtggaacgatgaaaaaaaaatcaatttttagcatccctatatattaagaattttcggcagcggaggaggagaggaggaggcgctacgttggcagtgatagcggctgtagcgaggagggttagggagagagcgagaggttgggacttgggagcgagagagaggagcaacctgatcgagatcgagagagagtgtgtgcgcgtgctagaaaaggatataaaaaaactagatgggcttgctagtggttggattgactccatccctaaagttgcgtattattattttttaaaagaaaggcacttgtatcccactttgtatcccacacgtacaagtatcggtttattaaaaaaacacagatattagggttggttttattaataaactgatatatatgagggtgtcctctgaaaatcatcactagtgctggcttttaattttaggcctgcctgatgaattgggaggatggaaatagtctgatagatgaaccgacgtatacgagggaatcctctattagggtctttgtaaattgatcggcatatatacttgtatacgaaatagaattctacttaccaaaacagcatgaaaagttgtactagtattatcaacgtaaaatgggagttgtactacatcaaatctagctaattgaacttcacactggtggagaaatgctttctagtcccggttcataaccccctgtagtcccggttttccaaccaggactacgaatccaggactaaagatcgctatctttagtcccggttcaaataaccgggactaaaaatcaatctttagtcccggttggtgttaccaaccgggactaaagatggaagcatctttagtcccggttgataacaccaatcgggacgaaagatatttttttcttttttttctgcttttaatattgaatattgatttcacacaatcccatcccatatccaaatcatcacatattacagaacatctccaaatcctcaaacaaatcatctccaaatatatcacaaactcttaaaaaaattacatcacaagattctaaaaaattcatcacagattcacatctcacacaaaaatacatcacagat

SEQ ID NO: 22040 - DNA, 615 bp, Oryza sativa
cgatgactttggaaatcacttcctctccgactcggattcaaaccagtctggaaggctcagaccactttgatctcatttggtctcccaaacaccgcgaaggcatgttccaagcttgttctctccgacacaggctcaatctcgtcagggagatcaaccttggcgagtttgatgattaaatctccgatgtcgctgcgtttttttcccttccaatttatcattgtttattagattgatttctaatcatggatgaatctattggtgttttttttattgttcatatataattccacggcactactgatgtgagtgctagcgattgtcgactcgtggtgtcactatgtagtcaaccggccatggggtcttccctggcatgcgtactctgtttgacctcgctttcacggctgctcgactccgccgctactgatggacaacctcgtattcaccgctggcttccttcactaccacagaccgctaacctcacaccttcacggttggcctactaaatcaccattgatgggcgacctcgtcttcaccgctggctgcctccacagccgtcaattggtaacctcaccttcacggttggcctactacgccgccattgacgggtgacctcat

SEQ ID NO: 22041 - DNA, 650 bp, Oryza sativa
catcactagatgtttcgactgagaacacacacagtcatggcctttttatacatatttatataggtacgtcagggatttgatgctggcgcaagcttcaacattgatgtggcaaggatacctcatgagcaagccaggattgtatgggaccacccacctattgtccaacactgcacctctaatttttacacgccacccatcatctctcctcctgtatgaaggatacaagtccttcccttgttgtgttgcttgacagaacggtcgaagaaagctgaagcgacactctctgtccaccatgcaggcgcactttttgtttagctcacctcacgggatgtgcaacatatgctttatgaccagatgatgtagcacagggtatttttccttatctggtatctctgcacagataactttatcataaccatctgggtttgttaacttactgcatggattcatggttaacaggatatgttcatgtaggaggccccgcttctgaaactcaataacatgagcatatgcctgaacctcactgaaatacttttcttggtgaacaagtctaacatgtatcgtagcttggccctaaatacccttgccacaaggtcccgcccatcttgcggctgttggctacaataaaaattttctgttatctccttcca

SEQ ID NO: 22042 - DNA, 723 bp, Oryza sativa
gaatgttcatcgacccccgacttcatccatctccaatccgtgtacttttgtttataaccagactgagccacaaactaagccttacccactagacatgtggaagtacggtagtgctttgcaacaaaggcccgagcttaatccttatagtggccggggtgctacttcccacaactggcatgcacccaaaccccaccgaaaacaggttttaggggctttgaaagaggaagagaggggtatgtccaattccaccataagccaaacattccatagtatccaaatgatatgagaattcccaaagtctaaagttataaaaccacctaatgttgcctaattaatcagcgaagcatctacctaaattcatactagtggaaccatgaatagagtacccactagttggggttttatttattctagggtgaacaaggtaataataacaatagcaataataatatggtcataacaaaggtaaataggcatggctaaataaaacagtgataacgcgggaatttaaataaagcgataatgcaataatttaaatcaacataattttacaaactgggatccaatatgttcaaggatgatgtgacttgccttgctcgctttcccaaacgtcggcttctacttccacgaagagcggatcttccgaagctgcagcgtctacacgaccaacggaaaaaaaaaagcttttactctaataaactccatataacacgcaggaacaaa

SEQ ID NO: 22043 - DNA, 528 bp, Oryza sativa
aatcatggcttaccgtctacgatctcgcaatccgcgcagcatgaggagatagcaaggccatggcgaactatttaccagtggctttagcagattccgcccggtcctggctccatggattgccccgtggtacaatcggatcttgggccgaattacgcgaccacttcatcgccaacttccaaggcaccttcgagcgccccggcacacaattcgatctctacaacgttatacagaagtccggagaatctctttgagattacatccggcgattttctaaacaacgcaataagatctccgacatcaccgacgatgttaccatcgccgcattcaccaaaggaattcgccacgaagaattggtcggcaagttcgggcgtaagcctcccaaaacagtcaaacttatgtttaaaaaagccaacgagtacgccaaggctgaagatgccgtcatcgcatcaaagcagtcgggctccagttggaagccaaaaaaggatacgccggctacgggagggggtggaagtaacaatcataaggacc

SEQ ID NO: 22044 - DNA, 2085 bp, Oryza sativa
cctctgatcagagtataatctattcgaatagccgcgccctcggttatgggcaagccaagcaatgtacccaggttagtgttttaattcttaaaatttgctcaacaactaaaatgtggaatggttggcctgggttggcttgggacgagctgggacccagggtcgggttgccagttcggtctgaatcatcgtaggccttgggttaaggcaggttcctgagggttcacggccttgattaataattttgtgtagctctagggtcgtctttataaaatggctttgggcaactaagtgacttttaaatgctgttttctgcaaaacttaacccctatattattaccccttgtacccccttgcattaatcatgcatctgccggtgtggcttgctgagtactgtggttgtactcattcttgctctatctttctcccccccttcagtaagagaagctttggagaagaagtcttaggtggagtcttggcttataccccagttgagcgcctgtgaagatggagccgtaggcccgctagtccgctgctgtttatttttgattgtcaggcctgaagcgcctttgtaataatgtaaatattatcgatgtaataaagatgtgtcttttatatcatgtttgtttggtgtacccctgcttttcctgggacggggattaatacattagcgttcgggaaaatgcaattttctcggtcgcgacagccggcgatgataggtggatttggtaattggtttgttccgattctgataggtgcacctgacatggcatttccacgattaaataatatatcattctggttgttgccaccaagtctcttgctcctattaagctcagccatagtagaagtgggcagcggcaatgggtggacggtctatccgcccttaagtggtattaccagccattctggaggagcagttgatttagcaatttttagtcttcatctatcaggtgtttcatcaattttaggttctatcaattttataacaactattttcaacatgcgtggacctggaatgactatgcatagattacccctttttgtgtggtccgttgtagtgacagcattcctacttttattatcacttccggtaatggcaggggcaattacaatgttattaaccgatcgaaactttaatacaaccttttttgatcctgcaggagggggagacccaatattataccagcatctcttttggttcttcggtcatccagaggtgtatattctcattctgcctggattcggtattattagtcatatcgtatcgaccttttcaagaaaaccggtcttcgggtatctaggcatggtttatgccatgataagtataggtgttcttggatttctagtttgggctcatcatatgtttactgtgggcttagacgttgatacgcgtgcgtacttcaccgcagctaccatgatcatagctgtgcccactggaataaaaatctttagttggattgctaccatgtggggaggttcgatacaatacaaaacacccatgttatttgttgtagggttcatctttttgttcaccataggagggctcactggaattgttctagcaaactctgggctagacatggctctacatgaaacttattatgtgggtgcacatttccattatgtactttctatgggagccgtttttgctttatttgctggattttactattgggtgggtaaaatctttggtcggacatatcctgaaactttaggccaaatccatttttggattacttttttcggggttaatctgaccttctttcccatgcatttcttagggctttcgggcatgccacgtcgcattccagattatccagatgcttacgccggatggaatgctctgagcagtttcggtcttatatatccgtagttgggattcgtcgtttcttcgtagttgtcgcaatcacttcaagcagtggaaagaacaaaagatgtgcggaaagtccttgggctgttgaacagaatccaaccacactagaatggttggtacaaaaccctccagccttcatacttttgaagaacttcccactatcaaaaaaacaaaaagctaggcccacctctcctaactattgcccataaaaa

SEQ ID NO: 22045 - DNA, 654 bp, Oryza sativa
  unsure (1)..(654): unsure at all n locations
gacaaggatcagcatgtaaaggaactgtacattcaaaaatatattaaaaatgaaaaaaattacaaaaacgtacctctgacaggagcaccatccatcaactcaaactttgcaagagtttcagtctcaacatatgcactagagcctgctcctgttgattccctacgacgtacttctagttccatgtttttatctttattctgacaagaagaaagtagatcttcccaataatcannnnnnnnnnnnnnnnnnnnnnnnnnaataagaatgtttcaatgtaagcaaacgctgtggatgccacattgaggaacatgtcagaacagacagccaactaagcctatcttcttacttgcttttgctgtattcgaactcaatatgtaagcaatcctcaattccaacttccatctgaaaggaacatgcaagatcaagagttacataaccaaatatgtcttcatgtctttcacacacactaaataaagcatcactgtgaccatggcgaatagcatgttagtcaagaaatagaagtgccgaacagtgtatgttagtcaagaaaaaaaatactgttggccacaacggaataaaatattatgcagctaccatctacaggaatatcagaaaaacaatagcagctgataagcacaataaaaaggtacgatc

SEQ ID NO: 22046 - DNA, 606 bp, Oryza sativa
gaacactgacttactgaagaccggaatggaccaatgtgacattgactcaagaaggtttacaaaaaggccaactatagaaaagccagagctgactgaatgaaataccgcagttcactctgactccggttcggtacctactctatatctgaagattgaccacagcgtaatgccttaccgctttacaccttgctttccttatttagctactttacctcagaatccctctctagagagaattctctttcaagtttgaattgttccattaacccatctactgccaacacaactacttcttttctcttttcacaaataccttcttttctctctttgttggttaattgagtagggtattctagtgaatcgtacctgttttccgacaggaagctttggctgaaaggataggaatagctcttgcgcaaggaatataaatagcgtacgcgtactagtccagggaataaaaaatatcttacctgtgagggggaggcaaaagggaaaaagctagtattttgaaaagggtatagtagctggtattcggattgagcagtgccataaaaagaaagcgttgttgtttttcctgttcaaccaccccaacctgtaacgtataac

SEQ ID NO: 22047 - DNA, 677 bp, Oryza sativa
tcagcatcaaatgcattgtcttgaaatggcctggaccataagtcttgttctgttggaatagtccattgttaggaccaaggcgcaattgaccttcactttaagctcatgtggagggaggccatttggagtgatcgtgttcagaaagtccaaagagtagctattttggggatcatcatcgactgaatcaaagctgaggtaaatcttttcctttccaggaaactaatcaatcatcttcgtgttcagcttatccacgaaatcattttttgttgagaggatggcccgtgtgctcatatattccacggaggtcgtatttctctcgtcatcaagcgaggggaacacatattcaatcaatgtgttcactgaatcttcattgtccgaataaccaatgacaatttcatcaggcagacggacgtcatcatctgcgatcgtgttttcagtcccgtttccaatcctaagtagataatcgaaaaccaagggtcagattgtgccctcatattacgcgaaaggcatatcttccttatattttccataaataagatctctacaattcagcatcaattatctgtgcccttgtcccacatgtcaccacgggaagaacttatctgaaatcaccccgcaatccatgacgtttcctccaaatggcaataaatgtccataataagggtctcaactgccaa

SEQ ID NO: 22048 - DNA, 11793 bp, Oryza sativa
caaagatatgctctgctgtttatcttttttatgctttgtaatctaatctatagaagtacagaatagccattactacctttgacattaactgcaaccttctgttatctgttaattttttgtagtttggtgcttagaagattcttttttttgttaacatttgtttgcttgatatcacacttttatgtgcttagaagtcatctcacacatgtcaacagttcctggaattaaaatggattcaagggctaaacgtcggaagcgggaggaagaggatgatgatatgattcttttccttttccctgctgtgcatcttttggatagtggtggtgggggagagagaaaacacctaggcatgcatcaacccagactggtgcagaaaaagtgacagaggtacttgaagggcatgtcatgaattgccttgtggcgtaccgtatggaaccggaggtcttcaaaagtactgcagaatttctaagaaggaagaacttggtccgtgacactaggggagttagagtggaggaaaagcttgctatgttcatgtatatgctatcccataatgcgagctaccaagatatgcaatatgaattcaagcatagtggggcgacaatccacctacatattagggcatttttcgatatagtccctactctcacccatagattcattaagccgcctcttgcaaaccaaactcattcaaagatcacatcaaatcctcgcttctacccatacttcaaggtgcaatactaacttggcattcatgtataataaaatattttatttctaaaattaaatcttcttatgtgtttatattattcttgcagaattgcttaggagcaattgatggtactcatgttcctatcactataaaccctgagatggcagctccatataggaatagaaagagcacactaagccaaaatgtgatgttagcatgtgattttgacttaaacttcacattcatttcttgtggctgggagggatctgccacggatgcccgggtgcttaggtctgctcaactaaatggttttcgcataccgatgggcaagttttaccttgttgatggtggatatgccaacacgccttcattcctcgcaccttaccgtggcgttcgataccatcttaaggagtttggtcgtggtcaccggcgcccatcaaactacaaataattgttcaatcaaagccatgcattattgcgtaatcacatagaaagggctattggagttttgaagaagcgcttcccgatcttaaaagtaggcacactacaccctattgaaaaccaagttaggataccagcagctgctgccgtatttcacaacctgattaggaggtacaatgggaatgagggatggttggatcttgatcatcagccacatgatccacaccatatatcacctgaagattttgttgatgttccagcgggaggtgatgagtatggcaatgatgtcaactcactgaataatcaaactcatcaaggaaatgttattagggacaatattgcaatggcgatgtggaatgattatgttcatgatcattctaatctagcatgatatgtaatgaaatgtgatgtaataaatgacttgtgtgttttcatgataagttcccgcacatttgtttttcaaaaggacaaattcaagataaagaaaaggagcttaagagagactacaggtgcttgaaagatgcaagaacacaaagtggggcatcttgggacgaaaaactcgggatgattattgctgatgatcctgcagtttgggataatattattcatgtaagtttcttgaactattgaattccgtgcaattgttgaattgtctctcctcatatatatcttgttatgttctgtcatgttcctttactttctatattctccttttgcctcataattaactcagtttctttttcatctctaaaacttaacagtctttccctcgagctaagaagttccgcaacaaaccatttccaatctttgaagctttaggagaactatatgatggtaatttactaattctcagatctatccataaaccattcgaactacttttcacttagttatcggcatgcatttcttttcttgaataggtcaaactgccgagggcctcttgaactttacatcccttcagccaacaaatacactagatcagtcaagaaacacagaagatgatattgttacacaagtaggtgctgatgatttgctgatggagaacaatcaagatgacctaaacaatgatgatccaatcacagcaagtgaacaatcaaaagttgaagtgtcaaatcagttaaatcaaagaagacaaactgtcagtacatcaaggaaacctcctgaggataaaagagagaagaacccaaaaagacataagcaaaatgggaatgtggctgatgcaatggagaaatacatagagctgtgacataaacaagctgaggaggaaatggtacgggaaaaagaggctacaaagcaagttgatgaattttcaatcaagaaatgtatcgatgtcttgagcacaatgaatgaactatcccctgaggaaaatgcccggtcatttagtgtttttaaggatgctcagaacagagaaatctttatcagtgctaatccaaccgctagaattttgtggctgaaacttcagatggtgagtaacatttctgattatgatattttattttcattagtgtcatcttagcatgctgtcttacttggttgacatttctgatcccctacttacctggttttcttgtattggcagggttgatttacatgagattgggtgcttttgtgaggtatgttctgcctaaagtttcatttatgttgatatacatgaatagcatgatgatagtgatcagccttttttcatttctcctgtagtcctgttgagcttgacattgttgtcatcagtccaacttctctatactttttttttatgctttactgtcggcattaagctaccatagtcctgctatgtcatatctttgtaaaataaacttatctgtgggccaacattgttctcctcctaatgtgctgtcattttctggatgctgttctacattggaagttttctgttgttgtgatcacctgtaaaaacttatcagagtcttgtttctggatgctgcaacagctgttctttggctgccgtgtctgtgtcttttttttaatcttttcttggggtcacaatgctcatcattttctcctctcaggtcatggagctaatattattaggtgaagatcaaatggtgtcaaagataggacaacagtgcatgcagttaccatcttcatttcttaaatttgtggacaaatcgattttggaacctgggaacctagtttgtggttgtactcagtgttctaggtgttaatgtcacttgctaatcactagaatttaaatgcgtggggtacattggcaactactatatatgcttgtaatattgtttggagggcacagattgacttaccacatgcgaatgtcaactgctacattgaatagcagtgttaactatcgtttaaaagcttgtcagtattttcattttctttatttaatgaactattttcttaattttggttttcttctgtacatgccattgtagaaattagttatcagctcttttttttttttgaaatttcgtattattttgtgtgattttatagtttgattctattcgtaagttgagatgtgctatctatgctcagtttttattcaaagagatgtgtttgccctgctttccctgcttttcccctgttttccccatccgaatagcatgggggtttaacacccaacgtggaagtggattgggtggtgggaggggatccacccaatcctggactggtggtgtttcccccagggaaatccctccccacgtgccgaacgaggcctaaccgatcgagggggcgcagccagtgacgggaagactccaccgccgcgccacgacctcgccgggatcccctacgaccaccactgccgcgcagcaccgtcgctgtcacgaccaccatcaccgccgccgcccatgtcaagcagagcgacgacaacgacgatggccgggacttcctcttcatccaacgtgtcaaccggtcacatccctaaaccctttcccttattctctattgttgttcaatcatccatcgcaaatagaaccacccgactagatctaaacctaggtgatctaatagacaacactaacaatggtatcagagcaaccctagtgtttagattggttcgggaaagaaatccaaagagaaaagcaaagaaaagcaaacgatccgacggaacgaaaagaaaaaccctaaccctaatcttacctcgtcgccggccgtcgttgacgccggcaacggaggggggaggggcaaagaggcaccacctaggagcaactcgacggccgtgcgcgcacccgcgggtgcacgcgcgtgccggcgaggggggccgcggcggcgccgccatctccttcggccgccgccctctttctctcacttcgcggtgggggctagagacggtggggggagaagagaagagaaaagaaaagatggcgccgccgtgtttccccatccaccgccgtcgccggccgtcgccgaagccggggggagacgagagggcgccgaccacaccgtcacaaggccgctcgacggcggcgcgctctgcctagggtgagcacgcgcgccggcgaggggccccgcgacggcgccgccacctcctccggccgccgccgatggcgccgccgctccggtgtagagagaggagggagagaggagaagtgaaatgtgcggctagggtttggccggttgggaggaagggtttttgtttccccgaactcggcggctgaccgtccgatcctaaccctagcaaatggatggccggatggtgacggtcggctggtggccgcgggccggacgggccagaccggccaaaagtccactttaggtccctcggccgaaagaaagaaggaaaagaagaaaaagaagtttaataaaagtccctcggccgaaggaagcattttcaatatgtttaatgattgtgtttatttctaagcaatttgaaccaacgtgaaaattgtttagagaatagataaatgtgagaaatgtttctgaacaggtattttgtatattttcatgcaaattacaatagaattttgaattgtttttcaagttttacctctgtttaaatttgaaccaacgggcgaatttttacagagagtaaacaacagagttttgttattgtttatatgaattgtatatagatcttccactgcaaatagatgaaattgatgaaaattagtgtttctaaaattaaatttcgaaccaacgggagaatttgattttaggaacattaattatgtgctatgatgttgtaattttctgaccaacgttgataattgcaatgttatagttatggctctatgtgttatgtctattttctgcccaacggtgatgtagacttaatacataataattttaatgttaattttgttctcacaatacatgattatcttaggtggctactccttgatgggttacattaaagatattccgaccctgaaaggagataactacgaagaatggaaaagagaactcgaccttgcttttatcttgggacaggtggactgggtgttgactaccccatgtcctatggaacctgctgaacttttcagaggtgaaaatgagtcaaatgctgaatggcaaaagagagagagggacaatgcttccctcatcatgtcgtatgacattgagcatacgaaatggtccttagccaacaagaactgtttggctacggtaaagaacacgattgagccaaccaaattgggctcaatcccagagtatgacaccgtctctatgtacctcgaaagtataaagagccagtttactggttcttcaaagttttatgcgacacagctgataaagtagcttgtgacagagagataccatggaggtggtgtaaaagactacattcttaggatgggcaacatggcttctaagttgaagcaaaaaagatgtgggcatctgagatgactttctggtccatctggttatgtcctctttgccaaagaactttgacaaccttgttgtcaactacaaaataaatccagaaaaatggaatattgaagagctcatctctaattgtgtccaagaggaggaaagactcaaagagaccaatggtggctcctttaaccttgttaaagataaggaaaagagccacaggtcaccatcctcaaaagaaaaacagcctcaacatctgcctcagaaacaacagttcacagttgagacaggatcagtgtctccactgcaagaagacaagacattccaagaaagatcgtcctgacttcctgacagtgatcatggcaaagaaaggtgagaacattattacatttgtaaatgaatctcattatgattggttattctagatccacatggtggattgattctggagtaactattcatgtgtgtaattgtttaaagggattccgttcaatgaggactacgcaaagaagtgaaagatccattagagttgccaatggagttgaagcaaaagttgaagctgttggagatcttcgcctagaactcacgaatggcttcacacttttacttccagatgtttttatgtcccttctttgcaaagaaacttaataataagtgtatccaaattggattttgatagatatgattgccattttggaaatggcaaatgtgaactatggtataataatgcatgtattggtcttgtgttgcaagatcagctttatttgttatctctttctgagaatgtgaatgttgtgtcctcgttgacaaaagaaaagaaagcgaactcctgatgtctcatcgaaattatggcattgacgtttaggccatatttcgagggggagaattgagagactggttaagaatataattcttcctccattggagttctcagctttagaacaatgcatacaatgcattggtgcccaaaacaccgtatgagctatggatcctccgtgtgtgtgggagtcctgcagaggccaaagtatttaacccaaatcttgggaaattgaatcccaaaacagtaagctgccattttattggctattctgaaagatcaaagggttatcgtttctactgtccaaacagttgtacaaagtttgtagaaacgatacacaccgtcttcttggaagacgaaatgattagggggagctcggtagttcgagaaattgatcttgaggagaggcggatgtctgtacctgctccgtcgactcaggaacctttcttctctctacctactaatgttgtgccagcaatgcatgccattgcggtaccaacacctgttgttatctctcctgtggcaacaatgaatgaaagtggggaacccattttacaggattcaatagaaattattgccacaccagaggaggagctgcaacagcctcaaacagataatgtgccaaatgtggaggcccctagaaggtcttgaagagtcagaagatcggctatccgtgatgactatcatgtttataatatagaagagtcgcatatggaggatgatcccacctcatataaagaggccatgagaagcgctcgctcatctgaatggttggaagccatgaaagatggaatgaaatcaatgaaattaaatgatgtctgggatttaaaagaaattcctaaaggagccaaatcagtagggtgtaaatgggtctacaaaaccaaatatgactctagagggaatgtagaaaagtttaaagcgcgacttgtggcaaaagttttcacgcaaagagaaggcattgattacaatgagacttttctccagtctcttgtaaagattctttcatgattataatggcactagtggcacattatgatttggaattacatcagatggatgtaaaaacggaatttctaaatggtgatttgaagaaaaaagtatacatggcacaaccgaaaggtttcgtcatgaaaggaaacgaaaatataggatgccgtataaagagatccatttatggattaaagcaaagcttcgagacagtgctacttgaagtttgatggaacaataaagaaatttgggtttttcaagagaatatcgaggacaactgtattgattcaaagttaagaatgggagattcattttcctaattctgtatgtagatgacgttctactggctagtagtgatgtcaatctactgcaggaaataaagaaattcttgtcctcaaattttgacatgaaagacctcggtgaggcttcatatgtttgggcatagagattcaccgaaatagaacatagtatgcattgggactttctcaaaaggcatatataaaaaaggtattgaagaaatttaacatgtatagatgcagtgctacacctgctcctatagtcaaaggcgaaaagtatggggcatcgcaatgtcccagaatcagtatgagctcaatgaaatgaaaacaaagccatatgcgtcagctgtaggaagcctacagtacacgcaagtgtgcacacgacctgacttggtatttgttaccgggttacttggcagatttcaaagtaatctaggcctagagcactggaatttggtatagaaagtcttgcgtgattacaaggaacaaaaggcctcatgatgtcttacagaaaatcagaatcgctccagatagtggggtattcggattctgactctgcaaaagataatacaaagtcaacatcgggatacgtgttcaccctggcagtaggagctatttcatggaaaagctcaaaacagaccatcactgcagggtctactatgtatgccgagtttatagcatgctatgaggcaacggggcaggtgaactggctaaagaagttcatacccaggtttaaaggtggttgacagtattgagaaaccactaaagttatactgcgatagcaaacccgcagtaatgtactctcacaacaatcagtcaagtggtgttgccaaacacattgacataaagtactatattgtgaaagacaaagtccgggatcaaacaatcagtctcgagcacataagaacagaaaggatgctcgtggatccgctcataaaaggccaacctcccaacatgttcaaggaacatgtagcatgcatgggtttaagggaagccttatgaatcctggactatagggcccaaaagttaaagtatctgtttctaaatagagatgtgtatagtggctgtcgaatccatcggtaattaaccgtgacgatgaaacatgctctatatgtaaatctgtgatggaatagaaaaagctaaaagaaatagtgagatcaagggggagaatgttagatagatctccctccccttgagccgttaggctcaagggggccttgacccgcgccctgatcgggggcgcccagcccaatggctgatggccccccgtcacactgtgccatataaagaggggtggaggacgggacgcacatgacacgaggttcgtcgccgtcgccactccaccccaaaaaccctaaccgatcgaggggcgcagccaatgacgggaagactccaccgccgcgccacgacctcgccgggatcccctacgaccgccactgccgcgcagcaccgtcgccgtcacgaccaccgtcgccgccgccgcccgcgtcaagcagagcgacgacaacgacgatggccgggacttcctcttcatccaacgtgtcaacctgtcacatccctaaacccttcccttattctctactgttgttcaatcatccatcgcaaatagaaccacctgactagatctaaacctagatgatccaatagacaacactaacaccccaaagtaatggattacttgatcgattgctccagaacagcataatacctttcattgttatgattatttcacctgcaataaaattgggcatcaggatttacctttacctcccccacaaccccacatagatagctgagtcagaatgcacatgcacaggaagaaaaagagagaaaatgttaagaaaattgcacatgtacaggcgtacagcacattgtgaaggaaaccaagattagagaaggatgggagccgcaggaagccaggaagagcaaaggcaggggacgatggggatatggatggtatagacgtatactccaaactccaaaatcgaaacgaaagagacgcacaactaagggcagaatgaaactctctacattactccctcgtggatttcaacattttgcttatactgtttgatcattcgtcttatttaaaaaaatttaaaattattatttatttatttttacttattttattatccaatgtaatttgagcacaacttttcgttttttatatttacacaaattttttgaataagacgagtggtcaaacagtaccagcaaaatgtcaaaatcccttatattatgggacggaaagagtacattagttagacttatttatattacactcatgccaagtaaactgtaaaactggtatcggcttacttaatgaagcatgttatgcatcactgcaaaacttcaatcatcactgcaaaacttcaatcaagtgaattaacaaagatccttgtgagataatacacataaggtcttcggacagattactttcaagaaacagaaataaacagggggaggtaatgcacatatactccacatgaatcaaagggtctaccataagcacacagaggacaagaagatacagaaacaaagaaatgtgatttggagagcagcactagtgaactgccgagctcttctggagtttatatacatgtaagtacgccattgccctaacctcgatgctagcttgtacaaaacctgagaatcgaaaaacatcttgctgctccagtttggaatctaggaagcctggggggtttctagaaggcgatacatggtgatctcttgctgcttgaagtacctcctatcttcctcatcaacaaggaccagattcaggtagtacttgacgctgaacttgttgtttatgttccgatacgaaggggtcagctcgtaaggcgtcaagaatagcctcaccgggatggattctcctggaaaaaaaaaaaacagttacctcaagttcacagcaaagcaatatccttgcaagcagagagatcatgcaagaagctaaataccgaatatcactactcactagaatgagaagctttgaacgttggcggtgctgaacgaaacggaatatgacggttataacttttacctctataaacatcggaaggaaatgttgatattactttatgcaccacacaatttgctttagtattaattaggatccttgcagccagtcctacttcaagtatacatgggatcaagttggaaagttctcaagtgaatgtttagctctactggggctgatatttcctaaatcataattaaagtatataggaattgtttcaagcagggaaagtgcacttccacagtgcatcgtgataattgagaagaaacccctgcaggatcactaaataactaaaatagacttgcatctacagatctaccagagtatcatataggcttgaaattcattaaaattcatgtgttttgctgttttgcaaacgttactaccaagctttgagtttaaggtaatcagcaaattgttgcaactatcataccacaaaaaagattcatgaaaagcatgcaaccatgtggtccacaaataagttatttataactccaaagcatgtcactttaaatatcaagcaacaagacaaggatcagcatgtaaaggaactgtacattcaaaaatatattaaaaatgaaaaaaattacaaaaacgtacctctgacaggagcaccatccatcaactcaaactttgcaagagtttcagtctcaacatatgcactagagcctgctcctgttgattccctacgacgtacttctagttccatgttttttatctttattctgacaagaag

SEQ ID NO: 22049 - DNA, 7462 bp, Oryza sativa
cggatgggagggagaccggagcctcggccatggccagctccttcctcgccgccaccctggaggaaggcactgtactcgtggaggtgagggaactcctggcccgacgacgcctgggtgttgaggtccagcgtgtccacgccggtgcggggaacggatccgtgggaagggccggacgccgacggctgcgagggccaaatgttgccggcggcggacgaaatgggatcttgggagaagaaatcgaagccgttggggtccatctccgcgcggattcggtgcacagcgatgcgtcgacgacggatctgatggccggcaacgcgggtggggtgagttgccagtgtggatgcctctcggtggatctgaaggaaggggcagcgcgattcgagggagagggcggcgcgggtgaagggccgggcggcggcgtgggtggggggagggggaggagaagctagggccgggcggcggcgcgggtgtggggagggggaggcgaagctgggccgggcggcggcgagggttctagagagtgagcgggggcgacagcgagcgggggcgaaatgcgatgggttttgccgcaacgggatcggcacaagtgggggaaagtgggaatcggtggggcccacagcaaaatagccccaattagcacccggtgggggtgataattttttggggtgggctatttgcaaatagccctaaaatagccctcctgtttggatccccttgagctattttggggttaaaaggggtgggctaaaaaatatccctaggatccaaacaccgccatagaacgatattatgcatagagattctccttactatcttgtaccaccggtaagtacacggcaataatttgctgagccagctttatttcctcttatgggaactgttatacctgcccaggggtactatttttggtagatgcatgtcggccccattcttctcttgtcctagtatatgcagtattaccttagtcctattgcatatactacattcgtcctattttaagtgcatctatagtttttcgtgcctaacttcgattgttgtcttatttagaaaaaaaaattaaaaatataagtcacacataagatacttatcatgttttatcatcttataacaataaaaatactaattataaaaaaaatttaaataagacggacgattaaaattggacacgaaaactcatgggctacactaaaacgagacggatagagtagtattaatagagtagtattaggaacagccttttgacttgtctacggcaatgcacaaatagtaatcaatataatctaatcatatcttttattgataggaacaattgtttgcacagtactgatatatgtatattttttttcatgttatttcagatcatatacatgaaactcataatcaaccttctattctgttgatttatataattaataatttgaatctgtagacaatccagatcatgctatatggagtataacattattaattgcctctttgtaaataaccattatcagaactatatattcatcttcaaactttgatcactactcgttctttaaaagacaaatacttaaaaatgtattatcaaagtgtgccgcattaatcgtgaaatagttttcgtttatcatagtctaaccatttgcaagatattagatgcatcctcttgttttctctcaatccctccaactcaactcaaattgtactcagtgatgccattccttttacacaattaattgcatgatgttacacttacacaccattgtttacgccctaacgaaactaatgtgtagtgcacgtaaaacgaagcgattcattagcgcataattaattaagtatttagttttttttaaaagggattaatatgattttttttaaaacaactttggtgtagaaattttttttaaaaatgtactgtttaatagtttaggaagcgtgcgcgcggaaaacaagaagaaggaagttaggaaccgaagtaacaaacacaaccttagggcactcccaaccctccacctagtatgatgtctatggcattaactacattgccatgtaggacttttagcttatgtggcactatattaattaagagagagggagtgaagagaggaagaaactgggtctcatgcaagacacagcttcaacacgagaacctatgcactagacactatcaagttttgcattgggagagaatagtgtcttcataatagatgaaaaataaatatgattggtagagaagagatatgatgtatttattaatggtctattattttaagaaaccatggattatatagtgtagtgtgatttcttattgacatggcaccatagacactgcttatggacaatatggattgggactgtctttaatccaatcaaaccaaggccaccccgtgaatgttcactgcatacgcatagcactattcacatgagacagacccatggctgggcctaccaaccgtcacatattgatctggaaggacatgcactattcagcgcgtgtgagatgcccaatcaaagaaataactgaaattgatgtagataatttgtttacttaaacaccgtgggaacgctggaaagttaggggtgccacgtcagatgttacttttgtaaaaaagcccccgcagttctgttaattatgcattggtccccgctgataatttatagtataaattagctaggtttggctatcgttgagcattggccgaaattctattctattaactaaacaaattagctaggtgacttgaagtgaagtgagtgtactcaccatccaattatagttaattagggtctgtttattttgttgccactttcgattcattaatattcatgtgtgagggcgggaatattgtgaacattttaagttagttttttttattagaggaagtatatcctaataattgattctcatattttattgatagtatggagcgaatccttgagaagtatgacagacatgagttattatctgaaggaaataatgtgattgaagagttccctgagctggaggtgtgtacgtaggaaggggaaatgttcatcataacatttgtacattcatcctgtataaatatgcactacattatatatcactatatctgttcaatgtataggtagtaaacaatttttagtttacatcttctgtgttctgcgcagggaagcatgagctatgaccacatcaagctgaggggcaggattgaagctctaaaaaagagccaaaggtaacaaaaaatctagacaaaactaatagctcttcaatttttcccttttctgtatttaacaaatcaactggcctttccaatgtagtatgccgtgttagtttcaatatacagaaaataggaacagtatctgtggatacccaaaatatgctacatatttctgtaaacttttattggtttattaataagtattaattaatcaagaagagggatatttaaaaaaaattaaaccctgcaacatactcttctgggaaatgatcaatcttttttacctggtgggaaaggatgatcatattatttttagctcgattatttgtcgacacatatactttattgaacattgttgatcagctcagcatgctgaatatatatggccttgaatcaatgcattagtctgaaaaaaaataggtgcaaagcatctttctttaataaaaatgtaagtgcaaagtatcttcatcttcttgaatcttggtactagctagacagtggattctttattgatggctcaagtttgtcactgtcaatacaaccggtaaaatattacaatcaataaaaccttttttttaaattaaaaatgtcatatatgtccatctagtttgatcttatatatggatttggctcaaaagctgtctgggaatcagtggacaaatgctaaaacgcagacacctattcttgtcaaatgtatatctcctttgtacttgtgatgccctagttgttggcaggatagggacctcatgctctcatacttgtcatccatggctcaggaatcttatggggcaggaacttgactcgctgacactgcaagatatccagcagcttgagaaccagatagacacttctctgaataacataagatcaagaaaggtacaaacacacacacactgaacttatagaactacaaaaatatgtttacttgagatgatcatattgtgtggtgttgctaatggtttttaatttgtaactaggaaggtaacccgcgcgaggcatgtgttgtacactaagtttgagatatttataagagcaaaatattgaacggagaacatctagcacaatttctccataaattgttatcatcggcatcattgcttttataatgttataacctattagttttatattgtatcatatttaaataatatctattagaaattatttataatcttctttatcatttgaaattaagagacttattttttttaagaaaacatgttaacgaaagtaaaaatatggtgtttttgaaattacatatctatggaccatagttcattaaaggattaattaggtggaagatgaagctccactaaacttttgggtttatatagtctaatatggttgatgtagtttgagaggcaatccatatatgaacatttcatgtagggggggtgagaggctccatgcagcctaacatgaatacgataacgacgaaatataattgcgcagtaatattttaaaaatattatgtaccatgaataaattcttttttttaggtaagatagatttaacgattataactaatagtttaccggtttaaaaggcacatgagtattgcagaatgtagcttaaaattatggttgttttaatattcaatgttattgcgaagtgagcgcacctcaactggttaggtttcttgtggtggaacttgcccactcggattcaagtcctagatttgatatgggtgttggcatttacgactaattattctttcagtggtaggtgacgtatccatcgacagcgagacgacatggtaacttcttcaatcttaaaatatgtcggctcagtctttcggaggtactaaaggggtagggtgcgtagacgctgtgtttctaagagatttccaatattattaattgtttccgctaaaatctatttatttttttcttaaaaatgtatggattagtttttgtcaacaattagtgaacaatagctagtccgtagaatatatatctgatccaaagtaatgaatttttttaataatatagttaacttggttctttagttttaaattttatagtaaataatctaatttatctcctacttatgctacattcgatctcattggttgagcttatgtagggcacacaaaacgatataggccattaacgcatgattaattaagtattaaatattacaaacgtgaaaatagtttttttttttaaaaaaatgtatagaatgtatttgcacaacatgcgcagattagtagtttaaatgaggcataatttttagacaatacattatttatttctgtttttgacaatatgtcctgagtaatttattactcattatttcatcttgaacaatcaagatacgtttttttgatattttatattatattatagatctacttttggctgtgcaagtttgtaaagtaatatatttttcttatactaccaccttcactaaatatatgacgttggtcatcaatatataaaaaacaataaaaaaaatacaaaggaagtacaaagagcgttcttttctttcggtagtttcactaaatatggccgtcataagaaaatacagagaagtgcaaatccacctttaaaaaaagcgatgttttttttaatttccagtagtacgtacgtatacagttttttttttctgtatattatttcttcttttctaggccgtggttgttaatccgtatgtacgtatgccttctcagctttttctagtcaatttttttatggaaagtattgctcggtaaattaggaggggtagattactatttataacagatctaatccaatggtgtaaactaatgggtccaccaacttaaatgaaaatcgagggctagattttttttcttttttattagaatttctaagttttttctattttattattgcgccatgtggcagcttgagagcgtttttagagcaccatgtggcagtatgagagcgtttgtaggaagtttaatggacttttagtatataataatagaagatagatagatagatagatgttttagaacaatctcttgctcaagtcgatcgccgagctccgacagaaggcaaatgctaaaaaccttttgattcttaaacttgtaggtgaaatggttataaatcttcttaatgttagtcttttttgtctctctccaggaaaagttgctgatggagaaaaacactattctggagaaggtattctgttaattttactgatggaatgaaaagcatatcctaattattttcagttaccactgcatgattcatgtagctgtactcagctcaactgaactgaatcactaattttgtgttaatttgtccatgaaaaaaaaaaaagaaaattactgaactggagacactgcatacatgcatcagggcgtcacccactaaagctgctgctcctcctgcctgcaatactgctgatgcatttgttcccaacctcaacatctggtgagccacaccatccaactgccaccatgcaatgcttgccatgttgtttcttcagattcacctcaactgaaactctgatacctggccttcaaatcaaaccgcagctgcggcgattccggcgagccggaaaccgtgacggcgccacttggctggaccagcagcaacaatggcttgccatggtggatgctccagtcatcatcgaacggcaagagctagaagatgttcagatgaaatggtccctgcagccattgcatggttgctgaataatgtcgtcccagatggttaggcaagcaacctagctagaactttcagttagtgagcggtagtagtatctcccccttcttaatccctactatactccgtagattaattctaagcatccttttgtttccattatctacgctgctggtttgatgaaattcctgtgttgtattcagctgcattgggatcattgctcagcctttggtcatgtctctcactggaatcaatgtgtcatgtctgtcttgcaatcacttcgatctggtattctattggtcagtctaatgagtgtaccttctagtactcagttttgtctgaattgtttcacaggcaaacagaaaaggcatacttttctccgttcaaatatagtaatctagtactccctcagttttcgtttcataacgtaagactttctaatattgtccatattcatatgggtgttaataaatctagatacatatgtgtgtctagattcattaatatttatatgaatatgggtaatgctagaaattcttacgttatgaaacggaagaagtactagaaagtcttacgtactctatggtgtgtctaacctagtagtagattgctactccctccgtccctaaatatttgacgccggtgatt

SEQ ID NO: 22050 - DNA, 589 bp, Oryza sativa
gacacacatgcgccattgcccagttttcttccgaactagaaccgggttagccagccagtcgggatgaaggacttctttgatgaagcctgctgctaacagcttggttaattcctccttgatcgcgtccttcctgtcttgtgcgaagcggcggagtcgttgtttaataggtttagcgtcttctttgacatgtaaggagtgctcaatcacctctctaggaataccaggcatatcagatggtttccacgcaaagatatctttattattttgaagaaaggtgacgagcgcgctttcctatttacaatctaactcggcgcctattacagcagttttagtgggatcagaaggatctaggggaatttttttagtcttggcttcgccttctccgctctttgagaccttggtcgcgggcacttctccttcgcttgccgtggttgcagccagtcggatatcttctcgggcagacgccatctcgcgagtctgggccatctcgcaattttccttgtcgcatgtgacggcttgcttgatgtcgctccgtagagataggactccccggggaccaggcatcttcatcatcatgtaagtgtagtgc

SEQ ID NO: 22051 - DNA, 669 bp, Oryza sativa
ctggtgtgtggcaaaagcgaccttctcctgatcattgcactgcaggagattcagcttcttctctattgcatggagccagtcatttgcctccatagggttggtggtgctggagaaggtgggtggcctgacacgtaggaactcaggcaacttggactgagggggagggggaccaaactgctggtgctgctgttcggcgtgctgcatcatcctctggtgcatctgctggtgctgctgctgcatctgctgcatcatggctgccatcatctgagtctgatgtgccataacttgggcaagggtcggattctcgggaagtggtggcagaccattgccggaatcactgctggggtgcacaccatcagcacgttcttcgccgttgctgccctcgcctatcgtgcgggtgccagtcctggtgtagaccatctacagggaaaagcagacgggggaaaagaagaaaaacagatgctcaggaactaagctttattacaaaggaatttaaactgcaattgttctgatctgaattaaaacacttaaaagagcaagcaaaaatccttattaagacagccatatcataggcacatgatatggaccgttgactgaccccaaacaagcaacctaaacacacaaactaacaaggagaaagctagacagtcgataaactaatgggaaaaa

SEQ ID NO: 22052 - DNA, 1696 bp, Oryza sativa
gggggtggaagcggtacgccgtgtcatggaagatgtagttgtggcgctcccgcagtctggccatcatcaagtaggctgcctcctgacaggcgtgatctgctgtgcctcctgacgcctcaactgccatgttagcgaggcaagtccccacgtagccatggacctccaagctgacacggtgaggaagctcgccactgagcggtggaatagtcgtgtactccggcgcgttggggtagcccaccaccagtgtcatgcgtgccaactctgccacaaagtcgatcatgccttctccgcggtggttgggtgggtgaccggccatctagagaagacaagtgagtaggatcaatgcatgctcaaatccaaatttaaacaaagcaataaagactcaaataagggaatcgaataagagcgttattttatgcatagatcagtttgcataagagcgaataaataagacagactcacataacgataaaataatgagaaattagatacatactaataataacaaacaaagcataaataccttgcaacccatgttactgagctaggacctaatgcatttcacccatcaaatcccaactgactgacgaataaatcccaatagttttactaaaaccctagactgactcgttttggcaaatcccacttaaatgagcgacaagatttttcccttgaaccacaagaacagatcccaattttcccggaacaaatccaattgcaaagaacatatgcaatgaaaaggattcagagggctcttaggtttttttccatttggcttgtcctacggtcaaggtcggctctgataccaacttgtcacgcccagaaattcccgaatagaattccaagcagaatgtgcattaaaatccccgtccaggaccagccggggtacacaaacgacaatgttgacatacagatccacgtcttacaaacatcataaagtcttacataaatgcagcggaagaaaagaaagacaacaggagctaagccttgactaaactttgactaaactgcagcgggaacaccactccacaggcatcctcgacggcacggacgaagcctactcctcagagaaaccttcatctgacccgaactcgaactctggggttgggaaaagtagagcaagactgagtactacccactgtactcagcaagtcataccggaataggggtatgatgcagggaaatcatcaaagaagagctgaagtggttcatttgcataaagcgagcatttataaacagagattgaaagatttaaacagttgtaataattaattaatattaactatccactgtccaacgctaacccacgttgcgacaggcccaaccatccacctaaactatccaaattaaaggattacactaaggtgaaactaatcacggtgaatctggttgaccgcccataaccgcgggcacggctattcgaatagttttactctgatcagaggtgtacaactgtacccacaagacacagccccacgacacgtttccgtgcgccgacatgtcaccacgacataccggaaagaggccgtgacaggaccattcgcatagccccctctaaccaagcacaccacacctcaggtttcacccccactcctcgcaaggcagcgggcagtcccctctcgtgcctaggtgaatccggaagccgcataggccatcgcaggacccatccaaactccatcacgcccacccttgcctg

SEQ ID NO: 22053 - DNA, 985 bp, Oryza sativa
aaaatcaaaaccggtgcggatactaatttcttcttgagctcctcaaaactcttatcgcactcagctgtccacttaaacttctcatctttcttaagcaactgagtcatgggtcgggcgattctggagaagttttcgatgaatcggcggtaataacctgccagtcctagaaaacttcgaatctgcgacacggtcttcggtgggatccacttggtgactgactctacgtttgacggatcaactgccacaccctgggctgtaatgacatggcccagaaatttgacttccgtcaaccagaagtcacacttgctgaacttggcgtatagctggtgctccttcaacttctcgagtaccagacggagatgttgctcatgttcttcctcggattttgagtagataagtatgtcgtcgatgaataccacaacaaacttgtccagaaattccatgaacactttgttcatcagattcatgaagaatgcaggtgcgttagtaggtccgaaggacataacggtgcattcatatagcccgtaccgagtggtgaaggccgtcttcggaatatcctcttcccgaattctcaactggtggtagcctgatcgcaggtctatcttagaaaacactttagctcctttcagttgatcaaataaatcgtcgatccgcggcaagggatatttgttcttgattgtgacctcattgagtgcgcgataatcaacgcacatcctcttcgtcttatcctttttctccacaaaaatgaccggagcaccccaaggtgaagtacttggtcgaatgtaccctttctgcagctgctcatcaacttgcttcttgacctctgctagttcgttggctgccatcctgtacggtctcttgtaaattggggcggttcccggtgccaagtcaatccggaattcaatctctctcttgggtggcatggtagtgaggtcttcggggaacacttccggataactcgcagactatgggtatatattccatt

SEQ ID NO: 22054 - DNA, 505 bp, Oryza sativa
cactttgttgtgatcgagaaggtgttttgcgccatagcaatgatcctcggcgacggcatcttccagctcgtcgcgatctcgctgaggacgatacacacggtgcgccaccaccaggtagcggcggagacgctcaggtccttctccgacgtcgacgccatgccgcggccggtgatgagcttcgacgaccgccgcaggacgcaggtgttcctcagggagcacatcccgagcaccttcgccatcagcgggtacgtcgtcctggccaccgtctccaccgtcgtcatcccgctcatgtacggccaggtgaggtactaccacgtcgccgccgcgtacgcgttcgcgcccgtcctggccttctgcaacgcctacggcacgggcgtcgcggagaccaacttctcggcgcagtacaacaagctggtgatcctcatgttcgcgtcgtggatcgggatcaagaacggcgggatcgtcgggagcctcgtcatctgcggcatcgtgtcgtccatcgtct

SEQ ID NO: 22055 - DNA, 781 bp, Oryza sativa
ttcctgcagccctgtgaagtatacaccgatcacaaaagtcttaagtatatcttcactcagaccgagttaaatatgagacagagaagatggttggaactaatcaaggattacgatcttggaatccactatcatcctggtaaagccaacgtggtcgctgatgcgctaagtcgcaggcctattgcaatatagctcaaatacggcctgaccaaggtcaactgtgcagagaattggagaagttaaggctgaccgtggtacagtcaggagtccctgccagcttgacagtacagcctaccctagaatcgcaaattcgggaggcacagaaagaagacgaagggataaaagagttaatagaaagaatacaggagaagaaagacaccaacttctccatagacgatcaaggcacagtttggtacggtccacgcatctgtgtaccggccaagaaggagttaagagacctcatcctaaaggaagctcatgagtccgcctactccattcacccaggaagtacgaagatgtaccaagatatcaaggcatacttctggtgggctggaatgaaacgagatgtcgcagaatacgtagccctgtgtgacatttgccaaagagtcaaggcagaacaccaaaggccagctggactgctacaacccttaccgattcccgagtggaaatgggaagagatcggaatggatttcatcaccggtttgccaagaacccccagcggatacgactccatttgggtaatcgtggaccgactcacgaagtcagcacatttcgtgccagtgaa

SEQ ID NO: 22056 - DNA, 771 bp, Oryza sativa
actgaattgatcacatgcactatttgggggcaatgtaacatatggattacctcaagtggagttccacaggcaacaagtttgactccattatcacgacagtagttcaaaaggggttcatactcctgccagcgctctggtgcccagtgagaagtgtacaaccttaagttgttgccatcaattctgagcaaagaatgaattttcataaggtaagtgcacttgatattatcataagcagcattcagacattaattcatggccatccgccatcatgcttgcaatgtagtaggtacatatcaattctagaaaatccatttggggtggccggttggaacttttacagtacaacatttgtttggtgatgttgctgcaaggcaattttagctagtattgtggcaaggtttccacaaagtttaacgctacaatctaatagagcctttaacgctacaatctaatagagcctaagtaatctcagagctcaacacaaactacagactgacaagtactaactgcacttgaatttgaaacgattaggactcaaatctctaaaaactcaaagctacagataaatcacaacaagagcccatcctgtatatagtcagtcagtcagtcagctagataactagactaataagtacaactgtagaagtgtagaacaaaacctcctgtccatgaactggttgagctgctcctggaggttgcacgggaaggcttcgagcgcaagcgagatgctccttccggcctcggcgcaccgtgccgccagcttcctcacga

SEQ ID NO: 22057 - DNA, 768 bp, Oryza sativa
ttcctgcagccccagttgtacagatcaccaggctgaccgttgatggtgtacgcgtcggagatgttcggcgcggcgccggtcctctgagcctccctgatgacttgatcgggtccgcgtcccaccattcccctgtccatcgtgccagtgccaacattttcagtgtcagttcagacgactgatctgatagttaatatgcagatctgtgtacaaaagtaggaaggatcaagactgaccgagaataagggggacttctcgcgcgggcttctcgaaggggtaggtcttgttctccctggggcggatgatgagcgcgccgtagacggtggccctgagccaggagctgtgcgcgtgccaccacagcgtgccctcctgcccctcgatggtgaaccggtacttgtagctgccgcccggcttgatcgggcactgtgtcacgaactccggcccgtccgcccaccccgtcctgaactgccggatgccgtgcctgcacgcgcgcgttgatcaccatgtgttagctagctagatctcgaccggcggcgcagaaaacaacaatcgtcgccgttgacgaccaggagcggaagtcgttagctgtttgattggtgtacgtagttgggtcgacgacacgtaccaatggatggtgacgttgtactgcgcgtggttgacgacgttgatcaccacggtgtcgccctcccggacctccagcgtcggccccggcagctgcccgttcaccgtgatcacgttgtgtgtcttgcacagcctcttcaccggcgtctc

SEQ ID NO: 22058 - DNA, 836 bp, Oryza sativa
tccggtgtttgcatagtatggggatcgttggtactaggatatatgcgagattgtagtaaaagagatggagacgcagatttttatacaggttcgggcccttgaattgtcaggtaataatcctacatcctgttggccgaagccggtattgctcttattcaccataatcacaccagtacaatatttggggtagcctatctaactgttgtcgacttggcggtctgaagttctgactcgtagtcgacaacagggtattcttccttctcgagttcgtacccagcgagatcagagacagcgctagatccctacggctggcctctgtaggtaccagatagggtcgatctaggcatatctctgatgtcgatgtccggcggcttgtcttggcgtatgttggcttgtatatcgatcttatgtcttgatctattgttcgtgtcccctctcatcctagggggccttgtatttatacccatagatgtccccttatccaagtagaactaaggaaaccaatatggatacaatccgagcagtccatgtcgtttctatgcagaactctattcatccttccttatgcggaactcctcctatatggtgggtcctgtcaagatttagtcaactactattattaggtatgtggtatctataaccctgacacaagtgactttgcgtaatctcatcattcatttttatttaaattggcaggcatgttatattgaggacattagatcaaatgaacatctacggacttaattgtatgcaaaaaaaaccataagtagtgtaggtatgattcagacaaaagtttgagcttacaaagtagggtaccgagctcgaattcgcctata

SEQ ID NO: 22059 - DNA, 7164 bp, Oryza sativa
agatcagggcttgctacagcatgaagagctcgggtatgggggctcgcacaccggtgctgtttggtgggcaacggagacgacggcctccttcctttcttctgtagaggctgtttttctttttccttttttcatgttcaaaatgcttgtatgctgtgttcacttccatgcatgttaattgaatctagtgaactctgaataagcatttgaatcgatgctcgaaaatttggatgtggatttgaatctgtacatgctgtgaaaatctgattttggggatatttttggtgtaatttttatcgcaggcggctagctatggttgcggttccattttgattatttttcttcgaaattattttcgctggcgggtgtcattacctaccgccagtgaaaccaaatttttgctggcggccgcccaccgccagcgaaaacgaggaatcgctagcgaaaatatgttttcgctggcggtccacataaggcagccgccagcgattcgctggcggctgccttatatggaccgctagcgaaaattgaaattctctagtggtttttcgccaccagcacagatgattcattttcactggcttttgctttgtggcggctccaaataccaccagcaaaaacctaaaatggccgccacgaaagatagatttcgtagtagtgagcatcactagaatgctaggttcatagaacgaagtttgggatcataaaattagcggcacaggctgcaattgtcatctcttgtttcctcctgatgcttctcattctcaacctctcctacaatcagttctatctttctcctagtagtcaatgggatttgtgatagcttatttcagttgttgttgcctgagttggctctcttactgacgtagttttttattggtagagatctgaggtatgggtcagtgaacatggaagtaactatacgtagggtgtgtttagttcacgtcaaaattagaagtacggttaaaattagaataatatacgtgtcgaatataatagtcctatttggttacggttagacttggagttggaatagatgtaggatagagttagaattgaactctctcataggctctctcttaaatagagaagggggcaccacaatgtaaccatggcgactataatatagcgtagacatgcagggagagatggcggcgtggccatgaacttgtagtggctaggagctatattggttggggaggagcgcccataatcagagccccggggatgtaggcttcggctgaacatcgttaacaaatattgtgtgttcctgtgccgtcatctggcatgtcttcggtgatcaatgactgaagcgatcgggaaggttagtcgtcgttccactatatcgactaagttttataacacgatgtaacggaaaagttagaagtttatgtgtgtaggaaagttttgatgtgatgtaaaagttagaagtttgaagaaaaagttaggaactaaacaaggccgtagtacatttggattaaatggttgtatagctataggcgtgtcccatggtttggttggtggcattgagggtcaatatataaaccacatgttttctagacatagttatatgcagcaaaaatgcaaatgcaaaagttgttatgcataaacaggccctcttccaaaaaaaaaggtacatgtcatgtattttagaagccaaattaagcttcacatatatgtatgttatatgaagataaaacagaatgcacgtgcatgttatacttttgggcccctagcatatactctactagggtattatattgcaaatttattggttccttatcttatggctatgattaggctgcgtttgtttgcaggggttccaaactcctccctctcattttccgcggctacgctttttaaactactaaacggtatttttttgcaaaaattttcaatagacaagttgctttaaaaaaatcatattaatccatgtttcaagttagttttagctaataattaattaataatatactaatgtgtttctctgttttctgtgctggaaaagaaggttccaaaccagcacaaacgaatatagcattagttacttattggttgcactctgcttactggtagcagtgcttggaatagtccgagagatgatgatttagagttcaatccatttcatacctttctaatgcaattcaattgaattcggttcaaagtttgggcatcttcagaccttgagatggtaggactggatgttgttggtgtgccacgccttttaccgttaatttatagtaggagtatacggtacaaaaagttgctcctggttcattgtgaatctgtgccatgcaattggaatgtcgctatgtatagaggaacactttcagaaactgatgagaatcaagttccttgatctttacttcctactccctcagtttcacaatgtaagtcattctagtatttcttacattcatattaatattaattaatctagataatatatatgtctagattcattaacatcaatatgaatgtgggaaatgctaaaatgacttatattgtgaaacggaggaagtaataggttaggagacatgggaaatctggtaacttgcttatgaattaatgagcagaatgttttagagagagaccttgctggggtgttcacatctgcatttctcgcacactgggttgcttcgaggaaattgcagatttggagaaatgtaatgtcaataagaagatgcatcaaccgcgattcggtagaatttcaattgaagatctgctgcgcattttgttattttacttatctactttgaccattccctaaaatttcaaccaagaagtatttgagttatgctaaaattttcaataaaggaactacactaggggatccatatattcatgtagtggtacatcatgtgttaaatgatgttttatgaagagctcacagtaaatgtgggaatccgtgagaggattttatgggagttaaaactaccattaaatatcaatcttttaagtttttatgtagttccttcacagaaaagtaatcgctgctaaagataacttggctaaaagaaattggaggggagacaagcaatgttgttttttaatatgtaagagactattcaacatctatttttttattgccacgttgcatgttttgctttgcaatgagtcttttttactttcaacatccccttccttgtaatgctaaaaatatttttggtaattggctaaacggagtgtcaaaatcaattaaaaaactggcaagtgttttacgctggtcattctggtgttgccgaaatgatatagtttttcttaaaaaaaaagtctaatacaatgcaggttattgcagaacaccctgaacagttcacgaatgctataacagatcacagccattacacggttgtattgtgcttatgattagcgcaatgctacacttctaaaaaaccatcataaggatcggcactataggtgctggttcatttaaaatcggcacatactgtcttttccctcctctatgggctaaaaacaaataaaacaaatacctttaaataactataggtaccggttctataggaaaacagacacctacaccttaggtgcctttttttaaaaggaccgacacctataatttattaccggtatcgattaattaaaaccgatacctataataaactattggtgtcggcgcctatagcaaactgagccgagcggagctctcacgctggccttatccattccagatggcctttatctctctctcggatgcgcttctctcgaactctctcttgcctcggcagatcggggcgggtgagtgcctccactagcagatcggggagggggagggctgcagccggcggatccgggcgggggagggctgccgccggtggatcgggggaggggggagggcacgcaacagccggaggatccgagcggggagggccgccgccatcagattagggcaggggagtgctgaccccggcagattggggcgggggagggcggcagcgggcagatctgagcaggggagggccgatgccgtcgcccatgccagcccccgccgtggccctctgccgccggagtccgcgttgcgggcggcagcgcccactcctaacgccttttcgtcggccgcgcccgctgcccggtacctcccgccctgccctagcccttgcatgccgccgccgccgccagagtcagcgttgtgggccgctcctggcgcgtcctcgtcggccgcactgcccaccgtccgctgcccagcgcctcccgctcgggcagagaaagacagagaggagaggaagagaaagagatggagaggagagaatgagagagagatagaggtgaaggaagagaggggggggggaattattagacgggagagagagagaggagaggataagaagtgaaaaattttgaagtggtgaggagggaaaaaactgtaataaagaaaagatatttttgcatgcggaccctcaagagatccgcatgcaaaaatatattttcgcacacggatctttaggaggtccgcatgtgaaaataggctcatttttaaatgcggccccttaagaggccatatgcgaacatagagggcaaattttgtagacgccgccagttacactccatctacaatctaaaggggtcctcgtatagaaagttcatttttttatagtgaaataaaaattaataagacaaatgatcattttttcctgtcaaataacttttagaggagtttgttgggacaaccatgtgcctatgtttgaaaagttactgaaggataaaatatattctcttcagcctgatgctggtcaatttaaagggaacgaagcggctgaggttttcatggttgcatccttggaatggacatgtaactaaactgttacatgttcatatgtctctgaggacagttgaacaaagtaattcgttcacaactcggtgctatgcgcttaccagggcttgagaggcattaggaatggtgaaaccacattggcgagtggaaggacgtacgcaccctgttgtacgtgaaatccctgagcggaggagcaaccagatccgacgcccccctccgtcgcaccgaaggtccccgccggaacagcaccgcctcagccttcctcgcagccgctcggcacgacggcggtctgctcgggtgtcagcaagaaaatggagtgaggagacgagaagccgagtgacgacacgagaagtccgcggcgttccacggttaataaccttctgactttgaattgtttgattgtgaatacacgttaactgggctgtagtcgaattcggccttctttacactggtggagaaaccatctttggtcggtcggccgaaatctacaataatctcagttccactaaaaacccgtctttagttccggttcaaaaggttaaagctactttttgatggcaggtggtgtcagacccctcctttatctttagtcacggttggtgacaccaaccgggactaaagatctatttttagtcccggttggtgttaccaaccgggaaaaaagatcgacatgcgcggtgcgagatcgagaggactgaggcgcatgagaggatcagttaataagttatgaccttttatctcctcatcccctcactcaccccatgtcttcctcttcctcctcccatgtcttcctcttcctcctcaggatccgcctccttccctctcctccccactccgccccctcccgtctcctccccacttctcaggcggcggcggtggccaggcagccgcgaaggcggcctcgcgtggccgggaagcgcggaggcgccctcacgcagcggccgggcggcgacggaggtggcctcgcgcgccctcgcgcggcggccgggcggcgacggagttggcctcgggcgccctcacgcggtggctgagcggcgaggaatagcgcgcggcgggcagtggggcagcacgcagcgtgggcggcgaggccgcgcacggagcggcagcgcgtcggctcttctttcttttttttttataatttgtgattgagagatgtgtaatttcttttttagaatttgtgattcattgcatggatctgagatgtataatcgatttgtgatgcatttgatttgtgtgtaatttttctaagatttgtgatgtatttgatttgtgtgtaagtaacttagtatttgtatttgtgatgtgaatgatttgtgatgttactttgaatttggggatttggagtttgatttaggtatatgcatgacactcgatttggggatttgttgtttgttctgggtttatacatcccacttgatttgagacaaaataaaaagaaaatggaccaaccagaactgcccctatcctctctttaatcccggttggtagcattaaccaggactaaagatcgatctttcctcccggttatttcacccaggactaaagatagcgatctttagttccagattcgtagtcccggttggaaaactgggactacagggggttataaaccgggagtaaagatggtttctccaccagtgttagttccaaagtttttcttcaaacttttaacttttccattatatcgaaacttttctacacacataaacttccaatttttccatcacatcgttccaattttaaccaaacttccaattttgacatgaactaaacacaccttttaaaaaaatttcgtacaaaagtcaattaatgggacaaagaatcggcgtcatatagaaaataaatgaagaacaaagaatatcttacagttaacacttttacagcatggtatctatctattttatactaaaagtccatcaaacttcctacaaacgctctcaagccgccacgtgagactcctataaacgcttttaagtcgccacatggctctctaataattcaaataaaattataataaaaagaaaaacatctaactgtaagtttttatttaaagtggtggacccaataatattaatcgttggatcaaaactaaatatcttctcaccctttctctccggacccacaagtacgtacgtacgaacttatgcttctattagctcgatgccatcaactctggattctccctctctttttttttactaattacaaaatacatgtgcatcataatttgtgatcattttcatggagactgatctgcctcggtgagctcgattgatgccatccagatcctaattctcctttttttttccaaattacatgatacatgtacaccataatttattatcataaattattagttcggtttttttcatagagag

SEQ ID NO: 22060 - DNA, 512 bp, Oryza sativa
cgttacatcattggcaaggacaaaaggttcgtccaagtatccaaccttgttaagatcaaccgttgtcatctcactgcattaatcgttacgcctccaccagtcaatttaaaccagtggcaccggaacagagggaccttgagagatccatagtcaagttcccatatgtcctcgatggcaccgtaatacgtgctagttgtaccatcgtgtcctatggcatcgatacgaacatcactgttctggttcgtgctcttcatgtcttgggccctcgtgtagaatgtgtacccattgatttcatatccctggaatgtcgcgatagacccagatggtcccctcgccaggaaggcaagttgttggttaatcgtctcgttacccatgagatgttgtcgcagccacgcggggaaagtatcaatgtgatgccgtgtaatccatgcatcggacttaccgatgtttctggcgcgaactagcgccaagtgctcctcgatgtaaggagctaccaatgaagattgttgcag

SEQ ID NO: 22061 - DNA, 4142 bp, Oryza sativa
tcttgcttcccctgctcaatttctgattttccttgcacctacctcggcattccgctgtccattcgcaagttgccgaaggcgactcttcagccgctggtggacagggtcgctcatcgcctaccaccttggaaggggcgtctcaccactcttgctagccgctccgtgctggtccagtctattctctcctccattccagtccatgtgtctatggcaatcggccttcctgcttgcgttgttaaggccattgacaagaagcaacgcgccttcttgtgggcgggtacggatttggttcatggggggcagtgccgggtgtcctggacgaatgtctgtcgtcctaaggccttcagtgggttaggaattcctaacctcaggttggcagggttcgccctgcgcgttcgctggctttggcttcagcgttccgggcatccctatttgggatgtcttgaaggcctcggtcgagcgatctgtctccaacatgttcgaggcgtccaccttcttcgtgccgggggatggtgagcctatgctcttctagaccgaccattggattgatggaggctgctcagtggcctccttggctcctgacctcctcttcgctgtgccacagcgcctccattcgcgcacggttacttctggcctggcgaacaactcctaggtttcggacatccgcggggccctcactgtccctgtcatctcccagtttcttcttatctgggatgctgcgcttcgaattcagctctcgccgggtgtcagagaccgtcttgtttagcgttggacgagcgaccagcgctactctgcgcgttcagtgtaccaggccttcttttttggccagcactcctttgcctatgctgatcttctctggcacgcgaagggtcctgctaaatgcatgttcttcctctggtttgcatttcagcggtgctgctggacggccgacctcctcctaaagcgcggcttggatagtcattcggcctgccccttctgcggtcaagagcttgagacagcgaaccacatcctcctcgattgcgtgttcgctcggcaagtttggctccgtgtgctgtcgcctcttggttggactgccctctctcctccccggggtagctgggtttgcttggtgaccttcttctagggtttgcttgccggggcatctccgagccagtttcgattctatggtcctcctggtctcttggcaactatggaaagagtggaactctagagttttcgactctgcgttgtcattggtctcggaggtccttgagtccatcctctctgagggccacctttggtctttagctggtatcactaattttggggttcttctgggaaggtagtggctctgccccctcccagctatttggagttgtgtgtagccgtcacagtagtctttcgtctcttctttattttagtcttttttccccttttcttggcataagtcggactgactgtttgcgtcgtgtaacaaacattctattcttctaatatattgacatgcaatccttttgcgcgttcgagaaaaaatacacacctgttttcttgggggtggcaaatcgttggatttggaggtgtcaagaaaatggggatcgtaaaatttagctagctagtatcaagaatatagcgtgcagtacaattttgccaaaagaatcttcaaagcatacattattgtcatcgagttcagatcgactcaaaagattgttgatgctatatcgagcttaatagttagggagtgaaacaacagggtgagctatttatcacaaagagttacgtgcgctagctatgtgcaaatgacttaaagtgtactttaattttccattgatattgttttgctgcacagagaggatgagtgcttttttacttgtcccacttggaatctaaaatttatctagtggttcttctttaaccatgtaatttactatgtgttctaagcaggtattacgtccaaggtcctctttgcctgtcataaaaacacacatatacaaatcgtaatgaatgatctgctataattaacacatttattggtaccaatgtgatcagttgttacgttatagatacagttactttgttgcaatgccttttattgatgaaatatttatggattggtaaaaatatctggtcactgcatgaactggaaaatacaaacaaaatagaagaaaacaaaggtgaaaaaagtatcatgttgatgattttaatttgcaacaatttggtctttaatttgcagacaatttataaacgatgacaaagtaacagtctccagaacaatcattatcgtttacatgccgatatcatcgcctcatccataccaaccagttttgttcgtctggttatcggaattggaagcaccaggaaaatggagatggaatatggagccacttctatagttctatatattccattgacttttgatactataatattggatgtttcagtacgaaatgtggaaataaatactttgaaagtagtcacggcagcatgttagaagtgctaagcaagatcaaaattattctttgatccgcatcgatcgatccattccaagaaatatgatgaatcggaaagaaaatagaagaagaaaataactaaagtcgatctattacaaacatgctactggaaggattgttcttattatttctggttaagctgtctcttttttaacggactgctgatagtaataagctatttcaggtactatgcagtacatcatgaacatgaaatgttgagttaaaaccctttctgatttttgctattataatttacaaaccataactctagtcttagaaatgaaaaaaaaaagatgtttccatctccgagaaactacacagcagtcagataacaaaaacattcaccaccctgaattttgggaacctaatgcatgatccaccatcgattgatgtgtatatgctgtaaattttagccaccacctgtttgaattgtgtagctcccttagtttttgtcaatctttctatttcctcctgagatcgagtcacgcaaaagttgggccgatgatcaacagagaaatcatagaaagcagactaatacctatacataacaaaatgaacaagctgaacattacttggctcaatacatattacgatgcatatactttccacacttgtgtcctcttttacgctgctgctgtccttcttgtgctgctgcagtaggaggtgggaggaatctgaacaggggaagaatgcagaaagacggatcagtaggttggtttctcctattacgagttggtcccgattgaggtaattgatctcttttaatagttttgccagccctgatgacgcggtcgtgttgaatctaagaatcacggtactctgttttaattctgaaaagttcagttcagtttagatctattttttcatggtcttagaggctgtttatatatggagaaatgctccatacaaaagttgtagaaatttctttcaagtgtatgtttgattgtaaaaatatcccaggataggatttaaccattcaaattttcagtgtatttgattgattagcaagggtgaatgacggctgatacagcgaatattccattaagatgttgggtaagctcatccgtgaaaattgctggataatactatcgactgtagttaatcttgatcattactaataattaattagtgacagttgaatcatttcgttgttaatcagtaattaacactggtggagaagtagtttttactcccggttcgtaaccccctttagtcccggactacaaatccgggactaaagatagagccaaccaggactaaagatagagccaggctgatccccggctgctcttttattctattcttttcttcattgtttttaatatattgatttcactccatccccatccccaaaatcccaaatcaattatcacctccaaatcctcaaatcgatcatctccaaatatatcacaaaatattaaataaaaattacatcacaacttctacaaaattcatcacaaatacatcacatattcatatcacacacaaatcaaatacatcgatcacaaattctcaaaaaaaaaacaaaaaacaaaacaagccgccatcttccgcctgccgcccagccgccgccttccgccttccgccggccagcgccgcgcgccggccgccgcacgaggccggtgccgcacctgcagatcggggatgagtgggggg

SEQ ID NO: 22062 - DNA, 2288 bp, Oryza sativa
atttggtttgataggtggtgggcatactcgcatacgtagtagccgcataagttagttccctggtcctgctttgcacactacatgagaaacgatgagagatttaatatactctttatattaattgtaattagagattcaatgcaatataattttggatcatgcatgtactcactggaaaatgaaacctccgtccaagtttttctttccaagtcccgtggaccaattgacggaaccgagcccaagccgtacatatgcagttgcaagctatgattaattaattattacccgagatcaacataatagcaatagattccccgcgactttggaatagatggcattatattacctgtctatcacttggaagaccttgtcaaaaatcttctcctctttattcattgagtcgtacacagtgactctgtatgcgtccaagtcgaagaataacaggacacagtggaatctggaatatgcatgagatgagatatatatgaaaatgtacatgctatatgtatgggaacgaaatttgttcgaacgacaataaaaactcactctgtgttgtacggcagtagtatgtacgtcttgaaatgctgctgcgttaggagatggacaagattgtcctctgtgtctttctcgtacttgttgatcatttcggtgttgattttccgagggtcgatgaacccagtatcgtagaccctccactgtcaggccctttgaatctctattctacaacgatgaaaggaaattattattgcttacatatatgccaggagctaattattgaacgaaacaaatcgaactcaaagatactcacaaaatccatgcgctccgaagagagatgtcgagggcgtccagatggtatagatcgaagagatccttgaaatggatccagagaacatcttctccttgcaagaagtcggggtttctgatcctcgctccgaacatctctctacccttggcactcatttccatgtaccgtttatggaatttgtacatctgtgtcggtagggactgcagctgctcaggcctaacaagcggtttaccgagttcaaacttgtatgccacttccgccttcgggattggtgcgcctcgaatcagctgatccacagttagaccagtgtctgaaatgaattccgttatgccaaaatcttcgccggtcaccaacggctcgacctcttggtttggttgttctccaagctgagggactagtttagacttcttgtgataggctctctgaagtgttcggtcatagtctgatatctgtaaggcctccttgtttgttgcggacattcccttgaagaagttcttcacgctcgggtcaataggtatcatcttttcaggactccgaggcttgagttgcctcttcacttctcctgccacataagcatcaagctcctcttgactgcaatcgtatggtggctccttgtttttggtggcgtaaactttcgccttcttcgttgcccttgtgcgggcaggcgctggagcttggcaagaccttgtcttgggaggtgcaggcggacacggtggaggcggaggagacggaggagccggaggagatggtgcaggaggaagtggcggaggagccggaggagaaggtgtaggaggacgggcggaggaaccggaggagatggtgcaggaggagatggcggagccggaggagatggtgcacgagacgccgcttttcacccagggaggatgatgtaccgcttgcgccatagtataatggcgtggcttgtgtctcgtaaatgcgtctcaccgtctcctcctgggtagtccaactcgaagtcctcgtacgcggcttccaccagctcaacttcgaccctcgagtatcctgctggaatcggcctacagtggtaagtcccggaagggtccgttgggatggccattcccgacgccaccttcacgtgatgagaggttatctattagtaatcaacctaagcagcaacttgcggaatgtacaagtcaaaaatcatcaaactacgagcatacctttattgttcttgaagggaatatgcaactcacatggtgtccgctgcgtgatctcatcaacagggcaggtggtttcatcctgggtttgcatggcgtccattgaggcacagctgctacgattgcctgatgggctgaccattgcaggaggaatgtacggctggggatcctgggaccgatgtgcggccatacgttcaatcaccttccttgccacctcctcttgcatgctgagcttgtagctcgataccctgtactcaagatctgcaatcttcgcctcagtatctctcttgctcctcatccgactcctg

SEQ ID NO: 22063 - DNA, 5241 bp, Oryza sativa
atgggctgaccattgcaggaggaatgtacggctggggatcctgggaccgatgtgcggccatacgttcaatcaccttccttgccacctcctcttgcatgctgagctcgtagctcgataccctgtactcaaaatctgcaatcttcgcctcggtatctctcttgctcctcatccaactcctatacgtgtggatgtcctccttgaacccaatcttccaaggaatcactcctttccctcgtgttcgtcctggatgctctggagtctgcagggcgagtaacagctcgtccttctctctgtccggtcggaacgtgccctgagaagaggcttccactacgtctgttagtcaacgcgcagcctcgcgtatctgatcgccgaacatcagggagccatcagctgggttgagcgttccaccgtgagcatagtaccagaacttcgattattctggccatttagcggtggccggttcgatacccctctcaagcaagctagcctctatctcctcccacttcggcatcgtgacgctatagccgcctgaccccaagtggtgatggtacttcttcttggcggcattttctttatttctttccatcatcgcttgcccttgttgccctgtcttataagccacgaacttgtcccaatgatcccttagctttgggaatgtgtcgaagttcggtgttagacccttcaggatgtatttcttgtagagatcccccttgaagctctggaactgttctgccattttcttcagagtccactgtttcactatgttctccgtacccgcgagtagcgtgaacgtctcgagcattatggtccacagcatctctttctctgagtccgggacaaagctgtcattatccccgcgtgcccttgttctgcgccagtacaccgtgctgacaggcacgttgtccctcacaacacaaccgcagtggcgtacaaaattcttggctacttctgccggggcactaggtcggccatcttcgtccacatcagttatgatgtgccgaccctctatcttcttcgcggcacctcgttgtccgtgtgccctcttctgtccagcggagggatgacttccactagcttcctcctcatcgttcccctcctcgttcccctccgcatccctctccacgttcccctcctcgttcaagtactggtttggatcctcgttcccctcttcttcgttccagtactggctgcttccctctgcgattgtatcatacagtatctgttcctcatcgcgatcagccatctgtgcatacaaaaaatatttgttaggtctataggtcatatttgctaaccgtaatattaaaactctactaatcttatattaaatatctaataatcttatattaaaattgtaataatcatatatatatgctaagtctaacaatcttatattaaatctctaataatcttatgttaaaattgtaataatcatatatgctaagtctaacaatcttatattaaatcgctactaatctcatattaaaattgtaataatcatatatatatgctaagtataacaatcttatattaaatcgctactaattttatattaaatctctactaatctcatattaaatcatactaatcttatattaaaattgtaataatcatgtatatatgctaagcctaacaatcttatattaaatctctaacaatcttatattaaatcgctactgatcttatattaaaaatgtaataatcaaatatgctaagtctaacaaacttatattaaatcgctacaaatcttatattaaaattgtaataatcatatatgctaagtctaacaatcttatattaaatctctaacaatcacttctttacatcacttgcctgcgcgaattcctttgatggctagctaccacttcggcttgagggacgacggcgacgtcttctctgcaacattaccaggaaatcttggtaatatatatatatatatatatatatatatatatatatatatatatatatatatatataaaatcttgtatgtattaccaggaaaatgtattagtctaaacgcgttcgttctcacacttttagtacaagcgcattcacgttcgtaagcgtttcgttcacgttcgttcacgctcgttcgcgttcgttaacgtttcgttcacgttcgtaagcatttcgttcacgttcgttcgcattcgttaacgtttcgttcacgttcattcgcgttcgttcacgttcgttaagcgttcgttcacggtcgtccacgtatcattcacgttcgttcgcgttcgtccacgttcgttcacgttcgttcgcgttcggtcacgtttcaatcacgttcgttcacgttcggcgatgttgggcgcgcgcggcagtggcgtggcggcggcgtctcgcggcggcgtcggggcgccgttggccggtccggcgacgtgcgggcgcggcggcggcttgggggcccggcggcgtagggcatgcatgcatgatattaaattgttaaaaactctaattaacatatgtaaatagcacatgcatgatttaaaattaataaaaattctaataatcatatataattagcatatcatgatattaaattgttgaaaattctaattaacatatgtaaataccacatgcatgatttaaaattaataaaaattctaataatcatatataattagcatatcatgatgttaaattgttgaaatatctaattaacatatgtaaataccacatgcatgatttaaaattaataaaaaatctaataatcatatataattagcatatcatgataataaattgttgaaaattctaattaacatatgtaaataccacgtgcatgatttaaaacttttaaacattctaataatcatatataactagcatatggatgatttcaatttgataaaaattgtaataatcatacataattaacttatgccatacaacaattgatttgtacggatattcaatacatccaaaatagtttacatcgtgtacacaacaattacgacaatacatcggcggtgacgattgaccgcacgtactttctcctcacaattgttccttccttgtgatcgctacgtgagtaaggggtgtcttcatttgataggaggatgctagggtcaatcgtcaccgtgaaagggggttgcccatcaaactaatcgtaatcctcgtcagtcttgtcctctactccgatgatttttctttttcctaggagaaccacatggcgctttggctcgtcaggccctttggccttttttcctttgctggacatgtccttgacgtaaaaaacttccgttacatcattggcaaggacaaaaggttcgtccaagtatccaaccttgttaagatcaaccgttgtcatctcactgtcattaatcgttacgcctccaccagtcaatttaaaccagtggcaccggaacagagggaccttgagagatccatagtcaagttcccatatgtcctcgatggcaccgtaatacgtgctagttgtaccatcgtgtcctatggcatcgatacgaacatcactgttctggttcgtgctcttcatgtcttgggccctcgtgtagaatgtgtacccattgatttcatatccctggaatgtcgcgatcgagccagatggtcccctcgccaggaaggccagttgttggttaatcgtctcgttacccatgagatgttgtcgcagccacgcggagaaagtatcaatgtgatgccgtgtaatccatgcatcggacttaccgatgtttctggcgcgaactagagccaagtgctcctcgatgtagggagccaccaatgaagattgttgcagaaccgtgaaatgggcttttgtcacagcctgattttcgtttaaggatttataaatcatttaataaattattaatagaatttatattaaatgttcattaatttacaagtgaagttaaatatgggaaataaaatttcctaaatataaagcatggttggatttaatttttattaaattctccatgattaattatactctctggaattttctcagatttttcagagctcaattcatagttttaataatacaaagaatatttcagtaattatttaattaataaattaatcattaaatggtctggttttaatattgttaaatactttgagtgtccaagtatgttcaagatttttcttggaattatttgagcaatgaaagtatttttaacaattgaaagatcatctcattggttaatttatttggaaaagtaataaaaatcctcctcctcagcctgggccgaattcagcccattctctcccttcctcccagcccagacaaagtctgatttacctccctggcgctacagtactccatcttcctcctccagacagagccgagccagccgtgctcgtgcacagtgccgcctcctcatccgacctccccgttgctcctctttccaaattagttgcgggaatggaatcctctcaatctcctcttccttttccccaagaaatccccaaaattttctatggaaattctttacaatttcgcggatcaaatccttcctttttccggcgagaaccctagactttcccgattttttttctcgtcgatttgggcccggacccgagctcccgtgcctatataaaggaccccctagtcgtcctctccctatcccctcaagtcccgtccgccgccgtcgccggaaacgctctccccgcgctctccttctctctccaagcgccggcgccgctccagccgtccctagccgccgcctcatctgcctccttcctgcgccgccacctccatcggctccgcaaggtcgagctccaccccggccgccgttccccttgcgccgaaacttcgccggaagccgtcctcgccatgaaccagtgggttgccgtcatgttccgatctccagccgcagctagcagccgccttagccgccgcttttggtcgccgctgctgccgttgggttcgcaagaaggagagggagcccggcagccatctccccgaagccgaaatccaccggagctccatcgtcgccgtcaacccgaagctcgctgtcgcattttgatttccggcgaagccctgctgctcctcccgtcatcgccaagcttcgccgctgcctccattggattcgcagctgcgaagtgaagcccggccacccctccgttgtcgccgcacatcgccggaaagtcgtcgcctccgtggacagtacctcgccgcccttcgaagctcgttgccggccatcttccgttgccgttcgtcgtcgcttaagtggtggtaagggtcactttgatcccctctcgctcccggtgccc

SEQ ID NO: 22064 - DNA, 11804 bp, Oryza sativa
  unsure (1)..(11804): unsure at all n locations
tgaaagtatatcaacttttttgtatcaatatgtgcttccaaagtacatctaaagcactcctttctgaactcacaaactaggattgaaaccacataaaccctaacttttctctcataaaagtcgatatatttctgcctcaacccctcgtctatttatacatcaaaaaacccctactcaaattaggtgtagaacttctattcacaataggactcaattccatgctaccaaaatcatacgagccagaatcctatccccatccatgtcggactctgcgcttgatctccagcccacgtgggccctgtctccagcttggtctccagccacctactaccgagccgctctctgccgaaatgcctaatcggcgactagtcgcgcgcctgctcccccgcgcggcgcggccacgtggcgcgcgcggagggggggtggggtggaccgggcagcaggaggacgcgagaggactgatgcgtgtctagttttttttggttgttcttcggttttcctctggttctgtcggttttttagtttttcttcagtttccctctggttcttctggtttttcaggtttttaatatatatacaaactttgtatacacgtatataaagtttgtattcgtacctatacaaactttatatatgtgatttttttgttttttttgattttttaatatgtgcgcatacaaagtttgtacatatcataatataaagtttgtacatgttgtatacaaagtttgtacatatcataatataaagtttgtacatgtcgtatacaaagtttgtacacgtcgtatataaaatttgtatatatgtatgtttttttatacatcaaaaatatatacatacagtagagtagtagtattagtagtagtagagtagagtagtactagtagtactactgtagacagtagtagtagtataggaggaggaggcggcggcggcggcagcagcagttaggagtagtactagacaagtactccagtactaggactagaggccacaaaatagttaaatggatagaatcgactaagcagagacatccataatcttctttacatcaagtaaatcctttggctcctatacgcctttttctttaagttatttattgtttctctcgagccatagggaaagtctatgataaataaaaaaacatctcactctttctctatggcccacatttcatgataaataggggaagatgttttcttcaaattctttgttcaattctgaacaaaaaaaagaaaggaaagaaaggaatttttcaggctgtggtatcctatatttcctaatgtatattgtaggaataatcaaactattccttacagcagtctggaacacttacgtcttcgcaaagcaaataatgatcattgtaatcgtaattgtagaatacgactacaattgaaatgcatacatttggttcatacgctattgggaagagtaggtttattttacagaccgggaactctctaagtcttaaagtaaaggaaagggccgcgatcgaagtaccaaccgcaaactgtgagtaaccttctctatttcattaactaagagggaattagaatctttctcgaatggctacccttgacaaagggtagctgtatggtatcataatttacatgtagtgggtatagttaagtggtaaaagtgtgattcgttctattattaataattgaatttgaaatgatatacttaaggcgtccttatgttttttatattccgatgaaaactttagttcttagaaaggatttactcctttttctctcaatagcatattgaggaagaatatgcattttcgcgatttgtacccaaagactaattgaaattgcatgcaaaaaacaaattggatttggattacgagtacagagtcacgaagcatggattccaatttttaaaatatgagtaaaggatctatggatgaagatacaaaaaaatttatttccaatcataactaaatcttcttttgttaaaaaaaggaaatggaagccaaatagctaaaaaacggtagttttggtttacaagaaccatcagcaaaanggctcagnnnggnggnnncccnnnnnnnnnnnnnnngnnnnanaaattttattatttaaatttatatttttatttttttaatccgcccccccccccccccccctcccnnnggccnnnngncnnnnngngnnccncggnccccntcaggcaaaaagagctganttagatgttaagtggtgagaatacccataaaggagcngaatgaaattaaaatttcatgttnggttttgaattagagaggttaataataatcaaccaangnngannataacttctagctttccaagctatcgactcgagttcattctcaccacccgctccattctgtataaaataactattctatttgtctagacatgatagaggcctgtattcaacctttttcgtccaccggtttccagcgctccagagcagagtagagcagtttggtatagctcacaaggctcataaccttgaggtcacgggttcgattccagtctccacacttagcagtctgtataaaaggactattctatttgtctagatatggtagagggctgggtggttgggcggtatccaaccctttttattcattagttccggaccctataaggccaaatttagcaggttgcgaagtaacttgctaccacaagaggaactctcaaggccccctaccttgcagaaaagaaaaaaatagatgaaagaaaggcacagtctatctcccttccctttaaaagttgtttgctggttgtttgtttcgatgaatccccagtttagggagccctgttgccgagttcgattctcgccgcagtagtgctctttttttgagtggggtgcaaagggggctaagatagtaaaggggtacggtactagactaacacctattacattaataaaagtagactaaattttttatcatggtacgtaccttactaaattaagctggcgagcggcgggaatcgaacccatatcttcttcttggcaaggagatgttttaccattgaactacgctcgttacgtcctatattttatagggtatatccacttgggtcgactgtctatgtatgggtagacagtttcattttctatttgagttttaattttattaatttaattgtctgtcaatcaattcggggcgcaaattacatttaagaaatgagagaatttagaatagctaccagaaagaccagtcctatccataatgatgtatcgaaaaatacaacgtttttattgtttgaacaaccatcaagagaagcaaatacaaggggtacactaaggactaagactgaggaagtcacaattaatgcaaaaacagctaattggaaagcaatagtcatatttctaatccttcaagttaccatcaaataaagttaactacgtattatatttgatccctcacttaatcaaaattgtaataaaatacaagtaggaggggtttaaaagggctaccacgagttaaaagagcttcctattcaattccaaaataaactaataaactaatacgccccacgcgagcagtcgcccattaggggccccgctctctgctgcctgggcctcgactcggcttgccacccagccgaagcctgcagcccaaacaactagctgcacgcctgcacctgcacgcagtacgcatacacatccatgtactgcatgctacacaagcatacacaccacgatacagtatacacacatatatgcatgctacattacctcaccgtactgtaacgctatctactccaatccaatttcttccaatatccttcgcgaacactgacccttgtacacacacttcgtgaagcccattgcaaagatctctaccacacgctgtccatccaccatatgccatctcgtatccaacttcgtcacccggtatccttgatcgtctggacatcaactcctccctaagtcttgccccgatcccaaccgttgaccaaagatgactcccaaaaatcctgactctagtcaccttctcacatggtatcccgatcgcagtagacctctgctcctccttgaacatagtcccggtcctcaccattgaccaaggctgacctcaagttacctgcacacaatcagacaaaacaactatttctgggtacagatatcacaacctgacccacattagtcacacgcactcacaccaacatccacacataattccaaaccaattcactaaataaatcattttgcaaagccaattgttcatcacaaatattaatcatgacaatgatttcatggtctgaccggcggagctatggcggtctgaccagtggcaggtggacggttcgaccggcggcaacaggacttcgtcatctgtctcgttcgaggtaaatcttttattccgcaaaaaattttgggtttttggttttttctgccattcaccccctctctgatagatttgtttggtcttgatcgatcatacatgctcttcgaattcaacatcaagaatgagatcccgatgcatctgggtgtggaggtggtgcggctagtgtacgttttcctgacgccactcatgcacatggtctaagccaggctgcaacttatattaccgtgtgctgctctataggctagcatgtgtatgtgcattttgccatacgttacagatatgttacagtcttgtagagctggttggctgcaccctcttgcatatatatcctctagttaattttatgatttctggaattgaatctggtggtccttttatttatagtatagaactaattggacaattggttggttccttgtggtggaaccaacccacctgggttcaagttttagacttgatatgggtgcttgcatttacagttaattattcttcggacgcgatggccgatcaacggaaatattgatcccagaagatggtgggcaaaatttgctacaagacataaaaaatatgtaattagccagggggcaccgtaagaacatgtatttgttgcagggcattgaaaaaaactggtaattagctgctggacactcgcaccattaatttattatttttggaagaataggatagagaaacaaccattaaggacaagtttgcccttggctcgaatgaatccaacgtgggccccacatgtaagcccctccacatctttctttcagatgagaggacggagcagcgagaccaggccccttcggccggcaggaggtaggcggtggtggtggcacaaccatccgtggtgagcgcgacggagggcgtggccgggacagtgtgctcggtgacgagccgctatggcgagaccagctaccgtggtggcgtccgcactgctgctggtactgctcctcatcttctcccctacatgtcctcgccaccgtgtttgcgcctcgtcgacgccgaatcaagcaaggcaaggaggaggagatccttggatccagctccctaccacccctcgccgcccaaggaagtggatctagagactagcaaaatgaccaagagatggcagagatgagggatctcaatggtgttggcgatggtgactaccgcgtgctcctcgatgcaagtggggccaagctgttcgcagacagcatgcacactgcgtgatcctctgcgctgccgtgcgactgcttggtcggttgggccatgtggtccaacgaatagtggtggagactagaccggaggggtaagggccggcgccacctcgtcttctcacccgccaccatggccaccgcctcgctagcgctcgtcgctacccctctatgtgaccacgcacgttggccctccccgttgatggctccgccacgccgtatgtactggcgtccccagagcatgctagccatccttcgtgtggtcaacgggaagataaaggaagaaaaggaagaaagaaagaagaggaaagaaaatagagcgcctaaggtagaaccgtacttacatagccgtttctctctccaattcttccggatataataaaataatcctgcgagtgtctagcagctaattaccagttttttgcaatgccttacagcaaatacgtgttcttattgtgccccgtaactaattacatattttttggatgtcctgtagtaaattttaccaagatagtatagactccatccacaagggacatcccaagcgccatggtgacaaggggcagcacacccacaattagtgtctaaacagggtgttattaaccttgatttggtttctgaaaaattcttacaagtcgatatccacttaagttatttggttatagagcaattttagcgtactatctttggtacttaaggtaccataaatttttgatacctccagatactttctagtgtaaaatttggtatatcgagatattaaaaatttgtgtgtaaaatgtggtacctcgagataccaaatgttggatggtaaaattgttgttggttacctgttcccagtatcccatattaccaatgttatgtgtgtagagttatatatcttgcgacctgagaagggcagggaacatatgtaatacatatcagattcttcccatttggaaacaccagctactcttgttttttccttaaatttccttcagtcctttgcctgaatgcatgctcattgctattgaacatacacagtaagaaaaattgtatgtatcccagcatcttggatttgggggaatcaagtaaagaaagatgacaagagaacatagacagtagaactgtgtatagctctgcatgttggatttggaggcgtcggtaaaatggagatggtatcaagctgcagtaacccatcgatgtttgcccctgatcttgcatacgagctcagcactgaaacagtttgaacaacatcctgagcggaagattgcggatgattctttgatgttcatcaagcatgatatctttcactttctataactgataaaagatgtcactcactttacagtgacaaaaaaaaaacagatttacaggatagtggttgtaaaaacatgatgtcactcactttctgttactgacaaattaaatgacaatgaaatttagacaatttttcttgaaaattggaattccagattttctttaaacttcataagctgtgtttgataaaagcaaaacatggtaagtccgataaccacgtggtgacctttgcatttgtcaaccttgccaaggagttacgtttgtttttagtcaatgccttatgtcctaagacaatttccttttctttctgtaaaattgcatatctcacatgcaaattattgcaaggtcaaaatttatgaaagagtagtttgatgtgcagagcgctactatatatgtacccctattgacatataaaagttgaaggaaattccagatagtaataaggtatacgatatgcatggagcttcactcacctgccacatcaacttaaacttatgataggaaacaactagtggtgagggaaaactttagaaaagggaggaagagtaactgaacaaagtgaaattgtaaaaatgagttgcagttggtgttgttttcttctttagttccacctcaggactcacctcttcataggcttgcgggcatacccaggggaaaaatcacaggtccgccactgtatacacaagttggataatgtgtaaaatagaatcagaagggaagaaatggaagtaacttaatcacatgcatcatcgttggatgtttttcctcttgcttcggctactgttgtttattgcgacaatgttagcgccatctatatgactgctagtgcagttcatcatcgtcgaacgaagcatattaagattgacattcattttgttcgagagaaggttgctttgggacaagttcgtgttttacacgttgcgtcctctcatcagtttgctgatatcatgaccaaaggcttgccagttcagttattcactgagtttaggtccagtctttgcgttcgtgatacatactcccgcttcgagtgtgggcgggtattagagttagactagatttatagcctatatatctactgtatctgtatatatctcttatttaagagtttgttataatcactattgttttggctatataaatacaatcgccccccacgttcggttgtgtggcgtccaattattctctatatctaaggagaaaatctgccaattgtaaaaatctagagatgagtagacacatagtacaaacattcattggcagcaaggtacaattatgtgataatcccatcttgagcatgctatacccagttatcaattaaaatgaataagtagatcaaaacatgcatttgataaaagaaacgaatggagttccctggatagcaaatcacagctaagatttgaataagacaggttgctaaattcagtggtctcccaaaaagtgcataagacttctttttttggagaggaagagttaattagttaattgtataacatgaattctctcaggaattattaatgagtccactaattgactagattttaaagaaaaaagagcaacatagtatggcacaacacaatgaaactatatatggctaactacctttttttaatttagggacaaataagtggattaggaatttggtttagcaaaatatacttctccatttgaagactatacatttatacaggttgggctagagtgttcagggtatctccgatgccatgccatagctatcccataatttttgttttacacataaaagatgcacacgcacctgaacaaccacacaagcaacgcacgcacccactgacgtatgcgtcatcctttaacgcacactcaataaacagatgtcaattattaatccctaacattactaatttataataaaaagcattcatggtgtacaaaattgtgggtacaagctaggatttaaaccatggaggatagagtcattcatccactactaggatttaaacctcgagcaagctgcagtcgtatatatattagcgtgtttgtttaaaaaagggcaaggatccagaagtgtgatttcaaattatgaacactcattttttttccaacttgttccccaaaaatgcttcagttatcaggcttctataggaagaccaagtatcatctttgaagttctggtgtacacactttgtttgcttaggacagcgaaatattaattaattgttggatttggaggtgttgagaaaacggggatcgcagtttgctaggcatcaaggatattatgtactagtacaatttcaccctaatgtgttcttccaagcatacattgttgtcgtcaatttcagactcaaaaggttgttggtgctacatcaagagcgtgttagctagtgagtgagacaatagggtgagctatttatcataaaagaaagaagttacattttctagctaggtgcagatgactgaaaacgtgattcaattctccactgatattttttgctgcactgatcgatgaaggtcattaagaaaacagaaaaaatagtatttcctcacctattgcttgctaactccttgctgttgaataacttttagagagagcttgggacaaccgtgcgcctacatttgaaaaattactggagaataaaattcttgagcctgaggctggtctatataaagggaatggagtgcttgaggatttttcatgcttgcatcctttttggacgatggacatgtaaatgtttatatgttcatttctccgtggaaacttgagtaaaaagtaattccgtggtacgcttacggtggctttgtgaggcattgggaatggggaaaccacacacttggttgtagccacttatagcactcagtttgcatgtgttaaatccatgactcgaggagcaactaggtgttctagctatactggagatgatggggaaagttgcctactatggtgattgtgtttacctaatcgtactaaaattctagctaattgattgtgggtagaaagaaagagtaggtgatgatctgtttgaattgggttccacttaaagttttctaaggtggatctaggaacatcagtggtaataaaaagaaaaggtgtttccaataaaatcgtgtaaagcacatgtcgccaaattgaacagttctatggataggtcacttctttctatctaacctgtcatttcgagttcgtctcgtgcaaacacagggtgtatattggtggctaggccagggtaaagcaactaatttggttctttagcatcattgcatacatggttgattatccaaggacaaagaaccatagactatatataaatatctaatattttacctactaactggatgacaacaacatgacctgcacagatagaaggactaggtctcatccaacataattacaattttcttcacttccttcttgcaagtttcggactggccgagaaatgcatagggatatgctggctagctccacaaggtggtgggctagacggcctgagttcgaaggcccgccccttctatttattgatattaggttctaccctaatattcacgtttctaagtttctgactggccgacagagtcaaaagaaagcatgttttatagtcaagagtaagaggctacgcgtgcacaaagaaatagagaggagaggccatatatatggtttacctctgcttataggaattggaggcactagggaaatggacatggaaatgagctcattctacttgcactatcaatagtagtgtcaagttagctacttgagttggccatgcaaaaatctaagagtttagaggcagtcaagaaagcatcttagaagggctacataagatcgccggtatttgtggagccacgtgcattccaatcatatggcgatttgggaaggaaacatgagaaaagtatctgaagaacctataataagcatcgcactgccgaaaagattgtttttggtttaattttctggttttaacttctctgttttgaatagactgatgatagttagctattgtagctactgcactgtacatcaggaagctcaaatgttgacttgaatggacaaagcagtactccaaacaaataatagaacaaggctggggaaggttttttttttttggcaagaaaggttaagagactttccgactttatgctcttataattttttaacaacaacttgctagtaactacactctaatagctcacttctcacatgaaaaaaaaatgatatctccatcagtatatcacttatgtgtccaaatcagaacatcattaattgtgctgatacccaaaattcagtttaaatacacaacttgggagtgctgatcaaatctatgcatggaaccgtaaatcctcccaaaacgttaaaattttcatccaagaacacacaacaatcagagaacgaaaatttatcaagcatgaattctgcgaacctaatgtgtagttgtgtacaccattgattgctgacactggacattttagccaccacctgtttgagttgtgtagctccgcacctcagcgtttgccaatctattattgttctccatatcttctgagaattacccaaacgtttggccgatgatcaacatagaaatcataaaagccagactaaaaacctacataacatgatgaacactacttggcttcaaccatcatgctctcaacacatattacaacgcatatgtaacaattccatcaaaggaatatcgacacacgagcaaatgctatcgtcatatatattttgcacctgtgtttcggaattattctcatcccattactctgtcaagtccaaacagcggcttcagaagtatagagccggtggtcagggatttctgaattgaacaaatagaactagataagcattcatgtgctcgaggaagtcatataactgcagcatgtgttcctgatgccgctcatgcacatgttctaagcctgctctttgccatctgctgctctccagactatgtaccatacaagcatactccctccgtccgaaaaaacctcaaatcatggctttaaag

SEQ ID NO: 22065 - DNA, 727 bp, Oryza sativa
tcgccggggagtgcggcgtcaagtccacgatcccggggaatcccgatgagttttcgctgacctcctctctcgcggaactggtgacggcgatgggggaaatcccctccaacatgcggccaggattgcggaggagacgtcgaacaggatctacaccggggcgtgtcatgtcctcgcgtgtgtaaggctgtcgcgtcctgactcgatctgcgcgagatcttggaccagagggcggccagcgacacgcgtaaggaggtgatggaagaagtcggtgatctaggggagtctgttctccccctttttgaagagtaggacttcttgtatttcctagataatgtgtaaaacttgaactctgaccgccttcgtgcgtgcgattactatcccagcttactttggtatgctgacctcgggaacttttgtcctttctagagatgctgatgacgaggatgtccagcagcgcgggcagcctgagtcactggcaatattccggtactcgagtttgaaccacacgtctcgcctgaccatgtggatcaaccccttgatatagaggggatggcgacgacttcctcaggttagtagtcccttcaccccttaatgccctcctgactaggttagccatgttcccgaaagagatgtatagcttgacttagtggttattacgtttagtagatctcgagggtgcccttgctagccaagatcgtcatatccaatactggaagacgaagtttga

SEQ ID NO: 22066 - DNA, 708 bp, Oryza sativa
tcctttgttttcaatagatacacatagcaaaatctagtgcaatcatctatcagtgtcatgaaatatttctttccccctttatcaacacgccgttcatttcgcacaaatcggaatgaacaagttctagaggtgccaaattcctcgcctcagatgccttgtgaggcttacgaggctgtttcgattgaacacaagtatggcacttggaacctttgaccaaagtgaattttggaattaaactcatgttagctaagcgcatcatacaaccgaaattcacatgacagagtcgcgaatgccacacattagactcatcattctcgctaatatggttcacagcgttatgattattacacatgtcattcaaagaaaagcggaacaagcctccgctgtcataaccttttccaacaaaagtctcatatttagatacgacacatttattggactcaaacacaagtctaaaaccttctctacacaatagagagccgctaactagattcttctttattgaagggacatgctgcacgttcttcagctgcacggtctttcccgaagtaaacttcagatcgaccgtaccaacaccatgaacaactgcaagcgacccgtttcccatcaacaaggaggaacctctcccgacctgataagaagaaaacagagaaatgtcagcacatacatgaatattagcaccagtatccacccaccaatcaggtgaat

SEQ ID NO: 22067 - DNA, 1862 bp, Oryza sativa
  unsure (1)..(1862): unsure at all n locations
acgattagtatgaatatctcagtgataagcttcaatgtgttcaatctgttcactatagtcaccttactcttcattgacagctttgtgaccatcgattggagctccgttaagatgctgaagccgttggctgccctgttaattgcatcgataagaggaggcaaatcttcagcatccattaagtttcgtgtcatcgtcacaatcagagataaaactgccgccagcatttgtctgtccacagattcggcacgaagtgttcacaagcacctgcaacattatgtttatctcagtatgacaagcgtaacgatccaacacaaagactaattatcaccctatatatgatgctgataaaaataaagcaagtgtttcttttcttgcctcaaaccagactaaacctttggacttttaacctttaagggttccttgagggtctggataaatttcttcttaccagtgtgatgaacacccagttgttcgaggatttggccgggggttattttgtatccctgggaaatttgtttggaccaagtatttttgtgagatcaccaacggcatcatctttcacttgtaagattaacttggcatttgctttgccatgggaacatagcgtcgcaagcttttcacctaccactgccaacccaaaaatgatgttggcctccttataaactctgtgagtgaagatgagtaacaatttctcaatgaaatattccccatcactatgttagaaagcatgcgctcttgcattcatgtgtaaatgtccaatgcttgcataaacagggaactatgatggaacgatcccagcccacatccttggcaacctagaatcctctccatactatccatggcgttccacagtatcctgagatattgcggcagacttcctagccagtctgaccacagaacatacacaacccggacaatcacaaccatcaaaccatgcactgttctgaaccacgcactattagggtcatcgttgtggttgagcaggccgaaccgcaaaggcgccatgatcttggctagcaggccctccgtcttgttgatnnnnnctgacagttcctcgtgtgcaacgagcttcatgaagatactcaaggcctggcacatcagttcttcgtaattaacagggatgttgccatcacaatccgtagggggaccttcgagcagaaaagctgtgcaatggatcccttgtggaaactgctccaggtggaggtcaccagcaaggtgcgccacgatccttgcagcgtgctccctcgcctcggcattgtatgccctcgtacaatcaagtgactgcagcagtgtgtgcaggccgccatcttggctgtaggatgccgtaggaggagctgctttaccattgctttctgctcttcgacctcgacctcaacctcgagaaagaaattgtacttgtacattggcgtattcaggagggagtccaggatcctcaccccagagaggaagccatcaggggatccagacttggttaaaccgacggcatatgtgaccaggttccttcctttgacgaatgacgggtccttctcacacccgatcatcgtctcttgcatgtacgccatcactgactcgctcaaactagtaacaaagcgatatttgttaaccaccaaatccaccagccttttctgctcatagcacaatgtgaaccggtaacagaagagcacaccctgtagcaaggcgatggagtagacgaacttcagcgcagatttcaggttggcgccgccattgttgacctcacccccgtagtcatgctgtatcagacgacacgcggatatggcagtggtgatgatcagcccaaacatgtagagcaccgctagagggcagatgatggtggcaaacacgaacaaatggagcagccatat

SEQ ID NO: 22068 - DNA, 612 bp, Oryza sativa
accggatgcatggcaacactaagcagattcgttgctaggatgggaaaacgaggacaacctttcttcgctctgttgaagaaacaagacaaatttgtatggacacaggaagccgaagaggcattcattgcactcaagcgctacctatcaaaccccctgtacttgttgctccccaacctaatgaagaattattcctctatattgccgccacgccatattccgttagcactgtcattgttgtcgagagagagagagaaagtacatcgaccagtttattacgtcagcgaagctctccacgacgcaaagacaagatacccatagatccaaaagctgctttacgcagtcatcatgacatcaaggaagctacgccactactttcaagcccacagagtcacagttgtctcctctttccctcttggcgaagttgtgacaaacaaagacgttgtcggccgcattgcgaaatgggtagtcgagctgagccagtttgatgtccactttgtgccacgaacagccatcaagtcccaggtactcgccgacttcattgccgattggactatgccagataacaaatcagacaaccaaggcgacaatgaaacatggacaatggcgttcaat

SEQ ID NO: 22069 - DNA, 637 bp, Oryza sativa
gcgcccgccaccgcctgcgagggcgggacagctcgccgccggcgccggcgccgtcgtcgtcgtcggaggaggaccaggagaggagactcgtggaaggagccatcggtggaggaaacaatggaggagaggcatggttgcggggtgatatagaggagaagagaatgggagggaaagctcctggaacgagctgggaatgttcgcttgagctcacattttgttactgtgttcgcgagcgagtgcacaagtggagtgtttttgagtaatccatgacgtgttttgagtaatctatgactctgttggctcgtaattgtcgattggttttgggtttgatcccttcttttgtggcaatgggtttttgcacttttttttctttttcagtttgagatgttaaaagtacactttagatagcataaacttttattttgcatatttgtgctcatttaaaagaagacagttgtggtggactccgcctactcttattacagtaagtttttacaaattaccccttgaactccttaatattaaaaggatccaatctaatggatagccacataaaattagattaagatgaatatttcgtttagaaaaagatgggtaacacattaatacattttctttaatccatagcaaagcaccg

SEQ ID NO: 22070 - DNA, 1879 bp, Oryza sativa
tcgtgcccgtctgctaccgaaagtaagtactcacgtgtctatatatatgtaacgtgatatcatggatatttacgtgctgatcgatgtcatgctcacatcgtactaacatcgtcccaaaatattgctaccctagttctcgataggacatttcaaatccagtcttattataaagttataatccactaattctaatactcaacatgtaatcatgacacctcatcatccgctagcattaattaaaaataaaacttacgcaagcatgcaacattatctataattcattgaactctacaaatcaacatccaatcatcttcactcacattattcttcacaatatttttaacatatatatatatatatatatatccattatttttataatacttaacatatatttatccatataatcaatgtgcggaatatcatatttcatctacaaatctcatacagagtctactatgtattaatctcttaccatatagtttgacaaaccaattttatttgttgttaataactaatataaattttacttttagctcgattattaaaaaaaactttaaaagctctttattaattttcgcagcaaagtgcggggaaatgttccatcggaaactagcgcttagtacctagtattatatactacctccatattttaatgtatgacaccgttgattttttgtccaacgtttaaccattcgtcttattcaaaaaatttatgtaaatattatttattttattatgacttgattcatcataaaatgttctttaatcatgacatacatattttcatatttgcacaaataatttgaataaaatgaatggtcaaacgttggtcaaaaagtcaacggcatcatacattaaaatacagtgggagggagtattgaataggtctgctacctatatttcatgctcgcatactctctccggtttcattttaattaacgttttggacaatgatatggtctacaagatacatttttgcttatttttctattataatatatataataataaatgcatgtttacttttattatagcctttttaaaagccaatttaaaaaaggttatttaattccctttaaattaaatatttttaaagttattgggggccaaagttataaaaagtttgacttcaatcttgtctaaaacgtcaactaatatggaaccggagggagtaccattttctcaacgtcatcccatgcgctagcactcgtccttgcgtaataatccctttgtattactcgatgattaatttgcacatcggtgtgcgtgcatgcagggtggcgtgcgtgaggcagggcgggataaagtacacgataacggggaacccgtcgtacaacatggtgatggtgaagaacgtgggcggcgcgggggacgtggtgaagctgacggtgaaggggaccaagcgggtgaagtggacgccgctgcagcgcagctggggccagctctggaagacggaggccaacctcaccggcgagtcgctcaccttccgggtcatgaccggcgaccaccgcaaggccacctcctggcgcgtcgccccccgcgactggacctacgacaacacctaccaggccaagaagaacttctagctgatcgatttttttcaacttatttacttataatatttttacctctccctccgttctctccctacttaattgatgaatttttggaagtgaaaactaattaacactgaatttttttcttacgaattaatcctctgcgtatttactaatttgagtttgaaagaattcgttgatagtgatatttgatggatattcatgtaagctttggaatcttaaattttgatgtactggtcgaaaatgccattagcattgcatttattctggttttattattattattttggcttcaaaga
